United States Patent Application Publication US 2015/0240253 A1 - sequence listing, part 2

SEQ ID NO: 4543 - DNA, 362 bp, Zea Mays
cccaaccaaaaaagtcagagctcccatggctttccgtgccacgagatgctttctggtttaaaacaccatcgctgatacgtacttgccggcgttagcaagctggttcatgtcatggccttcttccaattaccttcttagacactagcatgcagcagtagaccattttagttagtatgatgagcagatagatctgctagattcgttcaatgtcagtctacctgcattgctcgccagtagtatagcaggaaagagagcatgtatgccaggtcttgaattgggagctgctggtacagcttccatgcgcgtgagttctgaaagtttcagccatgaagtagcacccccgtgaactcgaggtgtcttag

SEQ ID NO: 4544 - DNA, 687 bp, Zea Mays
cgccaagacgaccactctccatctcaccacgatgacgcctaccacttcgcgacaattcactcactcttcgtttcgccaccgcccttcgccgcctatacccagtactcgcacccgggagcccctcaaaaccctccacgcgcggcgaaggctccgctacagccacatctaacgctgcaaaataatcaaagtcctcatctgaagactcctccatccacgcaatcgaactcccagaatcatcagactcaaaacacttagacacagagccaaacgaatcatcatcggtagccacggtcgaagccgccacaaaaatagtattgtcagtagcggttgcgtgcgcaggccccaacctcagaacctgcgcagcaaccgaggttcaatgtcacacagacaaaacatacaaactcctcaacacctattcatccacctgtgaaggcccggccaaggccatggggtcttcggcagccggctcggccaccgccttcaaggcgtcctctcccgtcggctcggggtctttgctggctccagttggcactgtcggtgtagggaccgttgaggggccctcgctggcatcggatggcggcgccacctccacccccgatgtcacgggcagcgcactgtccagatcaccaaggtcttcgacctccttagcatgtgccatctgcagaaatagcagtcagcaaaaccacc

SEQ ID NO: 4545 - DNA, 436 bp, Zea Mays
gccagtcaacggcggcgacggcgagagccggggacgcagagatgcagggatccaagaaaccatttttatggtttgcgtgtagtattattaacgagaaagagactactacgaccggcctcactcgtcggccgtgccgcgtgttggtgttggtgcttgcaaatggaacatgatttgtgatcgagtgattaaagatttaacacgtagtgagctgtcagatcaaggcgtcttttttattgttgaaagcaaaagccactccgcgcacctgctgacattagttttaactagtgttttgctggcaggacagcatgcttttaataaacataaaacagatttaatgtgaacatgctcctccagagtccagactagatattctttgcagcagtctctgtaaattcataacactacagtaacagctgaaaagagcaggagctcgggc

SEQ ID NO: 4546 - DNA, 1006 bp, Zea Mays
ggtggatggcgcggacggtggcggaggcatgtggtagcggtcatcgggcgcgtgggtggtttgggagggagagggagatagaggcaaacctatggccgcttgtcagcgggatcacgaccgcggtcgtctcaccggcggcagcactcaggcgcgggggcagtttgggagggagagggagatagaggtgcgggaagggggagatagatgaaaccatgtggccactgcttgtgcgtgggaatgatagcgcagtctagggggagggggagacggcgccgaggacggtgagcgggggcacggcggggatcacgggcgggcatcacgcgggggcaccggggcagggatcacgggcgttgtctcaggccgtgcgcagcgggggcgggtgggggcgggcaacgcgagggtggacgccgggcgggggcatggaactgtggacgccctccttaccgtcttatagagtagtaatagattgatatccttgaggggcatatgatgagaaacaaaaagaaagagatgatatccgacaaggaaaagagtagtatttaaaatgccatccaaacgtaaacaaaatgttattccaatgttgcatgtggagtttctcagctagtgaaataatgagcagacgtttttgctgcaccaatctactgaattatctacggggaagaagtagaatagaatcctagcgtcgctgactcattgctcatattcacaatttgctgctttagtcctagggttgaagaccacaagttgactgcgcgctttattcatcagaatcttctgtcctgttgaacaagaactgtggaatagaagctattttggggaggttcagaagcagctcatcgagagaatcgtttctggaaattcctggaggcgatgggtcgagcctccccttaaagccatcagaatccacttggattgcgccgatgtccccaccatcactactgcattcagggtcgcgcatggcgggtggagctgtgtctttctcaagcaacgagtaaagggagtcaac

SEQ ID NO: 4547 - DNA, 1276 bp, Zea Mays
gacggccatggggaccgggcttcctggagtcgaagcagtggaaacggtgctggaggcaaccttgaggtcgagctggacgatgagatggtggaatatgaagaggaggtagagggcacatgcggaggttgcgaggcggcgagcgtgaaggcgagagcgcaagcggagattacggcggtgggtgcgaggcatcatcaagcaatctgactttgcagtgccaactaatgagaatgttgtatgtcacaatgtcaggatgcacattttcgttgggtagcttctctagaagatttaaagcagcatgtgtccatcccactttgcataacccatttatgagtgtattgtaagtcacaatgtcaggtgtcagtccttgattcagcatctcctttgagagctctagtgcatcacatacatttcccgccttgcagagttcattgatcagcatgttatacgagaaattatttggcttaattccctttgtcaccatttcctcaagcaacgccatactccaatcaacattcccctctttgcagagggctttaatcaggccattgtagctaataacatctagctggcaaccatgaagtagctaataatatgttctgcctcctccatctagtcattgttgcacagatgataaatcattgtattgtacgtgcaaatatccggcttgcacccctgactcttcatctcttggacaagccttgtcgcttgatcaagcttgccatccttgcataaggcatatatgataccattgtatccttgggagttcatactaaagcccttggctaacatctgatccagcatagctcttgcgtcatcccacatgccattcctacaaaatgaatgcaacaaggtagagtaggtcatgatatttggtgcacaactgttctcctccatcttatcaagcatccgcactcctgaaccaaatctcccaagcttgcaaaggccatgcatcaaaatactgtatgtgtgcacatcagacgggcatccttttgaacccatcatctcatacaactttgtcaccctggccagcttcccctccatcagacatccacagatcaccgtgttaagcatcaccacattcacctctggcaacctcccgagcaacgtgcacgcctcatcggcctgccttgttcggcacagcccctgcaggaggaacccatatgtcatcgcacttggcatgcatccttgcgtcatcatcctgtccaccagcctagctgcctctcgcacgcgcctgagcccgcacagcctgagcaccaggtcgttaaaggtgttcacg

SEQ ID NO: 4548 - DNA, 333 bp, Zea Mays
gagacagagcgacatctgcaggttttgtcaaccagacgagatgtgtggcccacgagcaggagttaatgtgacgggacgtgatgcccatgggcaatctgttgtcgtacgtgtgcacgtgggattcgaggaacaaaatcaacttttggattcgacattaactgcgaggagctcgatttcaatctcgtcggattcgtcggttccccttcctcttttcctctacatatttgggaggggttggctgtggccttcaccccgcgttcgcattcttagcctcaacctcctatgttttttcggctcgcccaatttcttcctggcgtacgatcctcacacccg

SEQ ID NO: 4549 - DNA, 468 bp, Zea Mays
attcactgcatctgatcaggttaaagtttcagtgttgttgcgccaatttgagcgtcctgatctagttgatctgtgaatattttcagtatggttgttataccaaaatgaaagaccattagtcctggtacaacttcgatgcaaacttgttatcatgaagtcacataaaatttgaagaaattgtcgtccaaaatcgatctcacaggtgtactgttcaccggagttcagaaagatctcgccggggataagaccgccaccacaactaaggatgggtctacggccaaggtaaaaatcttctgcgacgtggcgctaaagccctgaggtggcgctgcccggttaatcggcggtcaccggaccctcgccgtggctctgcccgcgaggtgagctcgccagcatgtttacagctccgtgaacctcatccatctccggccatctgcctataaattgagcccgggcactgcttcttcaccg

SEQ ID NO: 4550 - DNA, 618 bp, Zea Mays
caagagtttacatcatagaagcttgatgggtactcccaccgaacaactctacgaggcggaccggctgaccaaggtcccgtgtgagcaactctgtgaggcagactgaccgaccaaagtcctaccagccaacctagcgaggtgcaccggctcaccatgtcatgctgagcaactctacgagatggactaaacaaacaaatcttgctgagtaactcagcgaggccgagaagcaaaggccaacgaagggggttagtacactggtgtgccccagtgccatatcctcgtgtcatgcgcacggcaggagcacgcctgtaccctagctgacgcggaggcaagaccgacactgttagcccgcgccagccacggtaaggcacgtcgctacacacgcacacaccatctcggatgacgtcacagcacactagtgggatgaaagagtgtccgacaacaggtcagggcatagccacatacgaccattagtgtcctccgactctgccccatgggtcccctaggcgccgcaacaaggagccttggcatcggagtttctgtagtcacccatgttggttacttgctttcaattgcagtgaatcaaaagcaaggcaacacaaatattaaacgttaaag

SEQ ID NO: 4551 - DNA, 742 bp, Zea Mays
gtaaaattagtgtatatgtatatttgtatgtatcatagattttttttatatagtctagagggtcaatcgcgatgaattcgcctgagggcctcaaaatcataggaccggcgctgttcgcccagcgccggcgcacaccgcacgcgctacctataaaaacgaaggcaagcattcaagcagaatgctgaccggagtacagaagattagttgttacatgcctgcaccaaagctccaggagcactctctcccgctcagggaagcgatgacgccagatgtttaaatcactaataattctagaaagaagaactctcacaggaggatcctcactcctaaaactatagttgttcctatgttcccaaatcctccagaatatagcccccaggactgatgcacggatcagcggagggatcgagtcattggaggcagaagaagaaccaggcttcgaagctgtcaagctgaaatcccagacaccgccatagctcactgatctgcttgtcgcactccacaaaaatatcctcgcgcacatctggagtctgttattatgtttttttctgagtaggttctcccgagtgttcagcctgaagacattggaagaccaggctgaaatgatgccaccagacgccccccgaggaaggggagacagaatattggtcaagataacgggggaggaaagaatatggggatcatccaacttcgtctcctgaaggagaaggagcacgacaccaggattgatacaaagtagatt

SEQ ID NO: 4552 - DNA, 803 bp, Zea Mays
tccctaattttctctactacatctggtgaccatccactaagtttgggaatgaaaactttaggtgggtggatattattatgacggccttcctcccaggaacgctcaaaatgtgtatttggtgtcctactatcgccactccttcctaccatgtatctctcaagccctctggcagccgaagaatattcgaccatgtgtgcatgaggtgctgtgacatggctataatgtgccctaggtgggatggtgtaatgttgctgagatgggtgtgaaaactgtgcatattgtgcagccccctattgtgcatacacatatccagatggtccgacgtgaggggctagatggtctgcgaccgggccgaatgagtcgaggttatacatggcatgtctggccgcatatggcgctgcttgggtggcatgcgcataagtctatgtagggccggatggtccgacgaaaggtgtaaaacggtccatgatatggttggacagtttgagattaggttcaaacggtccagctgtgcccagagccggttgtgtacctgggagtgacatgtgtggttgcgatatgaatgtgttcatcggtataccatatggtgtccaagttggtgatgacccatttattgtcgatttgtcatgtgtgggtgccttcatgttaggttcaaatgaagtaaaacttggaataacatatttttcatatgaatgagctaatcccctcatagactcatctatgtattgttttaattcatcccatgatgttctagtaaagactcaaaacatggatctagaataattacattgggggttgttggg

SEQ ID NO: 4553 - DNA, 782 bp, Zea Mays
caagccgtcgccttctagatgagcttcagtcccaagttgtgttgggttaccccatttgggctcgtccttcatacggccccaacagtgcatgaatccaaacgcatgcccttcaacctccgcaaagttggtagctgcaagtgatgtctgcaaagacgaaaacagattgtatgggcttgctaaaacaatgtcatcgaacaaatataactgtttaggaaatggaagcaacttactttgtcagcatctgacattccactgggattttgtcgcagggcttctgcatagtagcctgcaaattttccaacctcaggcttgatattattggtccagcggctctgcagagacctgaggcttctttctgagtttgcccccctccgaaaattatatcgttccaccaccctcttccagaacatgtctcctttttggccgttacctatgacaggatcacagctaacttccaaccatgctttcaccaggtttacatcttcttgtgggctgaagttccctaacttagtccttcctcgtttcaggattgaaggtactgaatcctctggatgaagtacatctacctcatcagcccccagaaccacattcgcttgagtgtggtcaactgatactatgttaggtccagaaggaggaggaaagatgctaacattatgtgggggtgatggattggctgtggataccagccaccaggctgaggttgcattggaaacatgtatgggttccaggcaggtggaggagggggctggtatgggttccaaccagcttgaccttgcggctgt

SEQ ID NO: 4554 - DNA, 535 bp, Zea Mays
cacaagtgaagctcaaggagaggcaccagatccatggatataacaaatcaggccaactaaaatttttgatttttatttaatttgaatttctattgttcaaacacaatatacctagattattgttcttcatgagatgcgaagggtattgtttttcttttgtataatctgacataaccaactataggaattcgaatactctagcccgccagcttgtgccaatgtattccattgttcctcgttcataaaaataattgagttcagctgtgtgttgagtatgaccataaaaatgaagtcaaatatgaccaaacacaaacaatctcgtaattaaggagtctaggagttacgtcccctcatcatggctcaccgtcccatcatggctcaacatctattagataaactccaaattttttgggtgtcctagtaatatagcaaaaatatccttctttcccaaagcgatggcaccaaacaagttgtggaaggtggtgcctcctcaaagtgaatgagaagttcgtgcactagtacccacccaggggtg

SEQ ID NO: 4555 - DNA, 609 bp, Zea Mays
aaactcatttaatcaggcgctcgacaattgctagtcgagctgtgtctgaatccaatttctcgatgttcgatctgtgtccaaaaattaatccgagcccgtgctctcaaacgggatactccacgtgttggcaccaatttaattttatccaactcggcttaaaatctctatgtccaatctaaattcgaaaatcaacatcgacaatgatttttattaattcgactcgttttatttcgataccgaattcggagccgatcgatcttgattcattttatttctacttgtgtgcgagaatttaatttccaagcgacacccaaataaaatgtttcggttcattttattctgtggcctctcgttcatccgtatgtcagctcactccgttccctgcgtcggtctcagccaacgagtgagcgctgcgcgaatcggctaacagatgaccactcctctccaacccataaattgtcatcgtcttgataaacaactcatacgggagctcttgtctcagagaaatcaaataaaaaaattaattagctcctaaacaatcatctctttttctttttaaaaaatcaaccagcggccaccatctccctgtcttctccagccgacagcgcc

SEQ ID NO: 4556 - DNA, 371 bp, Zea Mays
ggaggttgcagggaactcgtcggtgcacttgctggtggcggggaggcttggacttgccgaatcgacacgacagcgagcacgaagttgcagcggcgtgcggctgttttacgagcagcagcaggaggaggttgggaggtgaggtgaacgacagcaaggagcagtgggttgtcgactttataggggagggagaggcaccgtgggagtggaaacgcaagcggcgggcgccattgatggcgtgagagaaaccgtcgagcattagtgggagatgaagaggggaagaaacggttaggcggcgcgtccatggaagatgagcaggtgccggggagccgaggtggtgagttgaagcggcggcgctattgacgtgttgtgca

SEQ ID NO: 4557 - DNA, 300 bp, Zea Mays
aaaaaaagacacgtgctaggattccgaagcgaagggttcctagctccggagtatttgcttgtgatcgtggtggcggctgtaggcgaaggtgtatgggtatgcaaggtcctacctcgaggattttgctctcggaggtactagggatggtcccttcacatattaatgaaggtgagtcggtcgaactgagcatgggtccttgtcatgctgtcttgacaaggagttgagtggaattcacgacttttctcgtgatgaggagttagagcttagattgccttttgagggcaaggagcttgaactgct

SEQ ID NO: 4558 - DNA, 362 bp, Zea Mays
gggagaccttgcccgtggcgcttcagggcgcgagcggggaaatctgcctttaaaaaggggttcacccttcgagtagctgccatgtcttgcttctctcccactcgcgacgcccttccgccttcgagctctctgcgcccctttgccttcaaggttcctgctttgtgtcgccatagtttaccatggccttgtgacttcatcccgagtgcgcccagactgagtgagtgctcgaaatggtataccgcctgcttggatggtgtcggagagtggatctccggccgggtggcggagtgcacccgccctaagtcctgagatgaggaggggcttaggcgtttcgcttgatcgttggagtgaaggggaagaac

SEQ ID NO: 4559 - DNA, 785 bp, Zea Mays
gttatcaagtaccacacctagactgccatgtcaaccgggagtaattaggcgcgcactacgtgaactctgtgtggttgtacttagacaaatttgagagggcgattactgtaatttagtagatcgaatctggaacaattgcggtgactcttctataaaggggagatgtcctttagacggaaggcatacatcaatcaacatacttgtcttctcattctcaactctatgtgttaccgtttctctactctgtcgtccctgcatttgccatgcagcaaatcaaggaagaccagtgtattcgaaccaacaccgatattttgacgacctgcacgggcgctgagaaattaggtttctgggaagtgcacctcgcacgtatgttcatgttcttcaaatccagttgtgggaagcattgtaagtagatatgcaatttctgtttatcttgacacgaatcttttgcatagatctattgttcgtttgtcttctgttcattaattgttatggtttggtgaatctgatgcttttcaagagtacattactaaagcacataatcctaaatttgtgaagtcttctaggcaaaccacaacttgagatctaattaagctttacaatgaacgtgtgcttaagcttattgagtcatttcaatctgtttcatccgttgctctaacttctgatatctggaatgttaaagctaaagaagactacatttctgttgttgctcactttttgaattccaattgggagctagaaaaaaggttgattggtcttaggctcatatatgtgaaacattctgg

SEQ ID NO: 4560 - DNA, 434 bp, Zea Mays
gttgtatattaagacgggggcaatttattggttggagaggagtggtcatctgttagccaattcgcgcagcgctcactcgttggctgagaccgacgcagggaacggagcgaactgacatacggatgaatgagaggccacaaaataaaatgaaccgagacattttatttgggtgtcgcttggaaattaaattctcgtgcacaagtagaataaaatgaatcgaggtcgatcggcttcgggttcggcatcgaaataaaacgagttggattaataaaaatcattgtcgatgttgatttttgaatttagattggacacagagattttaagccgagttggataaaaatttattagaggacgacacattggagattccgcttgagaatgcggactcgaattaatttttggacatagatcgaacatcgagaaattggattcag

SEQ ID NO: 4561 - DNA, 610 bp, Zea Mays
ctagggttcaagtgcaagcagcagcgcgatgaacgtaggtacatatagggggcagtcctattaattatctatcatatccttacacaagctggaacaacagaatagcttatgaatgtctaatttctttgctgagttcccctctaagtactttgcttctttgcctgacagtgttgctatcatgaccaaggcgtactcaaatgttgagaagagagtcgattttgctctaggagatcgctagctacatgctccttgagcgtggaactttttcctattggctgggcataagaaaatatagcgtagctaaaaggagaatgacgtgcacacccaccgtcctcctgctgccggcacccagaagcagagcaaacgtggacttacggagtcacagacaatgtctacgaggcggccggcagcaggagcagaccacacgctcccatgacgacggtgggtgcccaaactaaagtggcgaacaacgataaagacgggctggagaagctatcggttccaggacctaataaggcaaacatgaattgaggagagagggaagaaaatattaaaaagggaggaaagtactcaccgtcgtgcagcacaaagcgcggagccatgcctgtca

SEQ ID NO: 4562 - DNA, 825 bp, Zea Mays
gaaatattttctagactcagcgcacagtggccaaggacggcgagtttaaatctaacatcgttcaggggctttttaacaaaacaggctcgacgaaggggtactcacagatctcagccgttggatcgtaagtggacgactaagattagaaggttgtttaaacgaaccgatatccaatctagacccttggatctaaatctgacggcggtaactctatgcaagcgagatcggatcgggtccgtcagatcacatgcaacggtccacgatcaaagtccgaaagggtatccctgcgatctatctcgaccatacgatcgttaacggacgacgctcctatgtccttcctccttacggtctcggcgacgacgaaaacagcgcccgcggcggcggtctcgccggtgcttggccctccggtgaccccacccactattcactgccccgaaggttgcaaaacgcggtgtgagaaaaattgaattgcctgagggggtacctagcgtcagccgtgaagcgcagatggccgtccacgaagctttgcggtccacggcggtctgcagacaacggcgagcaattccgatggggtagaacaagtccaggggccgaggaacccgtggacaccaccgggacgacgccacaaccacacccgatcaggtaccgaggcacgcacactagtgaatctgccggtcaacgacgacggattccacttcgagcatgcagcagcggtggtggcaatacggctcagcagacgtgggtgcgagtgggcgagaagcggggaaacggtcgtgggagcaacgagtttatagtgccagggggaaggaatcgattccggggcac

SEQ ID NO: 4563 - DNA, 382 bp, Zea Mays
catgaatggtggctctgaatttaagaagagaagcagacagccgaggagaggggatgagtcaccgcggcgatctaccgtggcattcactgaggcactgtcactggcgatggataggctacctactatggactattgcgacgtggtaacaccacagattacatggcgcacgagcggcaagcggccaacaccagcgaggatcattttggtcgaccgtagagcaagtgggtacggcggccagcacccgacctcatccgcggtaagatctttttcaccctgagtcgttatctgcgcgcccataggcacgaatcgcatcgccgacacgaatccaggcgcggaagtcaccggcggcgaggtgcactgcatctactgatctttgtcagcc

SEQ ID NO: 4564 - DNA, 433 bp, Zea Mays
cccgggaggtattaaaaaaatccaaatcgtcacctctccagtacctgacgctttttttgggtgtcacttcaccaaaaccccaaactgctccctctccggccgctggttggcgatcttcgcttcccgtctcgatggcgtataggcgtgttgatcccgagccctttcttccgccgggcttcagcgctttggtggtcctgcaccgggaggttatggccaggttagtgactcggcgccttccgcctttacatgaggattgggccatcatcaatattcaacctttacctgatcaagaggtcactttcccagcggtgagggacgtggtcagagaatatttggtggagcaccgtcggcttggggtgcgggatattcagtggtcgcacctggggcaggtcctggttcaatttagtagtgtgcttgagagagacaatctcgt

SEQ ID NO: 4565 - DNA, 503 bp, Zea Mays
tttcatcgttggtctaccctgcactcctgctgggtatgactctatttgggtaattgtggataggccaaccaaagtagcccactttatcccaaggaagaccacttattcgggggctcgattgtcagatttgtacatgtcattgtgtgtctacatggcattccaaagaaaattgtatcggacagaggatcccagttcacctctcggttttggtagaagttacacgagagtacggacacaaatctaaacttcagctcaacctaccatccccaaatagatggccaaaccgaaaggaccaatcaggtgctagaagatatgttgagagcttgtgctcttaaacatggtggcaattgggacaagagtctaccctacacagatttttcatataataacaattaccaagccagtttgaagatgtccctgttcgaggcattatacgggagaaagtgtagaactccattgtactgggatcagactcgcgaaaaacagttcttcggaccagaaat

SEQ ID NO: 4566 - DNA, 581 bp, Zea Mays
taaaaaccaggtgtgttttcagtatttttgcatcaagaggtatgagttcacgagatgatttgtacttactatgctataaaccagtagctcgaacttgtaatctagacatagataagagggctgcaatattgttgccggccagaatctccacacctagaacagttgggtgagatcctgaagctgctcataagtcatccttgctcggttggtccactatttcaacaccctagtcatctaatgattgtcctgttccatgtgccttctaacacggctgctagtcccctctgcggctctgcccgcgcccacatcatctcgtaccggaaggatccctgcagtttcaaaaggagcagtgtggtccgacttggaagaacaaatgtgtgagatgtcaaagcttgggaattcagaggaccattcagagttggtcactcctcggtctagccggactcacacgccatcctggctgttattttcagtttaggatttagaccatcagaaattacagtaaggaagaaataaagagaactttggtgcatcatcatccttctgaacatggatcaacgaggagcagtttttctttagct

SEQ ID NO: 4567 - DNA, 625 bp, Zea Mays
cgggtgcgacctcctgtccttcctagatgcttactctggtttccatcagatccagatgtctagacaagataggaagcataccgcttttgtaacagtggatgggctttactgttatgttgtaatgccttacggtctgaaaaaaagccttaccaacatttgtatgggcgatgagtaagacttttggggacctgattagggacagggtagtggtgtacgttgatgacatcgtggccaagactaagagagggtcgaccctagtggaagacttaaccctggtcttcgacaagatgcgggcaacacgcacgaagctgaacccggacaagtgcatctttggtgtctccgcggggaagttgctgggattcctggtttcgcactagggcattgaagcaaacctagagaagatcaaggcaattgaggcaatgaggcctccggcccgcatcaaggacgtccagaagcttacgggggtcactgggtgcccttagccgcttcatctcaagactggctgagagggagctacccttcttcaggctattgcggaagtctggtccattctcttggaccgtagaggctgaacgagcctttcaagagttgaagcagcaccttgtgtccttgccgatactggtag

SEQ ID NO: 4568 - DNA, 459 bp, Zea Mays
cagttttggcttcggcttgtgtttttgtggcttcaacaactttctttgtagcagcagggctcaaggcctttgtagtttccagcacaacatccaacacgttggccatcctcctcctcttgggagttgcgacaaaagttttttgcacctttggcagttttgcctctgtcggagggctcaaaatttttggcattcttattatttcttcagcttttggctctttagctttatcaaccttatcttcgattggctcgactgcatgcgtcttcggcattacggtcggctcttcagcgctctatgtaatcggagcagtttgtgttgcttcggctgctgaagtggaccctgcgccaaattcaggcacggggaccgattcaatataacgcggccggtgggtcagaaccttcacctttctactcttcggctcaggctcagctggggtgactgaagcagcaatcttcctct

SEQ ID NO: 4569 - DNA, 465 bp, Zea Mays
agatgaggaaattcagaaaccagaaggtgctcgtcggaagcgttcgcgccgagtgaaccatccagctgcacctgccgaggagaagaaaaaggaaaggtgactccggcggttgtcatgcctggaacaagacgctggcccctccacattattccttggcgatggcccagcgggcaccatcctcgaggacaatgctagaggtgtgatgatgctcaggttgctggcggtgtgcttgatgaggaagaggaggaggaagaagaagaaattccactgatccgtaagaatagtcgtcgccatagggtcagcgacattcccatacaagccttgtcagcgcttgtcagcctccaggggttgtcaatatctgattttgaccaagcgctagaagagatcatccctgaagaccttctatcaaagcctcctaaagctgacaatcccactatctgttcagagatcccagatgacggtctt

SEQ ID NO: 4570 - DNA, 1466 bp, Zea Mays
gctcgatgaaggatcaccaaccggaacaacctgcaatgcatcagtggggaccagatcagtatcatcagcaggagtcaaaactctgtcatcaggtgcactagcctctaaggcgacttcctgacccgaagcttgggctgctgccatgcaaccagaatgcggaggagaagaccctacgtgaacgtccatggaagtgtgagagggagaaccagctctaacaccctcgggggctgggtcatagctcgcgctacccatccgagccgggtcatccccggcaacacccttaggggctgggtaagcgctagcgccatccttgagggccaagctctctatgacagccacctctaaggctgaaggaccttcacccgcttccatgggagcagaacaatccagaccagcctcctggcccttaagaccgtgctccaaggtcgatgaggcgcgggacgccgtccgggataactccaacccagcatcaggcacatcagtgcaaacatccatcatgccaccgtctgctggctctgacaacagatcttctgggaccatgtcttcaagagtctgatcaaaattcgccagagataattcttgcagaccaatgagggcagataaagctggagaaggaacaccactgctttccccgctggccaagtaacgctggttgttcttccgaattagagggatttcatcctcctcttcctcatcttcatcaacaacgcgaacagtgcacccattggggttagctttggccagatcacacccattgggttcaatgtcatctaggtcacacccattgggatccacagcagtcgggtcacacccattggggtcagcttcagcaaatgcaggcactggcacttcctcagttgcaggaacagaaggaccggcatcctgatccaagctagacactcgatgaagacgtctcttcttctttttcttcccctcagcaggagaagtgggctgattgactcggcgagaacgttttgggcgaacactgtcagacctctaaatatccaaagctttgtcggcctcagggatgggcgccaccaccagtgtttcagcaggagcgacatcagaagaatcctcagctaacatatccagcatggcacttatctctgcgtcacttggattcaaaggcacctcaaaatgaacctgcctctcgtcgtcaggaatttctccaagtgaggcaaccaaagcactaacttcttcgggagagggtcgcactctaaggccaaaaccgctatcaccagcaggagggtttgacacaaaaatggtaaaggccttggaaggaggcagattccaagccgagtatgcaacaggagcgccgatgttcgacaccttgcctctgagtatcatctcgagccggctcaccaagtccacaacaggaattcttctattggttacctgggttgaatcagccaggcctcgatatagatatgcggggtatgctctgtctttcagtggctgaatgttct

SEQ ID NO: 4571 - DNA, 344 bp, Zea Mays
caagtcgtcgctcgcaaggcattgagggccctgtgtcagatctatgaagaagaagtgcctgacaccccactcagattcttttcgccctttcagagagaccgtcccgcttggatggccaggatgcgtgcattggaggaacaacagctgcttgaggacgaccccacagtcgtgtacctcactgcatacctgctcacccttgatacacagtatgatttcttggctcggcaccaccgttagatgattgcccgagcagaagatgcagagaagcgcaaccgtcagctgcatgtggatctcaccacagctcaagcccgtgcaactgccttggagagtcgtgaagtcattgc

SEQ ID NO: 4572 - DNA, 668 bp, Zea Mays
gtaatctcgttgtttccttgtaactccactcggtaatgaatctttacttcaacccttctgttggaaccttaccgatcttacccttgattgttttctccactttgtcgtttcgcgagtcttgtcttaactatatcctttgttatgctttttaattattttcatatgcacctttgacacctctatatcctacattgatggttgtctcatacctgccctttaaaatcgccccttccgtcccataccttcttttctcttggtcgtatcctcttctttggctcgcgagtttgtaacctcatcctttgttgagcttttgtttcttattacctttacccttctcatctctcaatcttaccttggtgattacgctatgttcgttatctaaaacctcgaatctcccaccttagttcaagcgtggtctcttacttatctcacccgtggttatatcctatactttacctcttgcaagacttatcttatttctattcttgattgtacctagattcctggtttttttatgcacatttacctcttcctttatatccttgcctattatcacctttgacccttgacctctctccatatttaccatgacgtttacctatttcttagccccacttattccatttcaatccgagagtgttattttccctatcctgctcttgttcgtt

SEQ ID NO: 4573 - DNA, 654 bp, Zea Mays
tcggtcgtactccctccacaccgcacccaactccctagagccagcccgtagctccggtgacctccccatgacccgccaccaccgccagagctcggccaccatggccagaccctttctcgacaacctccaatcaatccagtgcctcggctaggatccctagagccccgtagagctccccgaagcaagaaaccgaacactacctcatcggaaacgctattccaccctcgccggagttgtttcccccgccagcacgtgtggccacgactaaccggtaagacatagttcaattactcgcgcccatgtattccctgacacccagtgaagctcgttgcatggtttaatcgaatcctatcgccgtggttaggccggaacactcgccgccgacgagctcccccgcctgcgcacgaggtccgaccgactccgactaccgccagtgacgtgccgaccatcgacgtgaccgtcgtgacctccccagcctccgtggacacttaaccagagctagatcgccgtcggtaagccccgtcgtcttttcctccgtcgtggttactgttcctgtaaggttaggaccgcggtatagatttaggttaaccctagggggttaggaccaagggccaatctgtgagagaaaggggaacaatagaaccagggacttca

SEQ ID NO: 4574 - DNA, 586 bp, Zea Mays
aagaaatcttacacagggattttgcccaagttcgcttggattttagacctatgagcacatgaaactgactaaaccgaatgagccacgtgttcgatgggttgcctaacaagctgatcatggccagcgcccctgcgcggtgtcggctcggtagagtgaccgcacatgcgcccgtgccaatttaagcccaacccacctcagtcgaacgttaccaaacccccgccaccgaggctgaaggattgtagtcggtgatcggttgaacagagcctgctccaccacccgccatcaacgccgagccacagctcacgtggcctgcgaccactctcccactggcctgagcaccacaatagcttccccacgccttgccaaagctcaacgacccctcatccgagctctactgcaccgtagaagctcaccagtgcacgcttccccgcatttgcccacctgagcacgtgagccatcgagtttagagcaccaccatccaatcggagctacgtccaacttcatcgagcccccgcgaacctaccgagcccttcccgagcacgctattgtactagggcctccgattgaacttgtcagcaacctccac

SEQ ID NO: 4575 - DNA, 696 bp, Zea Mays
gaaatgccgaaggagaccattactgactctagcgaaggtggtttggttcgactgaagtacaccttcaggtttggggataagtttgatgaaccaaatgatgactggctgaagtgcattgaaactactagcgacgagttacttggggcgtattccaagatcgaggacaatgccttgtccgcagcctttgggggtcagagtaagaaaagattgaacagggtattcgatgctattggtttcgtataccctgactattgttacccgctgcgagggcaaggggtaaaaagaaagattgcttcttcgggaaaagttgctgctttggcgatcacagctaagccgaagggcaagaagatgaaggttctgactcaccggtcgcgttacattgaaccgaccgcgatacttgaatttggcgaaggggccacttcagttgccaaaacaaaagaaactattccatctacgcagagcactgaagagccgactctaataccgaagttacctttagtcgagctagttgagacgaaggctgataaggctaaagggccaaaatttgaagaaataacgaaaatgctagagattttgagccctccaatagaggcaacagagccgaaggcgcaaaagggttccgccgcaactcctaagaggagaaggatggcgaatgtgctggatgttgtgttagaaacaacaaaaaccttgagtccc

SEQ ID NO: 4576 - DNA, 429 bp, Zea Mays
ttaccaaagttgaagtacattaataaatctacaaaatatagtaagggaggtattacaaaaaggtcctacaaaaaccccaaatcaagcccccaagtggagagcacactagagcaatccatttttctctaagtcccaaaatcagccctaacctaaagatcagaagtgttcacccttttgctggcaccaaaaccacatggtacaaataacaaaaagtagccaaactacccaaggcacacccctgaaaaatttgaaaccaaaccagggtcgtttgacacggtttggcatctgttttgtcgcggggtgaacagtgcagacagacaagacttggcgccaccatatcttccaagctagacccgatctctccttggaactcacatgaactagatagctctaggcacaggaaacaaatcttgcacaagtcatatggca

SEQ ID NO: 4577 - DNA, 863 bp, Zea Mays
tacacagaagaccctagctttttaaacaaccagaaagagtctgtgacactactgttttgtctcactgacatttgcatcaaggtccctccctttctaattctttacaacctgtggtccttgacaaccaacctcgccaggccgagctccagcgagcctgcaccggccggataactcaacggctagctctcccctttgctggacaccgaattcaaccctacgcgaccatttcccctcacttaattgctggaattgggctctaaatcacctcgtccacggagacagcgcgaactacggatgaacagaagtgttcccggcgatctagcacggtctagcttaattgaacgggtcgaggagcatcaggaggacatatgggtactgaaacaggagggcaaagagcatgaacaggcctggaacgagctagccacgacgaggtcactatgcgcggtgtttcggactgaattgggggaaatcccaaattggggctctcttgtgagtaattggaggcacaagcgggtggattggatgctggactaccttgcggaaccgacaacaggctcaatttataggatccatgagcggtggtgactaattcggggaaagacgtgcggcggccggagagaagggggtgttctcgcgcaagcgattggtggcatttaccgtggcgggctcaccggcgacgatcgggtgggctaagatgactcactgcgacatggttaaagcaccaaggcatgtggcgcaaggttgcaaagtggctaactccggcgagcctatccaaagcggccgtgacacaagcgggtacgacggccggagtagaatagtggtcggagttcatccacggtgtgatatttcttacctccttgccg

SEQ ID NO: 4578 - DNA, 448 bp, Zea Mays
ctgacaaacgctaggagaagagacctcgcgaagaagtgcacgtcgccggaccacctgcctctcgtgcccggggaggacctcgtggaggcaagcgcacgctggacgacatcctcgatgcccagtgcccataccacaaggacatgcgccacactcttcagaactgtcgggacttcaagcactccgttgggcacggccgacccttccaacctctacctcctcctccgccgcggggaggaccagaagaaccacgacaaccccagcagcaggagggggaaggaagaggagctttcccgcgcgttgacagggaggtcaacgtcatcttcggcgggcacgggtcgcaggagaacaaaagacagcaaaagctcaacgatcgccagatactggtagcaaccaccggtcctcccgctccgtatcgatggtcagagcacccgatcaccttcactcgggc

SEQ ID NO: 4579 - DNA, 349 bp, Zea Mays
aagggggatagcgtttcttgctaatctcatagtaatgggtactcagggaatagatgtcatcctagggatgaattggttagataagtatcaggcagttatcagttgtgataagaggacaatcaagttgatgtctccactaggagaagaagtggtagacgagttaatctcacctgagccaaggaaaggaagttgtcatcagatggctattgatagcaaagagccagatccactcgagattatcaaagtggtgtccgaattcccaaatgtgttcccggaagacttaccaggtatgccaccagagcggaaagttgagtttgctatagagcttcttcctggcaccacccccatt

SEQ ID NO: 4580 - DNA, 698 bp, Zea Mays
aagctgtgcaatggaattaaccaactagaaactagcaaatactactactacttctaggcaaccgaagaactgagcatgcaacaaatatcaagcatgtgtaggatgaactctctcctcaaagtctcgtaaagtgttagaagcatgctcatttgatctggtgttttcacaaacacagctgctgccttgatctgttcagtccgggtaaatccaagcttgcgtagctctgctactgccttatcccttaattttttcttgaagttcagcctcgcgctccataaccgctgtcatttttccaacattcatagccacaccctttagatcaccttggacttcatttaacatgtccaaaagagggtcacttgatccactcttctccttcccagatgtcctcctcctcttcacacttgatgatgctgaatcagtagaccacctaggggttctatagatctcatgccctcctcttcttcatgatcattaccatacccagtagcaagctcttgttctaagttcccaacggcttcatcaatcccttccgcaccttcaccggtagctatatcatttccatatatggtcgacaatgcatcaaaatatgggaatgcgacgtcatataggcctctagcttcaggatgtttctgcaaaataaaacagagcaaaggatcaaattaagatgctaccattaagccaaaatacatcacata

SEQ ID NO: 4581 - DNA, 538 bp, Zea Mays
ctcggggattcactcaacagcacggcattgattactttgagacgtttagtccagtcgtaaaaatgtctactgtccggcttgtgctctctattgccatatctcgtcaatgggatatccgtcaacttgatattagcaatgcttttcttcatggtgttcttaatgaggatgtgtatatgcatcagcccccggggtttcaagatccttcaaaacctggttttgtctgcaagcttcataaagctatatatgggcttaaacagtctcctcgtgcatggtactctcgtcttagtgatcgtctctgccagcttggttttgttccttcggttgctgacacttctctcttcacctttcatcaaggcgcagttatcatgtatttattggtttatgttgatgatataattattgttagctcttcaccgtccatcactcagcttctcttgcagcagctttcagtgacttttccagtcaaggatcttggccctcttcatttttttctcggcattgaagtggcttccaattccgggggtatgacactcactca

SEQ ID NO: 4582 - DNA, 441 bp, Zea Mays
ctggtggatgtcgtgcgacccgcactatttaaaactgggccattggatctaaattcgaaggtctatgtggcgtgaccgttggatgatatctatgcggtcgagattagtttgctagaatcctttcgttcaataagatctgaactgtaggatgactcgggtacggtggagattaggccttggtttgtttaaatcctgtgcattgattctggatcgggcggttctggttgtgtaccagttcggtgatggctgaatgtaatttaggttgtccgtgtgaaatgcattggtcgggatctctgcgtaccccttcggctgtgtgaacagtgctaaagagcacctgcatttttccttattcaacccgccatcctcagcctatgtaaagtaattacaaccaagcctagaactttgcaccttagcccctataatgtctggtatttgtgtccg

SEQ ID NO: 4583 - DNA, 621 bp, Zea Mays
cctggatgacgctgaccccaatgggtgtactatccgtgttgtcgatgatggtgaggaggaggatgaaatccctctaactcggaagaacagccgacgctacattgccaatggcgaaagtagtggtgttccttctccagccctgtctactcttgttggtctacaagaattgtctctggccaactttgaccaggctcttgaggatatggttccagaagatctgttgtcagagccggcagatggtggcgcgatggatgtttgtgctgatgtgcttgatgccgggttggggtcatcctgggcagcgtcccgcgcctcatcgaccttggagcgcggtcttgagggtcaggaagctggtctggattgcactgctcccatggaagtgactgagggaccttcagccttagaggtggctgctgcagagaactcggccctcaaggatggtgctggcacttacccagcccccgagggtgttgccgggaatgatccggctcagatgggtagcgcgagcgataacccagcccccgagggtgttcgagtgggttctccctctaacacttccatggatgttcatgtgggatcttctcctccgcactctgattgtatggcagcagtacgggtttcgtg

SEQ ID NO: 4584 - DNA, 462 bp, Zea Mays
cataccaaggatccagcgtctatacttgacagaggaatccgcgaaacagatgacatggcacaaaaatggaaaacgatacaatcctgacaagatggtgcacgcatccgatggtgaagcatggaaacactttgatgccattcaccgtgagaaagtcgaagaggctcgtaatgtacgtgttgcgctggccacagatgggttcaatccctatggaatgagcgttgccccgtacacatgttggctcgtgtttgttatccaatcaatctcccccctggtgtgtgctttcaaaggcagaatatattcgtgtcgttgataattcccggacacctggggaataaaatgggcgtgtacatggagactttgatcgatgaattggtacgtgcctgggaggaaggggtatggacgtatgaccgagctatgaagacaaacttcagaatgcatgtttggtaccagtactccatgcat

SEQ ID NO: 4585 - DNA, 367 bp, Zea Mays
aatacctttatgagtgactcgacaccaggcttccgtatatcgcaaagccaaccccaacgatgttctggaccaagggacatgtcacaaaatctcatattccccagcataccatcaattgaaaaagaacttggatgaacctgataaatattaagaaagttaagagaaacggaaaattttaacgtatagctgatgaagatgcacaaacacacagaggcaatatgacaaaaaaattgcaaataaaaacagtatcaggcacattccttatcctgtgctaatgcatgattgtgtctaggaaaattaataagttgtgatcattagacaactccctggcataatactagtggtatttcaaatgcatgcagtaaca

SEQ ID NO: 4586 - DNA, 542 bp, Zea Mays
cgtaggatgacagtcgaaactggtgctagagaggaagcgcttgtaatggttgtatcagtgatactgaggagtaaacgctcttggtggttgtatggttggttacacatgcaagccagagataagatttatcttatctggtttgttaggcgagacgtgagggaggggaatagacttatacgtttcgtgcgtgatacaggacgatggtcgaaaccggttataccctccgtgcgtgacgttggacgagagtcgaaactggtgctggaaaggaaacagtcgtagtggttgtatgggtggtcttggggagtaagcgacgattgaaattggtgctttataggtgtagaatgatggttgtatgagtggtggtaaggagtaattaagcagtcgtgatgattatatgattgacatgcgttgttagactaaaaacgaagggaaaaagacttatgcgctccgtggaggatgacggtcgctttatatgtgtaagagatttctgcaccactagtgcatgtgtgaattgatttgggtttgcgtttatgaagcacgaa

SEQ ID NO: 4587 - DNA, 591 bp, Zea Mays
aatgtccacaattacatctgtatatacatatagtaaaaaaaatgttgataaaataactagccaacttagattatcccccactaaaatatattaagcttgatagatccatctcatctcaaaagatcctaacttatcctaattaaaatctttctagcttaatagatctatcttatcataaaaaaatactctattaccttagtggattcagcttatcttgaaaagattttatgtcatcctaatagttctaactcaaccagtagagtcatgatgaattacataatcggactatccaaacttttgaccaacatcatgtagtctatctcatccatacctatcttaaccatattccccagcccgataatatacactaactcctaatcaatgagacaagaccgaagaagatgatcaacttcatcaagaaaggataagcaccaactcaagtcttcaaggatcaagtgaggtcaccaagatgattcaagatttaccaccttggatagagtctttcctagccctaccctttcataacctatctatgctctaaaggcatcttctaccctacataataaagtggacatacatatatacatccat

SEQ ID NO: 4588 - DNA, 457 bp, Zea Mays
caattaataagaaaaacattaccactgaggttgtaggtgttttgttctgtttcgttatatttgtatgaaccagtggatccatatcagcttcatcggggcaactttctaatagtacacgaatatgttgttgccttaacagtaattcatgtacctgtgtgtctgtaaactgcgtatcctgctgagaaactggagtagacatatcgggtacagttgggggggccggacacgtacatccttctgtacgtgtcatgtaaacaaagaaaacattgtttaagataatggcatcaaaacgatatcgataaatgattgcataacttttttatattgacgtaaatacattaaactgactaaccagctgtctggggaagaatatcatctgattttgatgtggttttctgcacatcataagcatcttcgttgtcacccgcctcggcacggaggacctcatcaattaact

SEQ ID NO: 4589 - DNA, 966 bp, Zea Mays
gccggacgactcgactagagtatcaagtcgtccaggtcgtccgactagtcgtcgattaggggcgattagtcgtccgactagatggtaaatcgaccaggatttgtccaggcggctagggttttctagtgggctactgggcttctattttttcggcccatctacagtagtataaaggcaatgcgccaccaccccttgtcaccccttgaaacttttcctctcctctgccgagtccagaacacaggctgcggctctagaacaccagcagcagctccagaacaccggcggcgtctccaaaacactagcgacgagatgagctcctcatctcaaggttccccccttctccccctttcctatctttcctattgtctgaattctgatgaatctgaatctgttggagaagctgctgctgctttttgcttggatgatgatatgctctaggtagtaggtactgcattacacattactgcttgtagccttgtattcaatatttcagtttcagttctgctatagtgctatatgcctatattgcctttcagtctgttactcagtttcaaattcatactttcagacttatataatgcctattgcagtattgcttatatatacatatatcatattatatatacatatgcccagaaatatataggacgattaggggacgaccagaggtcgaccaggaccgattaagcatcctaatcgttgccctaatcgcgattaggcacctggtcggtcctctggaacgaccagctggtcgtccgacctgaaaacaatgttcatatctatgacttcagaaatatcacagaacagttcatttttggacaaaggcaaacgatataagtctagatacccgtggagtactcaggtccttgacagaaaagattaactattatttgccagatcagaaatgcaactaaaccatgttgcatcccaacagattgaacagcttaaactataagtggcaaatgt

SEQ ID NO: 4590 - DNA, 1800 bp, Zea Mays
gagctatcaaatccaatcgaacagggatgacaactatatgagttggcacctaagagtatgaggacgattcatagcagaccctgcgcctaaatcatgtgaaaggagtcggggcctcacttggatcacccgtttgaagctcgtcgagcgccatgatctcgacgattgagggaagcatggtacaactcgcccttccccttccggtgaacgagatgcgtgggaatgtgtagtaaaaaatacgaggcatgtccccctaaacggatctgctataacgaacaggggactcaggggctcgctccgtaaaaagggcctcacttggatcgccgtttgaagctcgctgaagtgctatgatctcgatcgtcgaagggaagcatggtacaactcatccttccccttccgatgaacggaatgcatgggaaggggtagtagataatatgggcacgcccctaggatatatccactataacgaacagggggctcgggtgcatgcttcgcataccaaaaaaggggaccaaacaacccaggaggtcacctccacgcgaacaacgacacgacgaaccctaggcagaaacacaaccccgcaacaccacgaccaagttccccacttcctcccaatgcaacgttctcactgcttctaaaggcacacatacaaacgtagcccagtacagtcgccctcgatgccaccaaatggagtgtgatcagaagatcgttgaaattacaaacagggctccaaagcacatacatcaaagcccatttttgtgttagcctcaagcgcgctagaaaaggaacaagaaaagaaaaggtgtccccactccgcggccaatataagtgacaaaaggaattcatgcattacaaggctcaaggctgaggacatgtccaagtgatcttgcgatagcagtgacctatggtcatgctatgactaaggggaaccattgataacatcctcctgtggaaggaggttgaccacgaccttggtagccacaccaaaatcatcctccatgtcctctagagcgtcgctagccacatcctttgataggtcaccgatgccaagctcgaagctcgaccggaattgaacgaaagccagtgcaccgacagcattgcgacaagcgccacatcgaacagcttggcgaacttggttcgagacgtcaagatggcgctttaggcatgaacaagggcaataaccctatcctcgccctcacgaagacccgacacctctagctctagctttgggagaaactaaggaaacaagggtggtcagaatactcaagagaaatctccataaggggaaaatacgccactaacccgcaacacgacagtctgcctcttctaagtgggcgcgaagactgaacacctcaccatcgacagcctcaagggcaatatgggcggcggccagactcccccacagatccgatggggtctgcatcgagagaatgggaaccccgcctaggtaaaaaggcgtcctgaaatccttcctctagcccatcaaaatcacctagttgcgcgaggcgtgaaaagtgtaaaagtagaatcaggatcctgaggattctgtagcaaaaaaggaaaacccataccccaaatcaatcatccgtgcacaaggggtcttagcaccaggggacggtcctcttttgaatattcgcctggatccatggatagacaggaagtgactgctcctgtttcgacaaagagggcagatctaggtatggcaaggccacctggaggaactgtttataaaaagacttagggcacaataaagcgacatgattgtcgatgccacatataggatgaagcgacggttcaacacct

SEQ ID NO: 4591 - DNA, 704 bp, Zea Mays
ccagcgatctcagctcgaagccgttgggacgacgaaggttctagcaaacctggtccacctaccagtgaaccagaagcacacgcacccccacggatcaatgattccatcaactcgagcagctgccggctttggtcgatgaatggactaataacaaataatggaacggttaacgtgtgaagacaagatagtaacaaagtgactttgaggtctaaaaagaatattccgtactagttatcaacattttaaaaaacagtagctaaatttggatatccacaactactctatggtcctatttggaataacttcagctccagtaaatttgatggagttcatagagtaggtcgttaagtgctttagaaaatcgtggagctggaattgtaaacgtctagaagacattttgataagtcatttcgtttattatttggattaaaaatattttaatccacctcagagataacggtgaacatcccagggctagaattaccggcaatcgtgaggcagagtgctctgcccacgacgaagcatgggttctatgacggtgtgcagcaacatcgaggaatttcgcacaaccccatgcgtcccgaatccaccgagtacgtgaccagtaggcacggacgcaccctcctcgaccaccacaaacctctctcagttggtcgagtaggcgcagaatgcctacggcgacgtcgtttcacgctacggtggta

SEQ ID NO: 4592 - DNA, 430 bp, Zea Mays
gaagctgaagtactgcatcttcgccaagatgtgggttctctgtcagataaactggaggatctgctggctcataaagagacgcacaccactgcaccgaagattccctttgatgttgggccttcagatcctggattccctccgtcgacatctttgggtttatctctgcaccagacaccactgcaccggagtgatggatttggggtggtgaccaccctgactccgcctccggtcaaaggtacttccaaaacctcaccactggatgcttttcatactcctgttgttcataccatggatcctgattgggcattatatcagtctcgcttagctgctacattacctcaaccaaattttccccaatttgatggacatcatcctaaaatgtggaaaactaagtgtgagtcctattttgatgtgttcaccataccccgag

SEQ ID NO: 4593 - DNA, 506 bp, Zea Mays
cggggctgctgatcttcctagtgcgagtactgagtacaggcggtgaagggtggtgtcaaaacatagtgtgggtgagttttcgcgaagtggtaggcgccgtcgtatggggatggagcgtgtccgtcttcaattagaccgggttggtaaacgagaattgttgtcctcgccgattggggtgagcataggtgagggggatctacaaaatctttttgagggtgaggaattgaggataatgttgttcaattatagggagttgggtatcatccagaaggttgagccgatgtagtatatggtgccctcgccgtgtgtatgcaactgtgatttgtattgtaatgtggcctgtcggccgttttcgcacgcctgtgttgatccagctgcacccgtgggcgacttttgcgcggagtgtagattgatgtacttgttgtgctattccggctgcacccttaggcgattttggcacgtagtgttttttcggcgcgagacttcgatggcgtattttattgtgc

SEQ ID NO: 4594 - DNA, 569 bp, Zea Mays
gaaaaagagatgttgggccgccatcctcactgactcggcccaattgggcaatctacttactcgtgtgacctagttcgcccaggagaccgactggtggcccccaccagtcagttgtgcgcgcaccaattcgttcactgaagctacgcgctaacaactaggccccgaccttcaaccttctgtgctgggtgaacacatgcgcctgtgccactggatggtggtgccaacctgtcaggtccgtcctcaaccaccaagccacactccgcggacgccatcgcgatcctcgcatccgtgagcattgacccagagctcatcgtcgcgcgcatataaaaggaccgggccgcaaccttctctccttctgcaatcactcacccacaatcgcctgcgacgagtccctcaccgtgaatatcaccctcagctggcggtcgcgaatgtcagactgcccttccaccaccgcttgaagacaattgatcgccgccgcgccttgtcggacgtgccctggtgcttaccctgaccctggggagcgagtgcgtggccatagctctagagttttgccgccaggactttgctgg

SEQ ID NO: 4595 - DNA, 888 bp, Zea Mays
gtttggagaaaaataagctcaaagttgtgctgtcagtcaaccctaagtctgaattttcagtaacagtgaagttggatgaacttagagctcgattttgagtaaagtcctgtgactacttgatggtggacattataacaaagttagagctggtttgttaggctacaactttgacatagtgagatgatcgagtcactgcatgaattttggaacaactctccctgccattcgctctgtcaggctaactgaagaagttcttgatggtacagtaagcaaaaagatatgctagttcagtgaacttgccgccagcgacccccgcgcctggatttgcgccgccgaggtgattcgtgctcactggtgcccggataacgcctcagggtggaaagatcttcaccgctattgagcttaaggcactgttctgccccggccgtcgtgtccccttggcccacggccgagttcagataagttcaccagagttagccgtctgccgcttggatgacacgtgcctagacacagtacttcgtcgtagtgactcgctctagcacatccggtcatcggcggtgagcccgccactgtaaatgccaccaatcgcttgcgccagagcacctccttctctccggccgccgcgcgtctttccccgaattagtcaccatcgcgcaaggatcctataaatttagcacaccctcgactccgctaggtattcaagcaaccagcacacccactcgtgcctccaattgttcacctgagcccccgaattgctcacttcccccaaatcgggtttctgccaccgtaaaagggtcctcgccgtggctagctcgtttcaggtccgatcttatcctctgctctcttgtttcagcacccttacatgcccctgatgctcctcgactcgtt

SEQ ID NO: 4596 - DNA, 430 bp, Zea Mays
ccgtcaacctagtagtggaagcagtcttgactggggcgggcggtggagttggctcgagagcaacccaatcggtggcgttgtgctcctcctccataaagatggtctgtcccatctgatctggacctgcaggctcaaagacaggggatggacaaggtgcagtctcatcgaatgtaacctcataagtctccataatgcggttagtctctaggttaagaacacgataagcatgagaatgtaatgcataacccagaaaaactccatcagaagaccgggactcaaacttgtccagattacctttttttccacaaagcatctgcagccaaataccctgaaatgactgaccttgggtgaccgtccaaatcgcagttcataagaagttttgttcagaaaagcccgaagaaagatgtgattggacacatggcaagcagtg

SEQ ID NO: 4597 - DNA, 533 bp, Zea Mays
aggggaggaagccaacacccgtgaggcctatcggaccttgaagatagactttgacaagaagctaaaggcactcgcccccaaaaagaagatccagaagaagaccactaaccaaggatgccagacagagaagaagaagaagaaggcccctctagccctgccccccccagaatcgatgactggtccgacgaagaagatgtatccctagccagcctcgatgatcttctcaaggcatttggggacaccttagataaggaactcgctagcacctcgaagaacgccctcgtgtagtcttcccctgtagtagtcttatgcttgtaatgtgatggtgtaatgaataaaataacttggttgagaacaatttgcatgtgcataatagtgactctcttccctggcagatggcttcggataaaaccacgcctaccgcctcagggattggagcaggtttcccccgaagagctgaagggggagtcgttagagaggaaagtgaaacccacctccccacacctccacccctacccttagacctagcccaa

SEQ ID NO: 4598 - DNA, 456 bp, Zea Mays
tatgttttgggagatgcatcgataggcatctatgtgaaaagtgtaattgttttatgcatgtgatcggtgattgggatagtcgaggcgaatggggagtatgattaatcctgttggagtcactggtgcggtggatgtcttgtgcgtaatatggggacacatatgtgtgtgtgtgccatggtgtattatagtggtggtggcatatgataattggttgagtcgagcgggtatatgacgtaatatggttatactcgcaacgaagaaagatctatgtcttgtgtaacacaatgtttaggttacagtcgtataatcggataaaggatgctcatgatggtcgtgtggttgaggagtgatgtaggggcaagccaagtagtcgtcgcttcctctgtaaatataagttgagtctatacgcgttatgtgttcccttaaattgtgcttcacatatagtgtatgatcgtg

SEQ ID NO: 4599 - DNA, 922 bp, Zea Mays
cggggaggtcctggcgacccgtcgatggtcggatggcggtcggtggtggtcggagtcatcctggccacgtgcgggggcggaagagattgttggcgacgaggagcctagcttacacaaggcggtctagttcaattggatggctcggggaggttcaccggatgacgtagaagttgtgcgcacaaggaatttgataatggcacagtggcttacccggttcccgtgctccggcgggcggagggattccggtgaggatgatccggcgcttttggtgaggttgcgctcggtctgagggctcgggaagcttcacgggactttggggaggctagctgagcagttggcatgggcgagggatggctggggcgagctggccggtgctcaggcggctcaggcgggtggtgtggaggtcgctggagttgggggcttgttcgggggagtgaggcggggtgcggagtgggttgctgcgcacatggagagggctttataggtgcgagctggtgcagacgcggggtcggcctgacaggcgcttggggcgcgtttatgagggccagtgcacgcttagcgcctttggcacgacgtcgagcacgtggcagggtttagtgtagtcattttcaagcatccgttggttccaaatttcatgaatttgggcaagatcctattgtaatattttccccccgactaccctctatcgtttatgtgtggatgccgaggcatttcttgggttgtgcagtgagtagtcgcatccccaagattggtctatctgatagccctaatccgagaaggataacgtgccaaatcatgtcaaatggatttggtttgacctcaaatttttctagggtgttctaaggctattttggcgccattttgtcaattgggccaagtggttttgagttaaggaacatcgtgaacgtgtttgagtttggtg

SEQ ID NO: 4600 - DNA, 369 bp, Zea Mays
cgagaactggcccacgacggcttctccctctgcatgccctcggtgatagtgtctcggtgatggcttcatgtagtggcacatgagtatgatcgaatgtgcaagacagccgcaggcatggctataaataccccagagtccaatcagggaatcaaatcccaacaaccctgaggcggcggcgggttctgttcgggtggggaagaagagggtggagctgaccaccaggtcccaccagtaggtgacacaggtgtgtgtgcgggcgactgactggtggaccccacttgtaagcatcgttccgtgcatgtgcgtgagacccgggactgaggagtgggcccgttgcatcagtcacaagaacgggctgcaatgcgccag

SEQ ID NO: 4601 - DNA, 651 bp, Zea Mays
gacctcaaaaccagatactggtggagaggaatgaagaaagagatagcacagtatgtggcccgatgtgacacttgccaacgaactaaggctgagcatcaaaagcctgtaggcctatcgcaaccccttccagtgcccgaatggaagtgggaggaaataggcatggattttgtaaccggactgccctagacccaaaaagggaatgactctatctgggtgataatagaccatcttaccaaggtagcccacttcatcccagtgaaaactacctttggaggagccacccttgcccgaatatatcttaaagagatagtcagactccatggtattccacggaagatagtgtcagacagggtaacacagttcacttcaaaattttggatgagccttcagcaagctatgggcaccaagatagacttcagcaccgcctatcacccccagtcagatggtcagacagaaagggtcaacaaggtcctcgaggatttattaagatcctgtgtgttgacgtttgacaaaaattgggagtccagtttgccttatgcagagttctcgtataacaacatctaccaggccagtatcaagatatcaccattcgaagcattgtatggacgaaagtgccatacccctctaatatggtccaacataggggaaaag

SEQ ID NO: 4602 - DNA, 676 bp, Zea Mays
gcagcagcgtcttgatgatatcaagttgggtgtgggtgcaatgtggcagatccacccctatcctactctcctagttcactccatgcaacatggtacctcaactattgttggaaattttgaccagcaaaacctatgcaatactagagtctaagcattatagaaaagctggcagcacctcctgcaatatgtggtagaaaatcaaaatggtcctagaacatcattgttgctttctcttctataggaattcatgaacaagatgcttgctctagcaaaccggttgatctcgtctaggccatgaataaagcattgtcctccaccacgcagcacagttgcgccgctcagctagtcccggtgagtgaagtcttcaaccgtatctataacatgatgtcgaagatgattgtagctacagcaactacagtgatgtagctattgagatgtctgtagtgacgtaggtgcatgatgcctctatagaggcaatagtggaagctctaaagcaaatggagcttcacgcacatcctacttctgggggtgatgcaggaccatggacacgttaagcagtagcctactccgatattggcaactgtcagcatccagagttgtcctagggaggaaggagaaatcaacatgtcgaccctcttcttcaagccaacttcaccatttctctaagcccatgccc

SEQ ID NO: 4603 - DNA, 495 bp, Zea Mays
caccttctgtgacgatggccttttcgtcatggaattgtcacaagaacaaggacaatgacaaaaaatcttatttttgtgacataatatgaatgtcatagaaggtcatatttcttgtagtgaattgaggtggtcaagctatgcagttatgcaggatatgaaggattcaagccgcggggcgccgaacgactatgcaggatctcgacactatgcaggattcaggtggctttgtgtcacagtgcttagcgacctgaaggagttgttgctggtcgcgatagaccacagcaacggtggcagtatcccttgcgcgcggagcagcaacctcaaccgcgcattgctgctcttccccctcacattcccatccccactctccctgtgagccatatcctttttaccaatttacatcgttgatttggttttatgaactcatattctcgcttttagatgcagcagcatgcacacacgcacaacaattttccatggcatgctttgatggaa

SEQ ID NO: 4604 - DNA, 1010 bp, Zea Mays
aaagtgtcctccaaggccaagactgggtcggcagcaaggctaactgacgcagaagcccccgaggggactggcaggcttacctctggcctggccagcaaactagcggaaggtgcttcatccgagcaatctatgaggacattggtaatgattgttttaggtaagtcaagcatcagctcctcaggaatggcctcttcaagtataccatcgacaatggacatagacaaaacttggatatccaccatcctcgctgggacaacaagactcaaagtatcactctgagccttggagagtcgttcacactgaaccaaaggaagcacatcctcctcctcttcatcaacatcttcctccacctccttcgctatgtacctggtccttttcaccacacctccaccatccacgacatcctccaaaccagtatccaccacatcatccctgaagttcggctcagcctaggcaatcactggttgtaggtccgacaaacactggagtttccttttcttcttaacctctatggactcgtcctgggcatctgactgacaggaccgcttgcgttatggactcacaatattatccaccctcttcccgccaatgctcgattgcttgggggctccacaccccgactcaagtcatgctaactcagaggattccccagccagcatgccgagaacaacttcgatatcaaagtcactggcaggcgaccatatcacaatgtgagtctgcttatcctcctcaggaagatcttggtatgtgaaaattatggcccctatctcattcgaggaaagtcgagctctatggctagaactgctaccctcttcttggatgggagggatggacataaactcagaaaaatgtactttgcaacaatgaaacaacacggtcatcatgaatcatacaataattcagcaagcgttgaataagaaatcaagtggttagaacttattaatggaggaagattccatgcaaagtacgaacgaggagcactgacattcacagcggcacccctcaacatc

SEQ ID NO: 4605 - DNA, 623 bp, Zea Mays
ataaaagcttcaagctctactccagggaaaattgccaaggcttcgaaagtgcaaattgaaaccgaaacaaaactgaccgaagccgaagctacaatgagccaggctagcgcagaagctgggcctttagagcccgccaaggagaaaccctcggaaattggagaaaaggcagcgaaggaagaagctatagaacagattttgcctgaaaaaagctgccgctcctactcccgaagcgtctttcgaagtccttgattatattatttgacacgcttcgggaaaaggattatctgaagaagaaatttttgaagctaaacactatgcccgagaactgaagtacccgaaaggggccttagtgtttaatggcacagatgaagatgacttcttgtattgcctcccagataacaaagaattatccgtctgccgggaaatggccagaagtatggggttcctgaagcttgaagctggcctctgcgccatgacgaaggacgatcttgcggatagccttgcatacaacagtctgaaggtacgaaaattgtgtatttggaagtttatgaattttgaattagtattttgttcttatattaatccattcattcttttcgtatagggcttaatacttagcaacg

SEQ ID NO: 4606 - DNA, 324 bp, Zea Mays
cgagagggaggcaacgcctcaccttgacaaactgcagatgtgcctcctttgttcgccagctctaggcacaccgaagaagcccgagggtgcggctatggaggtggaggggatggggattcctagcgaagtagaaggggagggggtggggatgacactatggccagcgccagcgtggtggttcaccctcagattcggccgaggcgggcacagttgttgcgtcgtggagggggaggggagattagggatcccaacgaatcacgactcaaggagtaaaggctagctatctagtaactttcagatccaaggaccagggaggagaatggc

SEQ ID NO: 4607 - DNA, 603 bp, Zea Mays
ccaaaactgagaatcactctgcctttgtttaactgagataaggggttttcccttaatatatttttcagtaataatactttgccataaaccatttgaattttccaaattccacaaccactttgtcaacaaggcatcattcatataacccaaattcaaaacacctaatcctcctagacttttaggagagcaaaccgcattccagttaaccaaatgtatttttttgtttgagaaccaccttgccataaaagtcttttcctgagcaagtccaaattcctaataacagatttaggagccggatagatcgataacatatataaagggatgttagaaagacaactattcagtaaagtcaatctgcccccaggctcagaaatctacctttccaaccaacaagtcttttgtccattttttctatcattgggcaccaaagagacttactgactttcttattatcaattgggactccaagatatttcatcggaagacttcccacaggacaagtgaaaatgtcagcatacagatcaataaactctttagcttcccctaagcagaagatttcacttttgtgaaaattaattttcagccccgacatatgttcgaata

SEQ ID NO: 4608 - DNA, 545 bp, Zea Mays
ataggtggtctctatcaaattctgggtggttcacccattctttccctctggaatccgatcgacgtcggactccgagcgccaaattgtcgagcgccggtggggtgcgccgccgtaggcctctatgctgtgcaacctgagcagcggattaggagcgacgcgtggatgctgttggatctacgtaggatggacaggattagatcatggggtgatggcatatttgccttagatcccagtgtatacggttgtgattagatctcaagtcaccccttcgtcattttaaatcggaaccatggatcagtaatcgtacggtctggtatgggtagtggcctggtgcgaccctcggtcgtccgatgtgattgtgcgcgttggattgggcctcagtatttaaaatctctaccgcagatctcacaatcaacggttgataacgcataccgactcactcagaataatggtctaatctgagccaatgatttagatctgagcggcccacattagatcataccccttcgctgagccagacatacaaaaaagaccctggaaaatca

SEQ ID NO: 4609 - DNA, 330 bp, Zea Mays
ttgaattcgaaaatttggagggaactcgctccgtgtaccgtccgcactaaactggaccgtctagaatgctgttgcttgggtccatcagtagctcgttgttgttctatatctgttgatttagtttggtggtttgtccgttaataattgtactaactttgcactcgcatagtcgcttgtactcgttgactccagcagtaagtgcagcatattacgtttagagttcgcttgcctgcttcttcatagtgctgcctctgctttgaaattgtagttgaaaatgaacatgcttaaaataccttgctctctcaaacactatttaagcttaagacccgc

SEQ ID NO: 4610 - DNA, 337 bp, Zea Mays
tttagattgaaaacttgtctcacactgatgaatcttcccaccgattgaagggggaacaatttaggacacgagatgggagttgaaatgctctgaatcagaggaggacaatcgtcactagggtttggttcgtcaattctagggtttgggtgaggagaggaaaggtttttatagccccacagattagacctggttgattatgtgcgtctgcgcaaatcctggttgaaccggccctaaacctggctggaccggaaaaatccatagaagaactcagtcattttaggttgaaccggcctagaacccggttgaatcggcctgcactagaaaatcatagattttg

SEQ ID NO: 4611 - DNA, 819 bp, Zea Mays
agtgcgcaaacttagtcaagtgatccactaccacccaaatagcatccctgccctgaggagaatgaggtaagcccaccacaaaatccatggtgatatgctcccacttccactccagaatttccattggctttagcaaacttacaggcctcttatgctcggccttcacgcactgacatacttcacaggcagccacgtacttagaaacgtcaaccttcatccgcttccaccagaagttttgcttcagatcttggtacattttggtttcgccagggtgaacggtgtaaggcgttttatgagcttctctcaagatatccatcttcacctctgatttctaaggcacacaaaggcaacccctgaaacgaaccaaatcattctcatcaatagagaactcccggggtttaccatcgccaaccctctttcgagcttcctgcaataaacgatcctactgctgagccgcacgcactctctccatgagggaagattgaataagcatacgagtctccttactagcggtgccgacatagcacaaagcgatccccaaacggtccagatcagcaatcaactgcaaggccacttttggaaccccggacctactaagggcatcagccaccacatttgccttcccgggtgataatgaatagacaaatcataatctttaatcaattcgagccaccgacgctgcctcaaactcagctccttctgagtgaaaatatacttgagacttttatgatcggtgtaaatgtcacaagcctcgccataaagataatgcctccacgactttagagcaaaaaccaccgtggccaattcgagatcatgagt

SEQ ID NO: 4612 - DNA, 690 bp, Zea Mays
tctagcctcgctgttaatgggatgggacatctgggcgtggtggcgaaggaggatgatttagacccgctgctcctggatttgctctcggcccatgccttgcccctacacagctactccccttggctatgtcgccctcccgtgccagctcctgccgagtgaacatagaaaatgggaagaaggtggtagatctttcaagaccctccctagacagcacaattcattcaatccatctttcacctccgcagttcatatagacggaccagtccctgtaggtaggttcaagccagctccctatataccgttgctcatgttgtagatctagtgcagtccgagaggtctggtgagctcattgatggtcgcacagatggctgggaagtggtcagacctcgatattgttggaggaggaacaagcacaggccttgcccgagctccaacgcattacgcgaggaaaggagaaagaagttcctgaagcacgtcgagggtaaatgctgcaactgtttcgctaccaaccaaagagctttgaattgcaacaacacaaccaagtgttggagatgtcttatggaagggcaccaggtggcttcctgtcctatccataaagggggagtagggaggacctcatctttccccgcgttgaccattaccactactccctctgccatttctaggctcattcttaccttcaagtagtga

SEQ ID NO: 4613 - DNA, 541 bp, Zea Mays
cttaaggcgtttccaacttaagccgattgttccgttagtagggtataatgatcaccctaagttgtgtaagcgtgagcatgtcgcaccggcttaaggcatttctgacttaagccaaatgctccgttagtagggtataatgatcacactaagttgtgtacgagtgccgtgccgatttcgagttgagtctaacctaggtcagtagtttgatcaagaacttgtatgccttggaacatggaagctttattgataatgaaaccttctgcttataaagtacaactcatcctcaagagttttgaggcatttcttacgggtaaaatttcctgaggttctcaatattccatgaattttccacttcggtgtcgtccatttcagtgagccggtaggatcacggccgtgttacctctgcgacgatgaatggtccttcccatggtggtgacaatttgtgtcgtccctccccctttagcactcggtggaggaccaaatctcccattgtgaaggatcgatgtcgtaccgctttgtcgtgataacgcctcagggtctg

SEQ ID NO: 4614 - DNA, 418 bp, Zea Mays
caggatgtcggcccttctgctcctgctgctgaagaagtgctagtggaacttttttctggagctgatcccaatgggtgtgaccctgctgatgctgaccccaatgggtgtgaccttgatgatgctgatcccaatgcgtgcaatccggccgacgctgaccccaatgggtgtgttgttcgtattgttgacgagtatgaggaagaagaggaggaaatccccttaattcggaaaaaacagtcggcgttacctagttagtggggggagtagtgatatttcttctccagctttgtctgctctcgttggtctgcaagagttgtccatagcaaattttgaccatgctctcgaggatatggttcctgaagatctgttgtccgagccaacagatggtggtatgatggacatttgcactgacattccggat

SEQ ID NO: 4615 - DNA, 615 bp, Zea Mays
tgccatagcacgaggagaggctggcgagcttaagggtgggcccaatttttccagaggtgactgggagggagctgaccacggtggggtggcggagctccgcggcgggagtcgtcgtcggtgaagtttgggtggtgatcgggggcaggggagcgttgttcagagtttgcggtgatgtggtgaagttactgatcctagtgaattgctcgctgaataaccagaggggggggggaaggagaaagagctcacctgagcggagggaggggcggcggagctggagcagttgagctcgggaattggggagaagagttgcgaggctggtgcagggcatggaggagcttggggcggcccttttataggcgcccgaagggaggggagcagcggtgttaggtggaggtgaggtgcacaacaatcggtgtaaatggtgcacagcggcgacgacgggaccgctcggcggggcagtgccgtgcaaggacgcgaccacggcaagcgaggacgaagcggtgtcgaacttctctgtgcggcgagtgcaggcggggaggaggagaggacggtggccggcagtgatcgcgttgaagccgtgcgcggcgagggagatagggtggctgactggcgggg

SEQ ID NO: 4616 - DNA, 417 bp, Zea Mays
cgagggcatgcatgccataaatgcgctgcagtccgaggggttcgtaggttatgagtgctctatggtccattcacaggaaggtgaagtgcgagtcgtctcgtgcccccttgatgattgaggttatagcaagcctcctttttgcgaggcgagcccctaagtcccccattccttatgaaggatccatctgggggtacgtcccgtctttctatagttcctttccccatgcattccgttcgtccagaggggaagggtgagctgtaccatgctccccttggtggttgagatcatggtgctcggtgcgcctcgatcggctaatccgaatgagcccttctttctgtggagcgaggcatcgagtccactgttcgctacaagggatctatctaggggcacgccctatctttttaatactccttcatg

SEQ ID NO: 4617 - DNA, 303 bp, Zea Mays
ctttgaatgaggatttgggttactttgtagcattggatgtggctgcggcggaggcttctccacgtgtgatgggtgatgaggatgtttcgggtgcgagtactgggcataggcggcgaagggcggtggcgaaacggagagtgagtgagttgtcgtgaggtgatagacgtcatcgtggtgaggtggagggtggtcgtcttcgtgtggatgggactggcaagcaggaattgctggccttgccggctggggcgagtgtaggtgagggagagctgcgaagtctgtttgagggcgatgaattgaggataa

SEQ ID NO: 4618 - DNA, 390 bp, Zea Mays
tgaccttcaagaatctgggggtcttcagctttgatgggttcaacagggttggatggagcgggctcttggatccgcagggctctacgttggttatgggttaccaagtaggcctccatcaacttctggacatgctcatccttggcttgcttcagggcttcaacagcaatggcttcacgactttccaatgcagttgcacgggcttgagctgtggtgagatccacatggagctgacggttgcgcttctctgtatcttctgctcgggcaatcatctgacggtggtgccgagccaagaaatcatattgtgcatccagggtgagcaggtatgcagtgaggtgcacgactgtggagtcgtcctcaagcaactgctgcccttccaatgcacgcatcctg

SEQ ID NO: 4619 - DNA, 449 bp, Zea Mays
cgatgagtaagactttcggggacctgattagggacagggtagaggtgtacgttgatgacatcgtggtcaagactaagagagggtcgaccctagtggaagacttaaccctggtcttcgacaagctgtgagcaacacgcacgaagctgaacctggacaagtgcgtctttggtgtctccgcagggaagttgctgggattcctagtttgacaccggggcatcgaagcaaacctagagaagataaaggcaattgaggcaatgaggcctctggcccacatcaaggacgtccagaagcttacgggtcaatagccgcccttagccgcttcatgtcaagacttgctgagagggcgctgcccttcttcaggctattgcggaagtccggtccattctcttggaccgaagaggcagaacgagcctttcaagagttaaagcagcactataacacccctggtg

SEQ ID NO: 4620 - DNA, 747 bp, Zea Mays
actgttgtacgcaaggctatcagcaagatcatccttcgacaagattgaaaggccttcttcaagcttaggaaatcccatactcttagctatctcccggcaaacggataattctttgttgtccgggagacagtataggaaatcatcttcgtcagtgccgttaaacactagagctcccttcggatattttaatttttgggcatagtgtctggcttcaaggatttcttcttcagataatttcttcggctggggcttcaagggcaggggattttgctttttctgccatgctggtatccgaagtttgttgatcagctttgtcttcaggcgcgacagcctttgcctcaatgggcgctgaaggcccagcttcggcctcgtcttggactttgacagcttcagcatttttcttagtaggtccagggctcaaggccttcatggtctccaagacagcgtccagcacgctggccattctccttctcatgggagttgcggcaggagctttttgcaccttcgtcaattttgcctcagctggtgggctcagaatttcaggcattttctctattttttccacctgtggctcttcggctttatcattcttagcttcggctggcccgactgtagataccttcagcattacagtcgactcttcaacactctgcacaattggagcaacttgtcgtgcttcggcagtcgaaggggccccttcgccaaattcaggcaccacggccgattcaatataccgcgaccggcggg

SEQ ID NO: 4621 - DNA, 598 bp, Zea Mays
caacagcgtgttccggtgaaaggcttcggccgaccttcaattggccgcattcgagagcaataagagatcaaagaccgactagaacaggaagcaatttgataaatactgacccgaggagcgctggccacgggtgttgcttctcggtggagctaagaacagaggagagagagatttgggggctacgtgggtttttcggtgagcttgagtcgagcgcttagtcgctgagatgcgggatatggtgaagaagcagcacccgcactcaatttataggctaccggccggaaccagatgagattcaccgagctgtgaccgcgctagcgagctcacccgcgtggcagagccacggcgaaagtccggtggccgccgtttaaccgggtagcgccacctcaacgctttgaagccacgtcgcaaaagcctttaaccgtggccgccgacgaccatcccacgctgcggtggcgttcaaatcagctacaaatgttgaggctcaatttactctcaaatttactcccccccaggcactgtaccatggtgagccccccatcagcacacctgacagtcaatgttgaggctcaatttactctcaaattttcatggcaac

SEQ ID NO: 4622 - DNA, 374 bp, Zea Mays
tgataaccttcctagataatctcaactaatcttcttatcctttgacctgtgctccttgctgcaacccccttgggccctgacagtcctgacagaggtttagtacatgcctaattaggtttggtaggtgtccattacttaaccttggattatccttaattctccttttctttttaaccaaggcttaaagggtgagttgaactacaaccatgattaagaaatttctaaaaattctacaaaaattacagtagatttctactaattattagagactgtcactgaaatttggggtcaagattaattagagtttgctctaaacaaaaataccaaattcttgagcagagagggcacttaacactacaacacttatataacag

SEQ ID NO: 4623 - DNA, 589 bp, Zea Mays
tgacttgggggttgtaacatgttgcttaatggcgtggtcatatcatcctcctccccttgaaaaggagtcgtcctcgactctgaaatgtcttcgcttgtatatggtaagaggtcagcaacattgaacgtgttgctcacgccatagcttggtggaagatctattttgtatgcattatcattgatcttggcaagaacacgaaatggaccatcccctcgtggcatcaatttggatttacgctgattaggaaaacgctccttgcgcaagtgaatccaaaccaagtcccccgactcaaataacactttcttcctatgcttgttcacacttgcagccttgcgcactgctttgagctcaattgcttccttggtcttctcatgtatcttttttatatatgcagcacgcttagaagcttccatattggttctttcctgcaatggaaggggcaacaaatctatgggagcaataggtttgaacccatatacaatttcgaaggggcataaattagttgtagaatgtactgccctgttataagcaaactccacgtgtgacaaacattcctcccaatccttcaagttcttctttaccattgttc

SEQ ID NO: 4624 - DNA, 729 bp, Zea Mays
ctcagtcatgtacatattattaatgttcttttgtttccttttggtggccctagaattggagatgtcattgacgaggatgtggttcattcaagggctccatttgtagcctgcactcaacaatgttttgctgttaaggcaggaattgatggtctgcttgatgttgctcgtcgatctttctgtgataccagtgaaggtaatgctgcttatgtacatcattctaattcatgatattcacattcttaacaaactgtattgcagccatacataacctcgccaaaaagtacagggatgattataatatgccaaatttgaagataacctataatattaggcaaggattttactttattattccccaaaaggacatcaccgataggcttcctaataaatttatccaggtaacatgaacatgatcttacaaaatcagcttgttagctgtaatatgctaaccagtatttctgaattcttaatgataagttaggttgttagacatgggaagaatctccattgctcaagcttggaacttgcttcagtaagttaacttctctgcactgttcttagacatcttagtattgaccatgaaagtttttctgctgacactcaaatttccagtgtggtaaatgttagtcaagagtgcatgaatacccctgtatatgttatccattttccctacattgttctgcaactgtgaatgtgcttgttggctttatagctatcggatcactacta

SEQ ID NO: 4625 - DNA, 619 bp, Zea Mays
tcaccatccattgtggccaggatatcacactggtggggcagcgaaccagtctggtgcacacgaggaaagaacagtttttgctggtttttatcaatggctaattgaggggtttggggctgtaaataccccactaacaggaaaattacaagaaacaagagttgtgcaaacattctcatacactagtgcaacacctccgcttcatcccaagagatcaaagtgcctcaattgagtataaatattcttactagtgaaagagaaggctagtgtgcttgtgtgatctgagtcttggtgttgtgttgtgctctggtgctattgtgttttgtattatcttgtaaaggctagcaagagtctccgagtttgtggagtgccttgcagagacaaagttttcacatctcaagatctagagggctcaatcttgatcattgtgatcgcttgagagggttgaaagagaccctattctttaggacacctcaatggagacatagattcttcgaaatcgaactccggtaaaaaagaaaaaaaaggaaaaagagcttttgtaggccgaaacctgctaggcccgctcgcctccgcccaccgctggcccaatagcgtccagtcctccctcccccacacaacc

SEQ ID NO: 4626 - DNA, 348 bp, Zea Mays
gatcatcattggtgatgcacgagaggccgatggaaacactaagatttattccaggaaagtggtaacggaaaagacccctgatggaggggagacattaagatcaccatcacagcctccaacattgggggcaggcataggcagaggaccaggcatgcccccctgttctacacaccgcggatggtttgagacatagacatggacggtccgggacactgtcgtacagtctgagcagatcaagcggacggtccaacaacacccaggagcagcaacgaccacataccttcaaacctcaatgagtacatggaagacaaacatgcttaaggcatccggtcgactagtcaaatctgg

SEQ ID NO: 4627 - DNA, 483 bp, Zea Mays
caaaaactccacaatacctttttccggtctttgggcatcactcatcatgtctcatgtcctcacacccatcaacaaaacggctctgctgagagaaaacatcgtcacattgttgaaaccggcctagctctgttagcccatgcttcaatgcctctcaaattttgggatgaagccttcctcactgccacatacctcattaatcgcatgcctacccgtgtcatcgataacactagtcctattgaacgcctgttccacaaaactcctgattattcgctcctaaaaatttttggttgtgcatgttggcctcatctccgaccatataacaaacacaaattatctttccggtcaaaagagtgtgtttttcttgggtatagtgcatctcataagggctacaaatgtctagatgttgattccggtcgagtttatgtttctcgtgatgtcatctttgatgaaaatgtttttccctttgctaggacatcactcgag

SEQ ID NO: 4628 - DNA, 847 bp, Zea Mays
aaattttcaagaccaatgcagcgactcgaggcaccccacgcatagcccaacaaatgcattaagtgcggaggtcacgggtcagtcagccgcggggacaggcgtggcagtcagcgtgactaagggcggaccgtcagtaattgcatcaaatgggcgagccaatcagtcaaactttggccccacctgcaggctcgtatcctcccctaaggcgggcccgggggccactgtcggtaccctaaatcaggggtaccccttactacagtatgaagacacggtgcccgtacgacgatctctagccgcacggagaacagcacccgaccctgccacgtggacagctcaaggggcaccacatggcgagaaaacaagaagcatcccaggatgtaccagttggatcggacctccgcgaggaagcaccggacccctgtacgcgcaacccggacccccgattacggtccgggactcccaagtaagcatgccgggtcccttggatggggtccagatccctccgagtaaggtccgggccacaacggggtcccgagacaggggataccctggcataagcaagggtccggtactgacacgtgtcaggccttatcctatgcgcttgcgctccccgctcaggcggagacccgctgctgccgcgtggcttgtagcccgtgacataagccagcgggcggagcctgacgtaaggcctctaaagccgcgcgatctctgcatttattgcggagaggacgcgtcgcttgcccaccctgatgacaggcgatgtgcccctcagcatttaatgcgtcctgtccactccgctggcaggcggcgccagggccatcctgcagacggcgcacctgtccagtcc

SEQ ID NO: 4629 - DNA, 619 bp, Zea Mays
ccaggtcccactcgccagcgctctcgctggcgtgcccgcgtgccctccctctcattgatagctcgccccgcatgccagcccccttccctcctcatggctattgactgggccccacccgtcagtcctaccttctcctcacggacgcacaacatcaacgccttctccaccgactgccgtcctccctccctcgccgatgtttgctctagtgaagttaggcatcgcctcgtccccgccgtgctatgcacaagtacctgcatggtgccgcccctctccctcactgcgtcgtctcatcatcgccactgtgctccgcccgccagaagccagctgtccaatgctcccctctctgagcgcctataaaaggagcacccagagctcctctccaacctgcaccgaccactgacctctctcctccctcgccctagcctgattggaactttcaccaccactgacgccgtctctggtgagctctccctctccccttctagtcaactagacaacaatccagtgagcgcaaaagcttcactacaccctcacgggcttaaaacaccccgccccaccctcaatcaccccaaaaacctcgtcggtgacctcaccaccgcgattacccgccacgccgcca

SEQ ID NO: 4630 - DNA, 357 bp, Zea Mays
ggcgaacgacaagaagaataggtgggatggccagcaggagcccagatgtcatggagaacgctaaggcgacatggtcgcgatggtgcctagtcatggcacagatgtggagctaggtgatgctgcatagacagagaggtgggggcgctgcacggcgatgacaaagaagatggacaggtgtgatggctggcagatgttgaagaagggcacgacagttgggtgggtacgtgcctatggtaagcgacccccacgctagggaagactataatgggcagatggagagtgtgatgactgttatgaccaattatttttagcatctagttggggagcatgtttgttggtccaatccgtaggcatggt

SEQ ID NO: 4631 - DNA, 639 bp, Zea Mays
gcatggccgacaagaggtacggcgattgctcgccgtcgattagcgccgtcgcgggcccgtccttcactgcgaacacgcgcgtcttcgcctctaatctcggtaaagaaccctttccctctgtccactttcagctcctcttcgcaatgcaccgatcggatttcgctattgggcgcttgggaccgaaatcgctgtgccccggccatggcaccaccgtcagctcgggcagcgccaccgttctgctcgggtttatgggaagggatggtcgtggccgttgatgataagatgggcgggtctgattgaagggcggtagcatttggttatgggccgtcgatcatcgcacgggcggacgagatcagtgcccacgtagtgtttcaggctgatgcgtcgggtgtcgttcaattttgatctaacggtcgaagattatttagatccggtgcgtcgatctgaaacggatggctccagtcgcatatgggttcataaagatggagatctaatcctggcggtctgatcatgatcggatggctcagtggtgtcgataccccttcggatagccggttttgcaaaagaaaccccactatttttatgcataaacccgccatccctcgcaactgtactctgagtcttgggattgttacgcag

SEQ ID NO: 4632 - DNA, 748 bp, Zea Mays
atcaagggtgcggattagaagcccaggctccgaaccggtgtccaacgtcagtggtcggatcccgatctaacggtcttcccttaaagcaccgatgcgagagccccagccgatggatccaagatcaacgaatctggaccaatccatcgaagggggtatccttgatataatccaggccgtccgtcatcgatccgacagccacaaccacctttctaatctagaccgttaccccgcagatcaacagcaccagtacatctcctaccttacgcctgtagccgagctccccacggtggtgttgtagttcaccgacgcacagagatccagccacccggcgcgcccaacccataaccgaattgtccaaggcctatagaagtgtttaacgagctcgtagtagtcacatacctgcgttggtcatgcacattgcgggctggccacggcagcggcggatccgcggcgaagttccctcaccggcgagaaattccagagccccgagccaccaatctagccaaggaagcccgaggagaccctgcgcatgccccccatcacatagtggcctccaatcgccggcgccagcaagctccacgtgcggcgtcacccttctgtcgcacggcttctttgtaggcggctggaagtggtaaacaagggaagagcgcgatggtgtttctgcagcgtagccgggcctcctctatccttccccccatatagcccaaggtcccaacaaaatccgcagtgcggaaccggtaaatccggc

SEQ ID NO: 4633 - DNA, 469 bp, Zea Mays
gcctctgccgcgatgatcttccgtcccggcaccgccgtgtgggtggaacacccagacctcgcctgggccgaggccgaggtcgtgtcctcgcccgcctccccgtcctcgccgtcctatgtcactgtcgtcctatccaccggtgttaaggtgagagcgcaacgactcagacagcccattgtttcgatttccaagctccgctgcgtgcgttgcagcctaggtgttcgtcgaacagctaacttcgttgctgggttggtttgtccgtttggctatctctgtgtctgggctgtggtgtggcctgtgggcaggctatagtagacggtaggaaggtcctgccgcgggacactgaggccgatcttgggggcgtcgacgatatgaccaagctcgtctacctccacgagcctggggtgctctgcaacctcgcactccgatacaggctcaacgaaatctacgtgagtgtctccatcttttg

SEQ ID NO: 4634 - DNA, 388 bp, Zea Mays
ggtttatcgtggagaatcacaggaactccctcccccctcggtcagggagacagccagatgttcgcactccaagctggactgaatcccccacagacctggaggtagctgaggccggggctctgcttgccgaggttggattgttgaaggagaggggtctgactgccgaggctgtggttatcgattttgtttccaagaacattcaaccactaaaagacagagcgtatccagcttatctgtatcgaggccttgctgattcaacccgggttaccaacagaacgattcttgctgtggatttggtgagccggcttgagatgatactcagaggcaaggtgtctaatgtcggtgctcctattgcatactcagcctggaatcttcctccttccaaggc

SEQ ID NO: 4635 - DNA, 757 bp, Zea Mays
ggcccacacacaacccatcaccgctaaaccctttctttacaaccaacacagcagacgatatatcacacacacacctatgcttctgacatcatcccgtcgcctggagtttgattgtcccattcaaaagcatcagcaaatttgttcttgagcacatcatagtcttcccaggtaacttcatcagcgaaatgcgaccaaaccaccttcacttggaccactggatggctgcccgggcgcaccaatcttgtttccagtatattcacaggtctcacatcagcaccagagaggtccactatctgagacaaatctgagtacacaggggtagaagaaggagtaaaagcattgagttgcgaaacatgaaacactgagtggatctgggatgatggtggaagttccaatttgtaagccaccagtccaatcttctgaagaatcttgaaaggaccaaaaatatttcagagccagtttaggacatggcctgctgacaactgtagtctgcacatatggctgtagcttcaccaacacaaactcacctacttgaaattcccttttagtcctgtgtttgtcagcctgcagtttcatcctattttgagctgaggccaatttttgcttgagcaattcagaataggactgcctttcagtaacccagtcattaaccgactattccccatcaccagcaacaacaggtgcagcagaaaacacaggctcatacccatataaagccttaaaaagtgaacatcccaaagatgagtggtaagaagag

SEQ ID NO: 4636 - DNA, 1250 bp, Zea Mays
gttggcgggtccatgtgcgcaggcgggggagttcgtcggcggcgaggactccgacctaaccacggcgacataacacgatccagtgagttggggagcttcacgggaggtcagggaggtcgtgggtgcaaggaatcgaagaatagttcacctggtggcccggtctacgagcggtggcgggcggccgaagtccggcgagggtgattcggggtctctggtgtggttgcgctgggtctgagggctcggggagcttcacgggtctctggcgaagctaaccgaactgctggcgtagactaggagcggctggggtgagctggccgcggtggccggagctcgggcggctccggcggcttggcgggcggagagctctcggttcacggccaaaagctctggtgactaagcgcggcgagtgtgcgaagctgaggcgaggttgtgtagggccactggcctttagaggcgcgggtgcgaggagggcgcgcgacgaactcgaccgtgcactggggcgagcgcgcgtgcgggttgggcgaacgccggggtgccgaccagggtcgaacacgtgtgtgcgtttcttctgcccgagttctggcgcgagtagtcactcatccaagcctgctcttgccttggtcagtgcacaaaacctcttctccctataagctaccgattatgtgtgggggtcaaaggatttggcctactcgttccaaagatatggagctctcaagtcgggtttgtctctcaacccgagcccgaggcaaatctttggttttgtcgtgtctagggtccgaatcccaatgccatcttcagatatgtggtagagggattagtttagcacatatttgttaatgggagcttagggttttgagttagggattaaggtgaacgcactcgagtttgggttagaggctgaaattcatattgaaatctgaatttcagatttctttagaaagcctccaattgaatggcctgattgggctttttgaattttttttggccaaactccctcactaacttttgtagcttaattagtatatttcaacttttataattggcccaagccatgattccatgtttttcatggtctttttaccaatttccccttttttacttaaatggcttaattagggttattctagggtttgggcatttttctcactttgaggtgcatgatataattaaggcatgatccttaagataaaaagacttagttgagtttttgctcctaagtttttggtgtcttttgctcaattggattcaca

SEQ ID NO: 4637 - DNA, 848 bp, Zea Mays
gaaagaaggcagtggggtgaataactgaaaattggttcaggcaaactgaaatggtaaccagaatttatagtcaacttttggatgccatagcttctaatctgagaagtttgggtctatgaaatctgtagaaaattggtagaccttggattactaaacaagttctattaacagtgattaatctgtcttactcagaaaatgagagaaatagctagctgaagatggggggatcagttatctgttgaagattcagaagcactgaaatatctacccttgatatttaccctccttgccatgaccaactttggaacaggatgaagattgggatggtgtgctggcaggggtattcagattggtgcatccctgaaatatcacctgtgcaaatatcctgtacagtgcacctcatccttaccccctcttttcttttgcccatggataatctccaccctgcgtagctaggctctatgtgctggcgtggatttactggaggaagccacgactgcatttagagttcatagctgtccttgctgcaagttcaagcatccaacccctgtgatcttttccctgcctatataaagagcaaccggggagggaaaggtaggaacccaaccagtgatccgtagttcaccatcaaccatgttgagcagtcatgattagtagtactacaccccaaatcataccctagacacacccaagttccatcgatcaaggcactgaacttatttgatgaccaccccggcaacacctcggcttcacgtgggctggcgactgtggtatgtcttaacccccacaagctgatgttctagcatccccgtaccttggtgaagctcaccgagaagtccgtttggtcc

SEQ ID NO: 4638 - DNA, 548 bp, Zea Mays
gcagggctcaaggcctttgtagtctccaacacagcatccagcacgttggccatcctcctcctcttgggagtcgcggcagaagccttctgcaccttcggcagttttgcctctgttggagggctcagaatttctgacattttcattatttcttcaatctttggatcttcagccttatcaaccttagcttcgactggctcgactgtaggcgtcttcggcattacaattggttcttcaacgctctgtgcaattgaagcagcttgtcttgcttcagcagttgaagaggctccttcgacaaatttaggcaccacggttggttcaatgtaacggggccggtgggtcagaaccttcatctttttgcccttcggctcagctacagtggccgaagtggtagtcttcctcttttttccttgcccccacagcgggaagcgataatcggggtatatgaagccaattgcatcaaagaccttgttcagtcttttcttcccccggcctccaaaggctgcggacaaagcattatcttcggccttggagtaagctccaagtagctc

SEQ ID NO: 4639 - DNA, 449 bp, Zea Mays
aaatgtcaaaaagctcaaaaaattaagaaaagttcctatggtttcagaagagtcttgacactctgacacaataaacaaggttactgaagagtaacattagcagctttatatcggcattccatttgcctgcatagtaagcctatcaatcaagaaacctagataatgtgttcaatcatcatatcaacaacaatagtcatggtttctgaggcgcatactgtggatgtgtggtgctagagatatgcctggacgcctatagtgtaactaaaaccttgtagcgtctcttatgcatcaacgtcaaggcaaaacctcaaagtaaggctagcaactctgggaataaggcaaccaccaaggacttcatagctttatatgaggaatactgcctacgcagaaaaatcaataagcataaaaactgacctttcatgggaagctgaggaaccacaaggccttta

SEQ ID NO: 4640 - DNA, 651 bp, Zea Mays
tgccatgacgacaagggtgacagacaagatctttctcaaattttaatttaggcaatccttggatgaggtcaagtgagctcaaacaacacaaaagatcaaagctcaagtgacctagcctcctatgccacttccaaagagaagaggaagatcctgctaacaaacatcgagaagggccagaagaatgtgaaaaatcagcaccgaaaacttgaccaaaaggggaaatatggcaaataagatccccacgggcatccaaaactcgagataagccctttttaaagcgcacttcatagtcatcctcaaggagttgtgaaactaaaagcagattgaaatgcagattcgagaccaaagcaacatccttgagaataaagctctcgttcacccgaatggtgccacgagaaacaaccttacctcttgacatatcctcaaatgtgatgtattccttaccaatcacggggtcgaggctggagaaccattttgagcttccggtcatgtggcacgaacagtcggaatccatgagccacgtgttctctaggcctccgtcctgcatcaatagtaagacccggggtgagcaaatggcacatcactagggtaagtaaactgtgaagaatgctagtgctgcggcatttgcccctgaaaagtgttaggaaaaac

SEQ ID NO: 4641 - DNA, 367 bp, Zea Mays
gaccaagctcacagatgctgcagtgaagaatatgggcaggtatgagacaggccaaggctggctcactgagaagagccagactgtatatggacttgtgcagtgtcaagaggacatgctgaagggcacttgccaggattgcttgagtagtgccatggcaaagagggagcagatggttgaccagatgggtggtgcaatcctcggcgtgggatgcagcttgtggtaccaaacagaagttcagttctttgctggcacaccagcgttgtcgttaaatatgcccacacgtaagttcatctctaatactgcttggttgactttttttagaacaatctttcatcttcctttccacttaactatcagattagaatta

SEQ ID NO: 4642 - DNA, 407 bp, Zea Mays
acacttctccttgtgatacatggaagacatcatgtacatccatgagatgatcaggtagttccagttgatatgcaacctctcccactcgctttaggattaagaagggtccaatgaagcgaggggacaacttccctttaactttgaatcttctcataccctggattggtgacaccttcaaatatacgtgatcaccctccttaaattctagcagtcttctccgagtatccgcatagcttttctgccttgactgtgcagttctcaaattctcccttatttgatggacttgttcttctgcctcttgtataatttcaggtctaaagaactgcctttcaccagtttgatcccaatacagtggagtcctgcactttctaccatacaaagcctcaaacagggacatcttcaaacta

SEQ ID NO: 4643 - DNA, 604 bp, Zea Mays
agtcccaaaaccgagaaacacggacgcatatcgtcacagacaggttcccacactgcaggcttagaatcaacacgtctcccatctgcagtgttgacccaaaaatggcataaacattagagaatacagcagcagggaaatagataaggctagtatacgtattgcacatcagtagaacaattttacctcaaagcaaaagataatgtacacgcagcaagaaaaaacgaagataacaagcatgaaaagagacacaatcgtctgagtagcagcagcgctagagtatttacatatcattgctatgtacaacacaaaagatggatgaaaaattaggtggctagtatggcagccgcttcagcgacagtgaggacttcgtggtacaccacatttcaagtctgtaccccgcacgaaccgtcctcattctcaatcaggattctaaggccacctctggatgtagtcctagatacggccacataaagttgtccatgagtgaagaccggtttcttgaggtaaagcccaaccctggatagggtttgtccttggctcttattaattgtcattgcgtagcatactcgtactgggaattgccttctctggagtgtgaacggcc

SEQ ID NO: 4644 - DNA, 515 bp, Zea Mays
gctgatggacggcgggttgattggccagaaacagaggggctcgttagtaatttttatcaactgaagcggtatcggccatctctggccatccaatcagaatcagacgcgccagatcataacgtgaaccgttacgagcccgcgagcgcaggatcccgatccaacggtctacaagtatggtttcctttcgcccgcacatccgatgatcatcggccgagattgacacggccgaatcggtacgctagctcacatcgtgaacgttgataatgaatctaacggttgcgcatcaatccggctgagcggctacggtcatccgatccccaccgtacaacacgggatcaacggtcgtcggccttcttctacctcaccggttctctctctcttctttttttttctccagctaatccgctgcggacgagcgccatggacgcgacaacaaactattccgagctcgccattcgagccctatctaccgcccggacgcctctgctcctaccttacacggccacacattcatc

SEQ ID NO: 4645 - DNA, 328 bp, Zea Mays
agctccgtgaggtagtcagctagctaaccaccgctaatcggccacaatcatccactcgtctgctcgaattcggagtttcccccaaatccgatttccgccaccgtgaaaccaagctcaccgtcgccagcacaactccggtcagctcccgtcctttgcttccttgttttagcattctcatgcatctgcgatgctccccgacccctttaattgaactagaccgccacccatcgccaggaacacggctatcttgtcgcgatgctcacggccaccatggccagagctccatagttgattaatagccaaattagtttggggaaaaggcttaggg

SEQ ID NO: 4646 - DNA, 720 bp, Zea Mays
cgtccttccccatcgcgacccatggcccatctccttcgtcaccgatgaggatttggaggcattggtcgacgccgatctgctccgcccctgctcccacggcccgcagccttagtggttcgcgtcgggcgatgagcagatgtcggatctgtccgcgggctacgtgttgagtgtcatatcatttcatgagtgggggtttggagtttcggcaagccgctttatgtggctctctcacactactatggggtggagctgcacaacttcaacccaaactccatcgcttaggtggccatcttcaccaccgtctgcgaggggtacctagggattgaggcccattgggacttgtggctccatctcttccaggcggagcccttctccctccccagcaaggtgaggagggtgcgccacacccttcgggccggcgactgtgtgctccacctgtgctcagactaggagcagttgtacatccttgccaccctcacctcgtcgaacaaggggtggcagagccggtggttctacctccgcaacaacgatgagcggctacccgcgttcacgcaccacatcgtcctcgaagcgaaggagcgatggaggtgcaacctacctcgggagctccagacccacctgaatccgatgttggatgccatgcggaagctccggaaccgcagtctcaccgcggccaaagttgacgctgctttccaccggtgacgggttttgccgctagcc

SEQ ID NO: 4647 - DNA, 422 bp, Zea Mays
agcctacagttgtcacgtcgttcacgaatgtgatgcctcctctcacacacgtatactctctaactgtgtcctccacgcaaaatggaagcaacaaaccaaccgcatcatcagtgacctaacaaacaatccgtcgtggctatccgtacgcaatggaagcaacaaaccttcgtaccatcagtgaactaacaaacaatccgttatggctatcggataagccttatcttctccaacaaacaacaaataaatcccgccataacacgcatgacgatcgtgctcgccaaagtgatccgtgtcttctacccgctcgccgacatgctccgccaggacgacgcctacccactcgacggccgcatccactaggacgacaccgatggtggcgctctcaccgtcgagaacgacgagggcgtggaggtcttcgaggg

SEQ ID NO: 4648 - DNA, 579 bp, Zea Mays
ccaggcacacacatacgtccacgatcggacggccaatatgccatcttcaacctctcgccccccctattctcgctcctcgccagccagcccagggcgaccgaagccaccatggcgcactgaccagccggaaccaccacaacgccagacgcacaagagcgatggacccacacctaatatgcccaaacggaacaaaagtagagaagcagagggggagacactcaccggcaagtggggcggcgatccataccccaccctatagcgatttggccgtaaactctggactccgaaggtaccccgctcgccatgacatcgatacgcttcgacgagcaccgatgtaccattctgagtaccgacaagacttgccaagatcctgtgcgaaccggtgaactcccaagcttgcatcgctctccgatcccaatggccacgaaggcgagtgaaaactacggtggcaagggtgtggcaggcgccgatggatgtgcatgtgctcggtgatgcggcgtccaattttatacgggcaagcaaaatagactcggcggaatccgcgtggggaaaatcgggtcggcgaaggcagcggcgaga

SEQ ID NO: 4649 - DNA, 378 bp, Zea Mays
aagtggtgcaggaaggtggtcaagttagtaccaaaagaaaggaggcaagggctgaattcccttatcattttaacagcctgggagatatagaagcacaggaattcttgtgtctttgagaattcagagcctaacacactcactttgatcacaaggattgttgaggaatgtcggctttggaggtgggctggggcctccaaactgcaagacttcctggtctgggcacgagctacgaatgtgtaggtcttgatggcctacccctctgtggtttttgtattcaaatggtctaggtttcaccgttgtaacagccaaagcttttagttgcctagtccctagctgtaggggcaaaggtcttgtggttttggttgttttcggtcgttt

SEQ ID NO: 4650 - DNA, 654 bp, Zea Mays
ccacggatgagctgttcttggcggcgcggcagaccgaattgggggaaaacggcgtcgcggtggctctgtttgaaattggggttggagattgaggctactcggccgtaagaagatgtgctttcaccgtgcgcaatcgatttgggagaaggtggagagggcagtgcgaatttgacttcgatctagtcactgtgtttgctatgatcacacctcgccgtgaacccaatggctatttatagccgtggcggtccggcgatcacctcgcggctgaggatagtatcgcaatcgcatgtcgaccacgtcggtagaaggtatagtgagggagaactacggcatgagcgccaccgcggtggaattcactgagtcacggcggccgccggtgagtaactccggctaggcctgggagatggcgccacgtacgggttatccctccccgacgttatccacaccataccgcccacaaatcaggacagcggtggcactaattttggcgcagagaggtcgccgacggtgagcaagccgcgttggcaacctgataaacccgagagcactgtaccatgggatacttcttcagtgtgcctgacagtcacagtttaggaccaaattcctctcaatttcctatggcaacatacctgaggttctgcagcaaagttgtag

SEQ ID NO: 4651 - DNA, 558 bp, Zea Mays
aattggagaacaaagccctataattctctctgtcaggcgcactgaagagtgttcatgatggtagagtaacctgaataagatcgcgggttcagtgtatctcgctgccgatgactccgcgccgcgatcctcgccggcgctgtgatttgcacccagtaacgcgtggataacgactcctggtgaaaagatattgccgtggatggagtcggagcactgtattgccctgtcgccgtacccacttgcccagcgacgtggtcgcacggtcatcgccgaggctgtcgccattttcctcggttgcaccacgccttaggtagtttaccatgtcgctttgcaccgtggagattaaccagtgatagccatcctcctatgtccagtgaatgccacgatagaacgccgcggtgacttagtccctcttctcggctgccagcgcatcttctcaaaattgggcgccaccgctaatggacactataaatcaatgccccattgagctccgttagtttgttatacgttcagtgcaccagccctcgcctccaattagccaccgtagctcgcgaatttcaa

SEQ ID NO: 4652 - DNA, 540 bp, Zea Mays
tcacggtaggaatgaagaggccgacgcgttggctaaggcagcggccaaaggcgaggccttgccctccgacgtgttctaccacgtcatcggcacaccagctgtccgcaacccagaagacttacaaataactaatgacgccgaaggccatcgcattgtcaacctcatcatggatgaagatggcgggccccaataactttgtatctgcaaggtcattaccatccaagtgatatcaatgaggccaaatgcctgaagcaccaaagccgggacttcgcattactcaggggccagctgtacaagaaggggatcagtgagcccatgctaaagtgcgtgactgaaagcgaaggcattcaaatccttcgcgaagtccacagcagaacttgcggctctcactcaggacccagggccctcgctgccaaggtgatccatcaaggattttactggcccgcaataatctgtactgcgaatcgagtcgcgaggtcttgcgaagtgatagagctggagtgcccgatctttcggtgagtggagataattctgatttag

SEQ ID NO: 4653 - DNA, 349 bp, Zea Mays
tgaagtaagccttaaatggctgatgtaaagctcaaatgactgaagtaaaccatgaattgttgaggaaaacctcgaatggccgaagtaaatcgtgaattgctataaacttagtgtgtgatgggggtgatagacgaatcaatctcattaagtgtggtgcggactagtttcaacacctaatcgttggtgtggtcagtctggttgtgcagttaattaaaagatgtggttggtccctggtgggctggtcctgttgggccttttagtctaggtgatggaccatgcatctcaacaccgtgggtgatgattagtgtttggctatgtgtgtgtatatctctactatcctatatgatcc

SEQ ID NO: 4654 - DNA, 760 bp, Zea Mays
gctggggaaaggttcacgggttcaccagaggttaggtactcacttggatttgggcgaaataggaatcaaagagtgggtcgacagagggggtagtcatggcggcgttttacagagcaagtgtgtgttccggtgatgggcttcggccgaatttcaattggttggcattgagagcaattggagatcaaacgcaaactagaacaagaagtaatttgataaatactgacccgaagagcgctggccacgaaaggggttcttcatgtcggagctaagaacgcgggaggggaaaatttgtggactgcccacagtttcaggtgaaactgagtcaattgcttaagcactgaggtgcgtgatgtggcgaagaaaccgaacccgagcgcaatttataggccatcgaccggatttagatatggatcgcggatttcagatgtgctggcaagcttaccgcgcggcggattccagtgatggcacggtggtcgtcgattaaccggggcctgccacctcagtaacttgctgccacgtcaccggggacctttaccgcggccgccgacgacccatccgagccgcggtggcatccttatcaccggcgagggctgatccttatctccccctctaatgtactgtaccatggcaatccaccatcagatggcctgaccgagtgacttgaagccagattttctctcaattccatatggtaccaaacccaaacacctataacaaagttgttcctctataataactctacaactttgttatagcaacc

SEQ ID NO: 4655 - DNA, 289 bp, Zea Mays
atttttttagcatttaccttgatattattggaagattatatcactgtattattagttattggtcttcctgtaatctgagaacatatttgtgctgtccgaattaggtatgaagtgcattggaaccagagttgttctcactccttagggctgtactatctaagacctatattctgcttctattgggaatgctaaaacaaatatcccagcatgtcagagcctcagagggttgcaccagcttggttgtgtcaattggtttgtattgcttgtatttggtcacattctgtttttg

SEQ ID NO: 4656 - DNA, 372 bp, Zea Mays
gagttacaaggagacaaagagatcaccaaggatatgaaaggtaaaatgaccgctcatggatcattaagagacaagggtggtcaagggcatgtagaatgaaatatcttaaatagaccttgggatataaaggtaagcataaaaaagatgagagtatgaaagatttcaaggacatgagcataccaataccaagagacaagaaattgccgaaagatagcgacttaacaacataagaggaaagggtctcaaaagacaacaaggtcatggacatataactgaaatgtctaagtaggcagtagaaacttagaggcaagtacttgaaacaagagtattaaagggatacaagcatgtcaataccaaaggactagagttcgc

SEQ ID NO: 4657 - DNA, 289 bp, Zea Mays
gacggacgacagcttaccgaaggagcaataatccttgccgacgggagctaggcggtggtgtccaggaggaatccagtcggacggaggctaggcgatgtgtcagggaagggaagcccgaggccaggcaacagggacaagatcctggggcggcggaaactggatgggagagagagaaaaaatggcgcgagtgggttgtggtggcgaggccaacgcgccagaacaagctgataaaacaaaaaatggcgcgactggccttttcgggagtgggaaactagttgctacatgtaga

SEQ ID NO: 4658 - DNA, 556 bp, Zea Mays
gaccacaacagcagtactaccggccgggctccatgcagacaacgtactggtggggagcttgttgccggggaacaggagcagggccacatcaactggagaggtgaggcggagcgagagcgaaacgagggcaaaaactaggaccagccatcctcgcctgctgggcgctggccacgtgatggtggccctacgctcgctgtaagcgagtggagtaattattggctgcacctgcactgccctgaaatcaactccttttccatcccgaatcattcacggccgccgccaacaccaacaccaacaccaacaaccagcgcctgcagagcgagcggcatcatgtcagtgccatcagttgtgcagtgcgcggttgtttaatttgcagggaaggatcatgcagggcgcctatcggattactccacttttaacctgaccatgcaattgcatcatatgccgagctgcgccgggaagctggtcggccgggcggggggatcagtcaggctcacatcgacgggaaaaagaaggaactgcgtaaagcacgattgggcacgtgccgcggggattc

SEQ ID NO: 4659 - DNA, 590 bp, Zea Mays
ggatttttgacttgtatattacatggctccgcctcgttaaaaacctcacccccgggaggaaaagagtgcgggccagaataaaattgtatttgcgaagtacaagggcgaaccggccccgatgagtcaaacaaaaaatttgcggagattgtcaatgttccaggagtgctccaggtcttcgccgtttggtgttgtgagcctgtaagcactgggggaagccttcgtcttgacaatgaaagggccctcccacctgggctccagcttgcccctggactctgtccgagctgtacggacgagtacgaggtccccttcgttgaattctcttgggatgactgcgtggtcgcgccatgcttttgtatgggcttggtatttgttcagggcctgtagagcggagactcggtctccatcgatgagatccttcgaagtgggctcgtccacgtcggggacggctgacggaactgttcgcggggagccgtgttttatttcttgtggggtcatggcctccgatccatatagaaggtggaaaggggtgaacccggtcgccctgcactcagtcgtgtttagcgcccagactgcctcaggtagcaaatctg

SEQ ID NO: 4660 - DNA, 343 bp, Zea Mays
caacaccgcccttagccgcttcatttcaaggctgagtgagagggtgctacccttcttcaagctcctgcgaaaatccggtccattctcttggaccgaagaggctgagcaagcctttcaagagttgaagcagcacctggtgtccctaccagtactggtagctccagaacctggggagccactgtacttgtacatcgcagcggccgcagaggtggtgagcatggtgctggtggtggaaagggtggcgcgagaaggccaggaacctgagggcccggaaccagctacaggggtccgaaccgttcagaggccggtctactacgtcagcaaggtcctccatgaggcaaag

SEQ ID NO: 4661 - DNA, 540 bp, Zea Mays
cgatgcgccacctcgcgcgtgaactaaaagctggcaccgctctgtgagaagcgaaaaccatgtgaggggagagccgccgccgtggattgccgccagtagcgcaattcgggccctaatctggtcacccgaagcttgggcaactcacgaagaagtcgtacgtggacgcaattggaaagtggtgagcgggagccgtgggaattcctcgtcgggattcgtcgtccgccgcactgcgtggtcggccgattctgacgcccaaataattggtatgtaacctcggactatgttcgctacctgcttctcatttcgtagtagctagcgctgtgaggaaaggtgcaccgggggtgagaatcgggtgttcgccagcgatggcgcgacgcgggttgggcggcgccgtcgcgtctgttctcgggatggggaagacaccgctgaggcattggtctgggaacagacggtctagtttagatcaggcgtatcgcttcaggagatctcgcctcggccgtcgatcggcgatcgtgtgggcaccgtcgtgtccaatgtcag

SEQ ID NO: 4662 - DNA, 408 bp, Zea Mays
aacttgttatatgaggaaaacttacagatgttttttttttggttgatggaccattgccacacctcgcaactaaaatggaaagaacatttccactctttgctagtttgcttatttgtgggcactgtaaatgcttattggaagcgtatcatgactttgttcgggggagttgatcttgtgcatgtgcttcataagcccatgactgcttgaattctcaatacaaaggggcctaaacatcaatgctgcttgcaattccattgcgacattggaacaatgtaaaacagcgatggacaaatggattcttggccctagtgcaaacaatgatactatgtctgttagatgcctatgtatgtgtccttgtcgtattcggtctcatatagagtcattgttatacacaatctgtatcctgta

SEQ ID NO: 4663 - DNA, 544 bp, Zea Mays
agaattcattcgcttgaacaatattcaagagtaaacgcgcatcataagatgatttgagtaaaacctctccggctcgtttggtggagaagcgaacaatctgtgctagagccagcgccttcttggcagtcatctttaacccgtcatagatcttctcttatgaaggaaaggcgaaatggacaatctccttggcatccaatctcctcctcgcacgattggtggatagcccgggcacataggacttgccgacgagcatccagtcgcactccacagtgaagttgacaaactcaccgttcggcggcgccaccaccatccttatgtgagtcactgggacagacgcaaccaccctgaggggccatggctgcaaccgatgctctcacatcttgacgtcgacgggcggcggtcatgtcgcctgttggtacatctcgatgaccatgggtgaccatgcaggtagggtggtccagtaagtcagcttagccctatcatatgaactcacagctcaattagtttccatcacggcaccaaatttttgatccacaaatattcc

SEQ ID NO: 4664 - DNA, 614 bp, Zea Mays
cttcaacgctgggggctggacatcgttggaccactgtctacagctcaagggaacctcaagttcaccttcgtcgccgtcgaatatttcacaaaatggattgaggtcagggcagtatccacaataacatcgaagaccgctcaaattcttctggcaaaacattgtctgccgcttcggagtcccgtccgaactcacagtcgacaacggcaaacagttcgacagctaagagttcagggatttctgcttttccatcggcaccaagcctgtcttcgcctcggtgtaccacccacagtccaacggtgttgttgagcgcgccaatggcaaattttttagcgccatcaagaaaagacttcttgacgtcaaaaagggcaaatgggccgaccaattacctgaagtggtatgggccctaattacgacagagtgctgggcaaccgggttcacacctttccgcctattatatggatctgaggccatgacgccgcaagaattaaagcacgggtccccccgaacaaacacatcagccgtccccgatgtcgacgaaccaacttccaaagacctcatcgacggagatcgcgtcttcgccttgcaggccctcgacaaatatcaggttcaaacca

SEQ ID NO: 4665 - DNA, 575 bp, Zea Mays
gagcattaggagaacccaaggatgttgaaacaagatagcagggggcatgaacagacctaggattcactgaccacgctgagggctcaacgcacggtgttcttggttgatttgggggaaatcccaaattggagagctctggtggacgatcagaggtgagagctggtttactggatgcacaattacatagcggagcaggtgggggcgacaatttataggttccaacagcggtggcgtccaatttcacgaagacgcgctggcggccggagatgaaaggggttactggcgctcgggattagtggaatttaccttggcaacctcaccggcgatgaccagacgtgctagagcgagtcactacgacgaagtactgcgtctaggcacgtgtcatccgagcggcagacggctaactccggtgaacttatccacagcggccgtggcacgctcgtgtacggtggccggagtagaatagtggccatagtttatctcccgcgtgatatttcttaccgaggagcgcttatctgagttcggtcgggtgtgaatcacgacgctggcgcggatctgagcgcaagatcaccggc

SEQ ID NO: 4666 - DNA, 428 bp, Zea Mays
gcgaacatctggctgtctccctgaccgtggggggagagaattcccatgattctccacgatgaaccattccaggcgccatcccttgatgttgtccttgagggggatgtcgagatagtcagtcttcctcccacggcgcatctccaaactcgcgccccccacaagctagtgctgccctccagccatcccaggccgacagtggtacaaatgcttccaaaggccgaagtgaggcaaaacaccaaggaaggcttcacataaatggacaaaaacagaaacttgcagaatggaattgggatttagatgggtcagattcaggcgatagaaatcaaggagaccgcggaagaaaggagaaatgggaagagcaaggctgcagataagaaaaggaacataaatgacggattcgtgggtgtcttctgtcggaacagtgaccc

SEQ ID NO: 4667 - DNA, 987 bp, Zea Mays
gttaactggaaacgagttcctttactattcctacgtgtcgctgacggtttacagaaagctccctcggttttcatttcttcgcacggccaagtccacgacggcgctccgcacggcagagctccggcgagcatctgtactagccgattggggcaacgacaaagttctccgagcgactgacacgaaattggacctagcccgagcatttcccctaatctaatttcatcaacgactaattaataagctctagccacggcgaccgaggacaaggcggcaagatcgtcgtgttcccggcgacaagtgagctcctagcgcaattacatgggtcagcaagcatcgtggagttacgagaaagctcaaacgagagagagagaagatgagctgaccggaaaggagctgggccgcggtgaggtgagttttgcggtggcggaaccagtttgggggaaacaagaaattcgtgagctccggcgaacgatcgtggctgattagtggtggctggttagctgatgaccctgcggagctggtcacgggcttaatttataggcggcttcgttggtggccggtgaatcggacgagacgcgcggcggtcggaggtagaagaaggtactagcgcaagcgctaggtggcttctaccgtggcggtcattccggcgatcaacggagaggctagaggaagtcatggcgatgcggtggcgcggttaggacacgcggcataaggctggaaggtggcggtgcaccggcgaggttatctgcccagccgcaaagtgaataagaaagccacggtgagtcaccggagtgacctccagctcaccgccggcaaggatctttcaccgcacgtccttatccacccaccccgagcgcgagtcctaacgccggcggcacgaatcacggcggaggagtgatcgacggcgaggggataaacctgagattcttcttcagtcactgtaccatggcgagtggtattcagacaacctgacagagcactttggag

SEQ ID NO: 4668 - DNA, 334 bp, Zea Mays
tgttgcagagccttgggggagctgatgtccgcagtagagtctccatctatgcggatgatgtggtccttttcataaaaccaattgaagcagatctaaattgtgctaaaatgatactaaactgttttggttcagcttcaggtctggtaaccaatatgctcaagagcagtgctattccaattaggtgtgatgatcagctggtgcatgctggctacagtgtgttacaatgcagtcccacttcgtttccttgcaggtatctgggtctgcccatctctgataaaaaattgaggaagtgtgaccttaagttatggattgagaagattgcagaccgtctacc

SEQ ID NO: 4669 - DNA, 492 bp, Zea Mays
gcaactcaaagtagatttttcacaatagacagcttacaacaactttttcacaaccgaaccaaacgcacccttatatgttgcagatgatagctgctaagaagctcagcccactattaaaacattgcgtatagtattgcatgacttgaaaaaagggatgattacaagttatcaacccatgtgaaaagtgaaatcattgtttcgagtaggtgctcattccagaagatgtaaggttgactccagctgagtacctatcagggcacctaaacccattatatatatctaaataacattgtagcatctccatcaggtaacctataatcgatactcattctagatacgatgtggtagaatacctaatatagatgaccatcttttcaaacgtgtatttggataccggatacccgattggacatggtaacacttaggtctcttctttcggctaaatgcgtaaaccaaacgtgtatttggatttccagttccgcatatccttgg

SEQ ID NO: 4670 - DNA, 2341 bp, Zea Mays
cttcgacgccaaagaggccgccgacatcgacctccgggccatcctgcccattgccctctctggttcgtaccactaactaccgacctgatcggttcgagcatgctgatgctttattagttgcgctcttctagagtagccactagccagcatttcatgaaggacaacttggttgtattttccgctaaaccgagcgttctagaattttgtttggttcgtttgattcttattttagctcccatttaatataatatctaaatcagctttctcggaattccctctggattttgctgctatttgcaggttgatcccatccgtctacatagtacacctagttgtttatgcttgtgcaattatgcatgcgattttatgaaacttcactaatagctcaaattgaatgaagtttttaaaaacaaaaccaatttagttttgcatatgaggtatttcattcgaagagcttctcttcctctacggtacctgaatcaaattgcttttcagggttggagcaccttaccagcgtagacgagagatttgcaaaatacagcaacactctgttcagggagactagccttgaggtgaaccgcgaacagttgactcccaaggagaacgacaaactcaacaagtctatctccacctaccttcgccttctagctggctatttgcatcttccctctgccctcaagacccttgaataccttatccgcagatacctgtatgaatttagctcagctaattttgccgatggccctacgagctctagcttattctcttgtttctggtgggaaccttcatgtagggtgcatgtatacaattcggatgagttgctgctgagcgcactgccataccatgatacacatgcgtttgttcggatcgtgcagttggtcaacttagggtgagtgtggctctggtctggatagatacttattttctccatttgtcttcaatatcaacttgtgctggttgatgtgctttcaggaatagtaactgggcatttcttggcggtgtcaagtcctcaggtgcaccgccacccaggagtgttctagtgcaacagtgcatccgtgataaggctgtgctggagaccctatgcaactatgtaacgccgaaattaataatccttttaacagtaggattctgtcatgatttttgatatttttttgttgataattcattttactttcaggctacaccaacaaaggaattcagtcactcgaagacagtcgtctgcttttgcactgctgtgattgttgagtgtttgggtgctgtccctaagcttgacacagatgtagtgcagagggtgttgggatttgtgtttgactctcttaatcctgcagtgacgcgagaccaggaatataaggttacctcaaatgatttgcagtttttttggccccttttcaatggtcatatttgttatattttttctttcccttttactttgcaaccctcaactggatactgtgtgtacactatttcgaacattatgaatcttttattgtgctatatgggtttacttcccattgaagaactattgacatcctgctttcttagcaatgttataactacagttatgttgtatctttatgaccaggctggcgctcttatgattgttggagtacttggaacccgtgcgactctagcgcctaaacttgttcaaaatttgattcttttcgttgcaaggactgcacaacatgatgcattcgagtcagttgacttgccatggcttcgtgtttcagtgatggctcttataagtcttgttcaggtttggatttaacttattgtcattcatatccttaggaaattctggcttgctatgtaaatcattgaactcaatattggtgatgctgaggtagaagtattgataaatgtctgctaattttacagtcccaatctgtccatgttttccctaagaagccactgatggttttgaaagacatcaggtttaccgttgttttcccagcatacacattatatatttgctcctttctgtttctcctggtgttgaagtgttaaattcctatggtaaacttttttcagggatttttctggtatactttctgtattatccagtgaatacaacatcgagaaattcattaggctttatgttgaatcattaattgactacaggtgattttgcttatctgatgtaattatatttgcatatttctctctggcattgtatgaacgtttataactcttaaaatgcgaacagtattgtcgatggtacctgccacacacacctgattgaaactattgagagtctgccaatgaagaatttcattgaaagtgtcgtgtgcaaaattcttggaaactgtatcaaggtatctcgggccacaggaatcccagatat

SEQ ID NO: 4671 - DNA, 529 bp, Zea Mays
agaaattagggcataaaacagaaaagaataaaaaggcttcatgggccaactccacccaattcgccccagtaaccaaaacctaccgtgcggcccgtccagccacctggtggtggtcccaataggtgggccacccttgtcatccagctctcacgcgcgcttgaccaggaacttagtctcgctatgatgcgggcccgtccatgatagccacacatcgccactcccccgccactcggtcgctgatccgcgggcccccttgtcggcagcttcttctcccacctcagcgcaggattcggaccaggcgcaactgacgctgagctaaccccgggatcccatgatccctcgacgcccttgatttcctcgctccaaaggccataagtaccttgtccgcgccgtctctccattgatcgagcaccacagatctagatagcgccttcgtgagtattctgaaccggcggcggagtgaaccgtgggaggggaaatccttgacttcgggtgtagactccagtgctccgagccaaagggggttggt

SEQ ID NO: 4672 - DNA, 572 bp, Zea Mays
gccgcgcacgccgtcaccagtacgtggtccccatggccgagatctcctcccagctcccaaacgtggggactccaacaaactccgccgatctccctggtgttcggttggctatggcagctaatccgctcctcctgtgcatataagcttgggtctggcgcacctccattgatcgcagcggaagcgcagagaaaaattgagatcgcagccgcgatagatggggggaaacaagatgccgtggtcgtttctccgctttcgctggtgttctacgccaccaacctctgttcatgggcttccttgccagtgcaagccggacggatgccgcggcaatggggttgggcgttcggccaccgtcgtgccctccatgttctaccagggtgtttgcagggacctgggagtcttgcacaagggagtaattaactgcaagaagctccatcgatactccaattgttcagcgacgttcgtcaccgcggcgggtccatcttgcaccatggaccggctccaccaggacacctatgccagtaagttccgtacccccgtaatcgttaggacccaagcatccttttgcaccatcc

SEQ ID NO: 4673 - DNA, 624 bp, Zea Mays
gtctgtcagacactctgaacaagttcctcgatggtacagtgccacccaaatatcctaggttcagatcccctcgccgtcggtgatcccgcgccgcaatcctcgtcgtcgttgcgattcgtgcgtcgtgggttgcagatagctcataagggtaggaaataacgcggcgtgggtgaactccggtcactattctactccggccgccgtaccaagcttggatcacgaccacttcggataagctcgtcggagttagccacttcgcgaccgtgcgccacgtgcctcggtggtttaccacgtcgcagtagttcaccttgtgcatatccggtgatcgccggtgaccccgccacggtgacagccacccatctcttgcaacagcactcttttcactctccgaccgccaccgcgccatccgaaattcaccggccaccgcccttggagcctataaattgagggcagggatagttgcgccatgtaatcatcaagctatagcacccactctcatctccactcgctcaccgtagctccgcaattcaggttttcccccaaattggtctccgccaccgtaaaacaccactccctcgtggtctgtccgttctggtaaggcaccatccaattcgcgcgttgtta

SEQ ID NO: 4674 - DNA, 518 bp, Zea Mays
tcggacctgagttgagctagccgcggcgaggtgttcttcacggtggcggaaaccgaattggggagaactcaaaattcgtgagctctggcgaacgattgagggtgggagcgggggctttggtttcgtgatgacatagcgcacctgccccggccttcaatttatagagggcttaggcggtggcgcgcaatttggccgagcaatgctggcggccggagatagggaagaacactggcgcagtgtctaccgtcgtggtgacttcaccggcaacaattagacggctattagagagttacggcgatgcgacggaggtaccagagcacgtggcacaagaccagtagacggccatcaccggtgaacttatccaacccgccacggagagcttggtacgacggccggagttgtttactggccggggcttatccacggcggcgatatttacgtgacccgagcgttatccaggcactggtgagcgcgaatcacctcaccggcgggaatcgtggcgcgagggtcgtcggcgg

SEQ ID NO: 4675 - DNA, 533 bp, Zea Mays
atccgtcgcaccatcatccgctggctctgataacagatcctctagaaccatatcttcaagagtctgatcaaagtttgccagggacaattcttgtagaccactgagggcagacagagcaggagaaggaactccactactttccccactggcgacatactgccgactgttcttccgagtcaaagggacctcatcttcttcctccccgtcgttttcatcagcaacacaaacaacacacccattgggatcagcagcagatggagcaccctcattgggatcagcagcagatggagcacacccattggggtcagggtcagtaaattcaggcacaggcacttcctcagcagtaggaaccgaaggaccaacgtcccgatccaaactagatactcgccgaagatgtctctttttctttttctgcttgtcagcaggagaatcaagttgattggctcggcaagggcgtctcgggcgaacactaacaggtctctgaatatccaaggttgtaccagcttctgggagaggcgccaccaccgatgtcc

SEQ ID NO: 4676 - DNA, 740 bp, Zea Mays
cgattcggaccacagtctggattaacttgactacgacggtccacctgcctccaaactggggaacgtgcgcctccatttcccccatcacttacaccggccataagcacctcagcgtatgagcgcctagggagctcggtggcttgcggaggcggcgtgtgcgggggcaatcttggtttgcgaataggtctgacgaagagacgttgagaaagaagtctgagacctacgttgcggcttctggatgattcggaagatcggcccttggagaaaaaaggcagcccgtcccgagaaaaagacatgggcctacactgaaccggttccaatccagctgaatttgaattcatcactggcaacaaatctggcgaataaatcggatctgggggcggtggtcgctcattgcaatcatcaccagaagaccccaaaacaaaatcaaacacatccttgatcgtccaccgaggtggcggccgaggcaaaggccctttccacggcttagatttcgacagaaacgatgacccacctgcaacacaatcggaagaactcaccttcgacggtcggccagcattgtagggcttcttgctctgattccccgccccacaatagatgcgcgaggcggcgggcatgccacggcgaacccttcacgacgcggcggccacgccgtctagctctagtatgctctgggtgcaggtagggatggcaacggggaaatctccctcgggttttagctctccgtacccgtctccgcg

SEQ ID NO: 4677 - DNA, 976 bp, Zea Mays
tttccattccggcactgggaggggttgcaataggcctgcaggtttttggtgctcggccttcgttcgttggcaggtgtcacactgggctacatactgtgctatctctttcttcatccctctccaccagtatctggttttgaggtctaggtacatcttggtagttcctgggtggatggagtaggctgagttgtgagcttcctcgagcaggacttctcgtgcctctccttttggtacacacagacgattcttgaaccaaagggctccttgttcatctgtcctggggtccgagagttgttccttgcgagctttttccacaagtcttgttgtctctgagtctaggcgttgagctttgcatatgaggtcttctagtattggtttgacttcgagactgccgttgtttcccaaacatgcattcagttgagctgattccttcttccaatcttctaaaaagttggttccctttattccgaaagtttttcggctgagggcgtctgctaccatgttgggctttccggggtggtaatgaatctcaaggtcacagtctttgatcagttccaaccatcttcgttgacggagattgagatctggctgggtgaagatatacctcagactcttgtgatcggtgaagatgtgacatttgttcccaattaggtaatgcctccatatcttcaaagcatgcactatggctgccaattccaaatcatgggtggggtaattctgctcatgcggcttaagtaggcgcgatgcataagcaatgactttctcgttttgcatcagcacacaccctaagccttgcctcgaggcatcacagaagacgatgaaatcctgatgtatatctggtagtgtcaaaacgggtgcagtcgtgagcttctcctttatgatctggaaacttccttcacattttggggtccacacaaacttatggtctttcttgaggagctcggtcataggtcttgcttatgctggagaatccctt

SEQ ID NO: 4678 - DNA, 1056 bp, Zea Mays
gatcgcaccactcactgcgcatgggaccctcctgcgcactaccactcactgacaatcgggcgtgggggcgctctcgctgttatgtggccctccctgccagtagttgtttctcttaagtcgatcacatgtggtccctttacaacagctcattcttccacctcgacgcaggaagcggatcgtgggcaacaaccccccgagtcaacccttggcttccccgatttctcggcgtcgttggtcctctcactccagaggccataaatatcattttcgctccttctactcattgaccgagcaccacggaaccagatagtgttttcgtgaggataggtaatctgggtggtggtgcggaccgtggggaaggagatccttggtggtgggcataaatcccagggcttcaagccgaggaggtgtttgagtcgctgcgacctggcgaacgtgttcgcggcaccagcactggtagtggagcccctgtcgccaaggaattgctcgacggagttccacgaccgccatggaccgtgcatcatcgtgggcgggtgttcctgcctcgctactaccggtaatttacttctcatgctattcaccgttaaccacattacctgtaaaacagtttacgtgagggtcaggggggtgattggccgccgaatttacggtctccggcgagcggccgccaccgtggtgggtggctcgccaccgctgttgaccaccagatggggaagacattcagatgtcgttcacttgcaaagcaaggtccaggattagatggtagatgtctaggcggcaggagggattctgggtcgttgatcacgctgcgtagggcccagatttgatcgagcgagggcttgatgttggtcgttctatctaggtggatggatatgattcggatggaaaacacccccttcatttattatatcctcgccgttggttttgatcctagggcctcagttccaaaccgggttggtcagagtgagattctttctgagccgttagatgaacatccaacggatctgatacgggcatacctcttcatgggtccccttttacttaagaggcctgtgc

SEQ ID NO: 4679 - DNA, 489 bp, Zea Mays
gtagacactagtacccgagagaaagcgagggccaagtgctgggtggggcgccggtgttgacctcgcccacggctggtgtcctggagtccgtggtgtgccgcggtgcttcggatgcttgtcggtggatcacccattgacggattggggggaaatcaattcagtggcggccggaattcgttaacgcgcccattgatccgtcgtgggaagtctagagccaattcgacctccgcgttcggtgagccctcgattctttaccctcgccatattcccttacctagctaatgtcgtgtcgttattaatcatgggcaaactggtcacgaatttggcctttgtgcggggaatgtcttttgggcgctgcctgtatcgcggtcgggggtgttcaactgcgtggcggtcgatgaaatcattcccatgtgttcatccgtgggctagctccatgttgcgccaactcccttcaaggttgatgcagtcgtaccccgcagagatttc

SEQ ID NO: 4680 - DNA, 467 bp, Zea Mays
atcggcaatagtacggtgatgcgcgccacccgcgatgcagtggattgacaggggaaattctaaccccgacgagcaattcgtggataaccgatgcactactcggcacccgcatgacactaactgaggagagggataaggcgatgctaaggaagaggctctcaccgagggcggaggcggggatggcgctggccacgacgggaggcagaccgtttcccagaacgcaccgatgaggaatcgagcagctctaggtcagtcgcgcgcgaggcaacccacatcgacacgatcctcagccccaagcgaaccctcacgaccacctgccgaaacccgagcggtgaaggctagggataatcgcagaggcgacgtcgacaatccaactcggccctccctagctcactactcctcactaatggtggatggctttgggacgaacagacgaagagagggtgaggtaacgcgcatcatgatat

SEQ ID NO: 4681 - DNA, 1015 bp, Zea Mays
gattaaacaagttctatgattatttttacacttaaaaattcatttattaaatagatttcctgattactctctgtttggaccccgcgcatcataacagagaaggtcggggttaatcttgcaaaattatccagacacatgattgggtcaggtggatggcgggttgattataaaagagtctggggtttcttttgcaaacatactcggctgaaggggtataggctcatctgagccgttggatcagcgcccgatggctcagattaggctaagcgcattatgaacccgcgaacgacgtaaaccgtaggatcgcgatctaacgtacatgattcattggactgaaacgttatcccctggtttaatccggcccgatcatcagtcgatcaacggcccacagtgattctttccccagatctaatcgtgtgcgcccaatcgcagatcgacggccccaaacgctgtcttcttcctaccatccagagctaggccggcggcaccattgcatacgccgcagcagcggacatcgccggtgtgaagtgcccaggcgccacagtgcactaacctacggtacggatagcatatctcgaagctaacacgatggcggaacaggggacgagattcacaccaccggtgatggtgcagagggtcgacgacgaggtttagcaactccacgaggattcctagctctggcaagttctcgggactatgatcgcactacgaccgcacggatcagcgccaaacagacgccacacgcaccagacccgatctgagccatgggcgacgacacacccaaagactgacggtggcgcacaaactcaccggttctctcttctctctcctgtttctctcgagcgctcagcggattcgcaatatgcttggatggccagggtgatgcggcatctactccttaaatactgcccgcagggaaggccaagagcggagaaatctcaacagccgcgacatgcccggcgccccgcccagccgtggaccagtcctcgctcgtggtcagcagaaatcacgctgg

SEQ ID NO: 4682 - DNA, 534 bp, Zea Mays
gccacgtgccttagggcgttaccacatcatagtataccactgaagcatggctgttcatcgtcagtgaccttgccacggtgaaatccacgaatcctatgcgccagtgctctcccctctctccagccgccagcacgccatgcccaaattaggagccaccgccctcgggccctataaattaagcatgccatcaactccactaggtaatcacacacccaacacaccagcccatgcctcaaattatccaccagagcgcttcaatttggtatttccaccaaattagtcaagaacaccgccatgtgagtgctcaccgtggctagctcgctacaggtccgttcacgacctcctcgttctcgtttccaatccctgtgtgttgtagatgcttatcaacccggccaattgaactagaccaccatagatcaccgggaacacctcggttcatccgcagtttgtgccatcaccgtggacagagtgattacgggctagaactccacaattgagtgagggattagtgtcgccgaggatagaattaggcgt

SEQ ID NO: 4683 - DNA, 628 bp, Zea Mays
ccatccacgagcaagctcttgctgcgaggcgggggaggttgttggcggctccctctgcacgcctggaggcgccggaggcacaaccaaggaggagcctaagaaggaggagcaagccctctgactcgcacccttcatcacccgtctccttccctaatcccactccatcgctgctaggtcctcctctcccactttctctgcgaccgcgacggcagcatccgcaccgcccaccaccaccacctcctgctctgttgaaccgattcgctgaaaggtccctaccatccacgccatgcccttctctagcctcgcatcgcgcccttgatgtgtctcattgtgtcgctgtcaggccacagattcgtcatccgactccgatgaggctgcatcctgtcgtcctcgactgttgactgctggtaagtcaccctagcctgtttaccattcatcctgatcttgtctctccgtgtcccgcaatcccagtcgcgaggaactccatagcaatcccagccgcaatcgacgcaccggccgcgaggaactccattgcaatcccactccatcgcaatcccagtcgtaatcgacgcaccggctctcgatccgcgctctcaagggaaggtgagtcgccttggcaccgaccggc

SEQ ID NO: 4684 - DNA, 571 bp, Zea Mays
gctagtttggagatgtgtcgtgggaggaagactaactatcttgaaatcactctcaaggatagtatcaagggatggcacttggagtggtttattgttgagaaccatggaagttctctccccccacggtcggggagacagccggatgttcgcactccgagttggatcgagtcccccacggatcaggaggtggctgaggcaggggcattgctagctgaagttggactgctgaaggagaggggtctgactgcagaggctgtggttgctgattttgtcttcaagaacattcagccgttgaaagacagggcatacccggcttatctgtaccgaggcctagctgactcaactcgggttaccaacagaagaattcccgctgtagatttggtgaaccgacttgagatgattcttagaggcaaggtatcaaatgttggtgctctagtggcatactcagcctggaacctgcccccttccaaggccttcactctttttgagtcgaatccacctgtcgctgatggcggtttgggccttagaatgcgaccctctgctgaagaagttagcgctttggttgcctcgc

SEQ ID NO: 4685 - DNA, 732 bp, Zea Mays
acatttacgattcaatagcgactaaatttaacgtaatacgggagaacttacgtggctttgaagaatatgaggtgtgtcctattcatgtggcccaatatgtctcatggggatgtgcttctctgcgccgaccacgtctgctgtttttgtgtgctcttcgatatgtccaggtaccctcaatgccgccggaggagtaacagatacaccctctgtgtatggggcgattgcagacaaaacaggttgcatgtccattgaaacagacgtacctgctggcttatgcacagatgttacaggcaggatgtcatcgccagcgccggtggtggacatattcttcgccggccggacctctcacttccgccgccgctaaccgccgccaataattcagatggacgagcgaacgtggacgcggctgtaaagttgtattagtttcctaccgtaactgcgcctttattttcgcgcacgaaaatcatgtcttgccttatcacaaaacctgccgtgaacgtttgcatggtttacgctatcatgtatcacaacgttatgcagtcgtaaacgtctagcacatgcagatattcgtgcgcgcgagccctgggcatgcaaagattccacttatgcatgagttatgcacatttgtacacaatgctttgatttaaaccaataccatcttagccttagtgccctagcgaactgctcaaggtctaggacgcctagtccccctaagtcttttggtgtacatac

SEQ ID NO: 4686 - DNA, 388 bp, Zea Mays
ctggggcttctaggggcgctaagtgcgatctgggtggccagggaggttagggaagacctggcgaacactacggtgggatcggggtagcaggaacggtggtgaggcgactggacggtggagggggagatcctcggcggaccaggacactccgacgatcaatcgcgggcgagaaagtgcacgacagaggaaaataagagcagggttaggaaggttaagtcaagtagagactcaggggctcatgaacgaaggctggggcgcgacgcggactcgggtcaacggcggcagttctccggctgcgcaagaaatgctctggtgagcgtggactagacgaaccaaagggggagaaggcgagccaaggggcgttccaggtggcgggtgatagggcgga

SEQ ID NO: 4687 - DNA, 520 bp, Zea Mays
ttgatggtaatctggtgaagcctatgttacatgacggcgaagttgcaaatttctcttgcaccaggcaccacaaaattttattaatatatgctttaaatttatcatgtatttcctttcaaactgtacaatgtttgattgatcgtgcacagggttatttttcagctcgcttcgcccctgctcaccgccgccacatcctcctcatccgacacctccgccgccatcgggtgctctggacgctacttaccgccgtatcaaaagtgactcaccagcgcgcgccacccaccgctgcctcgacaatggcttggaacccatctacgccgctgctccagactcaccgccatcacatcctcctcatccgtcacctccttcgccgtcgggtgctccggacgtttcttgtcactgtctcaatagtgactcaccaccacgtgccacccaccgccgcctcaacaatggctcgaaacacatctacgccgctgctccagcctcaccgccgccacatcctcctcgctcgtcacctccg

SEQ ID NO: 4688 - DNA, 563 bp, Zea Mays
gcccgattaaaccctaatggttaggatccaacaggccgaagcggtacgctctgatctagtcatcgccatacattttgaatcggacggtgcgacatgattcttccctcccgtgacccagtgacggcggcgatcgcgcctgctcggcggcgccctcaccgtcgtaagccaattcgactcccaggcgcgctaacgagttcccaatttgctccaaaacaaggcaggattaatatgatcacgtgagtcagtatcttactggaatcaatgtgaagacgacacgcgcccatgcgatggcgcgatcccgcggcgaagacccaaccacgacaaagaattcctgttcagccgatgccttgttctcccggcttctcccccgaaagcgacccgtgcacactcacgaatgtcagggaccatgttcccggtgccgagcggcgagaatggtgggattcgacggcggcggactctcgctattcctctctggtggtggctggaagaaaggggcaaagggaggagcacgaggtggggttgggtccgcatttgaagcccgggcgatgtagaatcctgagtag

SEQ ID NO: 4689 - DNA, 648 bp, Zea Mays
gcagaagccgctagacacatatggtgtaagctagggggcaagggcagggtgggggcatggacggcggcggtgaggtcgcacgctcctcgaagacgcgaggagtcacccgttacctttgcctttctttgtctcaaatttcaatcgatagacttccttgtttcacatcctcctttatagccagcgggattcacacaaaaaactcacccctacactaatttcctattacaactcgggacgactggtcccctatgggcaagatctacaaacatgctcacccttccctcgccccggtaccacgtctctagtaggttccacctctagatgcatcgactagtcatacaaatatagaaccttgccctaccctcataccatttatgcggcgcccctatcattggatccactggcaagattcatagttgtgctaatccctatgccatgtcatcggtggagagatttgaagatacacttacccccgcaccaacctgctaccacgtttgaggtgtctcttgccaccgaatccaacgacgaaattcacatataaactaatccccaacgcaccctcctgtcacatatctaatggatcccacaactagatccatcgatgccatcagttcacttgacaaccaatcagatttagtcccctacctc

SEQ ID NO: 4690 - DNA, 1045 bp, Zea Mays
cggttctgccacagctggtatcggagcgaataccaccacagagaaatcaataagtcattaataccaacttttcaaaaataaaaactgcttagaaaccagtattggaatcatcaggactagaacgctagacctaggacgaaaggtcataggaatagtgggaaaacaggtggctaattaagtaggccatataggctagttttagatgtataaggatgcctcaaaagcacctttcggatcggtgagaagacgttctatccagcatgcatgcattataaaacatgaaaggattagaaattaaaggaaaaatgcatctaagtgtgaatgtagcaaatagggataataataaataacataaggagtagaatctaatctaacccacctccttttaacaacccgggcacatgtattcctttccactaccataacgtttacatctaaccctctttcacagatgacttcacccacccccatcagcggaggagacacttgtttcagttccgactacctttcccatgagggtttcccttccatcttgtgggaggtgctcagctccgccggttaccctacacctcgtctgtacatggtgtagttgtacgaggagcatcgggtgccctattgccgagtctggctgactctggaggctcaccctctacagtcgggttcgcgttcccttgacttcgaggctattggattcagggtggacgacaccaccgaggctgcagctatgaagactttgacgactttctgcggataccatcccttggagatggtaatgcacctagggatggcaatgggtaccaaacccgcgggtattggtttcataaacccgcacccgccaggaaatagcaaacccatacccgtgcccgcaacccgtgtcgggtactgtataacatctgcacctgccacccatgggcgcaacagacccacgggcatacccacgggtgcaatagacccacgagcaaacccgcgtgccctccaagcatctactagcaaacaatccatccagttccatacaataagcaatgattccaaacacatgcaattt

SEQ ID NO: 4691 - DNA, 736 bp, Zea Mays
gagaggtcaagggtcaaaggtgataataggcaaggatataaaggaagaggtaaatgtgcataaaaaaaccaggaatctaggtataatcaagaacagagataagataagtcttgcaagtggtaaagtataggatataaccacgggtgagataagtaagagaccacgcttgaactaaggtgggagattggaggttttagataacgaacatagcgtaatcgccaaggtaagattgagagatgagaagggtaaaggcaataagaagcaaaagcacaacaaaggatgaggttacaaactcgcgagccaaagaagattatacgaccaagagaaagaaggtatgagacggaagaggggcgattttaaagagcaggtatgagacaaacatcaatgtaggatatagaggtgtcaagggtgcatatgataataattaaaaagcataacaaaggatatagttaagacaagactcgcaaaatgacaaagtggagaaaacaatcaaggttaagatcggtaaggttccaacagaagggttgaagtaaagattcattaccgagtggagttacaaggaaacaacgagattactacaggtgtgcaaaataaaatgatcactcatggatcattaggaaacaagggtggtcaagggcatgttaactgaaatatttcaaacagatattgggacataaaggtaagcatatataaaaataagagtatgcaagattccaatggtacgagcataccaaga

SEQ ID NO: 4692 - DNA, 634 bp, Zea Mays
aagtgagctataatttgaaacgtaggaagtaataagaataaaaaaacagcaagttccaacattaacgaaagtcagctagtcacctgattttgcacaataagacaaatggagaaatatgaaacacccacgtacagctttgcaggccacaaccttaatcttttaaggtttggcatgaacatacacttggtgcacaacgcaatacattatgcttaatcagtcagctggcataaaagtgcctccagaaattgacaataaccttcaggtgtgagctttgttccccacaacgactcggctagcatttgaattggtcattatacaaagttttcaaacctaaactactatgtcatacttgatcttcggatacgcacattaccaaacagaggtccgtcagaccatcatcacacaatctaaaccactgaacctaaacttgaccaatgcagcactttcttaaaaacataaatctggatgacattgatgtgatcttcatagatttaattgaatagggaatgaataaccaatagtaacaccgtttctgattggttcaagagtggtgggttcatgacatcaaccttctatctcattatgaaaccagtaggacgcagagtttggcatagatgtgcttccctactcccag

SEQ ID NO: 4693 - DNA, 673 bp, Zea Mays
attcaccacatcgtcgcaagctgtaaggactcggtagtgaccgccgtagatagttagcctgtgagcgccacgttgcggcctctggtgactcctcccccttctcaccgtgagcgcttccccgttcaaatttgccctcctcgcagctgtcctctataaatcgatgcctcggcctatttgtctacttgttacgaagccagagcaccagccctcgcctccgatcatccacagtagcaccccaatttcgttttcccccaaatctactctccgcgccaccgcgagtcacctcgtcgtggtcggccgtctacaggtcttctctcgccctcctggtttgtgttttagtactctagtatgcttgtgatactcggcgaccccgccaattaaactataccccgcctagtcgtcgggaacacctctattttccctcggatcttgatgtcgtcgtgagcagaagaactccgggccggactcgtgcaattgagggatagatttggatccccaggggtggaattaggtgtagaccgagttagtacactggtcattgcgtattccggccggtgcaggttcgccggagcgcgcatgccgccgttcactatcagggacttggagttgtgaagagaaagaagtgtgagggtttaagtgtgaatgtcagtgagacacgtgaatagtgacgtgg

SEQ ID NO: 4694 - DNA, 1307 bp, Zea Mays
attttgagaaatcaattatgtctcctgctacagcttccagcttaaatatgcatcatctcaaagccaagtgtgagaacattctccttgatctacaggtattcattttgtccgtactgatacagcagtgcttcatagtccatgcgtcattttagtgtcaccaatcttggtgtttaatatttttttcttgttgatatctgcagacttacccaaaatttgtaaggttcaaggcatcaattgcccaaattaagcttgatgaatactaccatgccagaaacatctgttcagatgattcaaaccttggtaaccacttcttgaacaataacttgcagcaaggagttcaagcttccctccctcagtgcctgtttgctgctggagatcactcggtagaaacctatgaattttgtggcaacagttcaagtgaattgacacgagttgaattgctaaaaacttttggcaagtccacattctattatgatgtcagtaccaaagatcaagatggcaatttagtaagctcaacttctatgtcgatccgtttggctcctttgcttttatgggtgcacttccatacaatatacatgctactgagttttgtaagtaaagttgagtctgatttgtcacatggagaaaagcatggtgacgaaaaaggaagcagattgagtaccagcacaaactcatcctcaatcggaagtctaaaagttcagatattcctatcaccggcaagaatcaccctgtgctttccatctgagttttcatgggatttgagccacccatctgtcctggataagttcctggtgatcgaccacacttcatgtctgaacatggtagaaactgtatcataccctcaaaatgagtttcatcttagcaagtcatgtacctcaatccatttggctgtagggaatgtagacatatatttggttaagccagtcaataatgtattggttggtagaatctgttcttcaagtaggcaaactttctctacaatgaagattctttctgttactggaaccagttataatgactctggcatcacactgatcaggagaaagtttgctgtaactggccctgagattttgaacaatgcttggagtttgccaaagctgcatgatgaaaagatttctaaaaaacagaacagcaaatgggctggcatttccccttcttcaacacatgatcttgtggagacaggatctagtacgcgccaggagctcctaaagagcactgaggtcttatttcatgttcaactttcttgtgtctcagtacaaattagtaaaaaggattgcgagttactaaataagttgctagatcatgtc

SEQ ID NO: 4695 - DNA, 330 bp, Zea Mays
ctcatgaatgccctccaacagcactgtcatgtaaagctgtgatcaacttagtccttagagcagagttgtctccaatccaaatcaccccattcctccttataattccctgatgcaaactgtagccctgctcattaggactttgaatcaaaagctgagtcttcaactcttgagcctccatatcagtttcatatgaatttaaaacctcctgaacctaaagaggttgtacctcagacacttgggataaggccatgagataactcactctggacagagcatctgccacagcattttccaccccctttttgtatactatctgaaactgcaacccca

SEQ ID NO: 4696 - DNA, 398 bp, Zea Mays
ggaaaagagagcagtccatagcgaccacagcagcgggtactcagtgtcccctgatctataagcgcttcatctatggtctgtgtggtgcggacaagacatcgttgtctccatcaggtcggcacactgtcgatgtcggtgaccatatgattgtgtttgcagccatccttcaatgccatctgcttcgtcgcgtgtattattgttctctccgattaccatgataggtcgtcggatgtcgacgtgtacacgtgtctagcaaagcagcccgcccacatctaggctatcgtggtcatggtggtcggagccgtgcagggcgctgtagtcgatgggctcatggacacacttacgcccgccaatagggtcaattcttcgcacaatcatttcacagactaaactgccct

SEQ ID NO: 4697 - DNA, 412 bp, Zea Mays
tgctcagcctgccgtagcaagtgaaagggtttggttcgtcgagcctgtaatgggaacggtgtctaacaaattcaagcattgtaacatacttgcggcatgcgacatcgcctcctcccacatcagaatattttattccaaggtggtatccacgatcaccgtaagggaaaagaagcggttactgcaaggccatgtaggatgggtgcaagcacgaaacatgtttgaggccaccttctctagcatgcacgaggacatcgtacttgtactgtgaagatgagcaatcgcccactattacagcagcaagctcaccattggctggtaagttgtactgtgtgtcgtgtcgtgtgttacagcctaacaatcgcaacgtcacattttggtcgccttgttcgtctaaacgttctttagcaaagcg

SEQ ID NO: 4698 - DNA, 559 bp, Zea Mays
cgcaaccttacaacttataaatatcttcgttatatgacaaacaatagtatataaatatatttagtataaaatcatattaacttaattgatctgtacctaaattaggatttcaagatccaaatggggccgcacatttttcacggcgaggacagaggaaaggagccgctcctcttgggacccggccgcggacgagcggcccacaaccacaagctcgtcagcttgtagctatacaggtaactagtgtcctcataacagttgctctacttactgtctgttatgttatggtaattgattattgattgttcacggtcgggtcattggagtgagatcgatcataaatgggttctatgattggacggagtgtgatttcatgatgaggaacgagctgtgtgtttgattgcggaaatcattcagttcggagcgaaaataaatgcggaaatcattggtaagtataataaaatgatgtagatggactgtaagagatgtcacatcagatttatagtagttgtgctcacgaacttcaatatactagcttgtgaggggaagggatagactaaat

SEQ ID NO: 4699 - DNA, 352 bp, Zea Mays
gaaaaacctaacatacaggtcaagttcctaagattaaaaactctagtttgtcaataaaatggcatctaaatttgaaaatactaaacaagtaaaaattcaggttaaagtgagtatagtgtaaattgcatatgtgaataatcatgtctccatgggcagcataggcatgctcaataccctatgtatgatatgacctggatcagactacaggtccattcgtgcgatgttcaccatctcatgagctacttgaactttccaccacgaaatccgtcaatgcaaagagtagtatcttagcagtaactatcattacaaaggcttctattgaagagctgaatattgtggaaccaacctcaac

SEQ ID NO: 4700 - DNA, 599 bp, Zea Mays
cttgtattggagcgatgatcgaggtacggtggtgtatatggtccatgacgaccatgcatccaagccaagccattgcacggagcatgccgctcgcgcgctgccagatctaatcttagcggtcgtaacgtctttgagacaacagtaagcactcacgcactgagctcaaaaaataaatgtggagtagcaattctaaaatagataaggttcgcagaacagatactactgtttggaataaatgcgacatttgacagacactaggagggaatcttgttgcgctaggcaggcaggcaggcagcattggccaggcaggcggtgccggtacggtagtgggtgaagagccccccaggcccagggtcaatgcgtcgcggaaagttgcgcaagaagccaagaacaatctctgcatagccttccgagccgcgcgcagctagttcgtagtacctcctacgatcatgtttttaagctccaccatcaccgttgctttgctcgtacgtctggatgatgtactgtaggagtacgtagtactagtaggccacccttaccgccgtacgtgtacgtgcgtgcagcttttcttgtgatcttgcgtcggtcgccccttttca

SEQ ID NO: 4701 - DNA, 697 bp, Zea Mays
atcctggcagagtggcgttagacctccagatgctacatgcctggtgttacaacctgtcaacggtgtgtcacctttccttctatccaagtgcaagagaaagaaaggctttgtccgtcgatgctgcatttgtgtttgcatcacaaaggattctctaggtagttcattcagttatgtggatcatgctcatctgtttgagaagcatcaggtgcttgcaatttttctgggatcctggtggaagtaatgttacacatccgcttgaggggaagccgaatttgaagaagggggggaatgttagggactgccggcccaatagtccatggtccagcgcaactatatgatgacttatgctacaaaggagcaaggaaggagagtaacacgggaagaaattattttcaaagaacacaagagctccttcctccagaaaccacctcctctactattcttcttcttcctctacacagtgatcttcttcttcctgcagatctcctcatgaatatctagccctcttggattcccttgcttctctacatatcccaaactctatttcacctcatatttgtatcagccactattgtttcagttttcctggttgttgcattgtattagaaggggttgttaacaagtggctcctacgcacgatgccctaagactgtcttcaacgcttgcccctagctcctccccttagtgcatgtagggg

SEQ ID NO: 4702 - DNA, 648 bp, Zea Mays
aggtgcgggtctttctgactgctgaatcaagaatcttcactggcttctcatggtactgaaggtctttctgaatctgcactgcctcttcttcgatgtgactttctggtgcttgcaggcatttgtgaagctgggatacgtgaaacacattgtggatgtcggacatggattccggtaattccagacggtatgctgcgggtcctaccctgccaatgatgggatagggaccgacgaatcgcggtgctagttttccttttacttggaacctcctgacaccacgcattggagaaaccttgaggtagacgaagtctccttcctcaaatatgagttccctccgcctgttgtccgcataactcttctgccgactctgagcttcaagtaaccttctgcggatcagagcaactttctcttccgcctctttgacaaaggcaggtccttctagtgctttttcacctacgttggaccacatgagaggggtctggcatttccatccatacaatgcttcgaacggtgacatcttgatgctggcctgatagctgttgttgtatgagaactctgcgtagggtagactagattcccaacttctatcaaatgctagcacacatgctcttaatagatcttcgaggactttgttaactctttctgtttgtc

SEQ ID NO: 4703 - DNA, 579 bp, Zea Mays
tatcagggcacgaggagattgcactggattaatggctccaagtactacacccgttatgttcctgggcccaaatgtcggggctaaacattcttgtatgtgcccccttgagctataaaaggggaggcatgcaacgttacaacacagacccaagtcatccaagacacaacacaagctcacgagcaatacaacacacagtggagtagggtattacactctgcggcctaaaccactctaaactcttgcgtgttcttgtgttcatccccaagtctcacaacaagcagaacgcttaggcccctcctcatcttaggatttagggtggttgcactccgccacccggccggagatttcctctccgacatttggcgtgccaggtagggggggcaatattaggtttttgcttgttttcctgctcggtgccatggttcacatcgttgagcaccgcgacgtagtcgcgggggacttcctcatggaggaagaggctgcatcttctgcgccgttgagctccagccgcacggcacttggagcagctactgtgcgctccgcacggcagcacacgcctacataggcttcccgaactcc

SEQ ID NO: 4704 - DNA, 452 bp, Zea Mays
atttggtcttgcacggtggcggctggagaaagaggagatcactggtgcaagcgattggtggcatctaccgtggcggctctccggcgatcaccggatatagataacccgagctattgcgacgtggttaagggcctgaggcgtggcgcagtcgcggtgaatgacgcagactccggtgacggccgtaaagccacgtcgctggcgcaagtggtcgagggacagcgaggcacagtaacccaaacccatccacgacgagatcttttcacggctgagcgaaatccactcgcccgaggcacaaatcacgacggctggcgcgaatctgggtgcaaaggctgccggcggcgaggggggctgaacctgggatcatgttccgttcactgtacaatcagactcccttcagacgcgtgatagagcaacttgcaacgcctagaccttggatttttgtgtaaaaactc

SEQ ID NO: 4705 - DNA, 371 bp, Zea Mays
cgcccgtgtcccgttcgtgaagactccaatcggagcgtagccatggctgccgtcgtggagcaggagaaggagctcctctcgtcggtggtggatgacacccgctcctactccggcttcaatcccctccacccatggctgtggtacggcaccaccacctgtcgctccctcccttccctttcacgtgactccatctcctgcgatttcgtccctgtgttttgcgcatcgatgacggatcgaccgatgaccccccatttcccccgccgtttctttgctttgctttctagggggtgtagaagctggagcgggctgccactggcaactctacgagagaagctgcccaggttcctgcagaagtgcgcttcgagtctgac

SEQ ID NO: 4706 - DNA, 290 bp, Zea Mays
ctggaccatccccttgtgtctataaaaggggatgcctagggccttctggggggacgggcagcaaggacagcggagacagactcactcaagcatcgagctccactccgcaacactagactcctcaggagacctaggacccgttccttctctcgcaaagcttgtaacccctactgcaagcaccccccagtgcaagataatataagcctcatccctcctcttgtgttccatcttgcatcaacccatctggacaggggcacgcggcacaaaattcactagtcggtccggttgag

SEQ ID NO: 4707 - DNA, 405 bp, Zea Mays
tggttatttcctaaattagttgttactgtacatggcatccggtgctagcactagtgccacactagacatggtcgatggtatggtgctcaaatgcatagatgaggacttctctaagtatcatatctagtggcacactagacatatctagtagtacttagtgtgggggacagatatcccccgggtccactagaattcgaaaacccttgcatggggccatggaacagtcgccccacaaggtcgtctcgtcgtgggctgggcaaagactacaattgaaatggaccgacccaagaaggcaatgggctcgtgcccagattgtccgtgggttatgtgtaatcttaagggagtcgtccgtttttcccacgcctggcgccctcaaacgtcggagatggatcgggatgaagccgt

SEQ ID NO: 4708 - DNA, 505 bp, Zea Mays
atcagaggagccgaaatttgtcactgatgaaggtggatcgccgtcggccacttcacgccatggacatgactccacacatcgccatacgtggtaagaaaacttccattgtgttcgccttaaccttcactacgagtagcgccagcgggatcagagtttgaacgcttgtacacgaggatgctgaagtccaccgatgtcaccgccgtggctagagattactccgtcgactagatgaatggaagagagggtgagagggggaattgctcacgcggccgttggatcggtcatgagtggtggcgatcagatcatcatgttggttcagccagattagatatgagttgtagatcggggtttggatggttgggaataaggcagggcatggcgggtcatcgtctgtagatctgagatccaagcatcgtccagaatgcgtaccggttcgaggagaaggccattagcaagcaaaccgacggtccgattgaacccgtaccccttcggtgtgcaatttttg

SEQ ID NO: 4709 - DNA, 297 bp, Zea Mays
gttctctggcagatttcaccacagcgaccaagtttctatatcagctcatgagatggacgcttctgccacggatgggttacagggaggctgccactcatatctagctctggctccttggtgccctggtctctcactccgagtttgatgttgtggatttcctcatttgtgagatcgaggacaccgtactggatggtctacgtgcccggcgacagctaccgtatgttcactatatttgctacatcttcgctcagctgattcggccaccatagtttcagggcactcttgaggcgtctcgcc

SEQ ID NO: 4710 - DNA, 597 bp, Zea Mays
agattatcgagtagcagttgcatggacgctggaaatggagttcttcgttccctccctaaacatacagtagtagaagcagttcatcgttgcagcatttcttttactgcatatgcagctctatattcgtagcgcaccctttcgagtccgccggtgcggacagccttagggcattggggcggagttttggtggtcggcgacataggaacgttagtctctatgagcgccatatctagggtaggatgatttcctgtcactaggggctagagagagtctagtctcgtctgaactgtgtcagctagggttttttaggagcacatgaagcattggcttccatgtcggcccctatcttgtttatgccgtgcccgtgagcctgaggatataaccatataaccacggggaagattgtgttcgtgatcagagtgtggttaatgtagataggtctagagtaagttcccttgaccgaattcgagaatgtatccaagattctcctctttgttcttggcttttttgttctttaaatttctatattccaccctttgataaaatgatacatcaagactaatacattacgagaccaattatgtgccactaaactca

SEQ ID NO: 4711 - DNA, 353 bp, Zea Mays
cttgatccttgacttaaaccacaacagtgcaacacaaatggaaggtcggtcgctgactgattcagctaggtgggacccagtcagtggcgtggggtggcactagggtgtggctaggctcgttcacacttatggggatagcggcatggccagaggtggcctgcgacgacatcaactagcaatctatactacttattaagacaacaataatagtctgccttttacgttctgccttcccacaatctgcaccgtccatcccaaagccccgttttcgtgcgtcgtccgtccgccgtctcgtgtgcgtcacctctcgtccgccctcccccttccgcacacgcaacatggctccctctgcc

SEQ ID NO: 4712 - DNA, 707 bp, Zea Mays
ccatttaaacacatgggaaaagaacagacagaaaagactactcggtgactacacctcgactcagattgggaaaaaaacatgtgttttctgcataactatgtgttttctacattgtaaacaaaactccatccagtctgtaggaagggaaaaaaaaccgaatgcataactgctggcaggaacaaactttctgaaaaaggcaaacggactaggataccaatttcgtcgccaatactaatacatcgtcgaaaaaaacaatcagaacaaacagggacgacctgtcctcgacctcataggcgtattcattggttcattgtggttcagtctgatcatttctactccactttgacccttctatatataccttcagcgagacttgccttaatgaacaacacggacatctgttgtttcaccatccatccatcaccacgcaattgctgttggccgattcatggggacaaggcttctctattttgctcacgtgaagaaaaacttgccaccaaccaagcattttctcgtcagtattggtacaaggtatattttcgcgtgcactgtctatgaccatctgaccaaacgagatagccggctcagcgcgttgaacaaaagatggttcagctttgcagccctgctcgcactgaaagaactgctgagcatctgctgctttggtagactacctttgcttgcccaacctaatccctattgcagtgcat

SEQ ID NO: 4713 - DNA, 590 bp, Zea Mays
gtcgacgtggagggcattctcgacagcgttctatgacgatgacgtgatgttctcagtgctccactgcggtagcgtttgatcgaccaagtcagtgagcaactggagactatgaggatgctagaacacaaactagagggggctaaacataccggaggggctctagccacggcgaagcttctcatggcggcgatggtgaccaactccagggaaacccgaagcgtacgagctatggtggatgagaggggctgtctgagggtgggttggacgcgtaacagagaggtggagcaaggggaacactctatctaaaggagctgattgcttgcttcgcgaatttgggatgagagtgcctacgacagtgatgagatattctcactgggctcgttcaccgtggcgcgcatgtagctcaatgatttgggtacttgtttcaccgtctgccacgctcgctatgacagggtgaagcaaagctacgcgtggcacatcatgggcgaccaacggatcaggatggtggtaattccaccacgacaccgggcaagtgggcattgcgggtcgaccgactccgtgcccaagttctcccctcgccgatcttttca

SEQ ID NO: 4714 - DNA, 839 bp, Zea Mays
atgggactgacttgccaccaccatcccttccccaactgaatcgcgagctccatggcgccccggctggattaccgcgacccgtgacccggtcgtccctatctcctctcgccctctatgcataagtactctatccccctgttccctccgctaatccacccgagtgtttatctcgaccttgaaccgtgggcaagaacgcgggggaaccatcaccgtcgtaccgctgtaccggtggcacttccgttcgggcctcggtttggcggggaaaagcactaacgacacgcgtgtgatctagccatagcttcgcgtagtgtgtggacggccgggcaccgccgcaatttctcgctggtggtgaagctgcaccgccgtctgcctggtgtcgtggttgggaggaaccactctaagaattccggtgagaaccatctgcactactaaaccatgtcctcaatttcgtgttgcgtcgtttaatttgagtatggcggtgtggagcgccggattgagatccctccagtgaggtcgccgccgtggccaacgcgttgccgtcacggcgttggggggaaggaggaattaggtccctggccgtaggatttgggatggacggctgggattagaagtagcatttaccccttcgcgtattgaatccaagcctttggcgcctgatcgagtggatggggtggaatcgtgttgagaccgtctggaaccgtggatgccgcatccaagggttgtgggttatacctgttcaccttagggggaatctaatcccgatggttgaagggcgatcggacggatctggttcatcgataccctttcgggtgtgtagtattgctaaagagcccctggat

SEQ ID NO: 4715 - DNA, 824 bp, Zea Mays
tagcctagatgcggataatgcaacaaatggctgatactatggcggatatgcacgcgcagatgcggcaggaacgccaagagatgcgccaagagagaggggatgcgtcaggagaggagggggcaacaacagcaagtcccattgccaccaccgccaccaccacttctagcccgggacaagcgccgggaatttatgagccacaagccgcctaccttcgccagctcaccagatcctctgcacgccgatgactggttgaagtcagttgagaagatgttaaacatcgcctaatgctttgacaaggagaaggttctctatgcttcttgtcgcctgactggtcctactgctgattggtgggattcttatgttgctacccatgatgctgctgacactattacttgggggaattcaccacacagttcagaaactaccacattcctgttggactgatgaatattaaaaagaaggaatttctgtcattgaagcaaggcaacatttctatcagcgagtatcgtgacaaattcattcagctatcaagatatgtttctgatgaggtggctgatgatgaaagaaagtaggagcacttcacaaaaggacttaatgggccactacagtatgcattggtcgctcataccttccgatcgttttcagaggctgcttgataaagctctagctattgaacacaagtgtgttcaactgggagacttgttgaggaaggccattgcccagaggtagggtagcagcagtattcatcctcgttacatgccgcccaagggtacaccagcttgtccaggaggaggaccacacccagctcagtatgctccacaggg

SEQ ID NO: 4716 - DNA, 310 bp, Zea Mays
taagaagtgcactatggttcatatatgcttgatatcacagtagtaaaaaacatgctctaggcactcgatgaatgaagatctttgttattgtaatttggttcataaaacatgatgtgatgtaataagcatgttaaaacagtaaatcatgcaattttccaaggcaacaatgactttggacttgaaccaaccgttaacatggatgtgcatgcaaggaagagagagagcaaacaaaggtgggtgtcactgaacttttgtgaatattggtcttcagtctagtgacatggcgatggactccttagctcctaacctc

SEQ ID NO: 4717 - DNA, 949 bp, Zea Mays
ggagaaatcagtaaacctaacccgcaaatcaagaagggggtaaatatgacatactcaagggtttaatcagtaggaacaaaacccccctctcaaccttccacaagctcaattctttagggggaagaacgcccatgtcggcaagcactacaaatcagattcagatatagaggatgtgtaattaccccagaacgagagttgattgttgggaccaacgagaggaatgacggctaccgagggcccttgcttcttccttttgggttccatggtgctcctcgcaagcacaactaagcacaatactacaactgacgggtggattcagaggtggaaatcgtagcggacaaagttagggttttcaagcggatcgaacaagtagacaattatatagtcattgggatttagcatgacgccattcaataaacgacctgaaccaggaacgacatttagatcaatttcaaacaggtaatggacacaactgcactcgtactcaataaggattcggctagacagcgaaaaactcgacaaatgacataataagatatcagtgaaaaatcaaccatattactccattgttccataagatttttttacaccaaaaggaaccagtccattatggactgactcatcagcaaaatacaccaaactagacttctactgctatattaccctacttctaccactacattaccctacttctactactattatagtatactacttaagccggtggcgcattgccaccagcacttttgccactgttgtcgctgcctttgtcgtcgcctttgtcgtcgctcttgttgtttccctcacctcctttgtctccacccttgctgcggcccttgctattgccgtcaccgcctttgctgccacccttgtcgccgtcatcgctacacttcccctcctcttccgactcatccaagtcggcgaggcccgggtgctccatgaccttaag

SEQ ID NO: 4718 - DNA, 713 bp, Zea Mays
gcatgatctagtaagaatttatgagtgattgctatagcaaaattatagctggtataaagggctacaaaattgccacagatggattggtgagtgtttgcacaaaaattcgagatcggggcgctgaaacctgtcggtcagatgctttgaataagaattcccgtggtacaatgccctgaacatatcccctgtgcactgaatgtcgccaccgacgatctccacggttggattcacgccgccgttatgattcgtgctcgccagtgcccggataacgctcccaggtaaaagatcctggtgacggataaactcggacccgatcgacggggaattcaccgcacccactcggattactgtcgaccggattggtcctcactggcgctggccgtttaccgaccatgcgccacgtgcccgagcatcttaccacatcgcagttagtcgcgttaagcgtatccggtgatcgccgaagagcttgccacggtaattgacaccaatcgcgcacgccagtgacctcctctttctctgaccgccgcgcgtcttcgtccaattccctggccaccgctcaagcccactataaattatgcatgcctcggctccgttaagtaatcaagcacctgatccagcaacccgtgcctcgaatcatccactagagtccgccaatttgggatttcccccaaatcgatttctgccaccgtagaaacacctcgccgtggctagct

SEQ ID NO: 4719 - DNA, 520 bp, Zea Mays
cagacctgaggatggctgaccacggtggagtgtctcacgacggtgacttcgaccgatttgggggaagtaccgaattcgggcgctatggtgggtaatcgggggcaaggagcggtgctcggggttcgtaacaagttaacggagctagctgtgcactcaatttatagtatccgtgagtggtggctctgaatttggaatagggaagctgacggccggagcaaggtgagtcaccagagttcgcataacgtggcattcactaggaaaaaggttatgaccgtcacttggttatcctccacaacccacgacggcatggtagaatagcttaaggcatgtcatgaccgaggtaaacggcggcacgacgatggcggtcgcgcggccacatcgccggtgcaagtgggtacggtgacgccggctcaatccattccccctctgatcttttcacgtccgtagtaatatcatgcctgagctatgcacgaatcgtggcggacagcacgggcgaagttcattgaatctgatcttgttc

SEQ ID NO: 4720 - DNA, 528 bp, Zea Mays
ccctgctccaatcctggaggcgataggcgtggttttatccgaagccatctgccaggggaaaagagttactaccatgcacgtgccaaatttttttcaacaagttactttattcattacacaagttcattacagcatacaactaccataagttcattacacacgagtgctatctagggtactcccaaactccttctctaaagtgtccccaaattccttgagaaggtcatcaaggctagctagggacatttccttggtgtcggacgagttccctatcctggtaggaggtagggctggaggggcttcttccttctgctcagtctggcatccttggcttctggtcttcttgcagatttttcttgcgggggcgagcttctttagcttcttgtcgtaatccatcttcagagtttggtaggcctcacaggtgttggtttcctcgccttccgctatctcgagactctcttgaagggacgccttttcccttgtaagttccctgacttgttgctccaggctttccacccgggagtttag

SEQ ID NO: 4721 - DNA, 331 bp, Zea Mays
agctggctggcaggcaggcaactccaggccacggtgccaaccaaatgaaccaatgccagatcaaaattactccaagaggtggaggcgtggagctgtctaatcagacatataattttctcttctagtaaagcattagcactgcatacgaggtctgcatgcagtgatgcacattcgactttgacaaaaaagacttcaaacagatttggcattgcagttgcagatcgacgacgacattcatgggcatcccagctctggctacaagcaaaagatcgtcactcgaaggactccgacgccatcatatgcccctcgtcgctcccgccgcggcgcgccg

SEQ ID NO: 4722 - DNA, 498 bp, Zea Mays
gttggcaagtgccaacatttggaaaagatagtgtatgccattaccatggcttcgcgtaagctaagacactattttgaggcacacaaaatacgagtcacttcagatcagggtcttggagacttattcagaaattcggaggcgtccactagaatagctaaatgggccgctgaactctccgattacaacatcaccttcgagcccaggacagcaattaaatcctaggttttggcagacttcatagtagactagacagagcctttggagccacagccgtttagcgaagacattatctggaccatccactgcgatggggtgtggtgtcacacaggcgtcgacactgcagcagttattacatcacccacatgactcaaatacagatatgtcgcgcgtctccatttcgcactagtctaagaaaaatgcacaaataacatcactgaatatgaagtcgtcatcttaggccttcataaactgcgagccctcggagtgacaacttgcatc

SEQ ID NO: 4723 - DNA, 499 bp, Zea Mays
cactggtaagaaatgagcggtcttggtcaatctatccacaataacccaaatggaatcatggtgcctagaggtgttgggcaatcccacgataaagtccatgcaaatgtcctcccatttccaagatggtatgggaaggggttgcaaagggcctgctgccttcaaatgactggctttaatcctttggcaggtgtcacactcggatatatacttggcaatttccctcttcatcctggtccaccagtataaggatctgagatcatggtacatcttgttgctaccagggtgcatggagaatttggaaaggtgagcttcatccaatatcctcttttccgagttcagggtccttgggaacaaccaatcgatctccaaaccataaaatccccttgctgtcctgacggaagcacttgtatttctccgccttctgcttgatcatttcttcgataacctgcacacccttgtcttcaatctgtgccctaactatttgctcatgcagtgtggg

SEQ ID NO: 4724 - DNA, 733 bp, Zea Mays
agttcaattagctgggccgataagaatccatagcacacaagggtgctgaaacaagggcaaggagggtatgaactaacctgtagacgtctagccacggcgatctctctcacggtggcgttctgaccgatttgggggaaatgagaaattgaggggctctggtggatgatctgaggcaagggctggtgcgttggatgcgtaaatacctagcggaactcacgggggcagcaatttatagagttctacagcggtggcgtccaatttgaagaaatcgcactggcggccgagagagaggggtgagtcatcatggcgatctaccgtggctgtcactgggtaatgagttactgcggtcaatgggcagtcactacgactcgcgacgacgtggtaagatgtcctaaggcgtggcgcaatcgcggtgaatggtgtacatcccggtgacggccgctcagccacgtcgccggcacaagtggatgagcgatagagcgcaacagtgcccccaagttcatccacggcgagatctttttgccccgcgaagttatccatgcgctactgggcgtgaatcgcagcgctagcgcgaatccgagcgcggggttgccggcgacgaggtgcactgcacctgagatcttattcagttcactgtaccatcagaatcctcatcagagcgcctgacagagcaacttgagagatgtttttcataaatttttgtgtggcaactccctaatccatctgtaacaaa

SEQ ID NO: 4725 - DNA, 812 bp, Zea Mays
attcagctcaaacacatggttcaacctgacatttgaactctgtatatcccagcttcttgtcatctctgtccttgctgagtactttccaacaattctcattgcctccgcttctgcttccctgacgaaggtggccacatctcgcccctgcagctcaatagcgaaggcggggctcagcaccatcctgttctccaaaaagggcatcaggcgcagctttactgtacccaaatcccagtcatgcgcaagtggccataccccacacacaataaactcttccaccaagtcgcgaccgctgctcatcctagccgcgtgccaaagggcatctttgcctgaatcctcctttttcagcttaaactacgggaaagcgataaagcagtaagagcacaaaatagacgaaggcagcccaggaacacgatatagtagtaagggaaaaccctaaaccctaaaccaaaatcccaccagttaccccattattcttggtgcatggcacaatctccacaacttcacccgaagtcttaccagtcctcggcatgaaagagcaagtaccaaactgtgaaatcttgccactaatcacctttttctgccaatggaaacgataattcttggtaaagacctccatcgagggctccccgccgcacgaagtcactgcccacacaaacatcggcagtggcaccatggcattcggtgtaagttgatgaatccaaacttcgatgcgtcgcagcacttcgatgacaaaccaatgtgtgggcaagcgaagtccgacagtaaaaacgcttcaaaaacaactaacccccctacggctctcggacctcttc

SEQ ID NO: 4726 - DNA, 358 bp, Zea Mays
ggtgatgccaacacgactaaccgcggcgggacacgatggccggaccggccagtgactgggttcacccttccccggatcttttcaccccatcccggtgttatctatctctcccgcggcacgaatctcctaggcgagcatgaattgcggtggaagatcaccggcgtcaggttcacggcactggagatctttctagcaactataccatgggatcttcgttagtccctgtgtccgagcaacttgcagggcctcattctctagtttttgtgtgacaacacactaaccagcctgtatcaaagttgttttgcaatgtaccagctgtaaccttgttacaaagaccttgatcaaacatccactgaat

SEQ ID NO: 4727 - DNA, 1322 bp, Zea Mays
agtaaataactgtacaggtaaccctttggtcataatatcagcaaactgaattgacgatggaacatggagcacccagacctgtcccaaagcaaccttctcgcgtacgaagtggatgtcaatttcaatatgcttcgtgcgacgatgatggacggggttggcagtcatatagacagcactgacgttgtcacagaagacgattgttgccgtagagatgggtgcatgaagctcctggagcagctgatgaagccaacaagtctcagccacagcgtgcgcaacaacacgatactcagccttcgcgctcgaacgagaaaccgtagtctgtcgattggaggaccatgagactaagttgtcgccgaggaagacacaataccctgaagtggagcgctgagagtctggatagcctgcccaatcagcgtcggagtaggcagacaaactcgtaatgctgccggtgccgatgtgaagtccagtggagagggtacccttgacataccgcaggacccgcttgagcagggccagatgaggctcgcgtggatcgtgcatgaataagcacacctgctgaacggcataggcgagatccggccgagtcagcgtgagatactgtagagctccgacgagactgcggtattgggtggcatcggccaccggggtgccatccgtagcgaacagcttggcttgagtgtcaacaggagtcgccgtagggtgacactcagccatgccgccgcgttggagcagatccgcagcatactgacgctgggagaggaagaggtcgtccttggaacgcgtgacagagatcccaaggaagtggtgaaggtccccgagatctgtcatggcgaactcggagtgaagaagctcggtgaggcgacgaagaagctgggtcgtcgaggctgtcaggatgatgtcgtcgacgtagagtagcaggtaggcgatgtcagcgccctttttgtagaaaaaaagggacgtgtccgaagctgacacagtgaagccggatcgctgttcgaagctggagaagcgctggtgccaagcccgaggcgcctgcttgagtccgtacaaggacttttgcaggaggcacacgagatcgggggcggccgagtcgacgaagccgggcggctgctcacagtagacggtctcgttcaggtggccgtggagaaaggcgttcttcacgtccagctgatggatcggccaggagcgagaagcggcgatgctgaggacgactcggatggtaggcggcttgacaatcgggctgaacgtctcgtcgtagtcgatgccgtgccgctgggagaacccacgaatgacccacctggctttatggcgagctagggagc

SEQ ID NO: 4728 - DNA, 448 bp, Zea Mays
tctaggccgagtatgcaacaggagcaccgatgttcgacaccttgtctctgtgtatcatctcgagccggctcaccaagtccacagcaggaattcttctattggttacccgggttgaatcagccagacctcgatacagataggccggatatgctctgtctttcagcggctgaatgttcttgaaaacaaagtcagcgaccacagcttctgcagtcagaccccttttccttcaacaatccaacttcagctagtagagcccctgcctcagccacctcctggtctgtgggggattcggtccagcttggagtgcgaacatccggctgtctccctaaccatggggggaggtaattcctatgattctccatgatgaaccattccaggcgccatcccttgatgttgtccttgagtgggatgtcgaggtagtcagtcttcctcccacggcgcatctcca

SEQ ID NO: 4729 - DNA, 492 bp, Zea Mays
gactctcctaccaaaaaaggctgaggctgtggaggtaaaggattttagaccgattagtttaattaatagttttgccaagattatcaccaagattttggctaataggcttactgaaatcctccctaaattggtctcccccaatcaaagtgcattcattaaaggaagaagtattcatgacaattttatgatggttcgagaaactgcaaaagctattcacaggcagaaaatttctagaatcttgctgaagttagacattggcaaggcctttgactcagtttcttggcatttcctccttgaagttcttgaacatgtggtgtttggtctactctggcgtaatctaattgctaagctgttgtgttcctcctctactcgggtgttagttaatggggaacctggagacctcatttgtcaccagcaaggcttgcagcagggagatcctctctccccaaatgctctttatattagtgatggatgtgctgaactctctttttt

SEQ ID NO: 4730 - DNA, 954 bp, Zea Mays
ttcgagcagaatgtccctacatctagccttcggtggctcgcactaccgatacctttgttgctcgatgctcatagtagggattataagtgggttacaagtagatgagagagggagggagggctcctaggtctcttatgtgtggatgggcctaaagacttcgggactagagtcctacactaagccttggcttcggcctctaggtcttcaagtctcattgggcgggtgcggttgcctttagtcaagtgtcttctattctgtgtgcctctcccattcatcgtgaccaccctcctccttttatgggccaaggtaggggtcggccttcggtggctcccttgaggagccacaatatcgtggtaaaaccgtgtgttttacctaggcagggccatgttgtccgtatgcgtcttgtcgcctggtcgtccctattcatgctcattatgatggacgacatgggcggtgtggggcctaggtgtcatcattactacctctacgccacatcgaaccttggcctctgtagcctaggtctcggcgtggctcgtcgcgctgcgagttctacggacagcctatgcactcaagcctgggctcgataggtcatgagtgcgccacaactcgaggggctcataggtcataagtgcactgcaggccgaggggttgcacaggtcatgactgggcggcggactggccctctactatggctcgatgctaggcatagttaatgcagccgaccacttatggcagaccaatctcgggccaggtgaggaatccactcgagtgggttcccttcgtcttgcctggctcccctctgtagctctgccacgcccgccccttggctcggtgcctcggggtttatctagggacgggtgcttccgaggtagatgattcccctactcccttgctaaccagtggtccacagtagtttggggtccttacccgagcgctctctctgaccggtggccc

SEQ ID NO: 4731 - DNA, 420 bp, Zea Mays
gttttctccacttcgtcacattgcgagtcttgccttaactttgtccatggattatgcttttcatcattatcacatttatcattatcacccctatatcttaccttgatgtttatcttataccagcctttaaaatatcctcttttccatctcaatctgagcattgtactttacctactttcccttggtcgtatcctcttctttgtcacctatgagtttttaactctatcctttgttgtgtttttgtttgttatttcctttaccattctcatcactctatcctaccttgtgattacattatgtttgttatctaaaatctcgagtctccaatctcaatttgagagcggtgttttacttcctcacccttggctatatcctctactttactgcgtgtaagcttggacataactccattctttgttg

SEQ ID NO: 4732 - DNA, 583 bp, Zea Mays
cggggtgaccactatgccctgctaacggagcaatcggcctaagtcggtaacgacttaagacgatgcaacatactcgcgcttacttaactcggggtgaccactatgccctgctaacggagcaatcagcttaagccggcaacgacttaagacggtgcaacatgctcgcgcttacttaactcggggtgaccactatgccctgctaacgaagcaatcggcttaagtcggcaatgacttaagacggtgcaacatgctcgcgcttacttaactcggggtgaccactatgccctgctaacggagcaatcagcttaagccggcaatgacttaagacggtgcaacatgctcgcgcttacttaactcggggtgaccactatgccctgctaacggagcaatcggcttaagtcggcagcgacttaaagacggtgcaacatgctcgcgcttacttaacttgggatgaccattatgccctattaacaaaagcaatcgatttaagtcagcaacgacttaaggcgatttcacatgcttacgattactcatatatgggtgacctctatatcccgaaaacaagtttcaaaatcatcacaca

SEQ ID NO: 4733 - DNA, 739 bp, Zea Mays
catatccttgcggtacgcgaagttataacagccaaaattctcatgaagcccatcttctctggccttcgtttgataatgtagctcatgcactcggcagaaagcttcagcatttgggtctattccctggcttcgaagggcccaaatgaagatgttgagcctaacgatagtgttaggagttagctgatgaagataaatttcataattatccaaaacttccccaatcatctcatgaagcggaaaccgcaatctagctttgaaaaagcttttgaaaactactacttcgtcatttttcggctctggggtggtttcttcgccggcaaaacgaagaagcttcttccctgtctccctgaagtaaccgagctccatcatcatgggcacatcgacctcagagacagtagatttttcaaaatcaaagtggctgggctttgctgggattagagtgttatagtcttcctcttcatcagcattttcttcctcaatatcagcttcttcagcttcagcagtacgtgcatcttcgtcaatagccccctctgtcacaaccaatcccgattgcctcataacttcggaaatcgaggctatctcggtggctttggcttcctctccttcgcgggtcacccttgcagttgagcgtactctggccatctgatgttgaatctcttacgagttttacgaagctggtgacttttacagttttgacgaagatttttcttttgccgaagctaaatcaaaatgatgcttc

SEQ ID NO: 4734 - DNA, 903 bp, Zea Mays
ggaattccttcaagcagtcctgccagcaacggtttggtcctccactgcgcagcaagcctctcagtgaattggcccggcttcccttccggacaaccgtagaagactatcaggagaggttttgggaccttcttgcccacatagtgcccctcacctaggaacaaaaagtccagctattcactgcaggcctcctagaacgcatcaaaattgatgtcgagttgatggcaccatgggaccttaatcacacactaagtttggcgcgcgcatatgaacgacgttctcaagtgcttgatggcaacgtcatagcagcacccaccaagccagtgagaccgccccaacgaccatcagttccaatcccagcaacatagccaacagtgccagccataggcaatgcagcgccgcaacgaccattcaagaagctcacacctggagagatggcagaacaccgaaagctagggctttgttacaactgtgatgaacaatatgttcgtggccatcgatgcccccagttattctatttggaagtagctgacttcgaagaggatactgccatagaggaagttgatgaggagccagaaccagttatctctctacatgctctgacaggcatcagattagaggacaccatgcagattcaagtaaaaatgaaagacaaattgctcactgcattactggatacaggctccacacacaattttgtcaacctcaacactgccttgtcattgcaattggaagtctgctcaagccgaggtaaggtagttgtatcaaatggcgacaagatcgactgtcatggccttgccaacaatctcagactatgcgtgggcccagatattttcaccatggatgcttatgctattccactagattcctttgacatcatcttaggggttcagttcctgcgcactc

SEQ ID NO: 4735 - DNA, 887 bp, Zea Mays
tgaattttcagactaacagtgaactaccaccaacttcaagcccaatttcagacatgattcaatgactttttgtgacaacaccttatagcaaagttgtagttggtatagtgctctacaagtttgctacagagctttggatgagttgccaagtaaaatttagagaaaatcgagcctcaaatctctctgtcagttcatctgaaaggaactcgccatggtacagtagccgatcggatcagaacaccagctcagctccccgccgacgaccttcgccgcgattcgtgctgccgtcgtccggattcgcgctcgcgacttgtggataacctctcggggtaaaagatctccgccgccgtcaagctggaagccaccccggtcagccacggtactcctcccctggctcaccgctcgcgggtaaagttgctcaccgtcgtcgtgccattgtcgttgtccaccgcgtgtcctaaccacgccaccgcatcgctgtgactccctctaaactccccgtcgaccaccggagttactgccacgacgatgaacacgtgttcactgcactagcgttcttcctcacttccgaccgccgcacatcaacgccaaaattcacgatcaccgccgaagagccctataaattgagtccggactccgctgcttcatcacatcccgcacctcaacaactgagcactcgaatcgagtacgccgcagaactaacgcagtccccaaatctccctctcctctgttcttgctccgccgtgaagaactccttcgtggccagcgttcctctggtcagtaattatcaaattactccctgttttagttagtctttgatctcctattgctcctagttgcggcaatttggagtttggccgaagcccaacaccggaacgcacccgtgc

SEQ ID NO: 4736 - DNA, 650 bp, Zea Mays
ctgcacccttatgcggcttttgctcggatgtgtcgtgtctcgcacttattgtgcttttgtctggctgcacccttaggcggcttttactcggacgtgtcgtgtctcgcacttattgtgcttttgtccggctgcacccttaggcaacttttgctcggacgtgtcttcgttgaagacttcacaccctatgggtgatgttgtgcacttattgtgcttttgttcggctgcacccttaggaaacttttgcttggacgtgtcgcacgcgaaggcagtctaggctgccaattgcggtgaatgttttgtgcgtcgaatgtcgaaggccgttgccgcagtcgttttcgacacctgtggtcttggtgccagtttgactttgcttttgtttggggctttgtggtattatattacatggcttcgcctcgttaaaaacctcacccctgggaggaaaagagtgcgggcctaattgacattgtttcgagagttacaaaggcactcgggccttgtgacttagacgaagaatttgggtaggttatctatgttccacgaatgctctaggtcttcgccggatggtgaggtgagcctgtaagcatttggtgatgttttggtcctgaccatgttgggcccctctaatttgggttcaagattgccacgagact

SEQ ID NO: 4737 - DNA, 277 bp, Zea Mays
aggcttgtgtgatggactcaatggagtacaggtgcaccaggggaatgaagtgacaatacttgatgaatcgatccaccaccgtcaagaggatggacttgctgtggaggcgtggtagtgcttccacgaagtcgagcgcgatgtccgtccagacgccctggggtacaggtagaggaaggagaagacccgccaggtggaagtgctctgatttgtacctctcgactcttcgccacctcgaccatctcttgcccccgcgacaacgttacttctctttgtcatg

SEQ ID NO: 4738 - DNA, 1442 bp, Zea Mays
ggaaactggtgctttatacagtagagatttgagcataaaggtgttaactgctaccaatagtccttgcaagaacaggtgccttctttgaacaaatggaagcgtgttctatctctaacaacaatttctctcccatatactttggatattagtttggtaacatgatggcaatcatggcaaactctaaggttcttgaatatccgaataggcatattgtcacttatactaatcaaagcaaatgcaattgccagcttctcactatgccgactaagagcaccctccttctcttcttcttcgatgtcaagcaaaacttccttcatgtctgggatgtaaccctcctccaatctaattctagtatcaatctcataccattttgacaaaatatcttttatgcgaggatgagagagatctccaacaatgaattgatgaataactccattaacctccacagtgctacaaccaggtgtcttgtcaactcccttttcacgcattaggtgcctgatttccctagcagaagcatgcctacctgatgcagcataaatgttagatagaagtacataagcgccacttttgtcaggttccaacaagatccaatgcttggcaacatactcggcgaattccacattcttgtgaaatctacaaccagccatcagagctccccagatcaaggcatcgggttccatgggcattttctgaatcatctctttggcctcataaagaaagccatttcgtgccaggaggtctaccatgcatccgtagtgctcaatctttggtttaatgccatactttctcaccatcgaatcgaaaagctctcggcccttgtcaaccaaccctgcatgtgtgcacgcacacaacacaccaatgaaggcaatgtcatccggtctgatacctgagctctccatctgagcgaagagcattacagcctccgaacctcgtccgtgcattgccagtccttttatcatagtagtccaagccagcacattcttgtactgcattctttcaaaaacgtccattgcgagctgcacctcaccacacttggaatacatatcaaccaaagcagtgccaaaaaacaggttgatcttaatgccatgagccttgaggtaaccatgcacccacttcccctgctccagtgccccgtgctgtgcacaagctgcgagcacccccacgagcactgtgtcatccgggcggacatcctcagcctgcatccgcgcgaatatcctcagtgcttccctcccatcaccggcctgaacatacccattcaccatggcgctccaagacacagcattcctcgcaggcatttcgtcaaacagtgcccgggcgtcagcgagccggcccgccctcgcgtaggcggtgatgagggtgttgaacgtcgaggcatccactgcagcggccgtccgcaggaggagaagcccgtcggcgaggctgccgaggaagcccgcgtgcac

SEQ ID NO: 4739 - DNA, 327 bp, Zea Mays
ccgcccgtggtcaggcacctctggtgcccctccgaccacgccgaggacgccaccgaagtcccgagagcccactcttgcttaccaaagatccctttgcctcaattacgtcctgagacgatgcctcgacctcaccgaagttctgcggacgaccgtcgtcatggacaagtgatcccacgcctcccagacgaccggcgaatgtcgctcgaggaccttcatcgaccccgcatcctcattcttcggtcagacttgcctctgcgccaccgtaattcgccctcgtgctcgcaggagtcctctgctgccatcagcctgaggtagacgaagaccccc

SEQ ID NO: 4740 - DNA, 471 bp, Zea Mays
ccttaatccatcatggattcgcccccttcatatgtggaatcgctcatcggagcaacctctaccccaaccaagctaccctaccactgttctcccacctttggccatcccgccccaactaggtaaccaccagagtgttcgccacgccaccctcgatctcactagcctaactcggctgccccaaacccctaggaatctcctggcgcgctcgccttcggcgatgcctcgctgcgacacgcaagcggtcacgcccaccctaacaggagccaacgatcattcatcgcgcctcgatccccaccgtccaactcagatcacgtggcccagatttaaatagcccaaaatagatcttagccactcacatagataccatggcccaaatcacccaataccccatttgctgagtttcgttaaatccgagccatagatcgagatccaatggcccacgatgcttgataccccttcagcccatctttt

SEQ ID NO: 4741 - DNA, 764 bp, Zea Mays
gcgataaatgcctggccgccgcccttaccgaatcgcgctaccggtcggccgctcccggcggaacagaaaacaccgaagtccaccgaaagccatggtcttcaccgcgccgcgaagcccgcgtcccgggatcctctccaggcacgacccggccgcccataaaggctcttcccgagactcgttcttccccctgctaccctctcgcgcctgcgccgagccaaaccctccaccatcccgccgccagtgagacccggtcctgggtgaagtttccgccgcatgctctgatcgccgcgccaccgtagccactgcgcgtgcgcatctgcgttcgactgggacggaggggtctgcgaggatcaccagtatacacctcttcgggattggaacctaccgtggcggatcgtgggcggggcgctgtacaatttcgtaccggcactcctgctccgccgcagaaccctgcgtcaccgtggccaggcaccatcttggtacaattgccggtgagtaccctcaaaccatgttcgcaatagcatgatcatcgcgtagtcctatccgatttggttttgtcgctcggggttggccgttcgccgtcgcactcacgtgctccgccgtgtgagcctggcggcggtgactctgctcggagttggtaggaagaagggcttctagccgttcattctttgatggtcggctagaattaggggtcttgggtgtattaaaccagagccgtcgaattggatgtgtgcggcccagatcagaaagcttatataccgttt

SEQ ID NO: 4742 - DNA, 551 bp, Zea Mays
tcatgccacttcgctgttgtgtattatgttcttttgtctgacggtctgttagctttctagaggtactgaccaagtcctgttactttgctgcgaccaaaactctcccgagccaccggcttgtccttctgcgcccgactcagtgtgccaacctgtacttttgtcgacgtcctcttggcccctgatccctagttcctatttttcctccaccgctttccagctttctaagtcccgcatcttttcgcgttttgttcttgaaccgcactgtttgaaaaatcgtgatggcgcccaggaagagaaaatagagtgctgctatgcaggtcatctctccgattgatcctgatagccaactcccttttgctggtaaccatgtttctgccgtttctgaagctgaccttttgcatcttgttgaaattggtgttctaccacctaaggaactatgttcttggcagatctggtggggagttacttttccgacggaggatacccacgaggcagttatttttgtgccttttctcatccggggactggccttgccagtttctccctttttt

SEQ ID NO: 4743 - DNA, 281 bp, Zea Mays
ggatagggacagtccttgatgaagtgtccagacttcccacagttaaagcagcggttaaatgaactgggtaaggcggggaaacgagtaccacgggcactcgactgattgtgttgagcaggggcaggagtgggatggatgaaaactggttgtttgaaaggataggcgggtggactaggaaaagagcaatttgggttaaaaggacgaatcaccaacctcaaaccgcttctcggatccttcagaggatccttcgcccccttcacacccatatctctttgtctttc

SEQ ID NO: 4744 - DNA, 279 bp, Zea Mays
atttaaatagcttccactcatgtatgcaattcggaaattgtatatgttctcccctaaaaatgttttaaaattagagatggtaaacatcacattttaaggtttatctgaaaatctagcaggacattttgtgtttgttgcaaatctgcataggaatcatcgtgcaacattatctaaacattgaactcagaataaagagcgcatgtctaattcatacatccattccacatacattccacacatgatttttaaacacttcgtgcacaatcttattcttgtgca

SEQ ID NO: 4745 - DNA, 344 bp, Zea Mays
accactggatcaacgcgctgcgaggatgaatcgccactgcaacccagatgcaggagttcgtctccctttggatcagaacctaggacacccaccttacgcctagcttgagggactctattctatggagatggacggcagacggaacatactccgctcgctcagcttaccatgtccagtttagaggctccttcaggcctttccggtccagcctaatctggagagcacatgctgaaaacaagtgcaaggttttcgcatggacaatggcagtggaaaaagctctcatcgcggacaatttacaaaaaaaggggttggcctcaccaagatcactgcactctgtgtaatgg

SEQ ID NO: 4746 - DNA, 322 bp, Zea Mays
agcctggtcttgatcctggagcagtggatgtattccttgagttcatctgctactctggaggacctctacctgaagagttgcttccattggtgaaggttaggatgatctcagttgtgtgattaatagttcgttctgattttggaaattatttatggttttcttttgttttgtgcagtgtccagttttggtagcatggggggagaaggacccatgggagcctgttgagcttggaagagcctatgcatcttttgatacagttgaagattttgttgtcttgccagatgttggacactgccctcaggttctatttgcaacagattaa

SEQ ID NO: 4747 - DNA, 639 bp, Zea Mays
ggagggttgaccacgtttccctttccttgatttgcgttccccgaagtttgttggaaatttgatttgttctgctttggataggggcagtctttgatgaaatgtctaggcttcccataattaaagcagccacttgaggaactgggaagggtagggaaacgagcatcaggggcactcggctgattgttctgggcaggggcacgagtggggcggataaacacgggttgcctgaagggatatgtggctggacgaggagaagaacgatttgggttgaagggacgaattaccaaccttgtctgcttctcagacccttgtgatggtccttcacccccatgtctttttgactttacttgtcccaaatttttggcttcaactgatagtgttgtgcttactaccctgctataggtaagatccaaacacgtagccattttgcgctggagccggtcattcaatcccctcatgaagcaattcttctttttcaaatccgtgtccacttgatcaatagcatattgggagagatgattaaacttgttgagatactacattacagaatctcccccttgcttcagacggatgaactcctccagcttcatctgtagcaccccttccagaacataatgttctctaaaggcctgtttgaac

SEQ ID NO: 4748 - DNA, 359 bp, Zea Mays
gtgggagtgggacacagcacactacagtctactgctatgggggagctctgggaagaaacaggaacatgacccttgagtgacgtggtgcttgtcgcgtagctctttctttcttctagctcgtgccccccagaccccagtactgcgaaagtatgtggttggtagtgcagcaggccagcagcggtggtgctatggctgctggtgcatagcatagcgtcaagaattggccatgtccatgactgtctcgtcttaatttcttcccctggagctggagctttgcgtcgtcactcgtcgtcgttgtgtgtacgccaccatgcagctcatcaccacaccaccatgcatctatcgcatcatcagttggg

SEQ ID NO: 4749 - DNA, 429 bp, Zea Mays
cttgactcaggcgagagtgtcgccgtggttggggcctcgttcacgtcgggtcctaggcagggtggagaagactaccgcagatcatcggatgatctttggacggtcaagatcggatctcgacataccggttcgcagagtggccggtgccgtccgatctcctgggaagggctcagattagaaatcgaatacccctttcgccaacattcgatctaaacaatagatctatagatggatggacctagtcgcggtttgccgcgcccttgattcagggcgggggatcacgatccaacggtcggaagcgcatacccattcataaccctcaccaatgtaatcgtggccgtccactcgtgatctggcggccagaaacgaagggtaccccttcggccagtcggattaacaaaagagccctcggattttaatggaatccac

SEQ ID NO: 4750 - DNA, 401 bp, Zea Mays
atttattgaaaagatcatgcggcttgtggtggttaagttcaatcatagagtccccaccgttcagctaagctcaaactgaaatatctcaaaggcaaaattgacgcctagcataagaaaaataatcgggctctgcctcaaagctaaaatatagtacagtagctatctgttcatgtcactgtttaccagttcgtgccatagacgcatctctaaaaaggacatcttatgtaaccaccagcaaataaattgtcagactaaagcacgattctttctccaagttcacctcaacattggcaccaatttagcgatgaagacaaataacttcaagcctttcaatagagataacagataaacattggatgcctcagcatggctacaattttatctgggctgcaaaacaaaag

SEQ ID NO: 4751 - DNA, 771 bp, Zea Mays
aagatatccctcagcatcataatgacccaaaaaagatggtatagaaaatttaatcttagcataagggtcgtcaggagcacgattgttattaccttgctagcggtgtgacataccttctatgttttgatgaagacggcgacgtaggcgcaaatctctggtggccgcttcatcataattaccttcttcatcaaacactgcatcatcgggaaggcgtggacgaggaggtggtggtggtggtgcttttgttgcgtctccaacacagcaagtctgtcgatgatctgggacaatcatcgatccagcctctcgtaagtcttgccaaggttcatgtcaatgaaggcatcatgcactgacttgtggaccgtctcctccatttgctccttcaggagcttgttgtttgcctcaagatcttggtggctaacacattcatcgaagtctatagggatccttgcttcttcttcgtcgcctgccatcgaaacacaaaaacaggaaacaaacggtgacggttatccctaataatttcactacacactcctctcaggtggaacacagaaacacgctctattgtatcttaccaagctcttacaagtgtctgacgaaatacaagcaaaggatggtacaatcggaggctggttcgtgatacttaccaagaggtagtgaaaccgcgattgcaaggtcaaatctgtattgatcagaagatatagtatgtggagctgtaggacaggcacaatatgtatgtgaatgtggaacaaaattgagtgcagatgagcgaag

SEQ ID NO: 4752 - DNA, 566 bp, Zea Mays
cgcatacagaggatcatggattcatggcacctcaccacgtcacataagaagagcagctgggaacgaacaagaacaagggcatgcatacaggtagctgtggggtcgtcgctcatgtactcgtatgttattgtggccatgcatgttgttctctctcgacaacccaaatgcaagttcctggtaattaatacagaaaataaagttacaagattgtttaggatcatggccacatatacccacacgtatactccttaccactggtgatcgaatggtggtcagtacgtttgctcatccatcactcatgcaggtttgagctagctgcaataattagtgcactaacaaacaggagacggatttgctgagagcaatgacaagaacatctcgctggaagatatataatcaaatctcatccaaacaaatcgatcccccgtttattcccaccatttacttgatccccgtcaatcgaatacaaaaagaggtcgtaatcgccttcttcttaaaaagagcacacagctccctccgatccggcctcctccccaccgcactctcctcacctcacctgaccgcgc

SEQ ID NO: 4753 - DNA, 654 bp, Zea Mays
gcaaaccgtgttgtcaggtgctctgaatgactccctgatggtacaataacagaaatatccctgggttcagtcaccctcgccgccggtgatccgcgcgcccggattcgcgccggttgccgtgattcgtgcctggcacgcagtggatatccacggggaggtaaaagatcttgcaggggagcagatgtggtcgcgggggaggcttatcaccacgcttgtagctgttgcgacgtggcaggaccaccgatattgccgtggaaactccggtgacctcggttgtgccacgtcgtggctagttactgtgcggtagtaaccgtagcacacttaagagtacaacctttgaaccattgcgctggtgaacgccacgaatcctttgcgccagtgcacttctccctctccggctgccgtgcgtctcctccaaattagccgccaccgctcatgaatcctataaattgagtgtgccatcagctccgctaggtagttgtgcatccagtgtgtgagctcttatcattccctacagctccccaatttgagacttcccccaaatcggtcgagaacaccgcgtgtgtgagctcgtcatggtcagcgctccacaggtccgatcatgttctcctcgctcttgttctagcattcctgtgtgctcttgaagctcatcgg

SEQ ID NO: 4754 - DNA, 764 bp, Zea Mays
acacagtccatgtattttgcacagttgagggaatgccatccaagagactgaccaattgccactggtcatgtttaggctatacaacctaaggttaccgtcatagtctagggtcaatctcctcatcgtctcatcaccaagatcagaagcttcaaacttaagctggtcacttgccacaaaccgtcctgtctggtcaagaaccccatacctggtactattataggtagtcctaccattatcccatggcatgtggaatggatctggccaatatatgctactagtctcaggaccgttgtaaataagagttaggatattgttagtggcgaagtagaaggcatagaaacctgaatagagcaaacccctagcagaagcagataccaacctagtatctctagtcatcggctgccatggtagaagtgtatcagttggtgagtcgaagcttctccagaggtgacgcccatctgtatccatgacaacaaggttgccgctatcgagaagcatcgcacgatcactgccggacgcggttgtgttggtgctccatatgaccatgccattatagtccacaaggatcaaggcccccttcttgtggaagatgagcctggagcccctgccattgagtggcgcatcacggttagccgtccaggagacagtcttgccagatgcccacgagaaccagatagaaaaggtgaaggcgttggtggccaccttgtagaagccgcaggtgaaggcaccattgggcgacactaggatgggggtggttacatcct

SEQ ID NO: 4755 - DNA, 622 bp, Zea Mays
gactaaccggaattgcgctggccgcggtgaggttgttttcacggtgttcttgagcagatttgggggaagtttaaattcgcgctccctggtgaatgattgaggatggttcttggtggctgggtgtgtgatgatcttgcggagctcacggtggcttcaatttatagggagcgaccgcgagcacaacgaatttgagcggcggattgtgatctgtaaaacggggtgagtcactggtggccgcgcaacgtggcttttaccgtggcggcacctccggcgatcaccggacatgcgaagcacggttagccacgacgtggtaaagcgtctggacacgcgacagatgacggtgatggttcaacggcggtgagaatcttatccgagggatcggtgagcaaggggaaaggtacggcggctagccggagtggtgtccagctcaacggcggtgctgatccttctacccgagatgttatccacttgccacgagcacgaatctagacgccggcgacacgaatcacggcagagatatcgtcggcggtgagatctctacgctagcggtctgatcccaagtctggtactgtaccatggcgaatcccattcagatgaactgacagcccgatttgcagagcta

SEQ ID NO: 4756 - DNA, 715 bp, Zea Mays
gaattagtacaatttctgcatgtttataggtagttcaagtcctgaagtcacaaataggtatatatactcatctgctctaggtcaataagcaccaaacatctaactataaatccacatcctaaatgtccagatacagcagtttaaataattgtgcttttcgcctcctccctgcctctgtaatttgtatataaacaggaaaatcacgtaggctgctctgatgttctaaaaagacaagatcaagttcccaatgaaaacatatatttgctcatccgattaggcaaaacccaggcactctggcaagttcagaaaagaaggtaacatacaatactgcttatttacttgtcagttgctccttaatgttcataggttaaggtcagggtccaggcaaaataataccataagggaggacaaaattgtagccaatgactcattaggagtgtgaaactcaaatttttatgttagctagggtctgcttttataagccttctctgctccctcccgctgaaagccgccgaggtgggactagactgaagcaccacaaacgttcagacctctgtctggttgcgtgggctttatgggctaccaatacgtcgatgctggcccggtccgtagagtctatctcgctccaagttctcgagtccgtttccaccgcagctggctggacacaggccacccgccgtccgctttgtttcccagacgtcaaggctaaactcca

SEQ ID NO: 4757 - DNA, 590 bp, Zea Mays
cacaaaatgattccatatcatttcaataaccggtccagtttacttgttctagacatcattaaattagtactttaatactgtatcaaatgcacatgtttgaccattaatttattaaaatatattggtaaaaggatgataatggcataagatcttgcggtgacttgtttattgatatcattttcatgtaaaaaagctgactacttttacgtttgctaatgatcaaagtttggaaactttggctgcacacattcttggacaatatctctgtacgttctattaacagtacattcatattatttccttgctaattaggatctagcagctttcaactgataacacatgatttcacagctggaggtagaatcagttacacgcctatctcaatttcacggttcatagcacttgcctgttcatggatttcacccaacgagcaatattattggcatcttttgcttcttttcaatttaatttacatctctattttattttctcctgtctgctgctaggcgcgtgccggcattcaagaagttcatttcctcccattcaatccaactgacaagagaacagcacttacatacttagacgctagg

SEQ ID NO: 4758 - DNA, 300 bp, Zea Mays
caaaagttgggcatcatcatctgataacatcaaacaataatgcaccattcgttgttagtacaatctgtaataactcaaattcacccttaactgcatctagaaacttagttgtctcatgttgatcaaatatttttactgccaaaacaacgctttgcttgcttccatagttaaaatgttttgttattgttagtgtatatggattaggcccatgaggcccatgtatgaatattgtatagccaccctctagggttggcccagtaagtgattctctctccaacatggtatccagctaggtttctc

SEQ ID NO: 4759 - DNA, 743 bp, Zea Mays
gttttctaaatggttttataagtgttcttcactgactgaactgcgcattaatttcagagaagcacaggggcctcggagtaattctcctaagacacagagcgcatgcggcgtggatggcgggttagttctgcagaactgcgagggctcttttgcatatcgcatccgcgaaggggtatcgcgatcacacggccgttggattagagattcacggcggggattacatccatttatttgccgaaccggtatcaactggtgaccaccagatccaaaatcagcggccatgattcaaaaccacccagatccgttcatccagtgttcaacggtcctgatttaattacagggaaaggggtatctagcacttaatcggagccatccgcttatgatcctatggctaacggttccttcccagctttccctctcccagcttgggccatacggcggcgccgcccaacggtgcatggtggcgcacccaccgaagaccccggaatctacaacgcacgaccctaattccctaatcgagcgaagctacacgatcctgggtgctcgacgaacatggcaaagtacttaccggaggcagatacggactcagcggcggcgcccacgacgcgaggcggactggcagtcgattcatggtacggcgagcaatccacgagatactgcccactgccacgagcacaggcccaccggggagatccgaagagcatcgaccatgctccacgacccatgcttgaacctcgagaaat

SEQ ID NO: 4760 - DNA, 464 bp, Zea Mays
atggcagtttgggccttagagtgcgaccctctgctgaagaagttaacgccttggttgcctcgctcggggaaattcctgatgatgaacggcaagtccactttgaggtacctttggatcctagtgacgcagaaataagtgctatgcttgatttgctggctgaggactcttctgatgctactcctgctgggacgttggtggtggcgcctcccccagaaactgatgcaaccttggatattcagagacctgtcagtgctcgcccaaaacgcccttgccgagccaatcaacttgatccttctgctgctgagcagaaaaagaaaaagagacatcttcggcgagtatctagtttggatcgggacattggtccttcaattcctgctgctgaaggagtgcctgtgcctgaatttactgatgttgaccccaatgggtgtgctccacctgctgctgaccccaatgggggtgctcca

SEQ ID NO: 4761 - DNA, 792 bp, Zea Mays
gtcgctcgagtcctgctctgctgccgtgaaactggagacaaaaaagcaccgccttctgtccaggacgagcttccccatcccggtgcctaccctccgcaagttggtcagggctgcggggctgggctgcattgctgagaactccattggagtggtgcctcttgttccggaatgattgctgctcccccactgatcgtctgttgcgggctcctctcccgtcgaagctgttgtcggtcttttgccagtccctggtctgttgtgtcactttgtagcccgcctaagtctgctatcaggttgtatgtgtctctgttcgccgtatgtcagtgtggtgtgtgcccctctcctgttgtaatcgtgtgcccaattggtgtctggtcggttcagtcatgagtccagtttgtaaaagttgtactgtgctgtcttggaacgtccgtgggttagccgatccggataaatgcattatcgttcgtaatgctatttcccttgcctccccctctgttgcttgtcttcaggaatccaaactttgcgaactaaactgcttcaaagcgcgctccttcctgccaactagacttccctgcttcctctgcatcaacaccgtgggttccagggggggcattgtgaccgcctgggacagcgtcgtgttcagccttgcgtccagcatttcacgcccttactcccttaccaccacgctcagctcccccctcacaaacacaaccctcaccatcacaaacgtctacgctccgtccaaccaccaagactccccagccttccttgctgaacttgcagacctcctcc

SEQ ID NO: 4762 - DNA, 349 bp, Zea Mays
ctggagggcagtggctgccgtgctatcttcatcatcgtgacctgaatatctgataccagattgtaatggtctcgacttctgagtttgtatgagtgggtagtagggcgaggccttgaggattgagggcgagagggagccgtgatggcgcacgactgagacacaatggggcaaggagcaatactcttcttagattgatctttgctaatcctcttaggtacaaactaaggactttatatagtccagtacaggcgcacataaactgctgccgcccctacttattctctaacaaactcctatctctccttttgatatctaatctaacaaacttatccttatccctctaatcctg

SEQ ID NO: 4763 - DNA, 589 bp, Zea Mays
caaattcgcaaagatttggagccaatggacgcttgaaaacgacaacaccgagcgtcgccacgtgcttgacctcggctggcagtcgggagcacgcccaactcgcgcccgcgagtgccccatgccatggtcggccaccgcagtgccccacctgcgtcgcatgcctacaaagccaaccacaaccctcggttgtactctccgcactcccccgaggccatagtcgtgcaccctcactggaatttcactagagcagggagcaccgccacctgccatcatcgaccaaagccgaccaccgtggcccaccttgcccagctactgtccacccaaaccaaaccgaccaccagctccccctgagtctcgtgaagcttccaaaggcttgagccagagttctacttcacaagagcggcgaaatcgacctcgccgaagtcgaaacttcgctagtgaacgcggacctgcctttgttcaattccttcggtaaaccgcatcacccacctcccgtgaagctcactgaccggtcgaattagactctaccaccgctgactagctagatcatgctccacagtcgagcttcgccgcctggagacgtggaccg

SEQ ID NO: 4764 - DNA, 334 bp, Zea Mays
atcatcttctcttaccgagtcatcctcacttagtgatttttcacctaagtcgtttcttcgtcatagtcatcgatcttttcaacctattgatctatatggttttggatcagttacttggcaaggttttgttggtacggttatttctgaaccttcttatcatgatgctatttcttcatcttgaatggcagcttgcgatggctgaggaaattgctgtgcttgagcataccagcatgtgggatcttgttccccattgtcctcatatctgtcctatttcctgtaaatgggtttataaggtcaagacccattctgatggcttgcactcttgttgcggctt

SEQ ID NO: 4765 - DNA, 330 bp, Zea Mays
cgagccagacgacgactggctgaaaagcgtcgaagctacaagcgatgatctgcttgggctgtattccagagcagaagacaacacattatctgcggccttcgggaaccgtaaaaagaagagattgaacagagttttcgatgccatcgggttcatgtatcccaactaccgttacccgccccggggacaaaaaaggaaaagtgaagattccaggagagatgatgcttcagctgcttcgagtgagcctacgccgaagaggaaaagagtgaaagtccttactcatcgaccatgctatattgaaccggccgtagtgcctgattttggcggtgagag

SEQ ID NO: 4766 - DNA, 1056 bp, Zea Mays
ctgatggaggagggtgccttggaggcgggcgctgaggcattcttggggccattcaccgagttggagtaagtaggtcccgatgccttcaactgggggcagttattcttgaagtgtctggggtctccacagtgccaacaggcattagctggtggttggttgtttgcaaccgagggggcctaaaaggagctttgaccctgctgactgaaacatgacggagtgggtccagctggcttattgaagcttggtcccttaggtggaaacccaaaggatcgaattctctggtgcctgtcttgccgctgagctcggaggacttggaatttcctcttgaggtgacctttttcttcttccctcgccctttccacttgtatggctttgtttgagaggtgcgagaagctgaggaaatcctggctggcgaggatagtcttgagttctggtcttagccctttcaaaaagcgggccatcttcttggcttcggtgctgacgtcgtgaggcgcgtagcgagccaattctgtgaatttgtgcacatactcactgacagatcttccaccttgagttagttcccgaaattcatcttccttgagctgaacgatcccttggggcacatgatgttctcggaaagcagtttcaaattctgcccaggtagcatctctaacggcagcgctgaaggtatcccaccaggatagggccatcccggaaagttgatgagtagccagatgaacacgttggttctcagggcatccgatggcttctaacttcctttttatcgtgcgtggccagtcatcaacatcgagcggattgctggatccagcgaatgtgggaggcttgaggcttagaaaatctcccatcctatcctgtggtcttccaccattcgggcgctgattctccagacttctagtgaggacttcaatgagtcgggtttggttggccagaacatgggctaaatctaatggcagctccgcaggtgcggggaggtgggtctcactcccttctccaccggcttcttcagctcctaggggaaaccttgatccaatcccggaggtggtaggtgtggtttta

SEQ ID NO: 4767 - DNA, 635 bp, Zea Mays
gaacgattggaggcaagggctggttcactgggtgtgtattaacctagcggagctcactaggggcagcaatttatagaatctatcggcggtggcgtataatttgaagaaagcgcgctagcggccggagagaggggaagtcactggtgcgagcgctatcatggctttcaccgtggcaaagcctccggcgatggacggactcactactacagttcactgcgacgtgttaaagctcctaggcacgtggagtatgggcggcaagtggccaacgctggcggattatcacggccggccatagagcaagtgggtacggtgaaccatccagtgaccgggcccgagcttatctaggcgccaagatcttttactcccctcggttatccgctttgcgtcgagcacgaatcacagcgaccggcgcgaattcgagcacgagatcaccggcggcgaggtgcactgcacctgagatattcttcagacactataccatcagaactctcatcagagcgcctgacagagcgatttgcagggccttgatctttgttttttatgtaacaactcacgcacttgtctgcatcaatattgtcgttcaaagaaccagctacaagtttgttataaagaccttactcagttacccactcaat

SEQ ID NO: 4768 - DNA, 572 bp, Zea Mays
ttgtcgcttcctcataagtggaagtctgataacttatttgctaaaagtaacctgtcggaggtaagctccagctaggtggcggatagcacccgctctaatcctaagatgaggagggagcatgaggttagcctatagagagataaacacaagaacaaacaagaatttagagtagttcgggccgccgaagcgtaataccctactccactatgagttgtactgctgatagcttgagaaagcttacgtctaatggagtctttgcgtgaatgcctatgagtcgtcctggcctgaacaactttaggttgctctgctctctaccgagtgtgccctctcttttatagcctaagggaggggttttacatggtgtctgagccctaacaagtgggaccagaaaaacaagtgggaccagaaaaacaaagagatcgctgagtaagagcgaagctggtggaccgagatcttctccgtctagtcttatcttctacccagtcttgttggcatgtggacaaaggctacgacgtaggttgcggcgtggtgagcgtagggagaatacgaacggtgtcgtcgcgtcccccccg

SEQ ID NO: 4769 - DNA, 637 bp, Zea Mays
cacattcagagttcaacgtggttgatttccttatttgtgagatcgaggacacaatattggatggtctccatgctcgccgtcagctgtcatatgctccttatctctgtcacatctttgcgcagctgatcaggcctcctcagttccagggcaccctcgaggcctctcgccttcagttcggtttctatcgtccagcccctgaggacctagtaccagtgccagatctagtgtcagatatccgggctgaggatgagaccttcaaatagttcgagacccagggtgccgttgctgactcttcttcagatgatgatgagggcctggggatcccgccaccgccttctgtgccacctcgctcacatgatcacgaggcgggtagttccaatgttgctcctgctgccccaccagctattgaccctgctctggctgctattcttcagtcacattcacagcatcagactcatctggtagcagagcatactcgacaggcagccatccagcagcagatgtccgaacgtatgctctccatgttttagactatccaggaccgtcaggacactcttcaacagcaactcttggcagacagggcggagcactgggcgttcatgatgcatatccttcagcacactggtgttcagctccc

SEQ ID NO: 4770 - DNA, 634 bp, Zea Mays
gcgggcgtcgcgtctccgacgagaaattctgtggtcgcggaagcgctcctatctccgccaatgccactggtacttccgccgcaccttgacgaagctctctcacctacgcggcagccctaatggcgacggaacgcggtgagccgattcacccgcagtgcccaatctcgcaatccgcgtggcggtggtaggctttggccgttcgggagatggattcggtaagaggagtgcggtgcgcagagacttataccctggtcaaggccatgtgccccgaggtgatgtcatcgctgcgattgtcgcgtccccgatcgccggtcccaaccggtgcgggcgagtggttggggttgggcctgacttgggggcaccgcatgtcaacggctcgagtgacggtgggacgttcacaaatctcccagatgactgaccgcacgggcccaagtgtcactgggacgccagagcagcgcagggagtttatttgttgtcgcgcgagcccgtgagccattgagaagcagcgggcgtgagagcggttgttcagtgggtccccattgtcggtgggcggttgtggagggaaacgggtcaggtgggtgagtgagttgggtcttccgaggaattcacggcccaagcgagatcctcccttttt

SEQ ID NO: 4771 - DNA, 346 bp, Zea Mays
cacagttgaagttggcagcagggttcaaagggaccgctctgaagtccttaccatcagagttgcctgaattcagtatttctgttaaggtgcttcagtctcgagggatcactaaggtcattcgctgcgtgcaacaggttctcgttgaatgtgagcagtgatgctttccatttgctcctgctgcttgggggcaagcaggttctcaagacgccgggaatgtgagcagtgatgccgtgccggacgcgctacaagctgaaccatctccaggtcctccgcgtcgccgtatgggcagagatgtcgtgccagatgagctgcaggtcaagctgtcttctggtgttcgtccccgccg

SEQ ID NO: 4772 - DNA, 468 bp, Zea Mays
gaagatcccaggtgcagtgcacccgccaccggtgaacccgcgtcgcgatccatgctggcgttgtgattcgtgctccgtggcgcgtggataaccgcttgaggtaaaagatcttggcgtcgggatgagctcgggtcctgttcagttcaccatacccacttgcccgacgacgtggccgggcgatcatcgcagtggtggccgctgtccttcgcggttgcgccacgccgtgaccctttcactatgtagctataaccatggcaagcctagagttactgcccttgagccgttgtaccggcgggcgccacaacgaactcgtccagtggaatatcccaccaccgccgtgatcgtcttcgacccaaattagcgaagcaattagccggttcctttaaattgagcactaccatcactctgcctctctattacacactcatcccaccctccgttagcctctttcgtgcaccgtagccccca

SEQ ID NO: 4773 - DNA, 515 bp, Zea Mays
cgccggggtcgtcgcgagatccatggctagcaagctgctggaagctagcgcaagtctgtgtggcaaaacactagcttgcaaggatcaacgatgtgcctgcacagttggagagatcaatgcaatctggcaggcaggaagagatcactgggaggagctgccagttgttctttggtgatgcatgatcttagccagggaagggatgggatggtttgggaggagcgggagaggtatttaacggagggaaaggtggcaaggatcggtcccacaaaaacacaacttaatttggaaggaagggttacttaattagcggtagttatttacttatttcctgctttgaacctatttaatttgtggggtttcttactaactagtactaattcatgttctcaatatctcaacgctggaacagtattatgcaatttctaatacaaatgctacatacaagttaactactactactctggtgtcgagttagctctgtgtgttgaattgttggcaggggtgacgccgattgc

SEQ ID NO: 4774 - DNA, 657 bp, Zea Mays
gtcgacaatgccgacactactttttatcagcttctctctaaatgtcaaaacaataaggtcattccgcacaatcggccagcaaaacaatcaaagtcgtctgtaggaaagaagtgatccgtgtgggggcaaagaattgtcatctactcatatgtccccagggatatcgtggtactttccacctgtctacttatcgccgatgttttgtcctactcacatgtaggatagtgcggcgatgaatatgtattacgtgtatagtctgtttgtttattcggccatcaattacgtgtatagtcacagcgaagaagatgcaatcataaagggtctttatgcattagatttctattagatggctattgtgtttggttgaaagaggttgttgcttgcatcgacctagagttcttatttcaggaacaagatgacttgtgaaatctattttttcttgaaagacgttggtagtataagtgtttttggttcatgaccttcaccgaaaggtaggggcatatgttgaacactaaatttggcagcactaacattgtgggacattccgcgggcaagctcggacggtccagcccccggacagtccggcttgttaacccaaaccgttagggatcaaatcagttcgagtgagagtcctgatgtgttgcgagatcttcccca

SEQ ID NO: 4775 - DNA, 628 bp, Zea Mays
cgggtgcgcttagtggttcttaatgatttaggggcgggtaagttcgcacagtctggttctctgattccgaactcttcacgttactaggtattcacaacttccttgcatctgcagagttggaactcgaggctttgagtgtttatctatgtgtggatcaggccagagggttcattcacgcctgtggtaggaactgtgacttgtgtctccttgacattccagaccgcgtccatgaggccatggagtttgggttcgctggagcgtggttgtgcctttcgccatcacgcagctacacttcggtggtgacctctgtagcactattggtttgccgagggttcaatggaggaagatctagatcgcctgatagatgactttgatgccatcacgaatgttgtgcttggggacgtgtccgtggaagagaattcatagcctctcgtagctttgcttacgatcccttcggtctcgacacttcgttatcatggcatttttgcattgttgacgtgtgtggattttgggtcccctagatgcaggcttgtgccaggttgctttaagagggcgcttttcgtgcggctttcacccatgcaccacactcgtgcgaggcgagccctcgagtctccactcgatgcagaga

SEQ ID NO: 4776 - DNA, 1066 bp, Zea Mays
ggctttttggcggtatattacatggctccgcctcgttaaaaacctcaccccccgggaggaaaagagtgcgggcctaaatgacattgtttgaagaattacaaaggcgcttgggccttggatcttaaataaagaatttacagaggttatctatgttccatgaatgctctaagactttgtcggatgatgttgttagcctgtaagtgtttggggatgcctttgtcttgactatgtatggcccttcccacttcggctctagcttgccctgggactttgttctggcggtcctcacgagtactaggtccccttcgttgaattctcttgggatgatattgttgtcacgccatgctttagtctagacttgatacttgtttagggcctgcaaggtgaggacacggtctccgtcaatgagatgtttggaggttggttcgttggcgttggggatggctgttaggtttgttcgagggatccatgctttaactcttgcggtgtcattgcttcggatccatacatcaggcggaaaggtgtgaacccggttgctcggcattctgtcatgttcagtgcccatatgactttgggtaattggtctgcccatttgccctttttgtcgtcgaggagccttttcttgatagcgctgaagatcttgccattggcgcgttcgacaatgccgttggattgtgggtggtagacagaggagaacactaccttggtgccgatggaattgcaaaattcccagaaatcctgattatcgaactgtttgccgttgtcgactgttagctcggacgggactccgaactggcagaagatgttttgccaaaagaatttttgcacggtcttcgcggttatcgtggaaacttctctggcctcgatccatttggtaaaatattcgacggcgacgaaggtgaatttgaggttcccttgagccgtaggcaatggcccgacgatgtccagcccccatcgctgaagtggccaggtgtgggcgatgagcttggtgaactgcgaaggggcgcctgagcgaggagagaattttttgcatgcttcgcatgatctggtggctcggttggccgtg

SEQ ID NO: 4777 - DNA, 411 bp, Zea Mays
gctgatccttggtgttgatgtaacgcgccttgatgctcccttctgccaagcagtctcggatgaagtggtatctcagccggatgtgcttgctccgttcatggaacacggggttcttggccaatgccagagcggactggctgtccaccctgagttccaccgctccagtgtctctcccgaggagatcaccgagcagtcgagccagccagagcgcctgagtcgaagcagtggacgccgctatgtactcggcctcgcagctggacatgaccaccacctgctgcttgaccgactgccagctaatgaggcacttgccgaggaagaagaggatcccgcttgtgctcttgctagtgtcgatgtcgccggtgtggtcgctgtcgctgtacccgacaaggtgtgcctccccagggcacctcg

SEQ ID NO: 4778 - DNA, 1100 bp, Zea Mays
gtagcagtagtggcacttttgaagcctgaagcaagccggagttgagaaacatggatggctgggtgtattttgctagaagcgggtaaggccaagcgataggctacattacccactctggctgctacctgatatggtccaaagtacttgtagctgagtttgtgatgagcccgcggcataaccgatgcttgtacatatggttgaagcttcaagtaaacccagtcaccaaccgcaaattcccgctcagacctgtgtttatcagcctgacgctgcatgcgaagttgagctcggaccaggtgttggtggacaagatcctgcataatagaacgttcctgtaaccattccgacagctgaccaggcacagtctggtttggagatacgcccagagaatgtggtttacggccatataggacttcaaacggagatgaacccaaagccgaatgaaaagtagtgttataccagtattctgcagtgggtaaccaagaggaccatttcttggggcaagcacttacaaaacagcggagaaatgtctctagacactgattcacccgttctgtctgaccatccgtctgggggtggtaggaagaactcatgcgcagctcagacccggccaacttgaacagatgttgccaaaagtggctggtgaagacaggatcgcgatctgatataacagccaatggaaatccatggaggcgatacacattgggaagaaatagttgagcgacagaggcagcagtataaggatgagatagtggtatgaagtgggcaaacttggtgaacttatcaaccactaccattatacaatctgctgaacctgagcgagggagaccttccacaaagtcaagtgaaactgtgtgccaagcagtaagaggaatggggagaggttgaagtttgccaggatacgccgatctatcaggtttagcttgcagacaaacttgacattgctgtacaaattcttggatgaattgcttcagtttcggccaggcaaacaaactcttaacccgacgatacgtggctggaatgcctgaatgaccgcctatagcagaggtgtgtaacgcggacagcaccctgttttttaactgaggatcatcgcccaaccagat

SEQ ID NO: 4779 - DNA, 417 bp, Zea Mays
ttttgataaagctcatgacagacattcatggactagaagagatatggagggaattactgtagaaggggcaaataaaggccataatccaagtagtgatgccgaagatgagccataaaataaaaaggtgagtcatgtttgcttttgtcatcgtactagatttgctctgataatgtgaaatctgacaacccttattattacacacaagtaaactgaactgtattacacagcaagccggcttcaggacaggaggaccaccccggaattcgctctagcaggtggtgctgctttgctatctggaaactgtaaatggcttcttattatctaccggtagtgaactctgtaaatggctcaagcatgcatggtgcttaagcatactttgcactttcttattatctatcaggaaactgtaaatggctt

SEQ ID NO: 4780 - DNA, 291 bp, Zea Mays
caggcctatcatatgtgctaatcagacctctcatatgtgttagattgggctgatcagacctgcctcatatgtgttgatcaggcctaccatatgtacctaggcgtttatggtagttgatcatagattaggcaaggatctccattgcttggctgctttctataaaccttagatgaccttgcctatatattgtacaccccttgtacctctatagtcaatctaccattccctaagccatatctcctttcatggtatcacgagtctaggtttcaccttggcttccccctcttccgc

SEQ ID NO: 4781 - DNA, 587 bp, Zea Mays
gaaggtaagagggggagaagaaaagaggaacaactagctacttaatataatagacagattatgctagttgcataatccattatattaaacaagcagaaacatggtaaaacatgttaatattcagttaaacacaccactaaaaaatttcagtacatcttaactgcacaagcagttaacaagcagttaccaagcagatatatcttgtataaatttcagtacatcacaaataagcatttacttaactaaccataaaaaccagagagagacaactgatgaataaattaagcagatctgctcagacaattacactttaactacacaagcagttaacaagcagatatatcttgtataaatttcagtacatcacaaataagcatttacttaactaaccataaaaaccagagagagacgattgatgaataaattaagcagatctgctcagacaactacactttaactacacaagcagttaacaagcagatatatcttgtataaatttcattacatcacaaagaagcatttacttaactaaccataaaaaccagagagagacgactgatgaacaatcagacaactacactttaact

SEQ ID NO: 4782 - DNA, 403 bp, Zea Mays
ggtaaaagcatatttgttcggatttagggaggaaaatgagtttatctatactgtgactcatacagtcttggtaacacggttaacaaacggacataacatgcaaactgtatctttttactatttaccttaaccatgtgagttcttttatttggttctggacatccttttattctagcttgctgtaatctactggattgcagcatgaacaccttcatgggtcttagcttatcttttcactgccaattgtggtctgagatgtgtactattaaatctcgaacaactatgttgcaggcttctgtagtccgtaggctccaatctgtactataacacatactcatttctatgtggtctacttgtttaccaaatcatattacagaatagttctctgtattttgtgttccag

SEQ ID NO: 4783 - DNA, 313 bp, Zea Mays
aagaacagccgcagtagcaagagcagtgacatcccgatgcaggccttacctggacttgttagcctccaggggttgacaatgtctgcctttgaccatgcattagaagagattatccctaagaaccttttatcagagccccttgaggttgacagtcccatcatccgttcagaggtcctggatgatgttcctttgtcatgtgatcctgttgggcaagaggaaacccggacagtttctcacgctttgtcgaccttgaagggcggtctagctcgcgaggacacgctggcccttgatgctgctgatcagagtcacccgg

SEQ ID NO: 4784 - DNA, 596 bp, Zea Mays
atttttcaatagacctctgaatttgtttttctgtcatttcttgcaaacggcttaagtactctgtagaagaggaagatgcacctttctttctctcagatttactgtaatcacgacctctcagtcgtttgcctgtcaacccagcagaaccactatcagtttcaagtgggtcaccagatggattacctgaagatccaatagattttgcatttaagcctcggaacgaatgtcctgcacatatactctcccatttgggttcacccttcagtttatgccagcaatgcatataatggaatggtttctgttcgtcgtgtgcaaacaatgttgccgcctttgaagtctgcacaaatattagatgatttagagaaatgtagtaacaagtatgcactactaaataattcacatgatttgaagtgtatatgatttgccttaccttgtcgtcatcagttaagccactttggttctcccttaatactcttgcgtagtagcctgagaacttactcacatcagctctaatcttgtcccatctgctgcttagtgctctgttaactctacaagggtactggcccctctgttcgttgtaccttttttcaattcga

SEQ ID NO: 4785 - DNA, 698 bp, Zea Mays
gctgaggattcctctgattcggtccctgctgaaacactagctgtagcacctatcccagagcctggaaagaccttggacattcaaagatctgatagcactcgtccgaagcgtcttcgcccggccagtcatccagcttctcctgctgaggggaagaaaaagaaaaagagacggcgtcggcgagtgtcatgcttgaatcaggatgccagccttctgctcctgctgccgaggaagtgccggtagagatttttactgttgatgatcccaatgggtgtgacccggctgttgctgaccccaatgggtgtaaccttgatgacactgaacctaatgggtgcaatccggccagagctgatcccaatgggtgtgctgttcgtattattgatgaggatgaggaagaggaggaggaaatccccttaattcagaagaacagtcgtcattacatagccagtggggagagtagtggtgttccttctccagctttgtctgctctcgttggtctgcaagaattgtctctggcaaattttgatcagactctcgaagatatggtccctgaggatctgctgttcgagctgatagatggtggaatgatggaagtttgcgctgatatgcctgatgtcgggttagagttatcccgagcagcgtctcgtgcctcatcgactttggggtgctgtctcaagagtcaagaggctgatctagattgc

SEQ ID NO: 4786 - DNA, 567 bp, Zea Mays
agaagatgttcagctgtggtccgatgcgcaaacagtgggtgatactgatacacggtgtcatggcgcgtccggatcccttctccaatggttttgaaaagcaagtacatttttttaagagagagagagagagataaaagaaagtagtgtgtgacattggattggaggtatagcgcataggccggggtgaccatacatatatataacatacgttctttgccgcttctccactcaacgacatgcatagcatggcgccatgatattccttgcacactcgcagcgccattccaggccgccttgcttcacaggaagttgactaatctccttgcgaacgccgaacattttgagatccgagctgaatgcgcctccacctagacctaccagacagagcaggcggcgggggaccaagccgagcaagacgccgcaaagcagcactcactcaggcctgcccaaaccaaaacctgtaaaatctcttggcctgagatacaatatacaagtggagcgagcgctccgagcagtcggggaacacgaagagatctgggcacgagatcgctgcatcgtattcacccg

SEQ ID NO: 4787 - DNA, 630 bp, Zea Mays
ggcctccgtggtgaaggcggattggagccgcggagggtcggggactgcggaggagaaagaggaggcgtcagcgtggtttgcaacgaggtttgcggtggacatagccctcgcggagatttgcgaacctcgacaaagtgcaggaagggagcgagaggggaactgactcggacgcggcaccatatatctccatcatccagcacattgaagtcaaagaagtggaggtcgtggtctcgtggagagggaggctgcgagagtggggctgatcaagcggttgggcgctccgtcgtgcggacgaccgaagaagaagactgctactcctgctgtcgcgcgactatgggccgccccaaacgtagctggagcatgggccacaccaaaaaatcaacccaaaacacctgcactgctgtgtagttgtattgtcttgcaaaaacttagtaccatactggctaataaaggagacattgagcagcttataaacgttggcgcagacttaacactaagaattctgttggtggctgaactggtcaggttcaactcgcgcgggcatgataatttttgctgaacacctgcgtgtacggcctgtgggggcacgtagatggcagaaccagagccatggcagaacaggtcaaaggc

SEQ ID NO: 4788 - DNA, 768 bp, Zea Mays
gaataggttggggcactaggtggctcatcggtagagtgaactagtggacagggacacacatgttgctagtagacattggcaggatcgatgaaatgagccatatgtgtcgagaagtatagggtcgtacgtggcatgatcagaggtgatagggtcatacgtggtacggtcgaaggtgacaggacctcacggggcactgttggactaagagaaagttctgtatgatgttgggagcaacaagtatggtgttgagctacaaggggccaagaaggactaggtcacgtacctaatgaggtgacaggcagagtcgacacattgctgacaatgatggaagaaggaaagatggggttgtagggatggggtaaagagacagtaccttggtcaggagtggtgtggtatgaggcgttgtagctagcaacccaatcggtggaagtagcaggagtgggctacaatgacatgaggtgagaggagagatccaacggagacaccctcccacagagcctctaggatgggtgttagggtcgccactatcgagcaggctcacatcaagtatgggcggtggtgacggcatggcctctatcatcatggagacattatcaacacttcggaacacaatggtcctagagagtggtgggcctcgggagggtggatgaaggctagagggtggtggagctcaacacagtagcagagaactagattcatgtcctgatcaaaggccatgaacgaacgtgccccgaaggaattatgcatcttgaagggatacacgcacat

SEQ ID NO: 4789 - DNA, 577 bp, Zea Mays
ccgaggtgatacacccgtccccgtgcccaatttccccttttgtgccctgtgttcggtcaatttcgccttcgccggtgctcggccgcggcggtccgccgtgctcgcacggtggccgactgatttggcccggtttagtttatcgaagtaggtccctgtgtcacccttgcctctgctgaagttagccaaggccttagcgcgccttaagttccctccccgtggccggaatggctcaccggagtttctccgtcccgcccgagaccttctcaccgccgttctcccctctctctccccgtggattcgtggcctcttccccgccattgaatttgtcgtagcgccctcttcccctctgcccaactccagcgaccccgaagccaccctagctcgtgcctgcctcaactctggtgacctgaccgccgcggagaggagcggcgccgcttcgcgcacgtttgtttccccagtctgttttcccccgtccgatcttgattgcacggcccgaaccgcgggataccgcttcacgcacgcatgcttgacgccctgacccgcctgttagcgctgcccgcagccgctcatccttccc

SEQ ID NO: 4790 - DNA, 1232 bp, Zea Mays
ctccaaccctcctgcttgtgatggtagcctgggtcatagagtgtgaccctcttctgaggacattgaggcattgattgctccactttggagtcttcccgaggctgagaggctaacccactttgagatgccagctagcactgatgatgccgagatggatgttgtgcttagcctgctggctggggagtcgtccgactctacccacaccgagctgatggctatcacgatgggcaagaatttgatgaagaagtggagattcggaaacccaaaggtgcccacccaaagcgttgatgtcgagtgaaccgcccgactgcacctatcgaggagaaaaagaagaggcgacttcagcgactgtcgtgcttggatcaggatgctggtctttctgtgccgatccttgacgatgtcccagtggacgccattcccaagtttgatgccaaaagcagtgataatgcataggctactggtggcattttttatgaggatgaagaggaggaagaagaagaaatcccattgatccgcaagaacagccgtttctacagaggcagcgaggggggtagcgatattccctctccagctctgtcggcacttgtcagtcttcaggggcttttaatatcagattttgatcaagcactggaagaagtcattcctaaagacatactatcggagcctcctaaagatgatgtcccagccatctgttcagaggtcccagatggtgggcttccattgcttggttctatcgggcaagaggtaaccctagtggtgtctcgcgcatcgtcatccttggagggcagtctcccatgcaaagacactgatccgggttattcgactcccatggaggtggctgaagggccttcaacttcagaagtggttgctgcagatgacccagcccccgagggtggcgctggagcccctgagggtgttgctggtagcgacccagcccttgtggatagtgcaagctacaatctagccctcgaggatgttcaggtgtgctctctttccaatgcttccatggatgtccacaccgggtcatccccaatctggtccgatggggcgacgacagtacgtgcttctacgaccttaactggtcaagtcgccttagagttcggcgagctagacgcaaggagcatgttgtctgctggtggggctgaggtcacctcgggtggtgttcttaagattgttcctgttgattttcccttgtcaaaccatgttccagttcctcctgccttgggccttcc

SEQ ID NO: 4791 - DNA, 591 bp, Zea Mays
tgccacacaaaaatttatgaaaaacatctctgaagttgctcttgttaggcgctctgatgaacggtttcgatggtacagtagactgagaaacatcttcaggtgcatcacccctcgccgccggtgaccctcgcgtcgtgatctacgctggtgctgcgattcatgttcgctagtgaggagataatcgaggcggagtaaaaatcttgacaccggatatgctcgaacccggtcactggtgggttcaccgtacccacttgacctgcaaccgaccgagatggccctcaccggcgttggctgcttaccgaccgtgaaccacgtgcctagtagctgtaacacatcgcagtaaaccgttgatgcaggtctgtccttcgccggaggccttgccatggtgaaagccacgatcacccgcggagtgcacttctcctctctccggccgctagcacaacttctcaaaaattagcctccaccgctctcggacactataaattgaaggtgccgctagctccattaggttgtcacgaagccagagcacccgcccctgccttcgattagccccataacgccctaatttctttcttcccccaatttggttct

SEQ ID NO: 4792 - DNA, 886 bp, Zea Mays
ccacaaacaaaagctaaatgaaacacactcttataagcgtttggtgtttgggatcgacatgttgccctgttccataaattttggatccgctccataaacaagctgccaaaaactcataactccaactagttctaaaaaacatggagtttatccaaacttcactaatttggtggtcaagcaaaataggtactccatgtattcatgtttacactatttttatgaaattggtatgatattacccacatgccacccattacataatgtaccatgtttcctttcattcgtccccgctcaaggccaactcaaaccttatttaaagttagacttactataactcaaacaattaaaatttctgtaaaccccatagtggagttgtagaagttggtacaacaaaactaaaaatggcagagcagaggcaaaacaccccgcaaaaaacgcgcatcaggatggttcggttggagtagaagcagcaaacggacgcatgctctctgattttgtgaagaagctacagagatgagacgcatgcgctcgccgctagcattttttaccttttctttctcttgaatccttctttcacggatggccatatacttcgccccgcttccccaatccctacccggatcgttctctctcctaagtatttcccaatttgatcggcaagtgcagccctctagcctcaggtgagagagcgatcaaatatgtcgtcattatgtttgttctattcactcctttgtaccacacgtgatgttgtatgtacaataattttgtattgcatggtttgaacattcttttgatacaacatcagccgagggttcttcgtcaacattcagcatgtcactatctatgaaggatttggacacggccttccatggagctggacaaaagg

SEQ ID NO: 4793 - DNA, 679 bp, Zea Mays
ctttactcccttcccctgcttcgtcctcgtttctcctcgaacccacccagcagcgccttcttccttcttcccgcccaacctcggccatgcccgtagcggcgctccgtcctcccccggtcgctgtcggcgcgggacgccgcagcgcccgactccaggcgcggttcgccctccgcgcgagctccctcgaggcgtcggcggcagtgacggtgacagtgaacgggtctgcagaggccgcggtggagaggaaggagaaggtgcaggaggataaggacaacgagggactgccggtgaaggaggagcaggagagggggctggaggtcctctacgacgacggcttcggctccgtgaccgtcaaggactacttcgcggcggccaaggtcctgtgccgggacgacggtgggccgccgcgctggttctctcccgtcgagtgcggccacccggccgtggaccaagcgccgctgctgctcttcttgccaggtgcgtgcgtttcttcagctcaccaaaatcaatcatcccaatgcttgtctttgaagaggtgctggaggtgctgggcaaacggaggaatcattctggtttggtttcctttctgtttctgtacatgcctagtgatccacagcgaattgacaacactatatgcaggaatggatggcgtcggcacgggactcatcctgcaccacaa

SEQ ID NO: 4794 - DNA, 401 bp, Zea Mays
ggtgtttctacttttgatgcactgagtaggaaagattttgatctacatgctgctgtaatatggtgtattcatgactatcctggtttgagcactttgtctggtagagttaccaaaggatactacgcttgtgtccattgtgacaaagatccttgctccaaaagaataaggaataaaatatgctatattggtcatcgacgttggctaccacatgaccatccatggaggaaaaagaaggattatgatggacaaattgagaaccgtgacaaaccacaacaatttagtaccactgagttgatgcaacaattggaaagggtgaaggaagttaaaccagggaagcatccaaatagcaataagaggaagcgagatgcaaatggtggtcaatgttggaagagaaggtcaag

SEQ ID NO: 4795 - DNA, 579 bp, Zea Mays
gttagactctgaagattatgacgaaggaactgagttgcaagatacgacagatagtctagagcagtcagcgacttctccaagtaaggtgaatagaaggcataattctttcttgaaggaggatatgttggtcacgaggaagcaaccaaagttaaatgatggttctcgtggccttagcagaatagtaatcttgaagccagtactgcaagaggtcatagcagtcttatctcaggtagcgcaacttcgttaccactatcaaatcatgttgactggcaagttcaggaaggcagtgataaacatgattgtcatttctcgcttagagagcttaaaaggaggctaagaattgccattagcaataatgagaaggatcaccagttaaactccacgagtagtgattttcatgaagctgaggctgattctggcaaactccacgagtagcaaagtagcattactaaactaaaaggttaggagacataaaacttgcctgggatcggacagcagtaccgtagccgtgccggcacttctcctcctgactcgttccagtgctgtgagccttgctccagtagcagtggggcgccggcg

SEQ ID NO: 4796 - DNA, 372 bp, Zea Mays
cttttattctagtttgtcgaagtgttggcacttgtgaattgttatcatgtgctcgcactcgtttttttttacaagagggacatctctatttttattagcaaacgcaatagaaaacaacgtaacaaccaccactggcatataacccggttcaaaagtactccgaacagacaacgacatcgagatagtcacacggacaacacttgattcaggtgtgctgtggcaaagatagaagcacgtcaggctaactatccagaaaagtttaaccacaattattaggtctagttctaaacctgataacccacgaaactaaaaaccaacccacgcttcatcaagatagcaacaactgttctcacgcgatacaaacgaatcaac

SEQ ID NO: 4797 - DNA, 571 bp, Zea Mays
gcggcgtcgtcggagaagacaattagcgagccggtggcggtagtggagttgctatcgggtcacactgttcagcttggaacttcgagggtttactcaaaatgcgtgcaagaaacacagcgtttaggttattttgtgaatggtgtggggcgtgctccagggccgaagaggtctgagagcaggagggtgaattggttgtgttcgaagtgtttttcactgttggacttcgcttgcctacacaccgattcatggttgaagtgctacaaaggagattcatgagctaacgtcgaatgccatggtggccctagcgaagtttgtgtgggtggtgacttcgtacggcgtagccctttggtccaaggttttgcaaagaactacttccttcatcggcagaaaaaggtgattggtgtcaaggttgcacagtttgtaacatgcaatttcatgccgaggactggaaagacttcgggtgaagtggtggaaattgtgccgtgtgatttttggcgggatttttggttctacatggagccggaggaccaaaggggttcctaggccaccgccctctgttctatgctcgcat

SEQ ID NO: 4798 - DNA, 507 bp, Zea Mays
catggcagctgtaaacaattcaccttttcttccccacaatagattgggaacacactactcttttggatattagtccttagacctgaagctgagccaaatagatgaagaatatccataaccacactgatgtccggggcagtaggacttagaaataacactgtgtcatctgcgtacagcgagatacggtgctgcatattccttgtagagagaggttgaagaaacccttcctcagaggctcgctgcacgagcagattcaagacatccattacaagaataaacaacatagatgatagaggatcaccctgcctcagcccgcgttaatgcccaatacattccccgggcagaccattcagtaaaatcttggtagaagaggtagctaatagcccacttattatatcacacaagatctgtccaaaaccaagtttttttcaagacctcgataaggaaggcccatgataccgagtcaaaagcctttgaaatgtctagcttgagaaggatacgagcctg

SEQ ID NO: 4799 - DNA, 700 bp, Zea Mays
cagcaacctatgcacgatctcaacccttggcaccaacctcaggaatggcctttgccgggacatcatcgggagccggtacagaagggcctacatcctgatccaagcacgacagtcgccgaagtcgcctcttcttccttttctcctcgagaggtgcagttgggcggctcactcggcgtggacgctttgggcgggcaccttcgggtttctgagtttccacctcttcaccaaattcttacccagttgtaatggccatcggctcggtgtgggtagagtcggatgattccccagccagcaagctaagcacaacatctatctccgtgtcatcagtgctagccggcatctcaaagtgagtctgcctctcatcctcaggaagactccgaagtggagcaatcaaagcctcaatgttctcagaagagggtcgcactctaagacccaggctatcgtcacaagcaggaaggttggatacaaactcagagaatggcctaagtggtggcaggttccatgcagaataggccacaggagcaccagcatttgaaaccctgcccctcaggatcatgtccagttgactcagcagatcttcagtgggaattcttccgtttgtgattcgggtagaatcgttgacactgctatacaagtaagctgggtaggttctgtcctttaagggttgaatgttcttgaatacgaagtcagcaactacagc

SEQ ID NO: 4800 - DNA, 311 bp, Zea Mays
atagcagtatacgaggaaatggcaggcctcgttccggtgctacacttgacggtcgtcttgagacgcttgacctggccagggtgtttttggttgtctcttgccatgttttcctgctacgtgtacagtgtctagaaacaagcataaagctagggcgacgtactcttgttctgttttcatgcaatggatggatatggatgcccaccatctttctttcgcagctcccggaaattcttatctgtaccagaacagtgtgatgtggcgagcgtattttagttcgtcttgtacgtatttttcttgcgctttgcgtcggc

SEQ ID NO: 4801 - DNA, 619 bp, Zea Mays
atgctaaatacatgtaaatgcatgatgccctttggtgtaaatgtagatgcagagctgttttgtatgttaaagtccctacatcctatgtttatgataactgatttcagaattgttttgtatttgtttatatatgtggctcatgccgtttaccattggtttgctgcaacttgagattctgtaaatagaaatggctgattgtgtttttctgcagaactatttagaacccatagctcttattgaattgtacattagttttgtgactggaagtcgtgtgtttgcagtcaattgcagacacatgatgatcttgtttgttattgcaagaacctgagtcttgttgtacttatctgctctcaagatgttcttgtttagattaactgaatctgtctacttcttctgatactttatacgcagtctgcctgtccgagctttagcctgagttcctaatatgtgctgcaccccctccccctgtccgagctctagcctgaatttgtctacctcttccgattccttatatgcggtaacaaattgtccacaatgattgtagcatattactcattaatatacacttgtgtgtgaacctgtttgtttgcttgtctgctgcctgcccagctaagctact

SEQ ID NO: 4802 - DNA, 511 bp, Zea Mays
aaaaaaatcttcagattcatccccctcaccgctggtgacctccacgcaaggattcgcgctgatcgcggtgattcgtgcaggactcgggcaggatagtaccggggggtgaaaagatcggaagggagtggatttggtcgcagggtgaagcttatcaaccgcgcctgtagccaggcgatgtggccggaccgccggtatctttaccacgtagtagtaatcgtggcacgcctggactttccatttcaagagccattgcaccagcaagcgccacgactgaaccactagtgatcttccctctctctggccgctagctttcatttccaaaattcggagccgccgcttaatgtccctataaactgatggcccagtctgttgcgccatgttgtcacgaagccagagcacccattccaaccttcgattagccaccatagccgaagtatttcatttttccccaaatcagttgtctacgccaccgtgagacgtcgcgccatggccagccacctccaggtccgcc

SEQ ID NO: 4803 - DNA, 337 bp, Zea Mays
cacaagatgtttcagatgcatcgtctgatccattcaatatgacgtcaacagacttttatgctttgttgtacacaagtttacgcttattttgtcatactgtctgaaaccgcctcctgtactatcgtataaaaccgaccgtgatgactgctttgcacgagaggactagggtttcagcggcggcgattgcatgagacatgagcgagtgcggggaagcaggcacgacggcggcggacgggcgtgctgttaatctctgaccactggcttggtcgcggacgcctccccgcgaggacacgggcatggcggtatgggaccttcccactggccatctccttaggat

SEQ ID NO: 4804 - DNA, 579 bp, Zea Mays
acggaattgctcatcgtcgtgcgacctccaccgcggtgccgcgggtcgacgtaggccgacgtctccacttcaccatcgctggtaagtcgccaggatctggtctgctgtgatctccgcatcgtattgcaccgattcgtataggtagtagagccctgaatcaccattaggccgacctccggtgaggtctccaccgtgtgagcactactccaccggcgcagcaccgtcgagttggaagggatgagccgatcaacgttgatccagtcgctaatggtcacgattagtttgatgagtactggttcattcattaaatgcccgccatcagatttcgatcgatcggctatggtatcgccctctcccgcggccgtggatctttgatcctatggatcctgagcgtaccacttcgggttataatacagaccgctggatggagatcggacggcacaattgtaaccgtaccccttcggttatggagaattgtaaaagaatcccaaggaacttgataaccaacccaccggtcaagccacattgaaaaataattgcataccagtccaaattcttgcagaagtacccctatctttc

SEQ ID NO: 4805 - DNA, 986 bp, Zea Mays
tggatagcgagctggcaaggctgagtacccacgcggcgtgggcctagctaggtggtgttcgaccgacgacaagtacaagcacagtgagaagggccttatgctccaggtttgggatgcgcgaagaagacatcacggtggtgcagcattacccagaggatttcttcatcaccttcgagcaccagcaccaccgtgacgcggtggtggcgtgacacgaattcacctacggcaacattgacattcgagttaggccatggcagctccctgttcatggtgaccgcatcaactttgactaccatgtttgtctctgcctcgaaggcattcttttgcatgcgtggaacgagggcatcgccaagcgggcggtggctatgagctgcgtgctagactacgtcgagtctcaatcactacaaaaggaggacacaaggacgctcaacctctgggcgtgggcgtggaacccttcagacatcccaaaggtaacttggctaaccattgttggcaggaacatcactgtccacaacatgccatcggcgggacaaagtggcttaaccttcagggtcatcgtccaccttgaccttgtggagggttttccgggcaacgaggatcaaggaagtacgcgtgcgttcgactggaggcttggagttgttgatggcgagagtgctccacgcgacatgcacgaccctccacctcgatgtaacgatcatcaccgagacgacgatgacaacgaccgccgtagacgtcgcctacaacgtgaggtcagttggagcatgcgtcttttccgaagcatctcgcgtgctccaaagggctgtgagcgagagcgctcggggtcgcgtcgtgaccatcgacacaacacttccaggaggtacatgtccggcgacgcgcctggaggtgtaaggcatgtccaacaacctcgccaagctgctgctatgccagcggacgcgtcccatgtcggcatcccagggcgtggcgtggagaacgtgggttcccgtcca

SEQ ID NO: 4806 - DNA, 425 bp, Zea Mays
gtctttcagccttagaggtggctgttgcggagaaaccagtcctcaaggatggtaccagcggttgcccagcccccgagggtgttgctggtaatgattcggctcgggtgggtagcgcaagctgcaacctagcccccgagggtgttgccggtggtgatccggctccgatgggcaatgcaggctccccttctcatacctccatggatgtccacgttgggtcttctccaccacattctgatggcatagtaacagcgcatgcttcaaatgaggaagtcaccttagagatcggcgcaccagatgctagagttctgatgcctgctggtgatgttgagttgatccctagtgatgttcttcagatttccccggttgatattccttcatcgagccaccacctggcttctcatgatttgggatttccttcattcttc

SEQ ID NO: 4807 - DNA, 484 bp, Zea Mays
caactagtggacttgcacctcaaaccttcgcaacacctccactacgaaccgatgcatcgtgaggcaaagaccgacagtgaaaaaggcctaaaaactatcaactcgccctccggctcggggacctctttcgcacctggggcccacccgacaccgttaccaaagtaacccagccgctgcatctccagcacgcgggccgagaaaatccttgaggtgccaaactccacggtgtggccgggctgcaactcaaccactgccaagtcgctcaaggtctcctcggacaacggcgtggccggcgacgcactcgcagcagacgaggaagaagacattgcaacgtaccgttaacgacggcacacagtttgcttgatacgggctagatctccggcgcagaatgagcaaggagggcaagcgagcaactgtaaaagctagggtttctgcaacgcaaactcaagcaggtagcggtctcggtcgaggtcgggtttttata

SEQ ID NO: 4808 - DNA, 304 bp, Zea Mays
tggatttcatctaacaattgtctcccagtggccgagtgaatgcatttcatgaagactcctcctgcacctctcctgtacagtaagccccctatgatgatgtagtgggctgactgccttgcgatgcattctgccacagccttgtcatccgactcttcttcatttttatgtacctgatgataggctctctccagtcgttgggatctgcctctggctgactcaaagcgttgcactcctccacctgatccatgaggatgctcggttgtgatatttcttggacgaagatcccaggcgaagcctaggcccg

SEQ ID NO: 4809 - DNA, 677 bp, Zea Mays
ctaaacaaaagtagtgatggccatcgatccatccactctgcctgtaccaaacaactagtttttttggtgtccgagacatatgaaaaaaatagtaaactaagttaaactagagtggatccatggatttctctatgccccgtacttgaacatgagatactttatcccagcattgacaaaccaggaccagatatgataggaggtattaccaacgtgttatgctaatagacatgatggtccagatataaacaaactagcctctaccaaaattcggaattaagatctgctaccaaattagcctctactacagttagcttgagatgtaaacactgattatataatagaatttgcagacatctaattatctaatcgtgaatgaatagcaaaacagtacagaatttgtcgagtccaaagtgtagattgcagtagtgcattgtaaattaatgatgcaatttcagattttcaaaaaaacatggttgcaaattgtgaaatcaaaaagcattcatggtcctgtttactactccctcggttccaaattggaagtcggttctggcctttctaggtacatatttttgctaaacatccagatatacactatgtctagatatacttcaactaatcattagcatctgctatcaaactagcttctaccaaaattaaaaattaagatctgctatcta

SEQ ID NO: 4810 - DNA, 350 bp, Zea Mays
ccaatcggtctccaaaccatagaattcctttgctgtcctgacggaagcatttgtatttgtccaccttttgtttgatcatttccttaatgacttgaacacccttgtcaccaatctgtgccatgactatttgctcatgtaaggtgggctccactgaaatataacttaaagcaccagaggaaacaacttctatgttcagcttgcactactcatcacacagggtggtgatttttgcatccatactcacacaacattggctttgccaggatggtaatgcacttccaaatcgtcctttatgagttccaaccatcttctctgcctcatattaagatcagcctgagtgaagatatatt

SEQ ID NO: 4811 - DNA, 306 bp, Zea Mays
attgcacgaccgtcaagtgcagccgataagctcctgcccgcgaccaaatccacccccgctagatcttttacccccgccccctgtggttatccacttcgcgccgaacacgaattgtggtggccggcgtgaatctatgtgcgggtatcaccgatggtgaggtgcgatgtatctgaagattttcttcatcactgtaccatcgcgactgttcatcacagtgcctgatagagcaaatttgggaatgatttactccaaaaatcatacagcactaggcaaagcttaatacaacaaatttgtttaccaatgtca

SEQ ID NO: 4812 - DNA, 484 bp, Zea Mays
cttccttgtgcacttgtttatgtaaaaaaatgtttattgtctgttcgcgcaaaccatgtctagcctcacattctttttttttgggaaaccttgtccaaaatcctcattaaattctcctctgctcaacctagaagccatctgagttgatgatctctcttttcgcctggatctagtaatcttttcctttgcgaatcatgttgtggccttatcatccgaatatctggatctttcattgattctgctccgttatctggttatctgctataacctgttctcatgtatcaaatgtggatcagtctaatatctcaatatgatcgttctcatactcttctctgaggatcatgacactgttttatcgatttttttctctagacagtgtgtccattaggttcaatggatgttgctgttgtcttggttccctcgtgtctctgagaagctcagtaatcatgatctcttgagtgcttccttctcgtatcccatctcg

SEQ ID NO: 4813 - DNA, 792 bp, Zea Mays
gattggccgcctgtgtaagcatccgccggtagccttccgtgtctggggttcacggaaggccgtcggctatctgcgccagcactcctccaacttcactctgcgtgttcaacgctcgggcgaagttggggtacaggtttcgagcgagaagagggttctctcgccggagtctagcatcttgttttgttagttctcactctcgctcttgagcctcttggcaatcacagcggcgggagttgcgtctttctcggtgtactcgttcatcaggtgtttctcccacttccgaagctttgtcctgggatacaggttgtgctgggtcccgttccctagcttcatgatgccgccacacattccggcgtctgtttctccgtcgccaggcatcacactgggggctcctccccttgcaggttcatcgtcggagacgggcaatgactccaatctcccctgaatgaagaggatgtcggggtagaaaggagcaggtatggtggtgtgcttcttgccatcctcctttgaaggcggaggtgccgagaagattgctcattgcgtcctccttcctcggcatgggacattcacttcctttttctgagtgatccgcgtccactccttagtgggtgaggtggacaacggagttcttcgggtcggagataccccaactgactggccctccatcctccgagggctcttgagccctagcttgcgaggggccatcttcccccgagctgtgagcaagggcgtggctcgcagacttgcttcggcttctctcgggattcccgaggagggtctcttctcgggtgg

SEQ ID NO: 4814 - DNA, 427 bp, Zea Mays
aatctgggatttgaatccgggcgagatgcaaacagacccatcaaaacaatataaattttaatatttttggactacgctaacactgttaggtatttttcggatcagacaaattttcatagttgtagacagtggaacagattaattacgagtactcatttcggttctagttatctcggtccgatttaattttgcagcacttctatcgtggagttctagtaatattcacttgggcaaaaatacaagagtggatcgggattccaaattcatattctcttaatccataaattttaaacaaacaccaggttcgacatttcgcgaaataaatacgcgagatcgatccggcatcgaaattgtgaacccttcggaagcgaagtcacacatcgttcacgtgggcgagaggttgtgcgctgtctagacaccgcttatc

SEQ ID NO: 4815 - DNA, 591 bp, Zea Mays
tagcagaaccagacgcaccttttaaacaataatgaaactatactcaaggagacattcatatagaattcctggtttcagataaaccaaaatggaagtttataataattaacatctcaattctgctcgggaagcacttataagggacattgtgataacatgagaaattgatcagaaacgtcaagaaattaggtgcccacctcaactccgcaggatttggaaatccgccttatggacacaatatttgcaaatgggaatagcccattggaaccacagaaagcggaaaagccacagcagaattatttacttcaccgacacatttaacatctcacatcggccatggcagttggatataaacaaggtataatgcagaatacagccgagagtgaagcatggagtgaaacatgacaaacaagcaatcagctgagagtaaaactaaaatatattattcttcaccaatgcagcaacttcgaagttacaacctatttttggttttgaattagcaggtgccttgagaatctgcttctgctttcagacaacatgcatatgtaaattatcatgcataatactagacttgaaaaatattcagacgag

SEQ ID NO: 4816 - DNA, 422 bp, Zea Mays
aagcatgcagattgataataaatagttcgagtgcccttgagaatgaagtctttttattgatgacgtattttccgattacagaatacaatgctgccccgatagcttttgaaatatagctagggggtaaaacttcctgagatgctctatattccatgaattcactatttctgggccatccaattgagtaagttgatatgatcctggtcgagtaacttctgctaccatgaatggcccttcccatagtggcgacaatttgtgtcgtccttcccccgttagaattcagcgaaggactgagtctcccactacgaaggatcgatgtcgtgtggccttatcatgatagcgcctcagggtttgctggtacctagctgactgaattactgtattcaatcgttcttcttccaatatatcaatatcctccagtc

SEQ ID NO: 4817 - DNA, 581 bp, Zea Mays
atgaagtagcccgggattattaatcattcatcagtgatatgcatgcgacgatggccctcttaaaatgccgtcggtttcaggaaccggccgggcgggcgggggcatcgagtgggagaccggaaaacggccccctcgtggtcgtcagataaaaacgtccgagatcgatggctttaattggggattcacctctcagtaaccccgtgtcttcttcaaacccacacatgaaactgatctctctgccgtttccgaccgcttcgatcgcaggtagggagcaagcgaggcagtcgtagtcccccgcgcgccgccaccaccaccgtctactactagtctactagtatactcgtgccttgacgaccccgccaggcgtcttctcttctcttctctcctatccgtcgtccatagctagcgatcgaccgacccatcttcctcttcatcgcgcgcccggtggtgttgggctaggctagctactggtagctaggtgcggcgtgcagtagtgtctcagctcttgtgctccatgtataccactactcgtgccatggagaaagaagaggggttcgggaagtcatggcttggcctgggga

SEQ ID NO: 4818 - DNA, 388 bp, Zea Mays
gatgattatgaaatttgtttgcgggatatagaagtcatcccctgaattgcataggcatgagcatgttgcaccggcttaagtcgccactgactttagccgattgctccattagtagggcgtagtggtcaccccgagttaagtaagcgtgagcatgttgcaccgccttaagccgttgccgacttaagtcaattgctctgttagtagggcatagtggtcaccccgagttaagtaagcgtgagcatgttgcaccgccttaagccgttgccgacttaagtcgattgctccgttagtagggcatagtggtcaccccgagttaagtaagcgtgagcatgttgcaccgccttaagtcgttgccgacttaagtcgattgctccattagtagggcata

SEQ ID NO: 4819 - DNA, 306 bp, Zea Mays
cttagtgacaacctcgctagcttccgctgcaagggggttgcgaaggattacttcggttgcatcgagtgaaccaagcccacttctagcaccgaaattgaggcatcgatggacatggcatgacagaggatatagggaggacccctcaagttgagtggactcctccttatgagcttagggcgaagccagtggagtggcatgtcatgcatggtcatgatctttacgtgctagtagagacacatgatgcaatgctccttgagggtggtgtttcattggagggacacgagaagagtcaaactctgtcgatgt

SEQ ID NO: 4820 - DNA, 831 bp, Zea Mays
cagcaatccagcacctgttatgagcagggagccaaagaaaaaatttgcatttaggtggggcccaggttttccacaccctggtatagtggctaataaattgatctcttgaagagcccttcatatgccacttttagctcaatagttaccatcagaggctatactaaaaacatgtttgtcttcaaatgcaggttgtaactctacatcagaaagaaggtcccaaagctgtagataatccaccaaagctcccacagaaagagctcctttgatgtcagagatccatcttcaattcagaagagcctcctgaacggttcttctttttgtaatcctccttggaatgcttcattgctttgaaatagcctgagagcgatatcacagattctctaccctgagagccatttatctgtctagaacagggtgttggccccatttccaacttctaaaattagaacagtggagaagaaagcccgaactttgttaggaacatgaaaggagagttttgcccagggacatgctggatcagttttatgcagccataactgtctcatctgaagagcccagcacatctcggataaactggagatgcccagacctcccaatttaagaggccgactgtcagggcccaagatgggctgcggcaaggagcagcagcaaggataagattaggcatcaagcatccttatcccctttgattagaatgttaaggcccataaagcccatatattctcgtctgcctatatatatgctacagtacccgagggggtgattgtcttgcctaatcaaggttagtaacatggtaacagagcaggttacgaaaccctaatttcttagccg

SEQ ID NO: 4821 - DNA, 419 bp, Zea Mays
ctgaatttgaggcagcgttggtggctcgaattgattaaagattatgatttgtccattcattattaccctaggatggcaaatgtggtggttgttgcccttagcaggtccggggttccaaaagtggccttgtcgttgatcgctgatctggaccgtttgagaatcgctttgtgctatgtcggcaccgctagtgaggagactcggatgcttattcaatcttccctcatggagagagtgcgtgcggctcagtagcaggatcgtttattgcaggaagctcgaaagagggttggcgatggtaaacctcaggagttcaccattgatgagaatgatttggttcgtttcaagggccgcctttgtgtgcctcagaaatcagaggtgaagatggatatcttgagagaagctcataaaacgccttacactgt

SEQ ID NO: 4822 - DNA, 456 bp, Zea Mays
ccctccagctgaggtcgggacgcgcacaacagtacatccctgcctcccttgtgtcttcgaacaaggggtggcagaaccggtggttttatctccggaatgacgacggggtgctgccgccctttttctcaacgagtggtgaccgccactggcgataactggcgctggggggccacacgcgagaaccaggagaagctccagcccattctccgtgccctgcagaagctccaagccgaaggccttaccgccgcgggggtcgttgccgctatccaccgccagagggtgctcccattggcagagcggcggttgcggctttcgaaaatgaagtcgggggttgatttggagggttcacggatgtccttgacccccctttccaccgacgacctcctcagacggatagcgggcatggtagggaggctggacgctggcgtccttaaccagcccccgatgcgtcccgac

SEQ ID NO: 4823 - DNA, 386 bp, Zea Mays
gaatgattgcgacagacgaactcgaagctttccgcttgggcgccatctcaaccttgctagcgagcggagcggaagcaatattgcaggagagcacagaaggcctggatgcagaaaagcaaaaactagagcactgaacgcggaggcgtgcgacagtgcagtacatatggggttttcccgggccaggcgccacttccaaaatgttggcatgccatgtcatcgcccggctgttatttctaaaacgcgggcacgccatgtcatcactcggccgttatttctaaaacgcgggcgtgccacatcgtcactcgaccgttatttccaaaatggtcgacgcggcccattttaactcagcggttatttctaaaaacgctgacgttaccagacttcac

SEQ ID NO: 4824 - DNA, 456 bp, Zea Mays
ttatggttaggttcgggtttccctatatttccatgattcctctgttgtaatgtgcttcggcccacctaactcttctatataatatagtcccaaccaggattagggttagggtttcacatattccaactgtaggatgtcagagctgctgtttgttcttgcatcgggcttgatgacagtgacctatgatggacttcaccttttgtatttgtgcccagcatgctgaggtggtgacgacgcccttgcttccttggtgccgcttcttgcttttggtgggtgggcgacattcttggtctgggctcatagaggcgaagtcggaactgctcgttgttgggcgtgatgatgcttggcaacaataacatgcagtttggtgggcttggtgtgttaggtgaagtctgagttgtttggttgctatggggatgatgacacatggtgggctcccgtattattttgggtcag

SEQ ID NO: 4825 - DNA, 621 bp, Zea Mays
caagattttgggcctgcgcatgcaaccgctactgatactgctaattttgtggcggcttcgaccgtggttgcggaaaatgattcgggtgattctgtgtgtaagttttttgagtctgatgattctgggagttcggtggtgtggacggaagagtcttcggatgatgatttggattattttgcggcattggatgtggctgcggcagaggcttctccgcgtgtggtgggtgctgaagttcccggtccaagtgttgggtgtaggcgtcgaagggcagtggcgaagcgtagagtgagtgaggtggagggtggtcgtcttcgtgtggacagggttggtaggcgggaattgttgtcctcgctagctggggcgagtgtaggtgagggggagttgtgaagtctgtttgagggtgaggagctgaggataatgctgttaactatagggagatgggaatcatcccgaaggttgaaccaatgtaaggtgtgatgccctcgctgttcgtatgcaactataattttgtatgatcaggctgtgtgcctttgctgatccggtcgtgcccctaggggacttgtgcactaggtctagcgcgtttattatgtcggtccggctgcaccctcaggcgacttttgc

SEQ ID NO: 4826 - DNA, 1037 bp, Zea Mays
gttgaggaaaagaagaaaaagaggcggcttcggtgactgtcatgcttggaccagggtgccggtccttctgctctagttcgtgatgaagtatcagcagaggtccttcctgaggttgatgccaagggctgtgatcatgcacaagctgctatctatatatttgatgaagatgaagaagaagaagaggaagaagtcccgctgatccgtaagaacagccgacattacagaagtagtgagggggtagtgatattccttctctagctctgtcagctcttgtcagtctttagggactgtcaatatcggattttgatcaggcccttgaggaagtcatccatgaggatatgctgtcagagccgactgccgatgacttgatggctgtttgttcagatgttccagacgctggactggaggtatcccgagcagtgtctcgttcgtcgtcgactttggagggcagtcttcaatgccaagacgctggtctgagtcgcccgactcccatggaggtgacagaggagccctcagccttagaggtggctgctgcagaagacccagccccgagggtggtgctgaaagttacccagccccgagggtgttgccggtagtgatccggctcttgtgggtagcgcaagctgcaacctagccctcgagggtgtttaggtgggctctccttcccacacctccatggacgtccatgttggatcctccccacctcgatccgatggggcgacgacaatgcatgcttccacagctttgaacaaacaagtcgccttagaggtcggcgagctagatgcgagaagtccgttatttgctggcagggctgagatcacccctgacaacgcccttcaaattgttcctgttgatcttccctcgtcaagccatgacatagctccccctgccttgggtctaccatcgttcctctccaatcttcaggtgagtcaactacttgccttttattgttcatattggtaaattataattcttatgccgatctatcttcgaccataggctttggttgatggaatgtctgcccagctaaggtcgtg

SEQ ID NO: 4827 - DNA, 441 bp, Zea Mays
cgttgcctcgaatgaggtttgtcgtcccaaaaattgtggtagctttggccttcctacagaatctggtgattcaacaaggttcttagtggctctcatgttcgttgggtaaaatggtgcttcggtggttctgatcccaatcagtttccttgccctgttgctcccatatacattgggcgtgtcttcaattccctcgtcgatctccttaggtcatgcaccttcgttgttgtgacttctttctggcttgatagttggattgttagcgacccttgtgtgtctccttctcctccctcttttctcattctgtcgagcctaaactatcggacaaaggtgtccttagtaataatcttgatttgcacctgcggcctcggccaagctcgttaccctgcatgcacttttgacacaggttcagctgtcaggtcgccaagatgtgaggaaaatgat

SEQ ID NO: 4828 - DNA, 335 bp, Zea Mays
ggcgaaccatcgtgctaaagttgatgtcagaggaattcaccaaagcttagcagatagaagagataaagtacaatcccagtcaagcactcaagcacgcgagtcaacttatcagagaatattttgctgccagtgaggccatcttgagaagcgactggcacactgaggctactggcacctccggtacgacgctgctagtaaaacttatttcaccctcctataggaaagggaagagacaacattctttcgtataagcagacatagagccaacattctttcgcataaagttctgaaccgatggctatgaactattctaaaaattgacttgctaatttgca

SEQ ID NO: 4829 - DNA, 589 bp, Zea Mays
atacttttgatttatctaccgttatggtttttcttgccgttgttacgttctcacacttcgttttcagggtttaattctaagcaaggctttgaaggcctagaaagatacggaggatgagagctgctgaatagctcttgggaatctttgctctgaagttatcatacgaaggaacgaagctttggaaaaagataaaatattactctccttagtggatagattgaaatctaacgaagctaagcttgttgcccaagccgaagctcataaagctgaagtacatgaattaaagggaaagattgccgaaccaaccgaaaaatttgaagttgaggtggtgaaacatgagatacgcgagatcgaaaagttaagagcacaaatgaggaaacctccgccgtaatggccatcaatggcgctaatggctggccgtttcttctccctccccggtgccctctccccttccctctcctccctctataaaagttgtgacctccctctctctctcttcctccctgaactcgccatctctctctcgctcaccttgctcttgccatagacggcgcccgcaccgtcgtacaccgtcgccggagctccgccg

SEQ ID NO: 4830 - DNA, 617 bp, Zea Mays
gtcggcattgctggaatatattcaaagcatacaatacagcaaaatgtagtgttcgttctctgagccaatatatcctcttctggcgaagttcaaagtttggcttgaagcaatttatgtccacaagatgcatagcctttcagagagatttcaatgtaaagtttatacacctgcaaggaaaaaagcaaatatttcttcacaggtagattgttcaagcctggtgtttgtggtacctgttttctatcattgctactgcagaatctatttttttcctcggacacacagatgagctacatatctctactactccttaagacgttagtgtagacgtccacaggttaggttggtgcacagttctgccatgccccctcctccgcgattcgcgtctctgccgccatcctcgccctcgccccgctctccatcgaaggaagggtgccattccagggattacaccaccattcttgccctcgcccgctctccggcatcctcgcccccactcgcccctgccatccttgccctcctacgcgcaagtcctcggcgccccttcccctgccaacgtcgtctcgcaagcgcccgtcgtctccgcgcaagggcccatcgtctcgcaagggcgccccttc

SEQ ID NO: 4831 - DNA, 393 bp, Zea Mays
gtttggcatgttagaatgatcggagggagaggaagtcgtcgccagatgccatcccgcgccgtagagccgcgatcttcgtggtccccgcaccccggtgctacaatatgaggtaaagagcgtctagatcaaattgtagcattcctctattcatgtaggtcgtttcttagcggggtcagatcacgagaatgttgggggtggaagttcgacagtgagcttgtcaccgtccgagccattgatcgattgggtgcgactcagattggggtggggcatatcgtttcgtcggaatagatcagagtcgctaattgaaaatccaaggtgtggacgattcttggtccgttgatccgagatctagcggtccagggtgtcccacgctatgcagctgtgatcccgttt

SEQ ID NO: 4832 - DNA, 448 bp, Zea Mays
caggcagcacccccattgggatcagcaacagatggagcacacccattgggatcagcagcagtttgggcacacccattggggtcagcgtcggtaaggccagttgcaggcacttcttcagcagcaggagctaaggtactggcgtcctcatcaaaattggatactcgccggaggcgtcttctcttcttcttttgctcgtcagcagaaggctcaggctgactggttcggctagggcgcctcgggcgagtactgacaggtttcgggacatccaaagttgtatcaacctctggaaggggcaccactgccaacgtaccaataggagcagtgtcggacgaatcctcagctaacagatcaagcatgtcatttatgtccgcatcactagggttcaggggcacttcaaaataaacctgccgttcatcatcaggaatctccccaagcgaagcaaccaaag

SEQ ID NO: 4833 - DNA, 879 bp, Zea Mays
attcgcgccgccgccgtctcaattcgtgctctggatgtcgtgataaacgctcggagcacaccgccgtggataagcccggcgattaaagtatcccggccaccgtacaaagttcaccgcggtggaaccagataacctcgccggtgcactgcccccttccggccttatgccgcgtgtcctaaccgcgccaccgcatcgccatgactccctctagcctcttcgttgatcgccggaatgaccgccacggtagaagccacctagcgcttgcgccagtaccttcttctacctccggccgccgcgcgtcgtcgcccaatccacggccaccgcttgcgcgctctataaattgaccgtgcccccagctccgccatgtacccaagcacctactgcacccacctgcatcccaaatccctcactagcaagctcgaattttggattccccccaattcggtctccgccaccgtaaagcacaactccaccgtggccagtccgttctggtaaggcaccatccaattcgcgcgttgttctcatgtccctgtatgctggtgatgctctccaaaccgtccaattgaactaggagcccaccaatcactgggaacacgaactaatgtccatggctttcgctgtcctcgtgggcagaacgaaataggtcaccaatcatgcaattgacttaggggaaatgctcggggcaggtctaatttggtgtctgtcgctcgagagcgccggtcatggccccgttcggccggtacagttgctcaccggagcgcggccgcgttcaccgtcgtcggggacttcaaaccgagaatagatagaagtgcgagggtgtctttgcaattgtcagcgactgtgttaaatagtgccttgggctttgtcgggatattcaag

SEQ ID NO: 4834 - DNA, 387 bp, Zea Mays
acacgaagaaaaatgcaatgtgtttacactacacatgatcacccacaatatagcttacatttaatatgcattctaaaagaaattccacctatgactagtgcgacgtgcagaagttttcagggaacacaagcatatagtcatacatactgtagtaacaagaatcattgatgtggccagagattttgttaccttgttctgcgaggagttgatcaaccacctttccaaccttcagttgataatgaattggcaacaagaatagcataagtacaaatcagagatcatgcatgcatccagtcaatgtagacacaccagcaaaccttgttaaagtgctcatactgtctatttccgaggccaaacaccccaaaccgaagattattcaaccactcg

SEQ ID NO: 4835 - DNA, 884 bp, Zea Mays
gaaactttagagaaatttggtcctaaactgtgactgtcaggcacactgatgaacatattccatggtacagtagccgatcggatcagaacaccagctcagctcaccgccgacgaccttcgccgcgattcgtgctgccgccgtccggatttgctcagctctcggggtaaaagatcttcaccacccgcgcgctggaggtcactccggtgactcaccgtggcctccctttccgctttgcgactggaacgataggctcgccggtgaccgccgcctcccggccgtgcgccgcgtggcttaacctttccaccgcgtcgccgtaactccccactgctgtctaatcaacgccggtgaggttgccacggcatgggacaccaattcatgcgcgccagtgttcttctccccctccggccgccgtgcgtccttctccaaattcccggccaccgtcgatgccctctataaattgatggcgcgggcagctgcgctacctaatagtgaaaccagagcccccactcccaccctcaatcgtcctccagagctcaccaatttccaacttcccccaatttcggtctccgccgccgtgaaacacacctcgctgcggctagctcaactcaggttagttcataccgattgctccctcgtttgagtgctctcgtgtacctgtgatgctcaccggccaacccaactgaactaagtcccccttaatcgccgggaacgcgatcaacccttagcaccgcccgcggtcgtcgtggccagagctcattagttggccatagatgaaattaggttaagggaaaagctcgggataggtccaatttgatgtccgtcgctcgggaaccctagccgttgccccaatcggccggcctacgagctcgtcggagctcgaccgt

SEQ ID NO: 4836 - DNA, 294 bp, Zea Mays
ctagaatctctagggtgtggctgctgcagtggagcgaaggcgactcggtctctacggtggagaagaacaaggagacgacgacgataatggctagggttcggccgtagcgtgcgttgcgggtgaggtgagctgaataattgcgtgctcgtgggtggaatcatgggcccgatacacatactctgctggacgaaatctacgtgaaggcccatggaccgacacgtggattactgtttcgtaaacggaaacataagacatcgtaataccaatatttgtgtggggactaatatggctgcc

SEQ ID NO: 4837 - DNA, 484 bp, Zea Mays
agttataagtgatgaactgcttggatcatattccaaggcagaagataatgcattatccacagccttcggaagtcggggaaagaagagattgaatagagtttttgatgctattggcttcgtctatcccgactaccgctgcccgctacggggacaagggaagaagagaaaagatgatgctttggtcgccccagctaagcatgtgccaaaggctgtgggcaaaaagatgaaggtacttacccaccggccgcgttacattgaaccggctgtggtgcctgagtttggcaaggaggcctcttcagctgctgaatcaagagaaactgttcctcccatgcagaggactgaagagccggctataatgctgaaggtaccttcggttgagctagttgaaacgaaggttgacaaagataaggctgaaaagtcaaaaactgaagaaataacaaagatgccagagattttaagcccttcaacagaagcaacaatgccg

SEQ ID NO: 4838 - DNA, 315 bp, Zea Mays
atgccctactaacggagcaatcggctaaagtcggtggcgacttaagccggtgcaacatgctcatgcttacttaactcggggtgaccactatgccctactaacggagcaatcggctaaactcagtggcgacttaagccggtgcaacatgctcacacttacttaactcggggtgatcactatgccctactaacggagcaatcggctaaagtcggtggcgacttaagccggtgcaacatgctcacgactacgcaattcagggtgaccactacgccctactgacaaaagcaagcgacttaagtcagcagcgacttaagg

SEQ ID NO: 4839 - DNA, 1523 bp, Zea Mays
ctggcgcgaccatgcggtcatcccaagagaatttaacgaaggagacctcgtactagttcgaaccacctggacagagtcacggggcaagctggagccaaagtgggaaggtccattcatcgtcaagtcgaaggcgtcccccagtgcatataggctaacaacgccatccagcgaagacctagaccattcctggaatattgacaatctacgcaaatttttttgtttaagtcctcagggcctacgcgcccttgtaattcaccaaacagcattattcaggcccgcactcttttcctcccggggggtgaggtttttaacgaggcggagccatgtaatatatatgcaaaaatcccccgcaaaaaaataagatgcaacatgtcgaaaaagaccgcatcaacggtttttgacattcgaccactccaaagtcaccacgagaggcagcgtagaccaccctcgcgtgtgacactccacgcaaaagtcgcctaagggtgcagccggaatagcacaacaagtgtgataatcagtcttttatccaaaagacactccacgcaaaagttgcctaagggtgcagccggaatagctcaacaagagcgttattcgaagtcttttcttcagaagacactccgcgcaaaagtcgcctaagggtgcagccggaatagctcaacaagagcgttattcgaagtcttttctttacaagacattccgagcaaaagtcacctaagggtgcagccagaacaacacaacagaagcatcaaacgaagtcttttattcaaaagacatcgcaacaattacctaagggcgcagccggaataacgttaatcgaagtctatcattacaaaggcactccgcacaaagccacccatgtacgcagccggaacaatacaagcgtacgaatacgaccaacaggccacaccaccattacaattacatacacacggcgagggcatcacctattacacatacacgacgagggcatcgcctatcacatcggctcaaccttcggaatgatacccatctccctgtaattaaacaacattatcctcaattcctcaccctcaaaaagctcccgaagatccccttcgcctatgcccgcccaatttggcaaagacaacaattctcgcctaccaacctcgtctactcgatgtcggccacgctccattcccatgcgacggcgcctgccgctccgtgaaaattcacccacacactgctttcccaccacccttcaccgcctacacccagtactagtaccagaaagatcctcagcacccaccacactcggcgaagtctccgccacagccacatccaacgcaacaaaataatctaagccttcgtctgaggactcctccgtccaaggaaacgaactcccagactcaccgtcggactcaaaacattcagacatagagccagacacattatcatcggcgggcactacaattgaagtctccgccgcaaaatcagtattgtcagtagtggttacttgcgcaggcccaaacgtcggaacctgcgcagcaaccgaggttcagtatcac

SEQ ID NO: 4840 - DNA, 430 bp, Zea Mays
actgataatgctagtgtcaatacagcagcagcaagcctattgacagcaaagaggccctcaatattttggaatggatgtgctgctcattgcctagatctcatgctagaggatcatgggaagcttgagccagtggagcaaactatcacaagtgcaaggcagatcactaatttcttgtatgctcacacaagggtgttagatttgatgagaaagtttctgaagaaagacttggtgagatctaggattactagatttgctactacctacttgaacttgaaaagcttgcttgataacaagaaagaattgacaaggttgttcagatcagatgaacttaatgagttgggttacttgaaaaaggacaagggaaagaaagccaataaagttgtgagatctgaaaccttttggaaaaatgttgatatagctgtaaattttt

SEQ ID NO: 4841 - DNA, 613 bp, Zea Mays
ggaaagagcctctgccgttctcgcaaatcggcgccactgtcattcaagcttcggtggtgaagggtagagcatggcccgtgcaagcggaggccggccgcgacatcgctcaacttggtggtgacttgtcatcatcgcaattccttgccggaatccagaatcggccgaggatccgcaccgcattggaccgacctttttcccatcgccattcgtcggtgagatacccctatctagtctgtcatgttctgttcactctaagacgcggggtcatgcaagatttagagaacggtggcaaggaatggaagaactcacggcgagctggttgccgtgaggcgcacgcgcaccgccgtgttgcggcgccaaggaagaagggggcattgtcgattagagtatgaacggtcgggattaattctgggcatatcccctcgctccatctaacgatagccgtggatccacatgggaaaagttggatacgacccgagatagatgtcgcccacatgtgatcggaaccatccaattggaatcgtgtggctggaattagaacactcatcgatagaatcatgactgtagatcctcaatcgagggcgatcgtcgcgtactgattcgaggagatcag

SEQ ID NO: 4842 - DNA, 404 bp, Zea Mays
cttactcaagcacaaggtacaaaagtcgctcttggtatgctctttatccttgggccagttaacgtgtttctgccaatgtcgtatatttaaattcaagacatgaaacatctatgttgcttgtaatctgagtatttgatattcgtataatttatttaggagtgtggactcaagtgatgctgaaaaccctaggtttgatgatgtagatgctgctaacatgcacatggaggtattagctcccgatctatctcctatgttcttattgttttcgtctctatatcccacattcgctatgttttatgccaataagatacctttttcctctttacttgttttactagattggtagacgcatatacggagagaggttggaaacaagtgatcgtgatgttgacatggaacaaagg

SEQ ID NO: 4843 - DNA, 501 bp, Zea Mays
gtgcagccggactggcacaacaagtgcgcgatacgaagtcttactaaaagacactccgtgcaaaaatcgcctaagggtgcagccggacaagcacaacaagtgtgcaatacgaagtctttttactgaaagacaacctcgtgcaaaagtcgcccaagggtgctgccggacaagcgaagggcaataggccacattacaatacaaatagattacatacacacaacgaaggatcaccagacccaccgcgcaaataaatacaaattgcgccctctactaccacacgacaagcgagggcatcacacactctacatcggttcaaccttcgggataatacccacctcccgataattaaacaacattatttttaattcctcacccgcaaacaaattctgtaggtccccctcaccaatactcgtcctcaccgacaaagatagcaagtcgcattgattacccccgatctacacgaagacgagtttgctccaaccccatccgacggcgcctccc

SEQ ID NO: 4844 - DNA, 654 bp, Zea Mays
aaatggaaaataaaaagaaaagaaggagaaaacgacttgggctgaaaatccaagaaatcgcgcttggcccactagtattttcgtggccagcccagtctcatccctgcaccgtgccacggtatgacatgcgggacccaattgtccacgagaccaagtaatcacccgcgtgtgggacattagctctgtcaccgaacaatgggcctgccatgtctgcttcccaagcgcgcactcagatccgcacacactgacattgtggccccggaacgccagatatcttctttcccatgcttccgcgatgatcgggcgggtggaaaccaactgcggcatgcgcagaccagctggttgactgggcctcgcgtctataaaggatagggagttcccaagccacacgcaatctcttccccctcattagaatccgctccaccgagtttgttccgccgcgaagagagaaaaggaggacaggagggaggtcggacattggccgccgccgcggacttggtcatcagtcactggtgacgccctcaaagcagtccggtgtgctcgacgtgaatctcgggaggattaccgttgggacgccacgggcggtgctcgactgggatgcgcagtacctgtaacatcccaattttgatcccgaggttagaaaccctaaactcc

SEQ ID NO: 4845 - DNA, 693 bp, Zea Mays
gccgactacctcgacatcccactcaaggacaacatcaaaggatggtgcctggagtggtttatcgtggagaaccacgggaattccctccccccatggtcagggagacagccagatgttcgtactccgagctggaccgagtcccccacagacctggaggtggctgaggcaggggctcttcttgctaaggttggactgttgaaagagagtggtctgactgcagaagctgtggtcgccgatttcgttttcaagaacattcagccattaaaggatagagcctacccggcttatttgtatcgaggcctcgctgattcgacctgggttaccaacagaagaattcctgcagtggatttggtcagccggctcgagatgatactcagaggcaaggtgtcgaacatcggtgctcctgttgcatactcggcctggaatctgcctccttccaaggcttttaccaattttgtgtcgaatcctcctgctagtgatagcggtttgggccttagagtgcgaccctctcccgaagaggttagtgctttggttgcctcacttggtgaaatccctgatgatgagaggcaggttcatttcgaggtacctttgaatccaagtgatgctgagataagtgccatgctggatatgttggctgaagattcctctgatgtagcccctgctgaaacactggatgcaacgcccatcccagag

SEQ ID NO: 4846 - DNA, 342 bp, Zea Mays
gcatataaagaccatgtgggttaagtcgggacttagctttgttgcacatggtgcaacgcgagacgtagcgctcaacatcatgatgcgcccaaggcgaatagaagtgagtggacaacacatcctcagtattcttaacaccaaaatgtcccatcaaaccacccccatgcacttcctgcaagagtagaagacgaacggagctagctggaacacataacttgttagcacagtagagaaggccttcacgcgacacatttttttgccacattcttcactctctgcaattttcaaaagcatctttgaattccaaatcagctgcatacaatccctttataatatccaaac

SEQ ID NO: 4847 - DNA, 605 bp, Zea Mays
gaagaagttggtggaggcatcccaatatatggtggcagtggcaaatcaacaatgtagcgaaaaggcatccccaagatgctaatgtagttgttgtgaatgtctatgtagtatgtgtgaggtcaacaggcggtggacgacacaatccccatcaatgatcagaaaaactaaaaattgtacaacaacagtgggatctaccatgtacaactcatgggtgcatcgaacaatatctcacatgcagacacggcgagtgcacaacactcggagaggcgagctactacaaccaatgatggcacaacgggtaccaacgacattgatggatatgatcacttttgcccatcaacaacactcatgatctatctgccttcatggccgcttagggtcggggtatgcctccacgtgataggaatgtggctcaatgatgagcccggaacgaggcagtaacgacctagcgatgatgaccacatgaggagatcccgatcttctgtgcaacagctacgacaaaaaaaatcatttggatcgatacgatcgagtgttaaatggtagcgctacccccacacatatagatagatctctctctcacccacgattgtgaaagctcattgcgt

SEQ ID NO: 4848 - DNA, 730 bp, Zea Mays
gagggaggagaggctcacaagtccctttatcggggtggaagtggagcttagaagttgtagggtggagtcctagctaagtcttggctgggctgggctccgacctcctggtcctcatcggtggttctcctcctcctgttcgtccttgtgggcacgtatccgtctgaaggcgcctggttgccccaagagctctctcctttggaccgattaatccccttttcctggaggccagcctctcacttttataggccaggagaagggtcggtcagtggtggcttccctgtgaaggagccgtaaggcatgggtaaaaccagtgttttacctcgggtggagccacacgtactcgtggggaacggggttgcctgactatctcgtatttaccatgatggatgacgtcagggtggtgatggtcctagatgttatcatttcggctacactgaccactagcctctgtagcctgaggctcggcgtggtttgtcgtgtagtgccctgtgggaggtctatgcactcaggcctagttcaataggccataagtgtactataggttgagggttgcgtgggccattaatgtgccacagtctgagggtctcgtatgtcatgagtgttatgtggcccgatgtgctcgtcggtcatgagtgcgaagcagaccggccccgcgctgtggctcggtgccagacctggttaaatgtggtatgtatttatggcgagttagtctgaggtcgagtgtgggatc

SEQ ID NO: 4849 - DNA, 977 bp, Zea Mays
cgatcttcttcttccccatggttctccggcacgcactgactgaaggatgccgccgcgtagatcctagctaaatggcctaaccacctctgcacctgttggcgtcaaccacgctaggactataaagacttccgggatcttgtcattgggggtgtgtcaaaatttctagccacctccgtccgagaaatcgtgagaggagagagcgtcggtggtcaccgcgagcgaaccttgtctcagtcgccaatccagcctgggaaacctacccaggaggaggggttggggtggtagaaggtgtgcgggagcgcgtgtgggcgcctgcgcgactgggccttgaggaatttctcaccgacgtgtgtccactccgccgagccatgaacctgcgtggacgtcaagcagccaaaggtaagaaggcacccctagaaccaacctcggtatttcatatgtgtagtgtcgtcgaatcaagtcggctagttttcaggcgggtgtggggcgaatgggtggtcggccatggtgctgccatggggccacagggcgtcgaaattgggaacattggggtgctcgcgagtggcgttggcatagataatgtgttcgggaaggatcagacttcgtattgaactaattaaatcagagtttggggaccgtgggcgctatatcgaagttctccggcgggcttcaccgcgttcgtgggcggcgccgccgtccactcgaccggaaggtagggagagtgtgtgggccattgatgcgcgaatgagtggccaggggagaacttaacaaaacgttttagttagatccaatttggactgttagatcatagagctacggatcggatcggatcgcacatatgtgatctggcgtccgtcgatcctgaatcctacggtcgcatttgtgtaccggttcggggagaacgtagacgtgatctggatcgccggcttctaatcggacagctaatctcgctccataccccttttccctgtaatttt

SEQ ID NO: 4850 - DNA, 358 bp, Zea Mays
atcagatccaaatcgaacgccgtagatttacttggacgaacaggtacacttacgttctaatcttagccgctcctggtggatccaacggccaccagcccttcttccaccaaccacaccggacgacggcgcaatccccagggccacggcggaactcgccggcgagaaacccaatccaccgcccaggcgcgcaaagactctaaccctagtgccctacacgatgctacaagcttggtgaaggtaaacagggtcttaccagagacggagatggctcacggacagctgctcacggcgaagcgcggatccgagatggcgcgtcagctccgacgaacgattcagacacaatcgcccgccatcccgc

SEQ ID NO: 4851 - DNA, 446 bp, Zea Mays
agtaactaatttgtagaagtattccttctaaaaatagatattttgttcaagaactagtagcatacagaaaattgatatacacctacggcctcaaactttttttcgaaaatagtagggtgcccaggggggctggccccttgctatctgcacctttacatgcgtttggcatcatctgatttaactgaagccagcctaacgttgttgtggtgaaaaatatttaaagcagataacatttggtcatatactggattttgctgtgatagcatatagtattgtgtggcagattggtcttccagaatgcagctgatgtatacctggtttttgtgcaatacaacattgtattgtgttccaatttgtgcttcgcatgatgcattactaaacttcacttgatggttcccatgttattttgcctaatgaaattatatgtgccttatacctgtccgagg

SEQ ID NO: 4852 - DNA, 1062 bp, Zea Mays
caacaaagcataagggtactgaaacatgagagaagagggcatgaacgggcctgtagcacgctggccacggcgagctcatgcagcgcggtgctctggaccgaattggggaaagtttcaaattgaggttctctagtcagtaattggaggcacgagtgggtgtgttgggtgcataattacatagcggagccgagggtgtgctcaatttataggattcggggacagtggctcgtgatttggagttggcacggtggcggccggagagggaagaggttactggcacaagcaattcgtggcgttcaccgtggcaagctcaccgacgatgaacgggtgggctaaggtgactcactgcgatgtggttaaagcaccaaagcacatggcgcaaggtcgcgaggtggctaactccggtgagtttatccgaagcggatgtgactcaggcgggtacggcggccggagcgtaacagtggcctgagttcatccacgatgcgatatttcttacccttatgatttatctgcaccccacagagcacgaatcgcgatggcgacgaggatcacgacgcgggatcaccggcagcaagggaatctgaacctggcgatctgatccgaacactgtaccatcgaaaacctgattcagagcgcctgacacacagagttgcaacgcctagatcttggatttttgtgcaagaacctgccaatccatctataagaaacttgtagccctacataccagctacaattttgctatagggatcttgcccatttgcttatctccttgcacaagaatcgagcccaaagttccttagaactcactgtcagtcaatgttcagtcttagaggagtttgacagccagactttagggctaattatctccactttttgtataacaacaatgcttaatcacttaagcaaagttgtactcctacagtggctctacaagtttgatgtgttgaccctaggcaaattccttattttttttagaaatacagagctccaaagtcagccctattcactggttttgggacttaggcatatgagaggtatagagtggctttttgcaaataagcc

SEQ ID NO: 4853 - DNA, 573 bp, Zea Mays
tttgggcaagaattcaagcaggattgagcaagaattttcttaggattgttataacaatattgtagctggatcttagagctaaaactttgctaaagggtgatgatcatgttactgcacaaaatcgggagtaaacagccctgcaaatcgctctgtcaggtgactgaatgggctttcccatggtaaagtaacctgaaacagatcagatcaagcgctcagctcactgccgatgatctccgccgcgattcgtgtcgccggcgtctcgattcgtgctcggggtaagtggataacgtcttggggtagaaagatcatcgccgttgttgagctggacaccaatccggctagccgccgtacctcccccttgttcaccgattgctcgggtaggatctcaccgccgttgatccctcactgccgtccgccgcatgtccaaacactttaccatgtcgcagctaactgtgctacgcacgtccgatgatcgccggaggagcagccacgttaatagccacgttgcgcggccaccagtgactcacccagttcatacctatcgcaatccaccgctcaaattcgctgtactcg

SEQ ID NO: 4854 - DNA, 423 bp, Zea Mays
ccgtcgttgtgccggaggtgctcgtgtgcgccctcgccaacatcgtcgggcagatcaccgtgagcaagcgggtgttcgacgcgcagggggacgactcgaacaggtgagctaggtgccgcttggtttcccttcttgcagaaaagctatatacgacacatatactgcatcaaatttcttctgtctaccaacatattaataagctaatatgtgcaatattcatatatcatctgcgagtatatatcatatatgcgtgctgcgagcaggtacaaggacatgatcgtgtcgctgatgaccggcacgggcctgttcaacatcagcgacttcgtgccggcgctggcgcgtctggacttgcagggcgtgcaggcgaagctgcggcgggtccaccaccagttcgacggcctcatcaccaagatgctggccgag

SEQ ID NO: 4855 - DNA, 313 bp, Zea Mays
aaagaatcgatgcttcttttcatatgtatcaactcatcccgttgcccaaccatctcaaagacacggctagccatcaccactgtatttacatcggccacaactccgatcaatgacatcagttccattattttctgggccttgataatgcatttaaaggtcacacatgactccaaaaccatattgaacaaggtggcattgttttttattgggtccagttttttcatctcccgcctatctgtaacttggtccaaaaagctctcgcaagtctcaatcagaacatcagtggcaaggtaggagcctacctgtgacttca

SEQ ID NO: 4856 - DNA, 476 bp, Zea Mays
cttggggtggcctggagctgtgtagccgcttagcatggtcccgtaccctaagcctgcacgctccaccactctgcgacgggcgtcctagtatttggaactgtgatccaagggatctgggcatacaacttggcttcccaggctcaatcttgcaggtcctgttgcgtgaatcagaggatggctgataccagacgatgggtcctatgggtgtgctactaacgctccctagccaaagctgtgtacaggtccaggtcccagtcgaggctacctcctgggggccgttgccaactctttcttaggtctactggtatccagcctcgacacatcaagcctacatcctaggggggccaagtaccaggaaggagttggtaacgccacacacaacaaggacaaatagtatacatataagtgctaatactgctcgataaatagtactcaaaagtatcttacaaaaacaaaagttattacatccgccttca

SEQ ID NO: 4857 - DNA, 467 bp, Zea Mays
ttctaacacttcaccgttggttagagttaaattagtcaaattaggaccatcaagttgactcataaattttatccaagtcatttcgtgctctagatttaccctactcaattaaccacgcgttctccacgataatcaacatcgaagcgcttttcacccaataatttgcattttaacttagacatcacatgaacactactacttttcatccgcgaccataaccatacacatttagaccacaacaagcaattcaccgtgactacaagcttaactaaagtcatctaacgagttgattaatcaaaggaatggcatagcccgccatacgacatacacgtcggcttgcctattattatcgcagtccgagacaccacacctatttatatcacaatcacttactccatcgactcctacttaacatgagttggctaaggactgactatttcccaattatcaacatacaccacctttca

SEQ ID NO: 4858 - DNA, 415 bp, Zea Mays
gtctacgcgcccctggagggaatgggagtgtcatatcgggagtagtggagaacggttatatcgttgcctgggcatatttctaccaggggttcactgttttgcttgtttgcgcaggagcgccctctcggaccgttcagtctcccatacgcgaatctaatccctgagctcttcgttcgtttataatggacctatctgagagatggcccccaccttttccattgttctttccctcgcattccgttcatcggaaggggaagggtgtgctgggtcatgttgcctgtgggatcatggtgctcggaagtcttcgaacttgcccgcgtgaggccccttttgcgaaacgggcccctaagtcccctattagttacaacggatccgtctgggggcgcctcgtcttttcactactccttcccgctca

SEQ ID NO: 4859 - DNA, 817 bp, Zea Mays
aacttcatggggatggcatccatccactttgtgaaatattctatgattgctaaaatctattgatggcctttgctggacgaggggttgatttttccaatcatgtccatcgcccaacccctaaatggccatggtttcacaatagtgttcattgttgacgttggtaccatctgtatcttcccaaacctttgacatgcttgacaccctttgtaatatttaaagcaatcctcaagcacggtgggccaatagtatcccgaccatttgatcaaccatttcatcttgttggttgattgatgagttccacaagctccctcatgaacatcatgtaatttgcctcagtcgaccctatgcacttgagcaacaaaccttccatggttctgtagaacatgtcatctcctatcaaaacgtactttgtggctttatcacgcgtccttctgggtgcccccgagccaaatccttcaactaattgaagattttggctctccaatcgcctgcttaattatgcacacctaggagtcttcgtcgtcctagcatgctttatgcctcgaggccatttgtgccagatcattggcttagacattctgagttctgtgggtccagtggaaatttatgtatctaaactgtgtcatcaactcacgtcattccatccatatttggaataacgactcgctttcacacttataatcctacgtgagctgggatatcactaagtttgcatccacaaaaatttccactgcctctgcaccaacctcaagcagtaatcccatccctttgcgtatggcatggtattctgctagattgttagtgcagtaatccgaca

SEQ ID NO: 4860 - DNA, 503 bp, Zea Mays
atgaagggtacctccacggcggaggaagcagtgatgttgatggcctaggaatctggtgagtaagtcgcgattcctaacactagagagcgattcggtttctgacctcccctggcgaggccttaatccccgcctcgttgacgtcgtgaagcccacaggccaatgtttgagccctgaacgacggtgaagatgaggaacagcggtggcggcgatttttcttcggttcctcgcttggtgctcacgacaaaggtggggtttgaggataggaatagggttcaagttcgaggggatgggttcgatcattatgcgcacaagtagattctgattctcggtcgatcccccagcgtggacccaccgaatcgaactgacccccgatggacccggctgatctccgcaacaacctcctaaatgcaagcgaggaggatgaacctgatgacagggtcccactatcagtgtcgacgaacggatgcaggcgcattgcactccgacgacgcaactaacccttg

SEQ ID NO: 4861 - DNA, 691 bp, Zea Mays
tgggtaggtgcatggggtgaggcgagggggaagagagcgggcgtgcatgggggttcaaagggggtcgggctagtggcagttgggcgagtagggcgcgacatggccgctttcctcggcatgcgtgcacgcacatgggaggcagttggctgtggggaggctcgcgcgtttgaaatgtccaagacttgctaaagggtgggccccacagacgccctagaagcggcatttgcgactgtggaggggggactaacaggcagggcccgctggtcagagaccacgggcgtgagcggctggtgggcggggctggcgagtagggctcgtgggcatagagagaagaaggggacacgaggacggggcggtggcactgaaagggcgggcccgccgggcaaagagagagaaaggggaggcgtggagcgactgggattggctggctgcctggctgggccaaaaggctgagggggatggtcgcatgcctctttgggttttccctttttattttgaattttgaatccttttccattttattttcctttttggactcaaaaccaaaatatgccacaaattcaaaaataaacatctcaagtgtatgcattaaacaaaaatagggtaggagggtcaggatgatgcaacacttcataaccagtgtgaggttttccctactagaaaggaattatatttctgactaaaacaaata

SEQ ID NO: 4862 - DNA, 515 bp, Zea Mays
cttcaagagtctgatcaaagttcgccagagataattcttgcagaccaatgagggcagacaaggcaggagaaggaacaccactactttccccactagctacgtaacgccggctgttcttccgatttagagggatttcgtcctcttcttcatcatcctcatcaacaacacggacagcacacccattggggtcagcgtcagacgggtcacacccattgggatcagcttcagtaaattcaggcacgggcacttcctcagcagcaggagcagaaggaccagcatcccgatccaagctagacaatcggtgaagacgtctcttcttctttttctgcccatcagcaggagaagcaggctgattggctcggcaagggcgcttcgggcgaacactgtcaggcctctaaatatccaaggctttactagcttcagggatgggcaccaccactaatgttccagcaggagcggcatcagaagaatcctcggctaacatatcaagcatggcacttatctttgcatcactg

SEQ ID NO: 4863 - DNA, 1021 bp, Zea Mays
catttttcttccatctgaaatgacaatattaccagcaagcttaggagcctccacatgcatcctcagttctgatatcttgcatgatgagaaagttatatagatcaggtgcgtttgtttctcttattttactaccctgtcccctctgatctagaccaatgatttgacaccatactttttaatgagatccgaatgcgtggctgctatagcatgtgcttatcaattgtgcttattctttattaaactatttttcatatcagctgttgttttgaagccctcctttcactgagagcatttagtgtcagtaagcaatccatgaatgcataatttctgctccagtatttgtgttttaactaagttagattctggtttagatgcctatatgacactacattcttgttaagttgatcatttaattagtttggtacctccagcaaatactgtaaatatgtttatggaatatgttaaatacttctgtatgtttgcttgccttatattttgtattttttctgtatagggctttgtaaacctgtcatcctttggataggagtgcatgaaaatctgcaatccatgtgtctgaatcatgacctgctattacttttactttatcttcctaagcattaaccttgcttctttgtatccccttaactggtggcttgataacactttgtattatgcattaaccttgcttctttgtatccccttaattagtggctcttggtaatgctttgtacacctgcattacattatagtcaagtattatgtttcataccttgcagtctgcactaacttgtaaaatagttcagataattggcacaagaacgaaactggcttatgcccttgcaaagcaatggtttggaatatacacaagtgcagaggagtccagtgacggtaattcatctctagctgttaatttatgtagctatttcttattattacataggtaaaacactgttgccaaacaatatcctgcatgaacagaatggcttttggatggtttggctggttttctaactgagttatt

SEQ ID NO: 4864 - DNA, 394 bp, Zea Mays
gggcggcgccgctcctgctcttcggcggtgagatcgtcgaagctagggcgggtgtgggctacgacggttctgaggacgccggggttggccagaattgtcgaggagggctcgatgaacacattgagggggtttcggccacgagaccaaggtcagagaggggagaacggcggagggagagctccgggcgggtcgggcagttccagtgaggaattctgaccgctaggagaggcaatcgactgagatagggctcggtctagttccagtggaggtgggggagcgctatgggccaacatcggggcacgagacggggttgggttggccagacaccgtgcgggcgaggcgagcaaacgcggccgcacacctgcgaggccaagttggctacgggtaggcgtaa

SEQ ID NO: 4865 - DNA, 282 bp, Zea Mays
aagggaaccactcgagtggatcctacgcccggccccagactaaccacgttgtaaataactggtcgcagtaaccatgcctggcacctagccacaccgcgtccgccagtccacttcccactcataacctaagaacccctcgggccacgtagcattcatgatctacaagtccctaggaatgtggcgcatttatgctccgcgcgcccccgacctacgacacactcatggcctatcgaattagacatgtgttgtcattggcgatgtctgcgttctctgcgtcccgac

SEQ ID NO: 4866 - DNA, 458 bp, Zea Mays
taacttaatggagatgacaccaatgattgttttgtctagacccactcgtagaaaggaggggaagcttaggcataagaaccaagaaattacatgagaaagatagtttacttatacacacaaatcaaaaagtttcattagaaatcacacattaataataaagagttaactattatatgaataagttaagaaaataatctacaaagattattagagtcaaacattagttatattatcaaccttgctctaatgtgatggggcagtggtggtcccgtagtgtatgttgtgtagcgtcatggcgtttggtgtcatcatgatgatgggatcagaccttaggaggtgtgttggtgggagggaaggagagatgggatgtcgacacaatcgtactggtggaggattcacaagaaagagtgaggaaaggcggaagaggggccaccagatcctctacagtcactatagag

SEQ ID NO: 4867 - DNA, 278 bp, Zea Mays
aggcggtcaagagaagaagaaagcgggacaagctcaaaggcatcaagctgggtattttcggccgtgagttccaagaggacgtcctcttgtggcacatcggcaccaccatcttcctcgcccgcagcgatcgacagctgctcaaggacaaggccaacaagtatctgggagcagtcgaggcgctgtcggactacctcatgtttctgcttgctgtacgcccgagcatgctgccgggactagagctccggaagctgttcgaggtcacctgcaaagctttgaag

SEQ ID NO: 4868 - DNA, 436 bp, Zea Mays
ccttcgtgcaggaggtggagtcagaggccattaagattgttggaaagtatgtgccaaagactaagatgctaaagagttgggatatccatggttccaacgtcaggttgaaccgtgttttgagttgaatagcttgccatacggtccctacccggagggggactccactgatgctggcgacgaccgaggaaaacaggtgaagacccggcctaaagagggcacctcgaaggggaaggttgtggttgcagctacccaaaaaaggaaaatagatttgcaaggtatgggggatgacaagatggggccgagggcctctgggatttttgttgaggagttaatggggatgtgcgtgggtcctggggaggtgttgtctttgcccgagctccgggaaacatctttgcgcatgctgaaggttatcgggggtcaatagcataggaaggac

SEQ ID NO: 4869 - DNA, 551 bp, Zea Mays
gcggggcttaccgacggtgttagagctccggcgaggtggttggtaaggtcagggagtctttggtgaacacgtcggtggtcgaatggcggccggtggtggtcagagttgtttgtcctacgtttctcggcaatcggagttcgtcggtggcagtgttctggctagttggcgatgatagggttcaattccaccggtggggaagcttcacggggtgtcggggagatgattcctcgaaggaattggactggggttggctgtggaagcgggtccacgttcaccggcgaaaaccgtgttccggcgaatgtgattgtgcggttttggtgaggtagagttccggatggggccttgaagagtcctagggaactcaggggtcttggtggtggcgctggttgaggtggcacgtgaccggaggtggtggttcaccgtgaccagccttgggcaacaatggcgggcggcagtgttctcgtcctcggtggaattccagtgaaggttggttgggcaacggttgggaaggaatggcggaaggtggtgcgacctttataggcgcgagcacg

SEQ ID NO: 4870 - DNA, 453 bp, Zea Mays
ggatgatgaagtcgcaaggaggcccgagttatcaaacttcaacgccgatcaatgctaaatgatgcagatactaaagcgaacacgtgggggaaggtattactgaagttcatggttgcggagatgctcgaccccgagagacgtcgtgctggagttccttccgccaggccctagctttctcgtccatccatcgatacgggaatgaggagggtgccgaccagtatatatagggacatacgagtctaatctagcgtggaactaggccggacaggtagaagattgagacggacttcagaagtttgttgcgaattcgtaggtgcgcacgcgtactagtgcgattctgttgcagccactggatcggagctcacgcttgaagcagatcctggccaaagtgccccacatgtcattgagcttggctgacatcatcgttgaggtcgtggtgacatcatgcgcgac

SEQ ID NO: 4871 - DNA, 350 bp, Zea Mays
ccttgtatggatattgtgcagctcagtcatcttatactccacagtgaacttctccatcttcatggatccatcaaaattgctgaacaattgtgtaacaataccatgctcctcattcccctcctttatgatctcaagaagcatatgttttgcactatcatagacctcaatcactgcacaacgatgataatcattcttacatatcttcctccaaagcctgcgattagatcctgtaactgcctgaccaagtgcaagtgacagctcattacagagcaagaaacaaggccaacggattacacgcacattccacagcttaggtggcagctcaagaagctcaacctcacgatcactaa

SEQ ID NO: 4872 - DNA, 315 bp, Zea Mays
gtggtgttgagccctgcttttgtctcttattgagggctagccttttcttgcttggtcgtgttgagccattgcccatttctttggggaccaagctttgcttactctaaatgacttgtttggcttttatctggcttttggtcatttgagtgactttttcttcttcctctttcttcttacatatgctcatatggtggtgttgacaatgcactcatcaagggggagattgcgagcacaaggttgacttgtcccttgtggttcaggttaatgacgagtgattgtcaacgggtagcactctggggtagtcagtggttgttg

SEQ ID NO: 4873 - DNA, 409 bp, Zea Mays
tccatggtcaccaccaccggcgtgccccgccggacatccctcccccacgggtaggccagcctcaggcccggcgccattgccgccgacaactgaaggaaagaacagcactcgcgaagcggcgaaggtaagggaacaccagcaccactgacacttctgttctcaccggggccctctgcctccacctacccgccgtcggtgctgccgagaacgacgcggagcgagcatctctagcatcaagagccgcctcccgccgcctgggatcgcggaatgcagctgcgtctgcgcgggtgggtgggaatcagatggattcacagtaactccccgagcttgccgcgggctcaattcctaatcttccaccgccgcaggagagatgagcggagcagtggtactagtagagctcagcggcgtc

SEQ ID NO: 4874 - DNA, 805 bp, Zea Mays
tctacaatgaggctggcttcaatgccttcaatgcaaacagtgctaattcatgtcacctgaccacgaacggcagacaggactcgagcgggtatggccgccatcgcatcagtcagctcaggtctgacgctctggaggtggaagaaggtggctggactgtggtgaggcccagacactggtggcgcaagagtgttgaaaatcttaggagatccccgacgcggcagcagatggatgtgaaaggacccaacacattcaagatgaagcttcagggtaaatgctacaactgcctctcaccaaatcacctagctttttgttgctcggcgcctactcgttgctggcgatgtctacaatctggacatagggctaggacatgcccagggacgtactacaggagcaggcacaattcaacttcctctctgcctgaaccagtgaagcattcaatgcagaataccaacaatatcagctccagacaccagcaacaggcccagttacgacacagccctcttcataaggagcaagaacaaatccctcaacctgcactcaacacctcttcagttcaacacaaaaaatcttacctctgtgcagttcaggagggccaaaccatggaggcccgctacccaggagatccaagggcaaggccggcgcgcgcctcctgcgccatttcagcaactggctctttccgtcgtcgcagggatgacctcatcagcaaggcggtggtttgctcattcgatgggaacaaccatgaggttgacatcctttcggcaggagacatgctgcggcagaagtttgatcttcgccatggtcagta

SEQ ID NO: 4875 - DNA, 383 bp, Zea Mays
gcgaagcttcctaggaatggcagggtattaccgccgcttcatcaaagggttctccagcatagcgagaccaatgacagaacttctcaagaaagatcacaaatttgtgtggaccccaaaatgtgaagaaagtttccaaatcataaaagagaaactcacaacggcacccgttctatctctgccagatattcatcaagattttgtcgtcttctatgatgcctcaaggcaaggcttagggtgtgtgctaatgcagaacgagagagtcattgcttacgcatcacgcctactcaagccgcacgagcagaattaccccacccatgatctggaattggcagccatagtgcatgccttaaagatatggaggcattacctaatcggaaacaaat

SEQ ID NO: 4876 - DNA, 574 bp, Zea Mays
gttgtataatcaaataaaggatgtattattaagattgagttaaaatgcggggtactagtggtacgctaggcaggcggtgttccaaataaataaatcggttgatgtggtagttgtcgtgcgtgatttattgttagtgagtagtggaattacgagttatttgagaatcatgttggaaactagtatgcggcgagtaactgggttcgtgtggtgaataataggtcagtaggtattgttggtgtcattggcaaatggggatgatttctgttgtgcgataaattttgaaaggcaaagaacatggtagtgtgtcgatcaagttaaccgatagtgcttttatgtgcaggataagatcgatgccttgtcgtcgtagtctcaagaattttttctaaaatgtgctagtgctctataatgatggggttgaatggacttgagatgtattacaatagctgtgtgtcgcgtgggttatccaaaaacggcaaaaggtggtgtatgttggtaattgggaaatagtcacgtcattagccaactcgtgttaagcaggagtcgattacgttaagtgattgttatatacatgttg

SEQ ID NO: 4877 - DNA, 548 bp, Zea Mays
gcctgctgaagggtcctctgctgctaagtcaagtcaccccgctactgccgaagctaaggtgaaatcggccgaagagccaaaattgaagatggcagcggaaggaccgaaatctatgagctcattgcaagaaacagaacagccgaaggtacaaaagattgcttcaataactccaaagagaagaaggatggccagtatattggacgttgttatagaatcagtgaaggtgtcaactcctgcatcagcgcctgctacagaggggaagattgtaaagggatctgttgatgctgacacagcgcaggctgtggttgaggctggacccttagcccccaccgaagagggtggtgaagcaaggcctttggaggctactgagagaccatcattgttaagtgaagagggtgctactaaagaatctaagttccctacccccggagcccctgccgaggaattagaatttatagtgcgtcatgtttcagggaaaaatattgaaagaacaaattgccgaagcgcgacattacgccagggatctgcagtaccctcgagggtcattg

SEQ ID NO: 4878 - DNA, 533 bp, Zea Mays
ctctatgagctcatgaggcacactttgctactgaggatgggatacagagaagccaccactcacatctagctctggctactcggtgccttgatctcacactctgagtttgacgtggtcgattttctaatttgtgagattgaggacacaattttggatgttctccatgctcggcgtcagctgccgtacgctcactatctctgttacatatttgctcagctaatccggcctcctcagttctaggccaccctcgaggcctctagactgcagttcggcttctgccgcctagcacttgaggacacagctctaactccagcaccagatatcagggttgaggatgaggccatcagacagtttgagaatcagggtgcagttgctgatacttcttccgatgatgaggaggatcagggggattccgccacaacctctcgtgccaccttgttctcatgatcacgaggctaatagctctagtgctgctctagctgctcctccagcaattgaccctgctttggctaccatcctttagtcgctcactc

SEQ ID NO: 4879 - DNA, 465 bp, Zea Mays
cccaaatgtgacgcggagggtgatccgcccaaggggtaggcctgatggcctaggatgatgccatgaaacggcgccaagcttcggcacaatgttgagcgcgcaatgcccaaaccatcaaagatctcgacgtacatgatgttgagaccactcctccatccatcaacatcttgatgaggcgctttgaccccacaatcaactcgacgatgaggggttacgtcccaggatgtgggatcacatcgaggtggtcgcagcggtcgaagactatcgagaattctaaccaccgtaggtaccacgggacgacgggctccacgacaaacacctctctttgagccaccttgtggcggtgtcaatctccttatgcttctccccccgaagatcatgaggcatcctatggtctcagggaattcttcaatggggacttcctgttctaccggcttcgtcggctctttcttctttgcttttttg

SEQ ID NO: 4880 - DNA, 494 bp, Zea Mays
agctcagataacacgtatgtcgtcaaaggttcagatgactgcaccggacccaccagtgcttctgattttcgtcacagcttgctacgtgtcaatgcgttcagagtaagctttatatcatcaattagtgcttgttctctgggcggtgtggtacttgtattgctagcgactgtggcagaggcgtagacgcgtagtgatactgtgccgcatgaccgactgggctcgtgcaggaaccttggttctgtttatacgcatattgagccttttgtggagtgtttcatgggccatgttttcgtgtggtgggctaaatttaagcaacaagtccacaaagcatcagctcaatctgagatggctaccaacctgagagttttcgttcacctgacctgatggtgcagtggtagcggtaattgcgtcgtgcagtggtaacgcagctagggatgatgcagaatcgaggctggacgcggaccgacacatacggtacgtgttccggtttccgc

SEQ ID NO: 4881 - DNA, 641 bp, Zea Mays
tgcttgatgccggccagggtctgctatctttttgttcttgttcgaaaaaagaatgccccgaacaatctttcagatccatggtttgaaatgggtggtgtagtacttttgttctgttctgagctgtgactgccggcgaagatgagcgccatgcgtctgcatgcctcactggttccattttcctagtcactgcttggactctcagactatgatttatttcctgttaccatcgatttggtcatcagtgctaccactaaaggtagtgcaatagatcatgctatcaatttacaaatgggagccggaggaaaaaaacaggacacgttttgtcggatacagaaccagagggcaaacggacagatctgactgatgactagcactgataagaaatgttgtgaatccgaggattataataaggttggtagggcttctttgcaaacagttttatctaagaatctagagaagtcgtagaagccaaggtggcttgactcttctcttacaaaaaaaggcttctcctctagagttttttcacagggtaggattcaattcagccaagaagccagagctaaagtgtctcaaaagtctttccagaggaaccgtaagtctttcgctcaaccagtgagacaaccaaccatatactattatac

SEQ ID NO: 4882 - DNA, 815 bp, Zea Mays
gttcgtgctcctattgcctattctgcttggaatctgtcacctcataggtcatttttcaatttcttgtccaaccctcctgctagtgatagtggtatgggtcttagagtgcgaccctctcctgaagacattgaggctctggttgctccccttcgtgatcttcccaatgatgagagacaagttcactttgagatgtcggcaagtccggatgatgcagaaatagatgttgtactcaatatgttggctggagaatcttctgactcggcccatgctgaaccgatggttgttatagttggacaagagcttgacaaaacagtggacacccgaaagcctgagggtactcgcccaaagcgtcctcactaaatcagccgtccgactacgcctgttgaggaaaagaagaagaagaagaggcggcttcgacgactatcatgtttggaccaggatgcaggcccttctgctcctgtttttgatgaagtaccggcagaagtccttcctgaggttgatcccaatgatggtgtacatgttgaagctgatcccaatgggtgtgaccgtgcaccagctgatcccaatgggtgtgaccttgttgaagctgatcccaatgggtgtaaccgtgttgaaattgatcccaatgggtgtgaccgtgcaccggccattgtccgtatttttgatgaggacgaagaagaagaagaagttctgctgattcgtaagaatagcctgcgttatagaggtagtaggggggatagtgatattccttctctagctctgtctgctcttgtcagccttcaagagttgtccataacggattttgatcaggccct

SEQ ID NO: 4883 - DNA, 1098 bp, Zea Mays
tctaagatggtctcggaacacgcatcaatttgacaggaacgccatgagaatggtctgtccatgtgcacggcggaaatcgcgaccatgggcacgcgttcccgcataaccagagccgaattgagtaatcagacgccacggtgagtttcacaagtgcacagagttgtcgaaacaacattcaatatgggcaggggcttaccatggtggtccggccacggagcgcggtgtttcgtgcttgccggagacaggaaaggggaaagtggggtcgcggcggctctgggcgaaattgggagatgagatcggggctatagggccgtaagaggttgtgctttcaccgtgcgcaatcgatttgggaggaggtggagaaggcagtgcgaatcttgggttcttctcaagcttgcggttgaggcagtgagtgcctcgccgtggttcatgccgctatttaaagccacagcggaccgacaagcgatcagtggccgcagataaccttgctagcgcatgtataccacgtagaagagaagtacagtgaggtagaattgaggtgagagtgacacggcggcggaaatgactggtgcggtggccgctggtgaatcactccggccgagctcaggagatggcgccacgtatgaatcaccctctccccggcgttatccaatccctaccgcccacgaacccgaacggcggctgcacgaattttggcgcagagaggtcgccggcggtgaacatccggtgctggcagccttatcccaatctgagcactgtaccatggtgctccctcagtcagtcgacctgacagagctctttgaagccagattttctcttaatttcaaatggcaactcaactaactttctgcagcaaggttacacacctataatccatcttcaactttgccacaatgcttaccatcaaatagtcactgaatcttattcaaaatcgggctcaaagttcaccccatcacactgttactgaaaattcagtccaggggtagcctgacagctcgactttggacttaattatctctggattcttctcaacaagtgagcttacaaccttgagcaaagttgttctccttagtttgctttataatatttatgtggtga

SEQ ID NO: 4884 - DNA, 541 bp, Zea Mays
cgagcatcaactttagcctggtttgatagtgtcccataagacagaaatggatttggctggccaaccttgtagtgaaattgatagcaatagtattcttgcatggttatatgagcccttgaatgtgttcccctaacccttgtatcactatatgcaacaccaacttggaacccacgctctccatatggaaacagaagtggatattggagagccatatatgctggatgcaatgatgaaatacgcctcaattccgaatttcttgtctctataataatgtctcgtttgaaggtatcaagtgagaaatcaccaataacaagcatggctaaatcatcggttgttggcatattgtactgcacaggatctccttctctagccccaataattctgatgataaattcttcatttgtgtgttcattaagccttttcctggcaagcctaaatttcttagcaaagggattgtgctcgtctaacatctttgataattcttgtacaatatcttgtcttatagaagaggtaggaccatcagcagtggatagagagttta

SEQ ID NO: 4885 - DNA, 637 bp, Zea Mays
tttctttactatttccccaggtcactgacaactcacaaaaagaccctccagtttctaattcttcgcagaacgggatccccgacggtaaacagtgctcggtcgatctccgatgagcctgttccagccggatactgccatggcaggagctcccgagcgacagagatcgaattagactcctatcgaacacttcccctcaaccaatttcaccattggggctatgaatcaaccggtccacggtgacagggcggtggtcatacggatggaagcgttccgaccaaatgacggcgtgaacgaccaaattgaagcttgggaaagcttcacaggcctaccagaggtgacgcatatactaaattttggactgggcacaaatagaaacgcggggctacggagagggtgtcacagcggtgttctacagagcagaggggtgttccggtgatgagactcaggtaaactccaattggtcggctccgagagcaacagggggctacaaacaagcaagaactcgaatcaattgggtatgcactaacccgaggagtgctgatcacggtagagttcctcgcggcggagtaagaacagagagaaaggggatttgtggactgcgttagttctgcggcgtactcgattcgagtgcttagtt

SEQ ID NO: 4886 - DNA, 898 bp, Zea Mays
cttcaaactcatagaaagaagctgatcgttcaagaataagtctagccttctcttcctaggaagtggcctctttgagcatccgagacagatcatcaaatggttgctcctcttcaatatttagtctggcaggtaagaaacttaagagcgacacatagctagataatcattctaaaaatacttgtaggataacaaaaaaagtaaatttacatcgaagcttcttttaaaacttcttcaaccacctccattggcattactgttgcaagtgcctattacatgcatgaatggataatcaaaatcataatctgtctaggcataaaaacatatgaccaccctagacaatggtgcagaaactatcatacacacctcagatgcttgcttcttacataaggacctctttagttctttctcaacaataggaaattcatcaactgcataggataatagctcttgtgaaaatgatcaaaacaaccaaacatttaaaatacaacagtatccatgggaggaagtatttaaatagcatgccttttactcctagtaattctgcttccttcagaatgcctgtcaactcctcaacaacattgtgatagtcactcgtagcataaagttttctgagtatgttcttagcacgactcacccaagagcaacaatttgagtaacgttgcttaagaatgttcagctctagaatgcttaagttggcaccatccgcaacaaggagaaaaccctctagctcctggaacattcacaatagaggaatagaacatctaaaatcatcccaaaaatacataatagaagaaagaaaaaaaggaggaaaagccaccttgagatcagggaagtcttcgagatataattgacaacgggtttgccatgattccacatctttccacagctttgagataag

SEQ ID NO: 4887 - DNA, 578 bp, Zea Mays
gttacacccctagttttaatcattgccaacagtacccagactgttgacagaggagctagaagaggaattatcttcaccatttcctctgtcactggcattcaacataacttgagcagtgggtgtgcggtgagcagacgctgagccggtgagccagagtgttagcgacccagacaacagaacagccgccacaagtctcaggaactagagaaggtgagatggaggagaagaagaacagtagtattagggttcatcattctcgacgaccttcctctcagcggacaagctgtttaagtatctcattacatggcctccggcccattaattaatccagtcgcggcccacaaccctgggattcggcctgcgtgcacggcggcccctttcttctcctccggcttcagacttggtgctctgttcctctgaatgtgccttggcagctatgctgacattcccctctccaagagatggcggttgtccccaagccgccgcagtgggaaaacgttgacgcaaggccacctcgtcctcccatgtgtcaagggcttcatcacagttggaccagcgcaccttgacttgagccacat

SEQ ID NO: 4888 - DNA, 756 bp, Zea Mays
cccccgcagacgtcgcgcgacaccacgcctgccccgctcgccccgccatgggatcctccatcagctaggccagggcccctcctccccatcctctcacatacatgttgacccctcctcctttcaggcccgttgccgctgacaccatcgccgccgtcccgcaaccgaaaccccatgaggaggaagcgaccgaggtgaaggtggactacctcaacctcctgtgtcccgtcccatatgagatctagcacgaggccttctgtaagtctctggtgccaccacttcatcttaccttgtttgatatgtcacccgagctactttgtatctgcctgccgcccaccgacggggatggttccagcgatgcactctctttcacagcttcagttccaggtcgatgttgtcagagacgtcagccttgatctcgctcaacacagatttaacacagattgactgtgtcctcgctctccttctctgccttttccttgtcggcgtccatagctttgtcgtcgtccgtcagtgaggagcggtgggactgctcgacgcattcgctagcgccaccatcgatcagattgcctatgcctatcatgaggctagaggggactccttcgtggtcgctggtatcatgtcctccacacaggacacgcaatcaccgcagcccccgcagtagcccccaccaccatcgtgcctgaaaggtaaaataaactcgaacaagggaatcatggtgattgattgatgaggttcagttcacaatctatcgcaaag

SEQ ID NO: 4889 - DNA, 1019 bp, Zea Mays
ccaaaagcctgcacctagtcaatgaagcaaacatcatcctcataccaaagggggaaaatgcggatagaattgcgaggtttaggccgatcagcctaatcaacagcttcatgaaaattataacaaaaatcatggcaaataggctggctccaaggatgaacgaaattatctccagtgctcagaatgccttcatccagaaccggtcaatccacgacaattttctgtatgtgcaaagggtgattatgaacctgcataaaaagggtaatcctgctctcttcatcaagcttgatatctccaaagcttttgacaccctgaattgggcatacctcctggatgtattaagggcctacgggttctctcagaaatggcgcaattgggtggcggacattttgggatcatcctcctcaagaatagttatcaatgggcaacgttcaaatgcaatcaatcacaggtgtggggtgcgacaaggagacccactatccccctaccttttcattttagcgatgggtccattacaccggatgattgagaaagccgctggcgagggattgcttggacaggttttacctagaggggctaagttgcggtgctctctctacgcggatgacgtgggtgtgttcattaaagctgacaggtcagacttggaggtgctcaaagggattctcaacgtgttcgaggggtgctctgggctaaggatcaactatgacaaaacagaaatctacccaattcgttacccgacaccattatggcatgcgcttatggaggtgtttctaggcaaatactctagcctccccgggaagtacctcgggttaccccttcatttcaaaaaagttagaagaaatgaccttcaacctttaatagaaaaaatcaacaacaggttggcaggctggaaaggcaaattgctgtcaaaggccggtagagaaactcttgttaaagcggtgctatccgcacaaccaatctaccatttaacggtttttccacctcaaaaatggctgctgcaaacaattgacaaaatgcgtaga

SEQ ID NO: 4890 - DNA, 291 bp, Zea Mays
atagaataagtaatataaattgttggtgtcttcttctcatgattctgtttttacttggctacagctccaaaggttgtaggattaatatatcattttggtgtcaaataattggagttagtcatttatttgtttgtgtcagaaatctggagtcttttattgctctgaatgcccaacagctaaataagggtattgttctgaatttagtcacaccttttcattaataagaccaaaacatttcataaatgtcaatgaggtttggagaagagaagaaagagcaataaccaagtaacc

SEQ ID NO: 4891 - DNA, 495 bp, Zea Mays
ggagtactgtggaatggctcatccgaggcccattcaattcgacgccggtgtatcccgcacggcggccctggaggacggacgtggataacctatctaggcacccaattagccggtacgtaatcgtccagtgaattccttgtttgctccgcaatcgcttttgggtatcggggtcggaattataggctggtctgcgaaaccaccttacaccggcagagcagagcggcgcgactgtatacggcaggaggaagatgacagtgcagtggccgtcggatccagagtcgatggccttgattagacctaggttaccggttcaggggaatagatctagagcgttgataatcgatcgggcgagtgtggtttaatcacacttcataaaatcttgaccattaggttaatatcggacgatcgtagcttcataccgatttagtattgaaaacttctaatctgtgccgtccggatcagatcgtgcggccctgatacgctgataccccttcg

SEQ ID NO: 4892 - DNA, 533 bp, Zea Mays
gtaggggctagtggtcacgactcaccaagggagtgaggcggcatatgcaatgctccaaagtggagacacatcaaattattgcccagccacccagtcccaggaagtaaatcgattctggacaaagaaacaagacaatttagcattgatgttgccagctttcaagtcctgcaacaaggtaagtattgttgtaacgggtaaagagggttcaagaatcctatgacaaaaataccaaagtcatcagacgcctgtgcggctgtgccatgcatagatatctttgaaaacatgatgcatcatcgtcacaggctgatagcacatgtctcaaatctcaaatcacatggcatgcctgaatgagaaaaagttgcagcatgactgcatgaggagagtctgagtctgaaacagagcatgctgattaacaacaacaacaacttaacaaagacttcgctaaaatgccagtgataactgaataataacttagcatcaccccaattgatgctggtcattaaattaattgatcgtttcacattattctctgg

SEQ ID NO: 4893 - DNA, 348 bp, Zea Mays
agtggtcacgcgtgtggtcaggtcgggccagtggggcgcgtgagtccgcacgattgtggagcacgtttatgcatgtgtaaacatgtgttatattttgcgtaaacagaaggtgcgcacgtggtggggtcgagttgggatatacgaaggtgggtcagcgtcgtgttcgctggtcgggtagttggttcctactcgtgtttatgctagcatatttaatggttcagacttgcataacatgagagtggcaacgaaattttcattggttcgttcaggtgggtccacacaccatcgtgattagcgcgcccacgaagttagaagttaccgtatatatcggaacataagatatggagc

SEQ ID NO: 4894 - DNA, 580 bp, Zea Mays
gggccgtaacaaacaacacattataaaacagatcaggcgtataggcacaaactcaccgacgatcgaaaacgcaaaatggtgttatgtctcctccaagctgcgacaaaattcccccaagcagcaagtacccagatcactggaaaaaatagcccataagaattagccgaccagtaaggatatatctctatacataggtagaggctagtgcctcttttagagactggcagactggtatgtcgaatatcaattccaaagaatctagattgtagtaaaaattggtaagctctaaacatgctgggcagcaggcaggaaacctagaccacccagcatctaactgcacataagcataaaaaaattggaaatgctgaaacgtccatgtaagaagccacaacaatgtgatcgctagctacatgctccttaagcgtggaactttttcttattgctgggcattagaaaatatagtgtaggtaaaaggagaatgatgtgcataggtgcacagactaaccgctgatcgaaaaggcaaactggtgagtgtctcgtccacgctgcgccacaattcacccaggcagcaagcacccag

SEQ ID NO: 4895 - DNA, 308 bp, Zea Mays
aattaggctaattataatcctgcatataagtataaaatctaacaaagggcagcacacagagactgagactcaaacccgggagcggggacgagacgaagaaataaagccactttaatttggccaaaacgacgcacgcaaagcatgaaccgctgccaacgcaagcaggtgcatcgacgacgacggccgtgctttgttcctccgacaaccgataggatatggccggcatgtgcctgacgaggcaccacgtacgcatgcaatcgctgcacgctccaaaaagtgacgcgctccgtcgtctcttccggttccgg

SEQ ID NO: 4896 - DNA, 582 bp, Zea Mays
tgactccgcgatacggctgatcggcgaagtcttcttgttttggcgcttgggggtggtttgggtggtggatgttttgctgatgcgggggcagaggcggaagtggaggtggtacgacttgtacctcctgatggtgttggtatgcgtggttaggtggatgctgggtggggccgtggttgtatggttgtggtaggtggtgttgatatgtgtgcgcgacaacccgtgggttgtcggctagttgcgcccgagacattctgtccctggtggccttcgtttctgagcaatcccttgttgggtgtgcgcagtcttcaccgtggaacaggcagtaaaatctgcgcggctgctgcgcccgtccttggccccgaccatgggtgccactgccacggccctgggggggataatcttgacggcgaggggcctcacctgcggggtgctagttggcaatgttatggacctgctgttgactgcggttgtcccgaccggagtctgactgtgaaggtcttgtgcatgtgcggctggactgtggagggtccttgggtttcctctgggactcgaccttgcactggtggagctcttcggatctgg

SEQ ID NO: 4897 - DNA, 534 bp, Zea Mays
cccgtctacgtataacttcgatcgggggtcgaattaattagtaggactgggattagcaatttttccggcagacctccgccgagcatgtgggcggcgccgccgtcctcggatgtgcgaaggaagaaaggagcagagacgctagatccaaaatctacgcgtggattagaatctagggtagcgattcgtttgggtaatctgttccgtctgattcgatcctacgctttaagattgatcgcggtcacttattagtcggggtcgttgttcgtaaatctaacgggcggatcagaaccggcgcgtggcgagtgcacggccttggatcgaggatccaacgactctgagtgaagcggctttaagcgccgaaatgatttaatctgagccgcatgatctagatcctatgaatggtattagatgataccccttcgaccgtgaatctttgcatataagaccctagatttcttgcttatcaacatgcggtccaggacagtagtaagatccttacagagagacccgagactttgcaaatttaaccccgag

SEQ ID NO: 4898 - DNA, 450 bp, Zea Mays
cgagctgctccatacgcgcgagccgctgatcgtgcagcgccatgtgcgtgttgagcgtggagacttgggcgagcaggcggtccagcttctcttcaatggaatccccaggaaggttccccatggagccggacagagatgtcgttccccatggagactacgtttaaacattttcttggtacttactactaaatcgttttctttatcttttttagcatttcattgtatcatttacagaactgcagaaagctactagtacttatatatctacagctatcgtgcttatggactgagttgtaacttgcatctcttggcttagtttgaagtgatttcctcctttttgggtggagaaccgtgacatttaacttcacttcaactcattgttaaatcatcagtaggaaagtagaaggaaatgctattttagcatagatgtactggagtactggatgcagg

SEQ ID NO: 4899 - DNA, 1459 bp, Zea Mays
gcagtgccaggaatgagatctatatagaactctactcctctttctggtggcatcctgggcaactcttccggaaatacatcctcaaactcttcgattacagacatgttttctgctgccagattaaacatcatcggatcgtttgcgggcggctgggcttgacaggaaactgcctttccttggtgatctgttagaagaacagttttgcttgcgcagctgatgatacctttgtgcttagctagccaatccattcctagtatcacatcaatcccttgggatggcaagatggttaagtctgccaggaacactaccccacttaaaagaattctgacttgagagcacccaagtttgcacaggaggtctgatcccggggttcgggtgaccaaagggacaactaggggtgtagaggggatgccatgtttttccacaaacttagtagctataaaagaatgggatgctcccgaatcaaaaagcacagtagcgggagtaaattcaccaaggaactcactgagcactactcccggggcttgctgggcttcttgagcgtcgacgtggttgactcgggctctgccctggtactgagtcctgctctgctggctgttggaaggaggtgccttggaggtaggtgccgagggaatcttggggccattcaccgagttggagtaggttggtccaggtgcctttaactgagggcagttattcttaaagtgactggggtccccgcagtgccaacaggcatttgctggcggttggttgcttgcaacggagggtgcttgaagggagctctgactctgctgactgtagcgcgacggagtgggtccagatggtttattgaagcttggacccctgggtgggagtccaaagggtcgagctctctggtgacgttcttgctgttgagctcggatgacttggaatttcctcttgaggtgccctttttcttcctcttttgcccttttcacttggatagccttgttggagaggtgagagaagctgaggaagtcttggctggcgaggatggtcttaagctcgggtcttagtcctttcagaaaacgggccatctttttggactcggtgctgacatcctcaggcgcgtagcgggccagttctgtgaacttgtgcacatattcactgactgttctcccgccttgagttagctcccggaattcatcctccttgagttgaactatcccctggggtacatggtgctcacagaaggttgtttcgaattctgcccaggtagcatctctgacggcctcactggaagtgtcccaccatgctaaagccattcctgaaagctgatgagctgccagttgaacacgctgattttcggggcatccgatggctttcagcttcctcttgatcgtgcgaagccagtcatctgcatcaaggggattgctggaccccacgaacgtgggaggcttgagtctcaaaaattctcccatcctatcctgaggccttccac

SEQ ID NO: 4900 - DNA, 810 bp, Zea Mays
cccgaggagtgctggccacggaggggtttttcacggcagcggaagaaaccgattcaagggaactccgatgatcactaagggtggtggacagaatagagtgactagtgattcattggcttcgcaacgaagggacgaagagctgtgctcggttgatttggatgaagggggaagagagcgtggtgaatttataggcccaatgagccaccgcgacggccatggtgataaccatcaccggaccttgcttgccaccaacgacgacatcggcactgcccttttctaagagtttgccacgttccgccgcgacagtaatgccatcagatcggcgatggcatggatggacggagaagagtggcgctggtgaccaagcttggccggaaggatcagtggtcgcgtggcggccggaataattatcttccaccgcgacgatcttacccacttccagaatatcatcgcgaggagatgctcgccgaatgctcagcccgaccatggcgcaaatcacggcgcagatcagtaccggcggcgaggtgtgcggtactagagatttttcttgctactgtaccattgggacttctgcttaaagcgcctgacatagcataatcaaggcataatttctccataatctatgtgacaacgtcataatgcatctgcatcaaagttatagatctataatccatcttcatttttgctatagcatccctagtcgaattcctactgaatccaacccaaacttgaacttcaaacatggccaatgtcactggtggtcatacttttctgaaattggtgttcagaactgtccaattgacttctgac

SEQ ID NO: 4901 - DNA, 374 bp, Zea Mays
atgaggtcttttcggccaatcttgttgtgatttccttgggggcattcgatgttatcttgggtatggattggttatctcagtatcgcacagttatatcctatttttggaagacagtgttattgcaggcgccgtcgggtagggaggtggtattcttgggaagttccccaaagttcacgttatccttgttggcgcaattgcttccggatcgccggtcaaggaagtcgggaatctttttctccatggtggtggagggtgaggctgccttgggtgcaggacatccgtgtggtgtgtgactttgccgacgtgtttccggcagagcttccaggcattcctccggagcgcgatgcagcttttgagatcaagctgattccggg

SEQ ID NO: 4902 - DNA, 442 bp, Zea Mays
ccggagcgtaataccctacctccactatgtgtacgttgtattgagtgtgtgtaagtgtgtgagcttgagagtctagagagcttgtgattgagtccgtccctgtaacgttgtgtgccttcccttttatagtttaagggaggcacatacaaggatgctgagccccaacatgccggcccaggagcataatggatggagtacattatgtgagtaattaatgccagtaacgcctgagtaatcaccgggagccttgatgaccgcagtccatgcagcattgatagccgaaacgtacgagtaatgatgaataacagcatggcccgcgtatcgtggactgtgcacgccacctgtcagtgggatggacacgcgcgcgtagcccagaggcgtcatgctaggttccacccgttggcttaagccgcacgcagtatgccacgtggcagcaatgggt

SEQ ID NO: 4903 - DNA, 535 bp, Zea Mays
ctggtgctgatatgttcaaccaccactctgaattctgctatggccagctagcatggtgaccctggcttcatgttacacaagggtctggtcatcccgaagcttaaactcagtggtctcatgaccatcgtcttcaacttctccctcttcttctcattggccttgatataaaaccactcgctcttccagccagttggccacttggcgcgatagctgaggatcggagccttcgtatccttgcgatacgcgaagttataacaaccaaaattttcatgcagcccgtcttctctggccttcgtttggtaatgcagctcatgtactcggcaaaaagctttagcatttgggtccatcccttggcttcgaagggcccagatgaaaatgctgagcctaacgatggcgttaggggtcagctgatgaagaaaaatctcaaaattatccaaaacttctccaatcatctcgttcaaaggaaaccttaattctgccctgaaaaagcttttgaaaaccactacttcgtcgtccttcggctctggagtggttt

SEQ ID NO: 4904 - DNA, 654 bp, Zea Mays
caaataaagagttcaaagacctgatgtctcaaatgctatcaaatcctcctctagaattgatgcagtagttggcgggtgtgatgtttgttcaacagatgaccactccacagctgcaaataattccagcagctcaatcgccggcttccaccgattgtacaaccgtcccaagctctatcgcgtcaacgagaaataaggttcgttatccatttgatgacatcacaaggcatgtggcgtgcacactagttataagatatggtattaacaataatcgtacaaagaaagtaggaacaggtgttgcgatcctaggacgcaagtttcatggaagcgacattccagatgattattgcagggtagaagtgacgacggtcgtctaaggatccgaggacgacatgctagacatctctgggcccaaaggaattgggacacttggacaagccatcaaaaatttcatcctttggcctcgaagggatgtcgaattggttgatccaccaatgctgtcgtcgtcgcatccccaaccatctccgcctcctcaaactttagtacattttgtacatccatcatcaccttctcaatcttcacatgctgctcctcatcctctttctaacccaccgtctccgccacaagcatcaacatttaggacaccaccaccttctc

SEQ ID NO: 4905 - DNA, 403 bp, Zea Mays
gtccgcagccccgaagggctccaaataaccaatgacagcgagggccaccgcatagtcaacctcattatgaccgaagactggtgggcaccaataaccctgtttctacaggggtactaccatccaaccgacatcaacgaggccaagcacctcaaacatcgaagccgggacttcgcgctaattgaaggccagctttacaagaagggggtcagtcaacccatgctcaaatgtgtcaccgagaccgaaggcgtccaaatcctgcgcgaagtccacagcggtacttgcggctctcacgcggggccaagggccctagccgcaaaggtgatccgtcaaggtttctactggcccgcaatgatttgcgccgctaatcggatcacaaggtcctgcgaagcctgccagaagtttt

SEQ ID NO: 4906 - DNA, 1240 bp, Zea Mays
aagtttgaagttttgaaatgttcaattcaagggtgtcaattgaaatttcaattcaacaaattcatgcaaacttgtaaataccattccggccggatccgctgataccccctctttttgtggagttcaatggtgcacaagaggcaaccacttaccctggcagcacatatggaggaaaacagagcgcagggcatgtgggcccgctggaatagtgtagcggccacaggcaggggtgtcttggggaggcacatatggtggtggtcagagcagatgcccatagcaggctggcagatgcagaggagcgcaaagactgcaaggtagacctggggggagggggtgaattgaggcccagcagcacccgaggatgatagatcaccactgggcagcgctcgatctgaactcatgggcaacagatcatggacgacattgagctaatcatgaactaagctaactgataccaaaatggaagagtttggggctcagactgctgcccccaggagtggagtttgatcctctcgagggcaatacagaggaagattttattggagctagagaagaacagaagctcttaataccatgtaagaatgataggatacgaagaacggatgagtggttagatgtactgcacaggtccaatgtggcaatatatagcatatgagagcaccccaacctagacaggacaacgaccataatacttaacataccattccatagtaaataattagaaacatgtctatgtatttatatttttcttcatttgtatgtacttttctgtgatcataaattgattatatttcttcgcaatctgtcaagggcgtcgactacggagtttgtagccttgacacgtaatggcgttggggttttgcccgacagcccgatggtgaaggaggtgagatttgagaggcaaaagaggggaatgagacaaataattcttgcttgctttattgaatcagctgcccgccttatatagccagaccccctaacaaactcctcctatttatcctctaatacttatctccctaacaaactcctgctacttatcctcttatctaaacaaatctcctcctttctagtcacgcctaactgcctgctactcctgtgtcggcgttatctgttgttggccgtgtggcctacgctgatagtggtggccccacatgacatctcttccccctcgacgagcagctcgtcatcgagctggaagctagggtagcggtcgataaaattgtcggtgtcttcatgtggc

SEQ ID NO: 4907 - DNA, 285 bp, Zea Mays
gaagatacctgagtggaagtggaaagagattggcatggatttcgttactaggttgcctcgcatctcgaaaggatatgattatatgggttattgtggatagcctgactaaagtggctcatttcattccggtcaagactaattataaggtatctcaattggtagagtgatatatggctcggattgtgtctctacacggtgtaccgaagaagatcgtttcggatagaggatcatagtttacctccagattttggaaaagttttcatgagaatatggatacgaagttga

SEQ ID NO: 4908 - DNA, 274 bp, Zea Mays
gaaagggtatgcttcaatcctagtcatccaatcatggaccaaaggctcaaattagattgggactggtatgaaccggtatccactccccgccatcagatcaagcatcaacggtatggattaaacccgaccctcttcaaactcgcgaacaaccccagccgctagatcacgatccaaccgccagcgcaaccgctggccaatcggttaatctgcttctaatctaggccctccatccaggatccgacggcggcgcggtcgtcaccatactccaggtcaa

SEQ ID NO: 4909 - DNA, 567 bp, Zea Mays
atgagaagatatgggctggaatgggccttgtaatcctaggctaagtaatggcaggtgagatataaggcggggaataattctgtaaggggtatgcacaatttggttatcaaaggatcatcttcctcgctttatccccttctccaagctttcttctacccgagcacctctcctctctccgatccccatcctaggtgctaacatctgatatcaaagatagctcgcatcctggaacctgctcacccattctcggccatcagccacgttctgctgctactttaggcatggatgctgcgatgcaacgtcttctggacgagatggcgcagatggaggtacgcttaaccagtgcgttggctcaccgctccctgtccatgctaacggccaccgcacgcttcgacagcacgccatccatgtaccagaaccacatggagtcggagtccgaggagacccgccagtctctgctcgtcatcaaccccatggccgcccagattccctctaccgaggaggtcttgcaaccgcaagcagaggaggccgaatcgtctgagtcagtttatgtgggccatgacggcc

SEQ ID NO: 4910 - DNA, 463 bp, Zea Mays
actccggtgatggcgctgccgcggggaaagctctgcgctgtcgtctgcgtgtagtcgggtggagacgatggtcttcggaccgtttatctcgcaggaacggtcaggattagattaactgggtaccggttcgtctgatgatcggtgtccgttggatcgaccgtgggtggcacagattggatctggggatacccccttcaacgattgatcctgggtcgttgatcgaaacatccatggcccgggttagattagtggcgtgagagcatctaaaccgtggattcataatctgggggctgttatcgcatacccgttcggatttatggcgttatgatcgtggccgttggttcagatctgacgatccatatccactgataccccttcgacccgtacaaattgctaaagagcccctcggcttgttccgaataaacccaccgtcctccgcctatgtaaattaattgcgattgag

SEQ ID NO: 4911 - DNA, 384 bp, Zea Mays
ataactgttgcacacatacagaactcacattacactttttctctaaaagatgctaactcgataaacaagtgtttttcaggcaaatcattgcgccgaagtattcttgcaggaagcatcgtttgcaggagcaacaaaagaagatggacagcttgcgacatcatgcgcggccacaacatcggcgacaatgtcttcaggcaccacggcgccgggtctcctcatcaggatccgcccggcacgaacaaccttatccatggccttattgcacattgccttcatgacgacgcgatcatcctccaaggccttgatagtgaggcgggcagcctctagctcctgcgtaacaagcttcttggaggcacacagctccttgatggtagaatctttggt

SEQ ID NO: 4912 - DNA, 669 bp, Zea Mays
tcaaagactcacgattgatatgaacagataatccggaagatacatgtgccagatgtgtcgatcacagggatagtaaagctctcgaactgggtgtaaagagatggtaagttaatagttttcacttgctaaatcaacatggtggatccaagttttttctagaaccacaagacctattcactaattactctttagtttgttcccgtgttagataacatgtctgattttgaggagccctttaaaatttctgggatgtggcaatgctccatttgcacgcatgaaaatactacatatagttcatcttgtgagctatgtggtgtgcttcatgatctctcactgtatttcaatgatatcagtgaagacgaagatggaggtatatagcaattgttttatactatattctactacagtgatgcaatataattaattatgtctagccttttaatttagttacttctcccttctgaaatctagctaaatgcagacacaagtattctggagtatccatccttgcaagatctctttttacaccacctagtgcaaagtcaaaggctattgttttctctcatgatttcaaagacagaagaaatacaacagggaataagcaagctacaatggatgctctacataagacattcatgactcgcaaaaagcgccacattaacataggta

SEQ ID NO: 4913 - DNA, 632 bp, Zea Mays
tgggccccttgggtcactctcagcctctcagggcatgcctccgtgcggcatggtttcttctgatggtcatgtgatgtctgtctcgtccatccgacgtgcgagtctctatagcttactctacgcctacggtgcccgtacctgatgggtcctgcagaacgtgctcttggtaaggttgaggttcgtgttcagaacagatttatcttccatcattgccattgtgtcactgtccagcatgcgcgagtatgcactagacatgttgtcctgtccgtattgtacgtgagtcgttaccgtggagactatgttgtcgtggcccccttggtactgtacgcgtggcacaaacatggtttggtgatgatgtgtcctgctacggccgtcgtggaccaataacgtcggcttgggttccttccttgcgagttcgtttggcgtgatcttggttgtatgccacgcctcgcagtcttgctcagcggagacttggtcgttcaccccacatcacagacttgctcggtggagactttatcgttcgccccgcctcgcagtcttgctcagcggagacttggtcgttcaccccgcatcacagacttgcttggcggagactgcctcgcagacttgctcatcgaggatttggttgtacg

SEQ ID NO: 4914 - DNA, 402 bp, Zea Mays
acttcttcatgtaaagtattacagtacacttgcaggctgtcgagggccgcactaagctctgccacacgagctcgagcttttgcttcgcggtcccaagcgatcgaacatgagttgacagcccaatcaatggttgaatcccgttctgagatctcgtattgcaagcggctgacgtcagctgataattcagctatacgctggttgtcctgcgcccatgccctattccggtggcgtagctttgatcgaagttgttccaccttggcttccaggtctccaattgggtcgttgctaccactactactcccttcttgtctgggggctagctgatggcgaggcacgccaaatggtccattagacttgtgtgcagttttccttgtatgcgccatgtctccataagaggggaag

SEQ ID NO: 4915 - DNA, 301 bp, Zea Mays
gagcttcttattgcacgggtcccaagtaattcttggagctgctcccaaaagcgtgccacaaacagtgctcccctgtcagacacaatggtcttcagaattccatgcaaacgcactatttgatcaatatagatttctgcatacttctctgtcttatgggtggtatgcactggcaagaaatgcgctgttttggtcaacctatccacaatgacccaaatagaatcatggtgccgggaggtattgggcaatcccacgataaaatccatgcaaatatcctcccatttccaagatggtatggggaggg

SEQ ID NO: 4916 - DNA, 547 bp, Zea Mays
aaattgtactagagagagagggtatggatgggcgcacggacagatagagacaagatatcgcttgtgttcgtgtaggcaccccgcacaacgctgacggcgacgcacgctactccaaacttcccctacgtactctagacttgtattagagagacaaccagcattagatccaatgccctttctttctacttacatagagagcacaccatcactcaacctcaactcgtgttgggaattagccggatggataagctgatacggagctgctgaaaccaaaggcatggaagacactcgacaacctaccggaaaatgtccgaacagagagcgaccggcacacagattcgaccgacgcgcaaacacgccctgccctgcacacatacagatttaaccgtatccgcctcaacgacagcagacagcacccacatgccggtgggccacgcgggcctgcacgttgcgactcatgcgcacacaacgtggcgtgtcccgtgggcctccctcccgtcgtccgcgcacgtaattaggttgtttggttctgggtcaagggttggaa

SEQ ID NO: 4917 - DNA, 342 bp, Zea Mays
cctacacagaatgacacggctgcgttggagaccgaccctgatcatccccatggccaccgaaggacgcctgatgacggctggggcgccagtggcatcggtcgctggagataacagcatgggctcactgcctttgggtatggcccttgattcaccctttggaaaggtcaatggtgaggatgagagcaagatgatctctcctccgacgcttgagcccccaccctgcaaagaaggcccgtcatcggaatgatagaggagcaagaaggggcaagttcccaaaaaccacccacctgtcccgcggagagcgactcttggagcaaccttgatgagggcactccagtgctg

SEQ ID NO: 4918 - DNA, 501 bp, Zea Mays
tggtttctcttttccacccgtcagtgagacagtgacggtgtgtctgcctgtccgtgtttctgaccggagtggacagccattactgcccctctgatctctgacggtgccgccgtgatgactgatgaagggggtagtgcagagcaaaggcacgcacggaccatgatgagatctgctcggaggagttaaagaccaaccagtgccaatctccaatctcgtgaccagatgcagacgcgtgcgcagaggatatcatcatcatcgaccgcaagcagcagagtgccagctccgggcgcagtgctacgaacgcactgactgcactggctaatcacatgtacaagtctcgtccgtagaccgtagtagacagtagtatacgaccgtactcgtacagggaaaaggtggatcatctgatccgatcacggatggatgagaaaaagcgacccgacagagaagagcttcagagttgagtgcatccatgccatggataggtaggcattccgatccccc

SEQ ID NO: 4919 - DNA, 554 bp, Zea Mays
ccagaattgtcttgagttctggcctgagtcccttcaggaaatgggccatctttttgccctcggtattgacgtcatctggcgcgtagcgggctaactctgtgaacttgtgcacatattcgctgacagatcttccgtcttgagtcagttctcggaactcgtcctccttaagttgaacgagcccttggggcacatggtgctcccggaaagttgcttcaaattccacctaggtagcatctctgatggtgacgttgaaggtatcccaccaagctaaggccatcccggaaagttggtgggcagccagttgaacacgctgattttctggacatccaatggcttccagctttcttttaatcatgcgcatccaatcgtctgcatcgagggggttgctagacccgacaaacgtgggaggcttgagtctcaggaaatcgcacattctgtcttgcggtcttccaccattcggtcgttgattttccagacttcgagcgaggacctctatgagtcgagtttgattggctagaacttgggctagatctaagggtagttgcggaggtgtg

SEQ ID NO: 4920 - DNA, 437 bp, Zea Mays
ggttattgattaaggcttttttttgtaaattgtttacgacactttgcacagttgtttatgcttaatatgaacatgcagtaaccaaacggtccaactgattgtgcgctgactagtggatcccatagtcctgcgccgctccccccgcgggccgatcgagccaatatggtcaacgagcgagacccaccagatcactttcaattaactccgctcgggtccacccaaaccctaaaaaaatcagctcctccccgtcgccgtcactcgctcttgcgatcgccatcgacggccgcccccaccgcttccacccgacgtaatctccacgcttcatcgattcaccgccgtcgttctcctcccctggtttgtttcccctctccttcattcgagttccccacattcttttgcatagttcagtcgccaaaggccatcaggttcgccacgcc

SEQ ID NO: 4921 - DNA, 386 bp, Zea Mays
ggaactctgtcgggaactccctctgatgtcgtcaacctgtggactcctcccccctttcccatctcggcgtctacgcaggtaccatcttcgtctcccccatcgctactcctattcgcttttccggatccgttgcatccccatgtcttgattagggtttaggttgcatctacgtccttggttaagatgttatgccccctgtattgactcgtaccaacgtgatgcacagatgctattgaacgattgttggttacggtttaggggaatccattcaaaggtgtttatgtttgttagcagccgacccaataatacatttcaataagtgcattctagtagattcaaaccatgtcaagtttttcagtacatcagaacggattaccatcgacgta

SEQ ID NO: 4922 - DNA, 691 bp, Zea Mays
caaaaattacgatctatatttatttagtttgttttgccttcctccaggtagactcttgttgggactttattgcccttctgccttacacagatgaccttagaagcgatagtgctgatgttgtcgatagccttatcgatctaggtttagatataagagtcctcacaggtcattctgttgtgcatatcgccatatcctgctgtcgagatttttgctattgtcattttctatgataaacatgtcttcatcatatatgtatattgttttgtcctctctacagaaagtccattgtcgaccacaaagcaggtttgtggaaagcttggaaaactaggtaccaatgtggtacctgcacatatagtgtttgagttagctcgcaataacagagaagtccattcaaacatcaacgggatttctgatctctttccaggtctatctttatcttctatgtacctcctgcaaagttttgtttttgcaagttcttgttaccattttgctatcttcatatcttagtacagaggacaaaagcgatatagtaagaagactaagaaatttcggttgtcattgtgcaatggttgggtatgaatttcttgatcatgatgccataggagagagccatattgggatttcagttgctgatgcaactgattacacaaaaagtgaatctgatcttgttttgactcagcctgcactgatg

SEQ ID NO: 4923 - DNA, 622 bp, Zea Mays
gggatttctgcaccgggattgaaggtgaaatgttccccgtgcttgttcgcattgccttacctttgtatatcacctattccctttgagtttagcgcacctgagcggtagttggctctgcgccggcgaggtccgaccgctgggattcatagcgccgccgtgtgtggccagcggtggaggtgatgaacccatggccgttgatttacggccgaacggctctgattagaagcaggcgataccccttcgcgacattaaatcggggccgttggtcttcgatcggacgacgtaggagtgacctgcgggctcggttgacatgggtcgtggattgatgatccaaccgccctggttgcgtatcgcatccctgctagggggttttaatctgggccactaggcagagatcggacggctaggatctgagcttaccccttcgcgatggccatctcactaaagagccctcggggaaaacgggaatcaacccgcagtccttccctggctagactgtgtcttggattaatttcgcagagacccctgcgctttgcagattttgacgctcagtccagtgggttattaaatcagagaaatgaattagaaaatgagtttttaaaataaaaacaatacctaggat

SEQ ID NO: 4924 - DNA, 314 bp, Zea Mays
cgggaagatacacagaagacccaccaactaaaaatggcgctcaccacggcctccactgaaaccgaagactagccacatcttttaaaaatcctcgcgcaagtaaagcacgcgagcaagctataaaatataccttcccgtgaatccagatgaaacggaccgacatgtggggacacacatttcatggtcccatgtgtcatgactcatgagacacaatctacgtgaactcccccggtgcttttcccagagagagaataggacaggatggatcacattgcgcggcagagaccccgccgccgcatccgcaccgcaccctc

SEQ ID NO: 4925 - DNA, 481 bp, Zea Mays
cagtgaggcaatggaggtgttctgggctgtgccggtggagagcaccgatgttctgatatggaatgctgtgatcggtggccttgcggtgcatggcatggccaccaaatcggtggagatattcctggagatgcagcgtgctggggttgcgccggatgagatcacgtacctttgtctgctgagcgcttgtgcccacggcggtctagtggatgaggcttgggagttcttccgctcacttgaagcgcaagggctcagaccacatgtcgagcattatgcttgcctggtagatgtgcttggcagagcaggacgcctggaggaagtgtacggtgttgttaaaagtatgccaatgaaacctagtgtttctgtgcttggtgctctcttaaatgcctgtcatttgcatggatgggtggagctgggcgaggtactcggtaggcggcttgtccagttgcagccagaccacgatggcaggtacattggcctgtcc

SEQ ID NO: 4926 - DNA, 461 bp, Zea Mays
ctcgctcctccctcactttgtcccttctttgcgtggtaaccatgcacgaacgatgtaatccacggccgtggatcactagccggaccaccgcgcctttaaatagccccaccacccacgacgaggtattcacatcttcaccagtgagctcggttgaagcccaaattcatggaatcctctccacctctcccaaaattggtagtgcatggtgaaaccatagtcctttgcgaccgtgtagccccaacctcacctcctaattccgcttggacccgttgcggcgctgtttttccccttttcagtcaccagcgagcgaaaatcctccacgctctgtagccagccactcctaggtctgctcctactcttcttaatcgtgtttcagcacccatatatgctcgtgatactcatcggctccacactctttgcttggccacgctcaattacccaaaacacatgaaattgtgttc

SEQ ID NO: 4927 - DNA, 977 bp, Zea Mays
cacctcaagaggaaattccaagtcctccgagctcagcagcaggacaggcaccagagaatttgatcctttgggtttccacccaagagaccaagcttcaacaagccagctggacccactctgtcacgtctcagtcagcaaggtcaaatctcctttcaggcccctccattgcaagcaaccaacctccagctaatgcctgttggcactgcagagaccctagtcaatacaagaataattgcccccagttgaaggcatccgggcctacttactccaactcgatgaatggccccaagaacgccccagcaaccgcctccaaggcaccctcctccaacaaccagcagaacaagagccagtatcatggcagggcacgagtaaaccacgttgacgctcaagaggctcagcaagccccgggagtcgtgctcgatgagttcctagttgaatttactcccgctactgtactttttgattccagagcatctcactcattcatagccactagttttgtggaaaagcatggcattcccactacacacctagaaattcccttggtcacccgaaccccagggtcagaccttctatgccatctcaaatgctcccaagtcaggattcttttaagtggggtagtgttcttggcagacttagctgtcttgccatcccaaggaattgatgtgatcttaggaatggattggttaaccaagcataatggcgtcataagttgcgcaaataagacagttcttctcactgaccaccaaggaaagtcagtttcatgtcaggctcagccacccgcccaagatccaatggtgtttaatctagcagcagaaagcatatctgtagtagaagaattcatggatgtattcctagaagaattgccaggaatgccgccagaaagagaagtagatttctacattgatctaattctcggcaccgcactaatcacaaagagaccataccgcatggcttccactgaattggcagagcta

SEQ ID NO: 4928 - DNA, 483 bp, Zea Mays
gatgcgcaaataatcagtttggtgtttcactcgtctagtcgataaatgttgtcataaataattgcgctaaaatttggtcataagagtgcagtgggcacgtggtgttggttggatgtgataagtagattggaagtgtgggtttgttgagcactgtgttgttgaacgtgtatgtcgaagtacattgaagtaataattgtgttaagttaatcggtagtgtctcaggtgcacgccacgacatggttgtatgcgagacaaggtaatataaggtgcgcttgacacgaatgttcggtcgatataagtagaaattgttttggcttaattagagaggtggtgacatgccaaattagtcgttgctttctctatatttataagtcgagtcgtgtcgatgcgcattttgcgttcgttaaattatgcttcacatatagtgtatgattgtgctcacgattttgagtagacacttcaagtaaatcaagtaggatcgtg

SEQ ID NO: 4929 - DNA, 280 bp, Zea Mays
caaaccccgatgaaggacggaatggaagcatcggcgagattcgctcggaaattaaggaataataatggtggcaaagacgagttcgcgcgaatattctcttctctattcctctctcgcgcgctcgcgcctgaaaacctcgcaccaaggctacgagggtgccgggaccggccgggagtgtcgcaaaaaacaacaacacctccagcggcggtagctggtcacctcacctcctccttcgcgggggctctgccgttgggtggttccgatccggatcggatcgaag

SEQ ID NO: 4930 - DNA, 563 bp, Zea Mays
ctcaccggcggcgaagattctcttaccccgcgatgttatccatctgccacaagcgcgaatccttacgccggtgacacgaatcgcggcgggactcatcggcggtgagcggagctgtcgcgcttgcgttctgatcttcatcaagcactgtaccatgggatgctccattcagttaacctgacagccatagtttacggccagatttcttccaaatttctatgacaacacatccagatctctgcagcaaagttgttcctctataatagctctacaactttgttatagcaaccctagctaaactctcactggatcatagtcggaatggctctcaaactgggatctaggtcactgtcaatctgaagttcagactgtatcagcctgacagcctgacttcaggcttaattatctccaatatcttctccacaactatgcttacactttcaagcaaagttgttctcctttgtttggtctacaagtttgatgtggtgacctagggcaaattcttattaatttgaaagatacaagggctcaaagttgaagcaatcacactgaaattcagacttcat

SEQ ID NO: 4931 - DNA, 625 bp, Zea Mays
caactcataacgagttgatttgtaaattttgtagcttcccttttatgaagaatgatttcgtctcctcctgtgttaattactttgcctcccggtcagttgacgattgctgcgacgttggtgcctcgaaggtagtggccgagtcactcggggtcacattgtcgctttttggggtgacgaccgagttattattgacaacattggtgcttctgaagtagtgtccgaatgatggcagggccacatcagtgtttttagaattaacgaccgagtggttactggtgatatcagcgttatagaggtaaccaccgagtgactgatggcaacgtcggcgttttagaggtaacaactgagtgactgatggtgacgtcggtgttttagaggtaacggccgaatgactgattgtgacgtcggcgttttagaggtaacagccgagtgactgacggcaacgtcggtgttttagaggtaacgaccgagtgactgatggtgacgtcggcgttttagaggtaacagccgagttagaacgggccgcgtcggccgttttggaaataagggccgagtgatgacatgtcacaccagcttttttaggaatagcagctgagtgatgacatggcacgccagcgtttttgaa

SEQ ID NO: 4932 - DNA, 1618 bp, Zea Mays
taaataaagtgaaaggaacttatttccttagtgatgccttccttgggactgcacaaaagcaaagcatggaatattggaataagcatatgattctcttttgtctcctcatataagttttgtacttgttcggctatcagggaaacggaaagtgggtagacgaatccgatgggctgtgcatctgtatggagtcctctgagtttggctactatctgttctacataaggcgcagaaagttggggcttaaaaatgacggttagttcctttacttcactgctctatgttgcttttgctttgaaacatgcttatctgaaccgacatggttagccttgtttattctcccctccatactcgagcaaaactggctcagtgtcaatgtttgataccgctaactgccatgaagtccagtgatatggaataggcggcgcttacctttgtcttatctagagtgttttttttcagtacatagtgaggtgctacaattttgtgctgtaagagtcccttccggttgatttgttctgtagtccagcttttccacaagggaatagtctagtattttttttccatgattccatttgttatggctattgcgagtcacaaatgcaaggtgtgccacctggtaagttgtacctcagaaatgaaatcattgacatggtaaatcagatataatggattgcattaagatcctctcgggccttttcaaaataaaagcttgacaggcattctttgaaaagcaactagtacgagtggtccaaggcagtagcatcttctttgaaaataaaagtttccttgccatttcgtgattaaaccagtcttctctcaagttgttccagggatccctatgcttataggccattgttccatccattaggataagaaaaccatcctcccgatatgatatgatatgatctgtacccccattcctgttcaagggaggcatgcctgtgcatttatttcgtcccaaaaccaaaaatcaccctgtgcatgattccgtgagcattggctggggaattgtgttcacttatggccggtcgtcaggtgcataagctgagaccactgcgcgtcggaacatggaataaactctttctggccgtagctttatctttcgccttgaatccgacgaaagcgagcaaggggaggggaacggagagctttaatctttgcgcggggattgcattcagctgttgcttgttaagtgcccggaatcgtatgctcctgctttctctgtaaacgctcttggacaattatcggtttcgcaggcgagcgcgcacgcgatcccgcgggaagggaataaggaaaagcgatgttgacaaagctggatgggaatcctgcgcttttttggaggcgaagatgagaaggaatatatcgcctgtgtcgacctcgccggcctgcttcttctgttccgtggcttggttgtgctcccgctggatcgtgccagccgccagcaggatgatgagcacgtgtgaaccctggcgtgggtatgttgttgtttgctctgggagtgttttgctcagtagtcgttctttgtttatttgtacaaactcgtccatttgtgtcggttgcagaaatacgaaaacacttcaaatggtacgaattggaatttggaaagtacagagtatag

SEQ ID NO: 4933 - DNA, 469 bp, Zea Mays
ataacgctgtcaaaaaccactggcatgtcatgatggcacgtaaatctcgtgcaatccaaggcattaagatgatgtcctcttctaacccctcaccatcagcaaaagagtctccacacttcatgccaaccatcaatatcaaccagaactatggaaaaaatatgcactcgcagctcgatgcccaagtagaagtagctactacaccccacatttaccatgccattgaattcaaaaattccttgtccaccaacacaacaaacctctcaatagaaggtattatgccttgcatctgctagactatgctttatagcttcttgctctccctcatggtttcacatagtgtgcctcgatcaaattaataacatgtgatatttgttttctttgcctatacaggagcctctaacatggacccacatgtcaagacacccatgcaatccaacttcatagcaatcacacactctggcttttcaac

SEQ ID NO: 4934 - DNA, 572 bp, Zea Mays
atgaaagcgcggttgcacctcccgcgtctcggatcgcgattagcttgacgacgcggatttatgcccctgcggcgggcatttcatcaaaacttgcgccgcgatcccatccgtttcccccctgtgtaaatctcgtgcatggcatggagatgcttgcctgcatgattaactaggttgccttgatgcacgctctggaatggttacgccccactactgtttcggatgttccacgataagatttcattctattctggtagcttgtcgtctgtctgtgtctcacaagtcacaagcttggagttgtgtcaataacaccacttctatagatatcggtctcaaatccgaattcaaactaattaatcaaaggttgacaggctttgtgcacatgacttcagttattcttccgttttgatttggatgtttacatggtttggattatgcaagttatgtgtagtgtggcagagacagctgcattgtatgaatgcattgggctaaggatgttaatctgtgctactgaaacgtaacctcttgtaaaactctaagcatcttcttatggattagcaccatgcagatccttg

SEQ ID NO: 4935 - DNA, 380 bp, Zea Mays
tcttcgccgacgcaccactactactcaccaccgtggccgaggatccacccgcaatgatctctggtaaagatgtttcccctagctttgctttggtacccacaacgttttgaaccagtcatcattgagttttgggcattagtgtgatgggcggtgtcgccccggtgaactccgtgggtggaacttggccgcgccgtcgtgcccatacgacgggaggttgaagagggccctggtctgttggatcaggcgtgtacgggttagattagaaggtggataccggttcgtccagaaggaatccaagccgttgatcgatggatggaggggcaaggggtgattctggcgttttaaaatctagagcattgatctcaaatcctagggctctg

SEQ ID NO: 4936 - DNA, 431 bp, Zea Mays
ggaatggcaaacacacgaacgtggagagggcgacacacgaaaccgctgccagagatcgacatcatcggttgggagaagactctgagcgtccctagcgatgcgggtgggccgcgggcggaggtggttgcagctggcggagcaaggattgtgcgtgattgatttagagctcgaaggttactgggcgacggtcagctgtgggcccatgtgatcggacgatccagattgaccgaaggcagaacgacagaaccagagaggcaggctacccttgcagcgttaataagtagtagataaaaataggtgcagtcttagtgatatccagagcagctccattctttaatcatatatccatcagagaaattatacaatgagtcagtgacatcatttctgcaggagtaatgttgcaagatgcaagagtttaaaacgaacaccac

SEQ ID NO: 4937 - DNA, 347 bp, Zea Mays
atttttcccggcttcgggatagtttcctctccaccgaaacgaatcaattccttctttgcttcactaagatagcccaacttcaccatcttaggaaaatcagcttcggatatggtggactttccgaagtccaggtggctatgcttgctcggcactgcgctactgtagtcatcttcggaatcagtttcttcaacagcagtccgttctgtttcggcagcagggatgtcttcggcagcaggcacgtcctccggtgttaccaacccagagcgcttcattgcttccgaaataggaacaatgtcagcagcttcggtctcgtctccctcacgatcgacccgagcagtagagcgaac

SEQ ID NO: 4938 - DNA, 289 bp, Zea Mays
ttgatgtttgtggctaggcggcgagctatggtaggacggtggttcgacgggcgctaacgaattacggtggtggtgctccccatgctccgatccagggtgcgcacccagcggtgcctcggcatagagcgccggagccggtgcttctaccgctgggaaggcatagcgagacgatgcagcgctgcagcaggaggagaaaacagcggtaagagcaacaaggagggcaaggcccttcatgttcgtgatgcccatgctttggttttggcttgcctccgatgctcgcccatctcgc

SEQ ID NO: 4939 - DNA, 321 bp, Zea Mays
cagacaccaaaaaactaacgaaggttaggctcatcattttaggccacttaaacttagactatgggtagaagcaatttaactagctctctaaatcactttactaggttaacttgcttgacgcatcaactaaataaacattacctctttctttgatctaacacatagagcattatcacatagcatagaactccacaatactaccacttgaacacctacggacctaaagcactcatatacttagttcatcggatcattcttcgatttccacggaaacatacctatcagtactactcgctcccaaatgattttaggcaacgataa

SEQ ID NO: 4940 - DNA, 393 bp, Zea Mays
gttcagcagtgagacaaaccaaaattcatccctccatatcttttgatccagttagcaaaacccataagcctccacacacaaacgacaaaggaatgtcaggggaagagatctctcaatgggatcatggccataatcgcgaagatttggagccaatccgtgcttgaacttgacctctctctgcgctgcctcgtgctcgacaccgtgcccaggcgccagagcgcgcactggagctcgcccgcgcacaccctgagcgcgtgtcagagccacccctcggtcgtgctcgccaacggctttaagaccacccccagacgctccttacctcactccaaactcaccttcgctggccagacaccatccttagatctggcgagctctgcgccacctgcccgagcc

SEQ ID NO: 4941 - DNA, 364 bp, Zea Mays
cgaggaccaggagactggaggtctagagccccgccaagccaagacttagctaggactccaccttgcagcttctaggctctacttccaccctgataagagacttggaagcctctcctccctctctcgactggttgtaacccctaatgattttgatcatcaatgatgttggtagcgcaagccaccgatgattggaagtaggggcattctgcctgaaccagtataaatcttgcgtcctccgtgcacacccttcggagcccgaaacacgaacaataaatttaattgccggagcaaggttcgaaacaccgatacccctttatcatatgagcaacaacctccaggaccatcccaaccaacaatagttttc

SEQ ID NO: 4942 - DNA, 736 bp, Zea Mays
cgggcagtcatctgtggaggtcttcgccaagaattattgcctgcattggcagaaaagggaaataggaaataagattgcacaatttggatcgtgcaccttaacgccgaggactgggaagacttcagctaaagtcgtgaagatagtcccttgtgccaggaacaagtggagcaactggtgggatttttggttctatgtgtctcctggtgatgtcgaagacctgcctagcctccctccggccattctgtgctcacactgttatgtggcgttccctcgattcgaggtggcggaggagaacgaggacgcgggggtccttcggtatgctgcccgcttgagtagcggacgcgacttggttgaggaatttatcgactatggagtgtggcccttggcacatggttgggtacttggcgaagtgtgcccccgtaggatgccgaccttgggcgaccaattggtgtgaagtcctgcctttgtggtggatttacgcggtcggaacccggccgcgtttgcgcgtgaagtggaggccgaggccgcgaggattgtgggaaggtatgtgccgaggacggagaccttgaggagttgggatatctgcggttcaaatgttaggttgaaccgcatttttgagttgaaccgtttgccatatgccggctacccggggggggacgacgatgccaatgtcgctgtccaccagggaaaaaaggtggtgacaacggccgacgaaggctcttcgcagggaacagcg

SEQ ID NO: 4943 - DNA, 609 bp, Zea Mays
tctagtccacgcacactaataaacggaaatccaggggcctcagcgcaagtgtcaccaagaaacagaacccaactacgtggaccgcgggttgaatccgagatgctacgagggctcttacgcaaaactcccatggcgaaggggtatctagcatccagggctgttggatcaccaaccgatggttaggattagatctttactgtaatgaaacggtacgccataacggccgtaggatccgaaatgcacggcccagatcaacactcgaatcgttatgcgctcgtgtaatcccgcacgttggccgaagatccaacgatccacgatcgctatagccaaaacgcttctgcacatctaatcgccaccgtacgacataaatcggacggccagaggatcatcttccacccccgcgacccaactgcggcgcgcagtccgcacggtggcgccatagtcgcggtgcccagatcacgtggcccgcaacaactaacttggatctcgacggtgctacacgtagcgggggttggggtgagtccagggagcaaggtcttaccggtgattttacacgacagcgagcagtccacggaacgaaggttgttccgccccagatttgaactccgg

SEQ ID NO: 4944 - DNA, 580 bp, Zea Mays
ttgatccatcagcttgagattgcgcaggaggaagacgcgcagcaaggtggagtactgggcgtcgagggccaggggaggcacgaccaccagggttggggcgcgatgggaaacgacggcggctggtaaaggataaggaagaggatggatcgtgggaataatgccaaggagatatttttccacatttcctctctttttttatttctctttggcttttctatttatgcaaaaatctgtatacatccgtgttctaagatttagatcaaaacgagatgcaaacgaaccgaacaaaatcacatcagccttgatatttgagactgcacttgatccggttgaaatcagataaattttatttgcagaccgaacactcagatcagggcaagaaacaaatagatcgaaccaaattacatcggctttgatattttaagcgacatttggtttagtcaaacatatatgaattttgccgccatccaaacattcgactagataacaattcgattaaggaatcggtgcatggtttttctcggacaacgggcggggtcccaattttacagaaaatcagtcgttttccgatttttcatat

SEQ ID NO: 4945 - DNA, 476 bp, Zea Mays
atactaaaggcgttgtacaagaacgattgattcgcatcatcatccataatggcagctgcaacaatttggcgagtacaactttggtagagaagttatccttgcccactcgtaagcacccgaacccatatcacattcaatggcttaatgatggtggcaaaatcaaagttacacgttcggtacgtgtttccttttccttgggctcttattctgattatgctaattgcgatgttattcctatggaagcatgctctttgttacttggtagaccgtggcaatatgatactaatagtttacatcatggtcgttcgaatcattcttctttcatgtttaagggtcagaaaataattatccatcccatgacccctgactaaattataaaagatgatcttgctcgggcttcaaaaactacaaagcaacatgcacctacgccatccacccctgttaatgctgaaatcaagttgcatgctccggtttta

SEQ ID NO: 4946 - DNA, 788 bp, Zea Mays
tgaattttctatgcattttacaagtttctagatttgtttttgtattaaaaatgaatttctaatattaatttctctgtttttaatacactcgggactgggcgtcaaattccagaaaactcaggggccacggagtaagttttccgtgacacagtgaatagtaataggtggacggcgggttatttaagaaaaagtgcaggggctctttacgaagattgccacggcaaggctacaggcggttctcggccgttggatcaacgaccgacgcgccagattaaacctacgtctaagcgaaccggtaagcgctggcggccgcccgatccgagatctacggatcggatttaaaattcccgaggtggcttcgaatgcgcccgatccccatccaacggttcggatcttcacacgcgaaggggtacgccggatcgattctccaccacacatccctggatgaacggttcagaatgaatcggtcacgatctaatcacaggcgtccattacggatcaacggccctgcgcccttcttcaaccccaggtcagggacggcggcgcagagtttccccacggcagaagtcaccggagttcgacgggacggtgacccccctgctcccccacccatcttcaacgagattcgcaacaagaagaaacactgggacacgccggaggtacttaccgacgttgaagggttacgaagggaggtagccatggccgagcgcagcgcgagttggcggcacccgagcatcgcacgatccacttgcctgaccaaaccacgagcaacaaccagtgcacccaag

SEQ ID NO: 4947 - DNA, 453 bp, Zea Mays
caagaccggtagcaccggcccgctagggaggacaaaaggcacgaactctctagcggcaagctcatcagagtggatgaccccgacacattccatccaggcagacaatacaccatttcgagcactcactcagtctgggcgcgctcgggatgaagtcacaaggccatggcaaactacggcaacgcaaagcagaaaccttgaaggcaaaggggcgcagagagctcaaaggcgaaagggcaccgcgagtgggagagaagcaagacatggctgctactcgagggatgaacccttatttaagggcagatttcctcgctcacgccccgaagcgtcacgagcaaggtctcccccgatgagcaccagggttcccatcctatgacacgggggccaggcctcacatgtcatacaagctggcccgaagcgcgaagaaggcgaaccgccgcacaaggagcatgcaac

SEQ ID NO: 4948 - DNA, 336 bp, Zea Mays
gttacagctggcccatgtgggcctcgagggcttccggaagacattgcatcggctgcgcgcgaacttctacatcaccgacaaccatgcggtgctccgggactacgtccggacatgcacaacctgccaacgcaacaagacagaagcactctagccggcaggactcctacaacccctagaggtgacttcgcaaatttgggccgacatcgccatggacttcattgagggattgcctcgcttccatggcaagtccgtcatcttaacggtcgtggaccgtttctccaagtacgcccacttcattgccctaggacacccctacaccaccacctccatcgcacg

SEQ ID NO: 4949 - DNA, 329 bp, Zea Mays
gaggacttgggcgctgacaggcaggctaagggcgcagggcgcgcgtgtgcgaagcgttatccgcggtccgggccgttcgatctgaatcggatggaggggactagaccagggggatgagcgttctgggccgtgcgatcaagatcggacgagggaaatcagaccgggaaggatgagcggtcctggtcgtgcgatcaagatcggacaggggaaatcagactgggaaggatgagcggtccgggcagtgcgatcaagatcggacgggggaaatcggaccgggaaggatgagtggtccgggccatgcgatcaagatcagacgggggaaatcggat

SEQ ID NO: 4950 - DNA, 717 bp, Zea Mays
gtggggagcggaggcgctccggatagagcctggacacgtgtcattaccggacccatgcctaggtcacggcacttcctctcccgggaccttgttatgggtggtccggagctcacttggtggggtccgaaccctatccaatggcttcgggctgctttacttcggcagtccgggttgtgtgtacaggggtcctgtgccttctgggtccgacggcgttgtctctgagaacgccaccttaactgctcatgagatgctcctggggttgttctccgtgcggctaagggtagccgcacagacgtcgtgccttcataccgtagcaaggggtacccctaatccagggtaccgacagtggcccctgggcccgactcaggggaggatgcgagcctgcaggtggggccagagtttgactggcgatcggctcgctgctcctgcgcacccattgatgcagttactgccgacccgcctatggtcacgccgactgctacgcctgcccccgcggctgactggcccgtgacctccgtacttaatgtctttgttgggccatgcgcggggtgcctcgagtcactgcatcggttttgaaaatttatcttcttagtcttctgcgacggcctcgaggaggagcagtattggcgcaagcggcggtgcgactttcctgcacccaggaaccggtgtgctaggtgcatgacatgtgggcctgggcccccatgccagaggttggac

SEQ ID NO: 4951 - DNA, 686 bp, Zea Mays
atcgcaatgaggccaaacgactaaagcatagaagcagggacttcacattagtcgagggccagctgtacaaaaaggggatcaaccagcctgtgctgatgtgcataactgaaaccgaaggcataaaaatcatctgcgaagtccacagctaaacttggggctccctcttaggacccagggccctcactgccaaggtaatttgtcagggattttactagcccataataatttgcactgccaatcgagtcacaaggtcatgcgaagcatgccaaaagttctctcctcgcttaggcatcccttcacaattgaccaagctcatcgcccatacatggccacttcaacgctaggggctggacatcgttggaccactgcctacagctcaagcgaacctcaagtttaccttcgtcggcatcgaatatttcacaaagtggattgaggctagggcagtatccacaataacatagaagaccgcccaaaaattcttctggcaaaatattgtctgccgcttcggagtcccgtccgaactcacagtcgacaacaccaaacagttcgacagccaggactttagggatttctacttttgcatcggcaccaagcatgtcttcgcctttgtgtaccacccactatccaacggtgttgttgatcgtgccaatggcaagatttttagtgccatcaagaaaaggcttctt

SEQ ID NO: 4952 - DNA, 316 bp, Zea Mays
ccagctaacgttacgagcacttctcactaaaaataatcacctacaaaaatagaaggagatactcgcggccaagcagcagtgcaccaacatgcaagccaaagtaaggcagatgatcctagaagaagaacagaaagccagagagctggagcagcaaatcatagaaatgcagggcgaagacccctgccaccagcaacaggcccccgcgctcaacttaaaccctcgtcacccccaaataccagccttcgcaccagctaccttccaagggttgaattaccttgatgacaaagccctcttgcactacaacttcatgcctccc

SEQ ID NO: 4953 - DNA, 769 bp, Zea Mays
cacgcaggtcgccctacaggcctacacatatcgttctccctctctttcacccatgacccatttataatcatttatactcccagatttgcttctcaccttttctgtatcagatccagcaagtgcgttagacataacctgggggcagcagaggactagccggtagcgtcaacaggctggatggagcaaacttcctcttctactcctcatctgttgccgctccaattcattccatggatgatgccctcattgtgctcgatgaaatgggcacatggtagagcggcggctggcagctcctactcattccatggatgatgccctcaatgtgctcgataacagccggctgccttgctccactattttatgctcattagtatgacaaacactgaaacagagcctgaggcacacaacaaaacaggagctagcaggagtaatacttgtgcaagggaaaatgaggttaggcaacgcaattgatggtattaagtcttttggtttagtctaatactttatattttctctgcctattcaagtagccatttcttttctgtgtacatgatttctagtgccgccaggcctgcaagcacaatgctgttggtatttttggcattaatgggtttctttagtttgagtgaatggtgttgcacacatacttagatattggcttcagacgtgtagtcatcagatgtcattatcctctcacaattgagttgattcttctgtgtgcagttggatctgaatgttccttgctgccggtgcaagtccatcatggaag

SEQ ID NO: 4954 - DNA, 708 bp, Zea Mays
ctaagcatatagtaagcaggaaatcaactaagtgtcagtcacaggtaaacaaggtgaactaccccaaacaacagtcactcatcatgctagaaacatacctaaaataaataccatatgaatatgagcaaaaggagcctaagcatgccatagcatcatcatgtacacaaagaacatactactaggagcctaatcacattctggcagttatacaaatgaagctcaaaataacctgatatgcagatataatacaaaagaaaatgaaagactaaaatctacatgaaaatgtagaatataagaagaaaagaccaaaaagggagccctctaatcaaaaagagaaataaacacccaattcccctcgtaaatgaacaaatgttttttgatcaaggggtttggtcaaaatgttagcaagcttgtgatttgtatcaacgtggcataaatcgatgtcgcctttctcataatgatcacgaagtaagtgaaagcaaacctcaatgtgcttggtcctcgaatgtagcatatgattcttggcaacacttatggcactcgtgctatcgcaaagcagaggcacatgatgaaaatccaagccaaaatctcgtaaggtagtcatcatccaaagtaactgcgagcaacagctagcgatagcaacatatttggcctctatggtagacagggcaacactagactgtttttgagaagatcatgaaaccagcg

SEQ ID NO: 4955 - DNA, 485 bp, Zea Mays
gcaaaaagcccactacaagccacggaaaggcttcatcgaaagagtcccgcaacaaggagaagaagaaggaaaagaagacttcttcccacaagtcgcatcggagtggcgacaaaataaagaagatgaggaagtgttagcataactgaagagaaggacaacgacagtcagcaggaaggagatgatcaacgggccggaccaaccacagtgcctgttgggcccccgtatgccaaaagggtgagaaaacgtaatgcgaaagtgtatgggccagcctgggtgaattgaggagaagaacagtagaataaatagtagctcgcgtggagttttgagttatgcggtaacagaactatgaattacttcttcttgtcgtccaagtatcaatacagccgccttccctctcctcctctcaatatctgattctgcctctctcttctcgagtccttctggtaggagaggttaacaattggtatcagattcgtcgatcctcg

SEQ ID NO: 4956 - DNA, 327 bp, Zea Mays
ctattgaacgaaggggtattttgcactctaatctcagccgtccgagaaccgatcgacggcgcctggtccatcatctacccccagccgtgacagacgacggcggcgccagcatccgtcgcactgctacggcggaggagtccggcgagcctcccctcaaagcgcacacgatgctccgattcactatggacaggtgcaaaacgatgcgaacgaccagacgaacgaggtgaggaagtgttcaccttggattatggcggcagcggttctggccacgcggagacgaagatccgcggtggagcttgactacggcgaggaattgctcgccaccgg

SEQ ID NO: 4957 - DNA, 448 bp, Zea Mays
gcggggtagaagcgggtagctcgtcgaggaagccgcgggtgcaggggtgctggattcggcgggaattcctcaccgaggatctgcggaccgcgcaaccacgtggcggagtcgctatcgtctcaaatccgaggtaaaacaacctccccactctctgccctactctcctcttcgtgtagtgctcttcgtattaggtttttggacaccaaatcgtggtgacagcgctcggcggcgaagcgccgtcacgaagtcctatgtcgctgccatgcctgggcgctggtcggcgaggaagaaagcgtgggcgccgtccgatccctttcggatggcttggattagacgccgtgtaccgattcgtagaatggatatgggccgttagttttcgatcgtgtggcaggtgttaggttggggaaaatcgtagcctagaaccgtggatcttggatccggtggtggg

SEQ ID NO: 4958 - DNA, 362 bp, Zea Mays
cctagttgtgagaatttttggaaaattcagtcaactgaatgaagcagcatatttaaaatcttctgaacaacaaaacaagcctaactgaatattctattaacatttagagaccacactgttctttacttaatgtttctttatccatatccatgtttgggatttttcaggctaggcaaacataatattaatgaatgaatggatagactacatgagtgctgccatgcagatcaagaggtagtaccagttgcaacatctgatctagtgaatcctaaagattgcttttgaatttgtttgtgattagagtatcaagccgtggagactataattgtgagtacagtggccccccttgttataaacttttt

SEQ ID NO: 4959 - DNA, 357 bp, Zea Mays
ccgaggtgaaggtatacagacgcgcccacacggaataccacaccgcggtggagcctcagctccgacgagcaattggcgccagtaacttgtcctatattgagcgatttcaggtgcgaacgagagagaaggagcaggggtagactcgagcgtagactcacggtaattggagcagcggagacgtctagccacgctcccccgatggtgcggtccgagttgagctcctcaacgcaaccacttctccctcatggtgttagcttttctggtggacacgaggatgcacatggggaaggataggacggcgccggagccgtggctacctaaataggctcggactgagtccgggcgtagcaaccactc

SEQ ID NO: 4960 - DNA, 719 bp, Zea Mays
gccgagcaaagttttcggaaccatcccttaagtttggtcgaggtttggacctttagcgacccagtccgaggtattaggcagcagttctagggtggtggagggtgtaggcttacggtatagaaccaggctaagcggctacccagctccagaccacccccgagaatgtggtcctttcccctagctggatctcactagaagttcaatcctcatttagcaacaaaggggtacaaactaagcgacaagctagttacatgatcacaacataagttaggaaccacgtgggggtcagaggaaacaatatatgtaaattaaagcaggaaaaggattgaactgagagcaatgtcttccttcataactgggtttataagagttaggcaatggatgccaaataccgggtttacgagggcggacctcactgggtggataacatgtaaatattaaacaattataaaggaagagttcactctcatgctaccttttggattgaatggtgcaggcgccccaacaactgctcgagcaatgacgggtgtcagacttcttcagttaagtagtgacttgggccatcctggtaggtgtcgagggcggaacttggctggtggccaacgatggcaacctcatacaccatagggtttggctgatgatcatcgtggtggaccatgcagatcttgttgctaccccttgcaacccctagcacaccagatttcatcgagccgccaaag

SEQ ID NO: 4961 - DNA, 482 bp, Zea Mays
cggggaggttacgatggtcacatcgaggtgcgggttggcgtcggagatggccggacttggccggtcctcgtgcgcaggcgagggagttcgtcggcggcgagtgttctggcttgctcacgtcgggatagttcaattggttggcttggggagctttaccaagtgacgcagaggcagtatacgtgaggaattgggaaatggtgcagtgacttacccggtccacgctctccagtgagcggaagaagttcggcgagggtgattcagggtttccggtgaggttgcactaggtctgagggcttggggagcttcatgggtctctagtgaagctaaccaaactgctggcgtggactagggacgactggggtgagctggccacggtagctagagctcgggcggcttggcgggcggaggagctatcggttcacggcaaatgctccggtgcttaagcgtggtgagtgtgcaaagctgaggcaaggacgtgcagg

SEQ ID NO: 4962 - DNA, 396 bp, Zea Mays
cttcaccgtgccaaggtcttcctgtcgtgtgtgagtcccgagtgaagatatggcctgggtgagaagatatggtggcctgaagatagctctgtcagcactgcccaaaccgagacaaaaccggtgtcaagtcatgtcaaacgatttgggtttgatctcaaacttctccatagtgttcctagagtattttggcgccactttgatatttggactttatggatttgagccttggaagatagggaacacttctgaactttgggaagggtttgaaattcagttttctgaatttctgaattttcccatagggcattagttcatgggctgatttggggattttggataattcaaatggcaaaactttcttactatactttgttggttatttagtgcactaaaact

SEQ ID NO: 4963 - DNA, 540 bp, Zea Mays
cgctccaagtagttcatcgcttgttgcctctatagcgtctagccaatcatcatttggctcatcaaattggcttctgtaccgaaaggtatacttgagataaaccaaggcactctggctggagccagcggcggcttccttcggcatttcccattcatttgcaagaggccatactttataagcaatgtgctcttgaactaaatctctcgtgccaatgtaggtgcatatggtgttgaaagcaatttggcacgcctgcacttcattcccaaatgtgatggatggccttctaatgccaaagcgtgaccatataggacgttggataacgcctctcacatcctccctctgattcaggtcattcttcacgtaaaaccattccttcatccaagaacctggccacttctttcgaagtgtaggcatagggtaattctccttagagcgaggcacgacgccatagtagccaaagttgttatgtattgttcttttcctgtcgccttcgtctcgtaagatagctcatgaatattgcagaagcatctcacatccggc

SEQ ID NO: 4964 - DNA, 471 bp, Zea Mays
gcagcggttgttttgtgccactgcatgtcagtcacaccatggacatggagagtgagctgttccaggacaaaacttcactactcagttcccttagtagctagaggaatctgatactatttatattatattacccccaatagttgtcctccttccttttacttgagctttcgctttcctttccagatccaggatgcaaagcacatgtacagacaactaatgcttccatagatgatagatcagtcagtgggcctccagtggttttgcattgagcatgtgcacattagtgcgatctgtggctccttttgcattaagagagtgacaagagcgattaacttaaaaaaaagataatgcgcattgtccatattacctatggactgacgaatgttaaggtctcatggctacttggtcgtcgaccactgtggtgacattgcggaccaatgctaattttgaggatgaactgttcttttcttt

SEQ ID NO: 4965 - DNA, 588 bp, Zea Mays
gctccatccttgcacctatcgatcccaatcaagggaatgaagctctcatcagagaggcaaggaaccagaagatggccatcagctcgccctctcgtgaagaagagctaaatgagaaaatcaacaaccttaaagtcattcaccagcaagtggagaagcgcagggagaagatgcttcgtctttcagaactccaaagaaaaattgatgaagcaaccgaagaaatgcgcaatattgaggcgcatgaaaatctaaacaatttgagggatcgagattactattggagaaattatgacaatcttcgtcacgaagtgtacaatgcctaagacttccactatgatgaagcttccccactaacaccagagctgcaagctacaccatggccaccactatacaagcctcctacactatctatctatgatggccagacagacccgaagcagttcctcatgagctacgaagccaccatatcatcatatggtggaaactcagcagccatggcaaagtccttcattatggtggtccgaagtgtcgcccaaacttggtactcgtcgcttcgaccaagaactgttaactcatggccgaaacttaaag

SEQ ID NO: 4966 - DNA, 570 bp, Zea Mays
ccggaatagcacaacaagtgcgttaatcgaagtctctcattaaaaaagacacccctcgcaaattcgcccgcaagcgcagccggaccaacacaggcgtacgaatacggcaaacaagccacattaccgtacaaattacaattacacacacacggcgagggcatcacatattacatcggctcaacctttgggataatacccatctccctataattaaacagcattatcctcaattcctcaccctcaaaaagcttccaaagttgcccctcgcctatgctcgccccagtcggcgagaacaacaattctcgtttaccaacccggtctacttggagacgaccacgctccatccccatacgtcggcgcctgccacttcgcgaaaattcacccacactatgttttcccaccactcttcgccgcctacacccagtactcacactaggaagatccccggcaccctccacacgcggcgaagtctccgccgcagccacatccaacgcaacaaaataatccaagccttcatccgaggactcctccgtccaaggaaacgaactcccagattcaccatcagactca

SEQ ID NO: 4967 - DNA, 1097 bp, Zea Mays
gtcacaagtcaacaggccaaacctgaccgggtcaagtatcctggtctcctgctgccactaccagttccaacacatgcctggcatactgttagcttggatttttatcaccggattgcctcagtccaatcggtctaattgcatcttagtggtggtggacaagttttctaagtatgctcactttcttcccttggctcatccctttacagctcttttagtggctaaactatatttgtcagaagtctatcggctacatgggttgccagctgctatgatttcagacagggacccggtctttacgagtcacttgtggcaagaactgttcaaaatggctggtactcagttatgcttaagcagtgcatatcaccctcagtcggatggacaaacagagcgagtgaatcagtgtctggagacgtatcttcactgttttgtccactcttctcccaagaaatgggcgcactggctgccgttggctgagttttggtataatacttgtcctcactcggctcttggaacttctccgtttgaagtgttgtatggccactcgcctatacattttgggcttgttgacaatggtcagtgtacaattcctgatcttcaagagatgttggcagagcgacagctgatgctccagcaagttaagttgcatctcaatcgtgcccagcaacgtatgaaaaaacaatcggataaaggaaggacaggtcgtgtttttgaagcaggacaacaagtgtttctcaaacttcaaccttattgtcaatctttcgtaacttcccggccttatcccaaattggcttttaagttctttggtccatttaccattgttcgcaaggttaatcctgtagcttatgagttggctcatccaccaggttgtggtattcatccggtattccatgtttctcagttgaagcctcaagttggttccaatacacctgttagcttgtcagtacctgatctgtcaactggtttgcaagtgcctgaacagatattggactccaagttggtttggcgtggaggcaaagcaatttcccaggtgttggttaaatggtcggattgggatgtctctctggctacgtgggaagatgaagctgtgctgaagcaac

SEQ ID NO: 4968 - DNA, 834 bp, Zea Mays
aggatgccctgggcagccaggaaggcagcggtggcactattaatgaactcagtgccattgtcggtctgaaaacagcgcacagaagagttgaattgtgtgttagcgtaagcagtgaattgaacaatgtgttcatgagcctcagatttatgacgcagggggaatgtccaacaaaaatgagtaaaatcatcaagtatgacaaggtaatatttatagcccgaaatactcaaaactggagaggtccagatatcacaatgaacgagttcaaaaggtgtagatgtattagaaatagaactagtaaaaggtagcctagcatgttttcctagctggcaggcatggcaaatgcggcgagctgctttattacactgtatagctgaaagcttatttagggtttaacggcggctggtgctggatgaccgaggcgagcatgccacaactctggagcaacgacagcaacatggcagcgaggcggcagacgatgtggaatggtgtagagatccccgttgctattgcatcgaaggaggaccgttttggtttggagatccttaacagaaaaaccagaggcgtcaaactcaatggaacagttattgtcgcgagtaagctgtcgaacagataacaaattacgagcaagcttaggagcgacaagaacattattaagatgaaaataacgatcagctataggtaagagagatgtgccacgaccagatgaagggatggactgcccgttaccgaccgtaattgagcacggtggggaatgacaacgagagaggagtataccgtcgttggaggacatgtgggatgtcgctctgttgtccataacccatgaaggggagtctt

SEQ ID NO: 4969 - DNA, 427 bp, Zea Mays
cagagcagtgtgtgcgccgtccttccacctctcaccgtggcacgtcgcctccacctcgccattgccggtattaagcactctcacttgtctgccgcaccctcaatttggcttagcacctaggtaatcgtggtatggcgcccggaatcgctaggaagggttcgctggcaagctctgtcgccggggagttgtgtggcgccgccgcgtccacgctcgggacggggacgatttcgctcggccgttggatggctagcggacgacggtgatcgtaacgtaggatacccccttgcttgattaaaccatggctgtcgatatccgatctggtggtcgcgtggcatgttgcgcgggttcattaaaccgagacccttggatttggatccgatggcatagatcggataccggttcgatgtaatatagagctaatcttcgc

SEQ ID NO: 4970 - DNA, 335 bp, Zea Mays
gtgaaggagagattgattataacaccgctatgccatcgaagcccaaccatttggattttgggaagtcgactgtgtctaaagctgatatggccatgatgacgaagctaggctacttcagagaagccgagaagggttgattcgctttggcgaggaagagattatcccgaaaccagaaaatgatgaagtggtagtttttaagagcttcttcaaagcagggttgagattatctaggctctccaaagccaaggggtggagccgctcgccgaagccttctgccgagtacatgaacttcactatcagacgaaggctagagaagacagattgcatgagaactt

SEQ ID NO: 4971 - DNA, 326 bp, Zea Mays
gggacgtgcgcagcagccgcgcagattttactgcttgttccacggcgaagactgcgtgcaccctacaagagactgcctagagacgaaggccaccagagacaggatggcacgggcgcaaccagccgacaaccctagagttgtcgcgcacacatatcagcaaccccctcagccatacaaccacggcctcgctccgcatccaccgcaccatgcataccaacaccaccaggaggtacaaatcgtacctcccccacacccacctccacaccagcaacagcaaaacatccatcaccccaagccccaaagcaagaagacttcgccgatcagcc

SEQ ID NO: 4972 - DNA, 749 bp, Zea Mays
ttggtaaaatactcgacagcgacgaaggtgaatttgaggttcccctgagccgtgggcaggggcccgacaatgtccaggccccagcgctgaagaggccatgtgtgggtgattagtttcgtgaattgcgaagggcttcctgatcgaggtgaaaacttctggcaggcttcgcaagaccttgtgacctgatttgcgacacagatcattgcgggccagtagaaaccttgacggatcacctttgcggctagggcccttggccctgcgtgagagccgcaagtcccgcgtggacttcgcgcaggatttggacgccttcagtctcggtgacacatttaagcattggttgactgacccccttcttgtaaagctggccttcaatcagtgcaaagtctcggcttcgatgtttgaggcgcttggcctcgttgatgtcggttggatggtagtacccctgtaggaatagggttattggtgcccgccagtcttcggtcataataaggatgactatgcggtggccctcgctgtcattggttatctggagcccttcggggctgcggacggctggcgtgccgataacatggtagaacacgtcggagggcagggactcgcctctagcggcagccttggccaatgcgtcggcctcctcattcttggcccggtccacatgctgcaaggtgaaacccttgaattgtctctcgagactacggatagccgcgaggtattgcataagtgcggggtcctttgctgcatagtctttc

SEQ ID NO: 4973 - DNA, 471 bp, Zea Mays
tttctccacttcgtcacttcgcgagtcttgccttaactttatcatttgcaatgctctccgttatcatcatctttacccttgacacctctatatcttacattgatgtctatcttatacctatcatttaaaatctcttgtcctccatctcaatctgagcgttgtactttacttattttcccttggttgtatcctcttctttgcctcttgcgagtttttaactccatcctttgttgtgcttccgtttgttgttgcatttacctttctcatctctcgatttgaccttggtgattacactatgtctattatctagaatatccaatctcttatcccaatttgagagcggtgttttacttatctcacccttgacaacatcctcttctttacggcgtgcaagccttgacttaactccattccttgttgtacttgtaccacttgctcttctatgccttcatcttttctcttacacccttg

SEQ ID NO: 4974 - DNA, 549 bp, Zea Mays
ctccagcccgagaccgagccagaggctctcttctccctctgtgctctctgctctctcgcggtctctggcgatctccacccctcgccggtgaccatctctcctctccggcgatctgctctccgacgacctcttccaagtgcatcatctctctctggtgagaatccctctctctctctctttccccctttactctctgttcatgccaccagtgaagcacccatttccaccctttgtgcccaattccaaatcttgtgaatcctagtgaatccatgttgtacaatgtgttcctttgtggcccttgaacattcttgcaggttcctagctccttcgggagggttttcccacctcaaatggcaatttccccgaaaccctaaaactccgccctccacgtgttcggtgaaatgcccaaaccagctaaaaatgctccaattgaacccaaatttttcaggcgccttcacaacatctccagtaacatattcgccaaatttcacgcccatctgatattccaggctttaatttcacccaattccccgtttcgagcgatcgttt

SEQ ID NO: 4975 - DNA, 501 bp, Zea Mays
attttgagggcctagagttccaccacgtggaaagggaccgaaacatggaagcagatgcgctgtcaaaacttggttccagtagagctcaacctcctccagatgtatttatgcagtaggtgcatcaccccaacatatccccaaactcgatagaagagtgcaaagcaatggaacaagacctgattgactgaaggatccctcttatcaggtacatcaagagtgaggaggaactagatgacaaagcggccgccgagcgccttgcccgatagtccgcccattacacccttattaggaatgttctgtattgacgtgggatcatgggcgttttataaggtgcattgacacattgatgggcaagagtttgttggaagagatatacgccgaagtatgtggatttcatgcatcatccatgacactagtggggaaggcttttagataaggattctactggctaatagcgaagaagcgtgcagcaaacttcgtttagaggtgtgaggcatgtca

SEQ ID NO: 4976 - DNA, 617 bp, Zea Mays
gcgcatattagattcatccacgcgcgaaccagtacgcaaacgtgggccacaggattacgggtcgacggtcacgaacccatctatgttccacaccgtccgatagtcgattcacgtcgcaaatttaataccccaaacgggtacccacttgtcaaatcacagtcgttcctagcccaatcaacggctatggtgagctctcctcaacatcccaccacagtcgtccgtttccagatcgacgctccaaccctttcttcatcctcccgagcataggccgaccggcgcaggcacagccaccgcggtggcgccattactagcgcataaggtccatgtgatcccgcccccagtccccatttctaccgtctctacacgacgcagaggtaaaatcaaaaggctaaaagggtttctcaccagcgggggagacctcggggaggctggccacgacgcctggtgggtcggcgttgtctgccaacaccggcgagaaatctcgacgattccagtcgattttagaccacaacggcaccacgcacgcaatctatatgtcccgacgaagcccccgaccacaattgaagttctggcactagcgtaaacgggaaaacaactcacagcggattctgtacaag

SEQ ID NO: 4977 - DNA, 653 bp, Zea Mays
caccaggcggagttgacccactggttgctgctcagatgaggatgatgcagcaaatggcggacaccatggcagatatgcgtgcacagatgcagcaagaacgccaggagatgcgttaagaaagagaagagatacgacaggagttgcgccaggagcgagaggagatacgccaggaaaggagggcgcaacaacagcagctgcaacagcaaatgcaacaacaacaacaacaacagcaacagcagcaacaagtaccactgcctccaccaccaccaccagttccaccctgagataagcatagggagttcatgagccataagccacctacatttgcaagctcacctgatccactggacgcggatgattggctgaagtccattgagaagatgctgaatattgcacaatgcactgaccgggagaaggttttgtacacttctggacgtctgacaggtcctgctgctgactggtgggattcatatactgctgcccacgatgctgctgatactatcacttgggcagagttcagtacgcagttccggaattatcatataccagctggattaatgaagattaagaagaaggaatttctgtcgctgaagcaaggaagtatgtcagtcagcgagtatcgcgacaagtttatccagttatccagatatgcc

SEQ ID NO: 4978 - DNA, 354 bp, Zea Mays
tcaagacatcagtaccatttgtgattaggagagtaactgaggaagacacaatgggtgtagcagggggcaagcttatgtggagtggtggcagaaaggttggggtagcacgcacacccaaaaatgtgaagatggtcataggatgtagtggtgccaaaaagagcaaagcggggtatggaggtacgaatcattgttgtaggaagacgattaaagaggtgggtggcgttgtggaggctctcaacccagtagcgagcaggaacagatgcctaaaatagcaaggagcgcgtgatgatgttggtagtgcgagccttgtgctcagcctcttcattctgagaagtgtatgagtaggacatctag

SEQ ID NO: 4979 - DNA, 715 bp, Zea Mays
tttattccctggactgcgccaccatttctataaaagacaggggcaaaactataaaactttagtagactcagattcctaccagagagtaccgcgggttgattcccaaattctttgaggtctcttatgcaaaactacatagccgaaggggtattgggagattcgtgccgttggatcatgcatccacggatcagattagatccgaaccggtacgtattcttacccgttggatcatagatccacggatcaaaaccccacacgcccacatctaatcccaaccgcttactagaggatcgacggtccggatcggatctccgagccgccatctaccgcatctatctttggcccacaatcgagatcccacggtcaagatcgcccccacccttcgtcatggatccgatggctcacgagcttcttctccacgcgaataccaggtctggcagcaccgttccccccccctacggcggacgccatagccagaccacccattcaccgctcccgggcacgaaattctaatctgaggtacgctacgcgcagataagatgtaggagaataggatgaaggctccataccggggttcgcaggcaacggaggaggcggtccacgacagcgtgcggatccaggccgagcaccacaccggtgaggaatcgccaagcgtcggagaccccatcacacccctgattccatggaaggctcaaccctgcaccggaaccccccc

SEQ ID NO: 4980 - DNA, 441 bp, Zea Mays
tgcccacttgggccaaaatagtgaacggtccaatgtatctcgggctgagctttccagagacaccgaaccgaacaactcctttagtaggtgataccctgagaaggacttggtcacccacagcaaattccagatcccgcctcctcacatcagcataactcttctgacggctctgagctgccaaaatattctgacgaatttcccgaaccttttcagaagtctgctgaacccaatcaggaccaaccagggatctctctcccgaagtctcccagcgcagaggggagatacactgcctgccatacaaagcctcaaatggttccatcttgatgctagcctggtagctgttgttataagcaaactctgccagtgcaagatgatcctcccaactacccttccatgacagaacacaagcacgcaacatatcttccatggtttggattgttc

SEQ ID NO: 4981 - DNA, 303 bp, Zea Mays
agaaaatgctccttgacgacaaaaagggcaaatgggcggaccaattatccgaagtcatatgggcgctgaatacgacatagtgccgagcaaccgggttcacaccctttcgcctgatgtatggatccgaagcaatgacaccgcaagagttaaagcaccggtccccccgaacaaacaaatcagccgtccccgacgtcgacgaaccgacctccagagatctcatcgacggagaccgcgtcctcgccctgcaggccctaaacaagtatcaggtccagaccaaggcatggcgtgacaacactgtcgtcc

SEQ ID NO: 4982 - DNA, 564 bp, Zea Mays
cccccgtgcgcgttctggtgcagcgtctggcgggtgggcgtccgtccactggctgacccgtggggtacccctgtcaggttagtcttcttcatctcgccgcaatgcacggatggaagctttaccaaattccgaatcaaagtccgttgagccacaacaaatttggggttgttgcgatttcgtagcaagattgatgcgaccacgggtgtatatatacgcggactcgtgtcatccctagctgagcgaaccagcagcctttctctcttctttcctttccctcgatgcagtgagttggagagagaaattgggggagcacctcgcgaagaactcagtggcgcttgtgattggttgtcgaggcaggatctgggagctgcgcgtgctcatcctgtgccgatcctaggaccctattgtgcctattgacttggttccgcggtggaccaccatcgctgggtggatgctcatcggtgggtggatcgtgccatggtctgggtctcctacacatgatagctcggtaagaattccgtcgaacacctcgcctcagttcttggaccgtgtaacgcgatttga

SEQ ID NO: 4983 - DNA, 966 bp, Zea Mays
cccttggcgttttaaacaactagtaaaggggtcgtgacactatttatatgtttcactgacgtttacaggaaatcccttctacttctatttcttcgcagtaccaagtccacgacatcgcacggcggagaaccgagctccgacgagcttataccggccagattactcgatgaccggtgctctacttcggctgagacctaattcaagccctaacaagagtttcccctcaattaatttcactagcggagctctaactcgctctgtccacggtgacagcgggcacaatggacagcatgacgtgttcccgacgatctaaggggtcctagcctaattggtggggtcggggagcatcaggggcacacaaggaattgaaacaaaagagcagagggtatgagtggacctggagtaggatgaccacgacgagattgtaaggtgcggaattttggaccgaattggggagaaccggaattggagcttgctgttgagtaattaggggcacggcttggtggatcagtgcttgattaccctacggacctgtcggtgtgctcaatttatagtgtgcttgagcagtggtgttcaatttggacgaattgcgctggtggtcgagagggggactgagtcactggcgcggtgattcgttgccttcaccgtggcagactcaccggcgacgatctaggactataaagcggtttatggtgactcaccgtgacaaggtaaagcgtcgaggcacgtagccaggctggataacggcgaacgccggtgatgccagtgcgattgaccacggcggacacgacggtcggttagaacagtggctgtagtttatctacaacgcgatatttcttaccgaggagcgctatctgtgttcgaccgggtatgaatcgcgacgccggcatggatctgggcgcaagaacaccggcggcgagggggggtgaacctgcgatctctttcagtcactgtacaatggaatcc

SEQ ID NO: 4984 - DNA, 696 bp, Zea Mays
cgagccccgagctcgagcgtacgtgatcgaacgaagcgtgcgtgcaatggcgacgcgacgtgtgagaggatcgaatcagatagggagcgtatctgctctagaagaagcgtgtcgcatgcatttgtcagcgagtggcaggcgttgagaatcgagcaagagaacaggaggggactatacgttcaaatatactacatgatggttggttcgtattggtgcagtctgatcgatccatgcttgctggcattagctcctggcagctcagatcagcttactacatgatggttggttcgtattggtgcagtctgatcgatccatacctgctagcattagcacctggtagctcagatcagctggagctggtcattctcttgtgcatgtaatggatacgttgcagcacgcgatcgtcagcttgcattgctagctctagcgaggcacgtcgctaggctatgacacaggctatgacacgtggacgacccgtacaccatttaacggcgacatgtaacggcaatggcgttgaagggatggaaaatataaaccagtggctttgaaggaaatgtataattttagatggtactgaagagatcgttataaattttgatggcattgaagagattttctctttaatttacaagtcaactgttcccatgcgggaccttaccttacctgccatgatgtcatgttccttccttcccccgc

SEQ ID NO: 4985 - DNA, 461 bp, Zea Mays
ccgcagctgcagccccgcagcgacgaatcccgcccgtagctcccacccatagctgcagcgacgaatcccgcccgcggaggcttccttctatggcgacgaatcccgcgctccatcctcgaatcaagaagcggcggttccttccatcctcgaatcgagcagcggaggattccttccatccaaaaatcaagcagccgcggcttccttctatggcgccccttccttcgacggctagccccgcagtggctccctctaatggcgttggcaaatcttccatccggatggcgttgattgcggggaaatcctctccctcaaagatctcaagccaccgcgtctatttctgccttcccgcctccgctcccactcctctctccctccctccgcacaccacatctgccccttcctctctctgtgcgcactccgtgtccgcgcacatcggaggtgtgccgctgccggctacgaag

SEQ ID NO: 4986 - DNA, 461 bp, Zea Mays
caaaaatcccaagggtaagagctaaaaatgtaagaaacaaggcacaaaacagaggaagggtcagacacttaccagggacacatacccgtggtcgggacgcatcgggggctggttaaggacgccagcgtccagcctcaccatcgtgcccgctatccgtctgaggaggtcatcggtggagaggggggtcggggacatccgtgaaccctccaaattgacccccggcttcatttccgaaagccgcaaccgccgctctaccaaagggagcaccctccggcagtggatagtggtgacaacccccacggcggtaaggccttcggcttggagcttctacagggcacagagaaggggctggagcttttcctggttctcgcgtgtggccccccgacgccagttatcgccggcggtagtcaccactcattgagaaaagggcggcaacaccccatcgtcattccggagataaa

SEQ ID NO: 4987 - DNA, 446 bp, Zea Mays
ttcgggataaagggaactcactttctagaagattggaagaaggaatcagcttagctgaatgcgtgtctgggagacaacggtagcttagaaatcaagccaatgctagaagacctcatatgcaaggctcaacgcctggacacggagacagcgagacttatggaaaaagctcgcaaagaacaacttccggaccttaggacagatgaacaaggagtcttttggttcaagaaccgtctgtgtgtaccaaaaggggaggcacgagaaatcttgctcaatgaaggtcacaactcagcctactccatccacctaggaaccaccaagatgtacctagacctcaaaactagatactggtggagagggatgaagaaagagatagcacagtatgtggcctggtgtgacacctgccaacgaacaaaagccgagcaccagaaacctgtaggcctactgca

SEQ ID NO: 4988 - DNA, 692 bp, Zea Mays
gaacaacgtgttctcggcgacccatggcagtctagttcaattggacgattcggtgagcatcaagaacatgggagggtgttggaacaatagcatagagggcgagatctgacctgagttgagctagccgcgacgagggcattcttgcggtggtagaacaggtttggggaaagtaagaaattcgtggtctctggtgagcaatttgaagcaatagctggtgcgttggcttcgagattatatggcgcaacagccctggccatcaatttatagggggcttaggcggtggcgtgcaatttggccgagcaatgctggcgggcggagatagagaagaaccttggcgcagtggattcgtgtctactgtcgtggcgacttcaccggcgaccaacggggagctagagtgagtcacggtgatgcggtagaccggtagagacacgcggtggacggcggtgagggcttaatagtggtgagaaccttatccgaaggatcagtgctcaagggagaggcacggcggttagccggagtggcgtccagcgcacggggtgatgatcttttaccccgcgatgctatccatcaactcccggcacgaatccagtcgccggtgacacgaatcgcggcgaaggatcagtcgtcggcggtgagggctccgtgcgctggcgtcctgatcctcacaaagcactgtaccatggcgattttca

SEQ ID NO: 4989 - DNA, 421 bp, Zea Mays
ggacgtgcttggcaacttattcaggcatgcggaatctagggggctgctgcatagcttgggggctgcaaatgtcaggtacaggctctccatgtacgcagatgatgtagttctctttgtcaagcctctggatgatgatctggtttgtaccaagttgatccttgactgctttggagaggcatctgggctgattgccaacatgaataaaagttgtgcaatccctatctgttgtgctgctcctgttgtgcatgaatgctgcagcaccctgcagtgtgtgcctgctgccttcccatgcacttatttggtcttgccaatctccaacaagaaactgcgaagaagtgacctcattgtttgggttgatgaggttgcctaactggaaagcatcccttcttaatctcgctgggagaacaaccttggtttgttt

SEQ ID NO: 4990 - DNA, 714 bp, Zea Mays
cgggcacaggtggtccgctagatctagattcgatggctacagatagattatgaacttgtatctcttgctagccctaggttccgagatcgatggttctgatttaattacttagatcactagtcccgaccgcccaattgagatcgaacgcccgagataaccccaaggcgaaacggtacgactcccctagtcacaaccactgatccccagaacgacggccaacatctttcttccacctcccgcaacccacacgcggtagcaccgccgatccgaggcctagatttcgccagagatgcgctcatccgagcttctagggcctaatccgagcgctaccgggaggagggcaaacgctggtgtgaacatgaaggggtggcgtaccagtgcacagcgcggcgaaaaccccatccgcagagcagtgtgatcccctgacgaagcttcatcgtcggcaagcaattgccagccctccgatcgatcacccctccaaacaacgccacagacacatccgccaggataggccgagcctccctggccgtgttcttaactcagacgacggcactccctccgattggccagcggcaacaaccttcactccgcccagcggcaactctccctcacgttggcgttcatggccgacaaaactggtttcaaggaacaggtggccaggggaggtgaccttatagcgtagagacgcggggagagtccacgcggttggtccac

SEQ ID NO: 4991 - DNA, 396 bp, Zea Mays
aaagggtgcaacttctgagaaggctgctgcttcagctgcttcaagcgagcccgcaccgaagaggaaaaagttgaaggtccttactcaccgaccgtgctacattgaaccggccatagtgcctgaatttggcggtgagacctctttagctattgaagccaaaggacctgctcttacgtagaggattgaagagccggctgcaatgccgaagactgacaaaattgaagaaccgagaatcaaagggacgaaaccattagaagttctaagcccttcagcaggagtggaggtgccgaagacacaaaaaggtctaacatcgacccccaagagaaaaaggatggctagtgtactagatgtgttggagacaataaaagcttcaagctctactccagggaaagttgc

SEQ ID NO: 4992 - DNA, 591 bp, Zea Mays
cctgccatgatattgggtcttgttctgctggctgatggaggagggtgccttggaggcgggtgctggggcattcttggggccattcaccgagttggagtaagtaggtcccgatgccttcaactgggggcagttattcttgaagtgactggggtctccgcagtgccaataggcattagctggtggttggttgcttgcaactgagggggcctgaaaggagctttgaccctgctgactgaaatgtgacggagtgggtccagctggcttattgaagcttggtcccttgggtggaaacccaaaggatcaaattctctggtgcatgtcttgctgttgagcttggaggacttggaatttcctcttgaggtgacctttttcttcttccctcgccctttccacttgtatggctttgtttgagaggtgcgagaagctgaggaaatcctggctggcgaggatagtattgagttctggtcttagccctttcaaaaagcgggccatcttcttggcttctgtgctgttgtcgtcagacgcatagcgagccaattctgtgaatttgtgcacgtactcgctgacagatcttccaccttgagttagttc

SEQ ID NO: 4993 - DNA, 294 bp, Zea Mays
ctcgtggtcgccccaccggccatatcgcttcatcttcgatggccttcaacgacacctcttcatcctccgacgacgagaagatcgccttagtcctcggcgacggggtgccacaacggctgcctactctgacccccggcgttggcccttcaggaacggcttcaccgtcgccactcttgagccagagcgacaaccgtgtggtccgccacctggtacatcacctccccccacgaccatgtgctccgagatcatggtctgcgactggaagaacgtccgacaataacagcgggcgctcac

SEQ ID NO: 4994 - DNA, 775 bp, Zea Mays
ctacttttcatccgcgaccataaccatgtatattggggctacaacaagcaatttatggtgattacgtgcttaaccaaaccatctgacaggtcggctaactggagcaacgacatagcccgctaaataacctacacatcggctagcccattattatcgcaatccgagacacaacatacactaccacatttttataaacacacataatcacaagtattttcgcacatcgaccaatctatacgaatcgtaaaccactaacccccaaatcgcaatcgctatgtatttactttctaaatcacgaacacttacatgtttatcatacgagccgagtatttcaataattatcctaaaaacaactaatctccattacacacttgtatctacttggcttacttgaagcgtctactcgaaatcgtgagcacaatcatacactatatgcgaagccttatttattaaacacacaatacgcatcgtcacgactcggcttataaatatagagaatgcggcgactactttggcatgtcaccacctctctacataagccaaaataatttctacctacaacgaccaaacattcatgtcgagcacactttattttaccatgtctcgcatacaaccatatggtggcgtgcactcgagacacttcaatcaatgcggcgcgaccactaatatatgaactccgatactcatgttttaataattcatcctctacgcaactagcattttctaactactcgtcacaacaataaatatactccctatataatcatgaatccca

SEQ ID NO: 4995 - DNA, 612 bp, Zea Mays
gtggtggcctatttaagccgtcgtctgctgaacagcgagagcaggtatgtgttcattgaaaaactctgcttatccttgtattttgcatgcaccaggtttcgacattatttgctctcaagtacttgtactgtagtatgtcaaacggatgtggttaaatatatgttgcacaaaccgattcttagtggtcgagtcgggaagtgggcatatgctttgatagagtacgatctaatttatgagtctttatcttctatgaaagggcaagttatagctgattttataactgaacatagggttgatgtagagcaggaaatctcatgtcttaatattcgtccttggcaattattttttgatggttctgtgtgcaaagaagggcagggaatcagctatgttttagtatcaccaaatggtttattgcatgaaacatcaattaggattgaatattgttgcactaacaatcagattgagtatgaggcgttgttgtttgggttaatgcatttagatgatatgggaataaaagatatagacgtgttcggggattcgttgcttgtggtacagcaggtgagaggggaatttcagtgtttagatggtatgctgcgtaattatttagacagg

SEQ ID NO: 4996 - DNA, 751 bp, Zea Mays
atctcatcatggttacattatatgttaatttccaatttgcatccaaatattagacaaaaccataataatgtcaacaggattaccattttaatgttggcattaatatgccgagggacataaacatcccacatcaacatataccagactgcaacattatgagctcatatccgtctccccacttgccgatgtttgacgtcacaccgcaaaaacatgtatatgtttcatctttgttttgtccattgtaatctcaattatcgattaaatttaattgacacatgactgagggtttaaacatagtatcattgattttttggggcagggaggtgacattgatgcatctcatgacactccaacttacacgggccccctttttgatcagacacctagtggtcatgtaagtactccaattatacatttatgaccttcatgcttcacataactcattcataaattactatactctctacctgcattgtgtttcaggttgcatctggtgaggaaacacatagcttgcacactacacatgtgcactcactgccacgtttaacagtgtttgactgtgctcggtcgctccgtgattttttgtgctcctcaaaaatcgacccaaacaggttttagtctttaactattaagagcaaataacatgtatgatgttgcagacatatataatgactaacatatctgtttttacattattatataggaaggtcatagaatttggtgaatgtattggaaattgtctcgatattca

SEQ ID NO: 4997 - DNA, 455 bp, Zea Mays
ccacatagacatctaggttacacccgacttggtcggtgaaccagtggagcatgcacctctagtatgtagctctagcgttctgcagaccaaacagcgtcatgacctagcagaatgtgctgaagggggtaatgaaggtggtggcgtattggttagactccttcatgatgatttggtgatagcccgagtatgcatctagtaaggaaaggaactcacacccatcggtcgaatctacgacttgatcaatacgttgtacagaaaaagggtccttggggcaccgcttattgagccatgtgtagtcgacacacatcctccaactcccattcttcttcttgacaagcacgggatttgcgatccacactggttggtgtacttcccttacaaatcccatcgctaggagtcttgccacctcttcacctatggccttgctcttttcttcatcaaaacggcgaagccgc

SEQ ID NO: 4998 - DNA, 394 bp, Zea Mays
cgaaggtggtttggttcgactaaaatataccttcaggtttagagaccaatttatcgaaccagacgacgactgactgaagtgtgttgaaaacaccagcgatgaactacttggagcctactccaagtctgaagataacgcactatctgcggccttcgggagccgaaaaaagaagaggctaaatagagtttttgatgctatcggaattatgtatcctgactaccgctacccgtcaagggggcagaagagaaagagtgcaacttctgggaaggatgttacttcagctgctccgagtgagcccgcgccgaagaagagaaaagtgaaggttcttactcaccgaccgcgctacattgaaccggccacagtgcccgaatttggcggtgagacctcttcggct

SEQ ID NO: 4999 - DNA, 306 bp, Zea Mays
gaggatctgagcctttgttcgggatctgagcctttcttttgggtatttctattttacagctggtgctgcaacagattcagaacctgctgctgatggatccgggacctagttccccgatggacgtggatccgactcatggtgttgtaacgcattctgctcctgctactcttaatggtaagtatatgatgccctgtttagtagccaagtttttcatagtttttaggtaatactgtggtattagaaaaaactatggcattcatagccacaaggtgtttggcaagctccttgaaaaactttgtattaaaa

SEQ ID NO: 5000 - DNA, 909 bp, Zea Mays
ttcttgctctgggctcgtctcaacaagatctgttgttctcgcatgaacaccgtaacaaacgccacctagaatctagggtcgtttcgacgctcggacctccacctcgaccatatatatttcttgccgcgacctccccttgacccagatccacggtaggaaccaagtcgggcggcgtatcgagcagagcattagagagtgttgccgccaccactgatctgcgtcctcatcgttgctctagcctcgacgacgggtcctggggcatcgccgtgaagcatggaagctggggaccttcaggttggtagagaattggcgatcgagggacaacattggcgggctgccaaccatgaacgccattgggggaccgtcgtgcaccggggcgaaggctctgcatttcacgaatcgtggtaaggaatctccgaatcaactcgcctgttacactacatcgtgtagcacctgtcggggttaagttgagagcaccagcgccgcgagggcactgcacaccggccataggcaccgccgtgggggcctgcgccaccgtcctctgctaggtgtggaagacgatgcgaggctataaagtgcaggtcgcaacgaactcctatgccaatccagtagccatggcgtgtagagttggaagggagagagagagagtgaatggagagatgattcgccgtcggggttacgtgctgtagccctcgtcggagacttgcggtcgggtttgggagctccgtctggttcccgtgaagaagttcgtggctagccgagggtgatgggttgaatccgcaatggagtcgacatcacgtgtgtccgctccgtgtcatggccggatcgcgccacgtccccaaacgtttcaggtgagtccgtaatgggttcgctttcctctccgctgctcgtagcttcatccgattcaaa

SEQ ID NO: 5001 - DNA, 656 bp, Zea Mays
gtttctctcctgagtctcctccttatcagagaggagctggggaaagtgctccctccgcctccatccgtccgtcgtcgcccggcgaatcgatcgaagctagcaatcaaatcagaaagagcaagagaagcgcccgagtccctaggccggaaagctatggacagcgccgccaactggcggtcaacgcagggcaccgaccctgccgccggcggcgtcgatccaaacgcggctgcccccgccggaagcgactggcgcacccagcttcagccagaggcgcgccacaggatcgtgaataagatgtacgtcctctccatcttccttccctccttctgatgggaactgtcaagcgattccaattctttcgtttcgccatggcggatccatgtcgcttcttttacgactcgatcgattcgattcgtgtacacctgcttccctctttacttatctctttaccttatttagatagaaacaaacagtatgatgcttgctgggtagggtctgctgatccatccttgcacttcgacctaacaattcgtttacctttctctcatttgtttactcacggaccccgactcgtttgttcgtgacatatgtccctattacagtcgcatcgatgcatccaatccaatacatcatactttctaaaattatatatctct

SEQ ID NO: 5002 - DNA, 304 bp, Zea Mays
ctcagcttcttctcacttgagttgagagacacatgcagttaagtttgtgatattgtggctagagcaagcgcgatggcgagcaaggtgcctgctgcactgctctcatgtgctttcttgctcctaggagccgtattccaagcagcagctggtcactacagtcctccgagtcctgcttcgtgcgggctcaaggtggggtactacgaccacaagtgtccgcccgccgaggccatcgtcaagagcgtcgtcagagccgccgtccggcggaaccccggcatcggcgccggcctcatccgcatgctcttcc

SEQ ID NO: 5003 - DNA, 696 bp, Zea Mays
tcagggtctctttcttcagattcacgaggagatgcgggaggtgtgggtggcactgattcagaaatcctcctgcgggggtggtacaaagagtacaaagggattccctccaggggtggtgactcgacagtggtcctgggctggcattccttgtgcttggcacggtccactaggtagacacctctaaggagctgactatggcggtccacctgctccctaaggtcctcttcagccacagcaaggcgactttctgcttcggtcgctcgggcttctgcctgaactaaggcaagcttagccttatgccaacgggtctctgctttctcggcacgttggatgaggtccttcacacgctggtgtagttggtcgcacaaattgtcgaggctaagcacatatccagacatagcgacaatagtggggtctttctctgtcgtggtactccccaagttacagatcctcgcagcccaagcaggacggttatgatccagtggagggaagtacttcatgggggtggaaccaaagtgccattcaaacatctggcataagtacttcaatgctttccgagccgcaagttggacgaaatcttgcatacggcttctagtggtggtgatgttccagggttgcatctccaagtacttgtcacttacgccaatgtggacagtcacctcacaactttcagtaccatgctctgtgaactcacga

SEQ ID NO: 5004 - DNA, 457 bp, Zea Mays
tttctttgacaactcatcgatctgcttcttaagttcaaccaactccggtcctgatactctgtaagctctcttaaagatgggggcggttccaggaagaagctctatggcaaattcaactttccgctctagtggcatacctggtaagtcctttggaaacacatctggaaactcagacacaaccttgatgctctcaattgggtctgcttcactgctatcgacagccatctgataacaacttcctttcttcggcttaggcgagactaattcggtcaccacttcctctcctagtggggacaccaacttgattgtcctcttatcacaactgataactgcctgatacttatctagtcaattcatccctaggatgacatctattccctaagtacccattactatgaggttagcgggaaacactatcccccttatttccacacttacattcaaacaaatgctatcg

SEQ ID NO: 5005 - DNA, 546 bp, Zea Mays
cagcagcaaatcgagcaggtaaagcaagaatagtgaaatttagcatggatgtgttagatcatctaccaagattgatggatcaaagcgtgtttcactgctatcagtgtaaccaaaatctgcaataaatatgtcattcctttggaaaatagataataactgcatactcatgtcagttaatagagtccaggtgcatgttgttctccattgtattctggaaaagggcatttcccccctctctaatagataactatgaagtgtgctggccatcatgtttggtaagagtctcaggttcacttaggctgtatctgtgcgctgcaacctcaaaaactaaggagacttatctatcaagacagtatttctctgttttacacccaaattctaatattccattttcactgatcaatttcaacattttttttacttctgcacctttagtccattcaccatttaatgcagactaagcgacagaggtgtgcctcatgtggttgaaaaagactgaagattttaatctgtatagtagactaagaacatctcacacgatgcttt

SEQ ID NO: 5006 - DNA, 398 bp, Zea Mays
gcaaaaatggctcataggggagtcacaagtccacagagccaatgcaatgcgcacaccttatggactatgtcggggaaatgatccgcgtcccctagggcctaccggtccgtgagcgcgctgagaaaagagcctctaatcgctggggcccattaatcagtcggaattggcaagcacaccaaccctggaaggactcgcccccggtcgaaccccgtggcaccgagcccagggccggcatgatggagcctgacaagggaggatgggcgtgtcggaagggaagcactcgagtggatcccgtgcccggccctagactgacccgccataaatgactggccgcattaaccatgcttggcaccgagccatagcgtgggtgtcggtccgcttcccactcatgacctacg

SEQ ID NO: 5007 - DNA, 614 bp, Zea Mays
accacgggtggcaaggaggaagtcccacctgcaacaacagtagagcaaggcaccgaaaccatatcgtcgtcgaggagaaagtcatgggaggcgtgggaggaggcgtctgaggtggctgcaaaggggaaagcggactcgtcgaatatgacatggcgagagatgatgcgacgtgtcgataggtcgaggcagcggtaacctttgtgtgaggggggatatccgaggaagacgcatgccgtggagcgaggggcgagcttatgtttggaggttgcttgcatgttggggtaatagaggcacccaaaaacacgcagatggttataggttggcggctgattatgcagatgagtgtatggaatgtcatgctgaatggaggaggatgggcgcctattatggaggtagcaggccgtcaggagtccctcggcccaatatgcggggggtagggaggcatggagaagcatggtgcgaatggaattgttgagtgtgcggatgatgcgttcggctttgccattttggggtgatgtgtagggacaggaggagcggaggtgagtgccttgagcagcgaagaatttggtggtggcagtgttgatgaattcagccccgttgtcagcttgaaaaca

SEQ ID NO: 5008 - DNA, 292 bp, Zea Mays
atcggccccaactcccagccacgccgcccgactcgatcctagtggttgtgcgcgcccttctggacggctctcctcgctactcgcgcagttgcgcctctcctaaaagtgttgtccccacccacaccggtcccatggcgtcacccccgccattcatgagctttacctcgcccgtcgttcctatgaatgtgtgtgccctcctccacaacgaccagctcatccggggcatgttcgtgtccttcgatccagtctggaaccctattctccaggactgtgtcgagatccaccctcaggc

SEQ ID NO: 5009 - DNA, 494 bp, Zea Mays
ttcctttcacaggccctcaatgcctgtgacatttctgggtccccaatggcttcacaaccttcccagttgatataacgttgatgcaggataggttgatgcttcttggggagaatgacggaattatagaaatccacgtgatgaagtgtccaaaagcgatttccatcgatcctggcatcgcgaatgcgcaatacaggattttggaaacgaagatcctggaggagagcagagcctccactagcagtgaaatcagtgactggctcattgccagcacgccgagcctctgcccggtggaggaccaagccacgaatcacaggagcgtgggccgggggaagatcaacttcatcatccttcccgccttcatcatcacttgcaggctcccacgcctgcggattcgtcgcaggtcgagaccgaccggaaggattctgggatgtccgaccgcgagcactttgagacccggaggcctcagcacccggcatgacattgccgcttccgcg

SEQ ID NO: 5010 - DNA, 559 bp, Zea Mays
catgcaccagctgaaccacctgttgtgccaaggaaccttgactccagcactatatacctcactgatggcttcgctgcaaaggtctcggacactgccaccaccaagggatcggattccagctcaaccgctgatgacgagctctcctcggtttcaggcatagatgccatggttcatcagtatggcatgctattgctggagagactaaccggaaaagttgcctactccgaagaagacgacgacgacggggtttcactggagcacttggcgtctcgctacttggatgatggcagcatgccccttgcggagctgattgacccgagcctcggttggttccctcaagaagccgcgcacgcactgtgcgaggtcgcaaggtcttgggttgggtggacccagaccccaacaagagaccactgatggtacaggtggctgctaggatgaaggagatcgcaattcgcaaggtcttgcgtggacccagacctcaacaagagatcgaccacggatggtacaggtggctgctaggatgaaggagatcaccgcgctggggccgggcctgagggag

SEQ ID NO: 5011 - DNA, 777 bp, Zea Mays
aatgactccttgatggtacagtaacagaaataatcctgggttcagtccccctcgccgccggtgatccgcgtgcccggattcgcgccggtcgtcgtgatttgtgcctggcacacagtggatatccacggggaggtaaaagatctcgcgggggagcagatgtggtcgcgggggaggcttatcaccacgcctgtagccgttgcgacatggccggaccgccggtattgccgtagaaactctggtgacctcggttgtgccacgtcgtggcttgttactgtgcggtagtaaccgtggcacacttaagagtacaatctttaagccattgcgcaggtgaacgccacgaatcctttacgccagtgctcttccccctctccggccgacgcgcgtctcctccaaattagccgccaccactcatgaatcctataaattgagtgtgccatcagctccgctaggtagttgtgcatccagtgaaccagctctcacctccaatcatcccctacagctccctaatttgagagttccgccaaatcggtctagaacaccgcgtgtgtgagctcgtcgcggtcagcgctccacaggtccgatcttgttcgcctcgctcttgttctagcactcctgcgtgctcttgaagctcatcagcccaaccaattgcactgaaccggagtagatcgacgggaacactttgaattgtccccagattgtgcggtcgccgtggacagcataattaggcgttagagtcttgcaattgagtgaagggaaatggtcgttaggggttgaatt

SEQ ID NO: 5012 - DNA, 581 bp, Zea Mays
gccaactcgtggatatagtgaattgcaccaaatttgctacaaactctaacaagtggtataagagtccatggttagaaaatctaaaaaatatcataggtgacatggtgatggggtagattgttaggtttaatcccacattcaaaattgatggtgggggaacaatataaggcggagacagctctcacctatcagtttaatcatttgggattagttaggtctaaggcattgttatgttgtgggcccttgtggacctggacctcatgaacgttggctcgtgggtatagtgagctgggccagatacgctgcagtggctgcacactaacagagaatcttagtacttttttttgtagtttcccaaatctgtgattttgaggcactatgtggtggttttaaataccccctcccttttgtggttgaaccagttaatattttttcgtgagctgactgagctctcaccaaatatgtagttgcattgtagttgtaggtattggactatggctgtatcgaattatttagtgacacatatttgctatacacagagatgatttagggggcgtttggtttatggaataaagtggtct

SEQ ID NO: 5013 - DNA, 551 bp, Zea Mays
ccgatccatggctacaatctagtgtgtcgtcgtcgtgttgttctttctgatgcatgtgtttggttagagggtgtacttactcgtttctagagattagtgcgctctggctagcagctagctagagaggagagggagtgggcgctgagcagcaagagctagctaggagtacagtagtacgtgctactagagtagaagaggcccaccggggaggcacaggcacagagcagtctgcgatgcattcattccttgttgagttattatgggatgtgaccgtgcgtacagtgcgtgtttagtgtagctaaaacaggcatgcatgcagtgtgaagctactatagctggtggggggtacggtacctactaactaggctttatttgcagagctcattactggtgggagaggagatcaaacttaggttcatgaatatcatgtaatggaatgttccttgcttgccggtcccccaactcccaacctccaccaattcctctctctcactctctctctctctcgcatctagatcaagatccctcctgctccacaccctgtgtcgctc

SEQ ID NO: 5014 - DNA, 555 bp, Zea Mays
atacggtgtcaccgctgccggcagacaaaatcacactagaaattggttcaccctctatggcattgtgcaccgccaccacgtcttcattagtcgatgtcatagggagccgaggggccataggtggggagaccttcgaggttgggcgattgaagacctttgaaatcaggtacaagagatggaaatatagtggtactttccggcagggtctgcgagggccttcggattggatacaatgccctaaccacacgacaaagtatggtattcgaggcatttttcattgtaaggcttcgcctacgctgtcagatccaccagttgactccaaatgccattgttttcctaagtaagtttgtgtggacaacaacgacatatgggggaaacattattgtttgcattgacagaagaagattatcaacaaacaagtgcaatagcttggaagctacatgtttaccctaaatatcgggaaaacaaaggggaaggtgattgatttggttccgtatgcaaagaatagatggggagttggatagatttttggttctatgtgcaggttagagaagc

SEQ ID NO: 5015 - DNA, 571 bp, Zea Mays
aactttgttacaaatagattaagtagttgccacacgaaaatcacagatcaaggccctgcaaatcactctgtcaggcgctctaatggggattctgatggtacagtgcttgaagaagatcttaggtgcagtgcacctcgccgccggtgaccccgcgctttgattcacgccagccgccacgattcgtgctcagcgcgaagtggataaccgaggggagtaaaagatcttggcacccggattggctcggacccagtcactggatggttgatcgtacccacttgcctagcggccggtccagatgacttcaccggagtctgccgcttgctgcccagatgccacgtactgagaagtgttaccacgtcacagtaaactgccttaggtagcttgttcatcgcctaagacactgccccagtgaaagccacgacaacttgcaccagtgaacttcccctctctccggccgccagcgccttcttcaaattggacaccaccgctgatagattctataaattgctgccccagtaagctccgttaagttattacgcacccagtgaaccagtcctcacctcgaatcgtt

SEQ ID NO: 5016 - DNA, 458 bp, Zea Mays
caccgtgattcgtgcttggcacgcagtggatatccacggggaggtaaaaagatctcgcggggagcggatttggtcgcagaggaagcttatcaccgcgcctgtagccgtgtgatgtggccggaccgccggtgttgtcgtggaagctccggtgaccacggttatgccacgccatggctcgttactgtgcggtagtaaccatggcacactcaggattacaatctttgagccgttgcaccggtgaacgccacgattaagccaccagttctctcccctctctccggccgccagcgcgcgattccaaattcacgagccaccgccctcaggccctataaattgagcatgccatcagcttcgctaggtagtcaagcatccagcgcacccacccgtgtctcggattgtcgaccagagcgctctaatttgggatttcccccaaattggtcaagaacaacgtactgtgt

SEQ ID NO: 5017 - DNA, 713 bp, Zea Mays
tgcgcaccgcatgactcaggggcggaaggaggccccccccgtgtagagctggactcgctggatctcgtcaagtcgaccggcgcggggaaggagggcttggaaccgattggagtactcctccaccgtcccggtatgccagcattccgagagctcgaagaggggagccgatcggagaggagggccaaaccgtaaatggagaagttccttgaaccgtccccagcgcggagtgccttcatcctcctggagctggatgtaccatagctgggccacgtcttcgagattgaatgaggccatccagaccttctcttccggcatgatgcgttgttggtggaagtatgactcgcacctgttgatgaagatcagcggatcggacctgccgtcgaagcgtgggaagtccatcttctggaaccgcggcggccggtcattgtgatggttgccgtcggtgttcccggtacctgccgacgaagagctcgacttgtccttcacggccgccatgtcggctttcatggttgccatatccgcggacagggccatgatcatcttggtgaggtcggcaatggcctgctcccccatggttggctgggcagcgtcggacgcgatggagggggatgggactggtggtgaggcgggaggtggtgcggcggcggtagaggggctggcggagcgggcgcgaggcgtcgaagatcgccggactcgcgataccaggttgtcaa

SEQ ID NO: 5018 - DNA, 399 bp, Zea Mays
gatgatcatgcggccttggaagcagaggcagcacgtcgtgctgctgctggaggtggtggccgaggacgtggtgctggtcgaggacgtggtgctggttttggcaatttcggtgctccgaatatgaggccacaattttttggccgtgcacaacgtgttccaattggaggtgctgcaggttttgatggtgatcctaattttggttatttagatggccatcgagcaggttatcatggccgccatggtggttacgatgatcgtggaggtggtcactttggtgcttttggtgaccaccaatttgctggtgatgatggccaccgtgatcagcgtcgtggtgatccagaacgccgacgaggtgaagatggtctgggcaaagttaaagtgtccatacctgcatttaac

SEQ ID NO: 5019 - DNA, 526 bp, Zea Mays
tgagcatgttgcaccgtcttaagtcgtcgccgacttaagctgattgctccgttagtagggtatagtggtcaccctaagtcaagtaagcgcgagcatgttgcgccgtcttaagtcatcgccgacttaagccgattgctccgttagtagggtatagtggtcaccctgagtcgagtaagtgcgagcatgttacactgtcttaagtcgtcgccgacttaagccgattgctccgttagtagggtatagtggtcaccctgagtcgagtaagcgtgttgattccatgtccaattgaatcgaagtcaagtgatagttaacagtttgaatgcccttgaaaatgaaaactttattgatgatgtattctcccattatagagtacaatgttgctctgatagctttcgaggttttgctaagggtaaaactttctaagatgctctatgttccatgaattccccacttcagtaccatccatttgagtaagccggtatgatcctggccgagtgacctctgatacaatgaatggcccttccca

SEQ ID NO: 5020 - DNA, 756 bp, Zea Mays
cttgttgccattgtcgttgtaggtcgggtgtgttgtggcctcccgagcgatgttgccatggagccaaaaggacggacctatagaaagctaccaagtacacatcaggctgcgcgagtcgatgccagagtcgtcaacaccacagcaggagagtgcgtcgggcaccatgttcaggctaccgggatagtgttcaatagtaaaattgaaaccaaacagcttgtcgacccagtgttgctacagaatggtcgacagtcgttggtaaaggatgaacttcaagctttagtcgtccatgcggacgagggaagcggcaaccacatagatacagtcgctggcaccgcaccatctccaccaagctgattagttaccgctcgtaggccgccagcttcaaatggcgcgtcgcaaagggggatgaagaaggccaagggtcccatgccccggtgaaggatagtgctgaaccccatcccagaagcatcaaagacgacgataaagggggcatcgaaggtgatagctagaggacgggcgccgttgagaaggcgtgtttgagcgtttgggacgcagcctccaactcgaagccccactgaaaggcctccttcttgaggagattggtgagaagcacaacgattgcaacgaagtccttgatgtacttgtgttagcagcatgcagtcctaggaagtcgtgtagtccccaaaccgagcgaggccggggccaggagaccatggcctccaccttttggccatccatggaaatgctatcgacaga

SEQ ID NO: 5021 - DNA, 834 bp, Zea Mays
tgaagactgaaacttggctgacagtgagttctgatgaactttggagtcgatttaagcttgatcgagtgagcaaatgaccaaggttactataatcaaattggagctggtatataggagattaactttgttacaaacggattagggagttgccacataaaaatttgagaacaaagcattgcaagttgctctgtcaggcgctctaatgaatgatttcaatggtacgatgactgaacaagatcaggtttagtgtatctcaccgtcggtgaattggcgtcgcgatcctcaccagtgctgcgattcgtgcgctctggcatgcggataacgatcgtcgtgaaaagatcttgcatagggatgaattcggagcactgttacgcccagtcaccgtacccacttgcgttgtgatgtggccggacggtcctcgccgtggagatcgccgttcaccgtgattgtgccatgccgtaatcaattcaccacgtcgtcgcaaactgcaaggactcagccgtgacctttgtagacagttagccagtgagtgcctcgttagcgacctccggtgactattcccacttctcactgtgcgtgcttccccatccaaattcaacctcctcgtggtcgtattctataaattgatgccctagtctgctccgctagcttgttgtgaagccagagcaccagccctcgcctccgatcgtccaccgtagcgccctaattttgtttccccccaaatccactctccgcgccaccgtgagtcacctcgtcgtggtcagccatctacaggtccgctctcgccctcctggtttgtgtttcagcactctagcatgcttgtgatactcgtcg

SEQ ID NO: 5022 - DNA, 1130 bp, Zea Mays
tatccattaagaacccctggctactgttcaacgtctcactgacagttacaaaaacacccccacgcttctatcctttttcagttcgaagtccacggcggcagtgagcgcggcagagctccgacgagctccaggaccggccaaacggggcaacgactagtgcttccgagcgatcgacaccaaattcaagtcctatcaatggtttcccctcaatcaatttcaaaattggtagtctaccctgctctatccacggtgacagtgcggagaatcaaaggaacagcgtgttcccgacgacccatggtagtctagttcaattgaacggttcggtaagcatcaagaacatgggagggtgttggaacaataacacagagggcgagatcggacctgagttgagctagccgcggcgaggtgttcttcatggtggcggaaaccgaattggggagaactcaaaattcgtgagctctggcgaacgattgagggtgggagcgggggctttggtttcgtgatgacatagcgcagctgccccggccttcaatttatagagggcttagtcggtggcgcgcaatttggccaagcaatgctggcggccggagatagggaagaacactggcgcagtgtctaccgtcgtggcgacttcaccggcgacgattagacggctattagagagttacggcgacgcgacggaggtaccagagcacgtggcacaataccaacagacggccatcaccggtgaacttatccaacccgccatagagagcttggtacggtggccggagttgtttactggccggggcttatctacggcagcgatatttacatgacccgagcgttatccaggcactggtgagcgtgaatcatctcattggcgggaatcgtggcgagagggtcgtcggcggtgagggtcactgaacttgatccgatcggctactgtaccatgggatgcttcttcagtgtgcctcacagtcatagtttaggaccaattctctctcaattttctatggcatctcacccaaagatctgcagcaaagttgtagagctacaaaccagctacatttccactataggaactaaactcagttgagcactagatcatgcttgaattcgtggccaaagtcactgcagttgcactgtca

SEQ ID NO: 5023 - DNA, 334 bp, Zea Mays
cttcttcaatagcaggaactgaggtaccagcgtcctgatcaaaactggatactcgccggaggcgtcttcttttcttcttctgctcatcaacagaaggatcaggctgattggttcggcaagggcgcctcgggcgagcactgacaggcttctgaacatccaaagtcgtatcagcctctgggaggggcgccactaccaacgtcccagcaggagcagcatcagatgaatcctcagctagcaaatcaagcatagagcttatctctgcatcactagggttcaggggcacctcaaaatgaacctgctgttcgtcatcaggaatcttcccaagcgaggcaac

SEQ ID NO: 5024 - DNA, 408 bp, Zea Mays
attatgtcacgtgtcctctctaatttcctccaaaaccgtgccatcaggttttgagatccaaacctagtgaaacttgtgaactgttgtgcagtggttttgaggcgtaaccaccaaaaaccgaggatggtatacttgatacacaatccgctcctctatgttcttgcgcctgccagtgtccctaggtgctagccaccacggctgatcacccgacttcttcaatcccttggccaagactcacaatatgtccttcaccgcttccaatccatcatcacgaacccaccttcgctgttgaccaccacctctaggcttcacatatgtgcactacataccaggagacatgttgcacaaatacagtcacgtcttagttagttcacacagacccaaaatactacacttgttgacaatcac

SEQ ID NO: 5025 - DNA, 553 bp, Zea Mays
agcctcggaacaccttcggcatccttcaatgtcaaatagaaccaaaaatcccaccagttcccccacttgtttttttgcacacggatcgatttccacaacttcacctgaagtcttcctagttcccggagtgaacgtgcatgaaccaaattgcataatcttaccaccaacaaccttcttttgccagtggcgacaaaagttcttagagaagacctcaaccgaaggcttactgccatatgtagccgttgcccacataaacttcgccaatgccattaggcattgggagtaagctggtgaagttggacttcgaaacgctgcgggacttagatgacaaaccgatgcgcaggcaatcgaagaccagcaataaagaacgcttcaaaaacaactaactccccctccggctccgggacctcctcggctcgcggagcgcgccccacaccgtctccaaaataccccaagcgttgcatttcatgcacgcgacctgagtagatcctcgacatgccgaattccactgtgtgccccagaaacatatccacaactgtcgtcagcccagtcg

SEQ ID NO: 5026 - DNA, 487 bp, Zea Mays
cgatatatggatggagagagggcgaccgggaccaataataataaagagaagggccggctccttgtggagtcggagtcgtgcatcgcgtgctacttactccctccgtccacgaacgttgggcgttctaaagattctaagacagattagcacctctaccaaaagacgcatgtacccttgtttttttgtttgattacaaggttggagtaattacaattaaagctaattacaatctacagcagcagtatccaagcgacttgcacccctgcagaagcattttctggcgccaaaaaatgtccacatccctccttggcgccaagcgacttgcacctctgttagccataaaaaatgaaaagttttcagaaaagtttcacatggcgccagttgcttttgccaaaatcagaaaactttgacatggcgcccaacaacctgtacataaagctgctgcaacctgccacaagccgccaacaccacccaagcgtaaagagac

SEQ ID NO: 5027 - DNA, 507 bp, Zea Mays
ttccattcaacaatagcggcagcagtagccgctagctatctagcacgatcactatattcctattatagcatttatgaatgtttttacttgcgatgtttcatgttagagcactggagattgtattgcgattgtgaatgaaattgtggaatattttatcgacgcttggactgaaatgtttgtgcagcggttcgtagttcatactcttccttaggcgggtgcccatttgtggttaaaatttaacggtctgatgaggacaagtacgtactgatacagaatgaaaattgaagttcctgggatgtatgtgatcttaactgatcaggttagcccaacacgcatgtgagcagtacatgttcctaattcaacatacagaaatattttttggctgtcatatttgtctataatctatatagctggccgtagtactgtgcttctgaatggagtcctggaagtttccattgacgcttgaacagaaaaacagtgtgctgacccctgaggttcgtagttcat

SEQ ID NO: 5028 - DNA, 1452 bp, Zea Mays
ttgaagaccaatcataggagaacaactttgtttaagggttcaagccatgatcctatgagaaatttggagaaaaacccaatcaaagatggactgtcagactgcctgaagtctgaaatacagattaacagtgttgtgacatgaactttgagctcgattttgatttggatccagtgactttttgtgagtacacgttatagcaaagatatagatggattgtagcactacaactttgctatagatcactggttgtgttaccacttgaaaatcagagaaatggcggcttaaacttgctcggtcaggctgtctgaatagaactactgatggtacagtaaaggttaactgaagaagatcctatccctctgcccatcgccggtgaccgtcgccgtcgattaccgctcgccgtgattcgtgcacccgtggacatcagataagcatcacccagtaaaaatcttcacccgccgtgagctggccaccactccgacgaccccccccacctctgctttgcggctggcacgataagctcaccgtcgaccgccgcttcccggcccgtgcgccgcgtggcctagccgttttacagcactgccgtgacaccttatgactgtcccatcgtcgccggggaggttgccacggcggtggacacgaattcactgcgccagtgttttcttctacctccgaccgccgcgcgcccttcgcaaaattctcggccaccgcttgcgacgcctataaattgaagccaccacaagctccgtaaggcagtcaagtaccccgatacccactattgtccccagccgatcaccagcaagctccaatttcatatttcccccaaatcagtcgaagaacaccgtgaaaccaagtccactgtggccagccgattctggtaaagctctgtccgattcaaaccttgtttaagtcttctcatagctcagtgatgctcgccaagccatcaatttgaatgtagatgcccccaatcgtcgggaacgcgctcctccacccgcaacatccctggtcgtcgtggccagtgcaaaccatagggtcattagtgaaattaggttggggaaatggatcagggtgggtccaattcggtgacaggcgctcgggagcgccggtcttggccctctccggccggtttagctcgccggagctgagctctccgcacggaccgccgtcggggacttcaccatgcaaagggatagaagatgggggttcttagtgcaaacagtcagtgacttggtttaacagtgaaagaacctgttctcagttagtaaaaacttcggggccctttttgcaaagtcactagggcgcgggcgcacgcgggcgctttcccctctggctgggccgtctgggctgaaatcagcccattactgttgaagctttttcctttttctttttgagcagagctttagaaatctgttaaaaattgtagaaaaatggtaaaattatgaaaccaatttt

SEQ ID NO: 5029 - DNA, 1190 bp, Zea Mays
aaaataaggaatctagtaaaattagtttgacatttttaggatttttctacaattttctaggatttgtttatctctggccgaaaaagaaaaagaaaaactagcaatagtactgggtcgattctagcgtagacggcccaggtccaggggaaaacgcgcccgcacccgcgcgcgcgctggctgttttgcaaaaatggcctcggcttactaatcaatccgaagtgggttcaattactattgcactgagtcgctgacggtttgcagaaaagcccctcacgttctattccttcaccgcgccaggtccccgacggtgcacggcgtggcagagctccggcgagcacgtagaccggccggaggaggccaagaccggtgctcctgagcagcgggcatggaattgaaccattcccgatcacttcccctaagttaattgcacgaatggtgacctattctactctgcccacgagaacagcaaaggctatgggcatttgctcgtgttcccggtgattggtgagctctcagtccaaattggtggttcggcaagcatcacagagttatgagagtgctcaaacgagggagaggggaggatgaactgaccggagttgtactggccgcggagaggttggtttcacggtggcggaaaccagtttgggggaaaaccgaaattcaagctctatgacgcacgattgctagcgattctcggtggctgggtgggtgatgaccttgcggggctggcggagggctcaatttataggaagcaagagcggcggccgggaattttagcggtgacgcgcggcggtcagaggaagaagaagagcactggcgcagtggattcgtggccagcgccgtagcaattgctccggcgatcaacagggagccgctaaggcttacgacgatgcggtggaaagttagagccacgcggcggacaacggtgacggcagtcaccggcgttcttatcggtttctactgcggtgaacatggtacggcgaccggaattgtttatcggccggagtttatccccggcgacgtacaccagtgttatccactcaccccgagcacatgttggaccagcggcggcatgaatcgcggcggaaatcggtcgtcggtggtgagtctgccgcgctgtcgttctgatccatttgggacactgtaccatcgcgatgctaattcagtgtgtctgatagccaagatttagg

SEQ ID NO: 5030 - DNA, 315 bp, Zea Mays
cataatgacccgaaaaagatggtatagtaaatttaatcttagcataagggtcgtcaggagcacgattgttattaccttgctggcggtgtggcataccttctgtgttttgatgaagacggcgacgtaggcgcaaatctctggtggccgcttcatcatagttaccttctgcatcaaacactgcatcatcgggaatacgtggacgaggaggtggtgatggcggtgcttgttgttgcgtctccaacacagcaagtctatcgacgatctcggacaatcgtcgatccagcctctcgtaagtcttgccaaggtccatgtcaa

SEQ ID NO: 5031 - DNA, 715 bp, Zea Mays
gtgagaggaaccaagtcagcagggggagactgactgtgccccaacaccgcagcccctttcccgcgcttagaacgcctccttttacgcttgggcagtaagggcggctgcctcactaaatccatggcaggctccatcgcgacatgatcatgcgacgaagcaagacgtctccagaccgaggtcttgcgcgtgccctccagagaatgagccttgtccatgccagacaacctctgccacaccggaggccgcaccggaatcctcagcctcaccaaggcatgctgggaggtttcctgtcttcccggaagacgctgcttgacgttgcccatgcgctgccacactggatgtttctgagattcgactagcagagacgagcagactgccacccgatgtccaaagttgagacaccgaaagcaccttgttggacgccggcaggtagcaacccggtgagaagtagagaggcagttgtaacaccgacctcggagatccacacgggaccctcgacgagggaggtgcacaccacgggtcctctatctgcgctcaaccacctgccagccttcttcaatcggaagggccgcaccagtcgacaccttggcggggaaagcaggagcagctaacgcagtaggggagggggagacatggcttgccaagggagagagaccggcggcgcaaaccgagctggagaggagtgcatctttaaaggatcgagaagatggaatgg

SEQ ID NO: 5032 - DNA, 586 bp, Zea Mays
cccccctagcggtgctacacgtggggaaagagatggcggagatgatggggtattactcaccgatggtcgagcggtgaagaggcccatccacgaggtagtgcggcccagcggtgaaattgttgtgccgacgagcaattaccggttcccggatcgccaccagagcccggagaccccacgcagaccaccagtgcaccgaaacgattccccagatacacccgtcgaggccccgtcggtggtggttgtgtgttgcggcgttggcggaacaagtggccatggcggcggccgaagtcttctccgaggcggctatggagggcacgactgcgcggctagtgctaaacgagagggcaagggaaggaggtggtgacgtcaattcttcccatataagggccgaggcgatagggaacgggtttggtcagctccgcccgggaggacttccgcgcgaaccgcgcggttgggtagaccgttgaggaacgcgatggcaaccgggagatcaactatgcagagacgcggaccaatccgtagagtccaagcaagtaggcgcgttcctgggatcacggccgagccggtcagcgcgatccgatccttg

SEQ ID NO: 5033 - DNA, 550 bp, Zea Mays
gatgatgacgatattcatggggttggcctcaatgcctcgctcagagatgagaaaacctaagaacatgtcacttgggacattgaagacgcattttggggctaagcttgatgttgttagcttttatcctgttgaacatcatcccgagatcgaacatgaggcctctgcatgcttggttttgaccataatgtcgtcgacgtatgccaccacaactcctctaatgaggtcaccaaaacacttaatcatatactgctggtaaatggccctatcatttttatgctatagggcatggtcacgaagaagtacaaactgaatggggtgataaaggtagtggcaggctggtcagactccttcatcgtgatttggtggtagccagagtagacatcaagaaaactaagcacttcacaccctgaggtgttgaggtggagtcgaccacctggtcaatacgcggcaagggaacaggtctttcgggcacgctttgtttaggcttgtgtaattgacagacattctatatttcatgttcttctttttcaccaacactaggttggcgaac

SEQ ID NO: 5034 - DNA, 633 bp, Zea Mays
ctaattttgtggcggcttcgaccgtggttgctgaagacgattctgatgattctgtgtctaagttttttgagtctgatgattctgggggttcgattgtgtggacagaggagtcttcggacgaggacttggactattttgcagcattggatgtggctgcgacggagacttctctgcgtgtgatgggtgatgaggatattccgggtgagagtgctgggcataggcggcgaagggcggtggcgaaacggagggtgagtgagttgtcgagaagtgataggcgtcatcatggtgaggtggagggcggtcgtcttcgtgtgaacgggactgccaaacgggaatagttgtccttgccggctggggcgagtgtaggtgagggtgagctgcgaaatctttttgagggtgaggaattgaggataatgctattcaactacagggagatgggtatcatcccgaaggttgagccattgtaatgtgtgatgccctcgctgtatgtatgtaactatgatttgtatgatgaggctgcgtgccttcgttgatcctgccgcgcccgtaggcggcttgtgttcgggtgcttttggggaagtcttcgtttttgcgcgtttgttgagttagtccggctgcacccgtaggcgtctt

SEQ ID NO: 5035 - DNA, 545 bp, Zea Mays
gaaatatatgtgtgttgcatttgcccaaacaaatgaataactaatataaatggaataaataacttcaagccatgctagaatttattgactatgcattgtaattaaattgagagttcaaactatatttgaatttgaattgaatttgcaaacaaaatggaaagcacaaaataaaaagataaaaggaaaacatcgtttgggcccaaatcccggttggcctgctcatcctcacccttgccttggcccaatatcgtatttccactgctcggcccagccccatttcttgatccgcacggcccactctacgctcttcccttttctttttcgtttgtggcgcttacatgtgggtccgctttgtcagccatctttcttcttcccatggcgcacagaagtccgttggctgtccgccgccgcgcgatatccgccgccagactggggcatcctcagccagagctctcggggtcggactctgcagtcgggtataaatgccgagccgtgcgcccttcctgctgcccaccatgtgccgtttcgtatccgtcgagagcgca

SEQ ID NO: 5036 - DNA, 488 bp, Zea Mays
gtggggcaagcatgaacaaaacagtgcaagtaggtctcaagacattggttcaccctttcagtttggccgttagattgtgggtgatatgctgtggtcatgcgaaggtctactcccactaacttgaataattctttccagaaagcgctggtaaagatcttgtcccgatcagaaataatggcttgcggcaacccgttaagtttgaaaacttgatccatgaactgttgtgccaccgatagacctgtgaaaggatgagtcattgggataaaatgactatacttagaaaaagtatctacaaccactaaaatgcagttggagtgacaagaattagggagtccttcaataaaatccattgatattattttccaagcaccatcagggactgggattggttggagaagtccagggtatttgactctttctggttttgattgttggcacacggagcactcactgcaccaatttcttatcatctttttcattcctgtcca

SEQ ID NO: 5037 - DNA, 656 bp, Zea Mays
ggacaaagtggaagtctacgtcgatgacatcgtggtcaagactaagagagggtcgaccctagtggaagacttaaccctggtcttcgacaagctgcgggcaacccgcacgaaactgaacccggacaaatgcgtttttggcgtttccgctaggaagttgctgggattcctggtttcgtaccggggcattgaagcgaacccggagaaaattagagcgattgaggcaatgagggccccagcccgagtcaaggacgtccagaagcttatgggatcattagccgcccttagccgcttcatttcgaggctggctgagagagcgctgcccttcttcaagttgctgcggaagttcgggcccttctcttggaccaaagaggcggagcaagccttccaggagttgaagcagcacctggtgtccctaccaatattggtagctccggaaccagaggagccactgtatttatacatcacggcggtcgcggaagcggtgagcatggtgctggtcgtcaagagaccgacaccagaaagccaggaacctgaggactcgggaccggccacaggggtccgaaccattcaaaggctggtctactacatcagcgaggtccttcatgaggcgaaaaccaggtaccttgagacgcacaaactcctctatgctgtgctga

SEQ ID NO: 5038 - DNA, 730 bp, Zea Mays
caagtggtttgttctggccacgatgaccgtgagcatcacggcgagacaatcgtgttcccggcgaccagaggacttctagttcaattacgtgggtcgacgagcatcaccagcatgcacagatgctagaacaggaacaaaaagggtatgagcagacctgtggagggctggccacggcagggtgtgattcacggcggcggagataaggaagaataccatcgcagtgactacgtgttccataccgtggcaactattccggtgatccacagggagctaaagtgaatcgtggcggtgcggtggcaaggcttggacacgtggcgggcaacggcgacggcataccagcggtgagattctaatccgaggggcggtgagaaaggggaggggtattgcggctagccggagtggcgcccagctcaccggcggcaaagatctttcaccccgcgacgctatccattcacccagggcacgaatcgggacgttggcagcacgaatcacggcggagggagtcgtcagcggtgaggacagtcgcgctggcggtctgatctgcacaagcactgttccatggtgaattcagtcagatgaacctgacagccaatgtttgaactcgatttgctcctagattcttacgacaacacaaccagtgatctgcagcaatattgtagagctacaaaccaactacaactttgtcatagcaaccttggttaaattcttactaaatcagacttgaattcat

SEQ ID NO: 5039 - DNA, 552 bp, Zea Mays
gagctatatcagttattcaaaaagtatgccaggtccgaagagctacatcaacacaagatagaatctcaacggaaacccaatgacacctcgtagtccagcagaacatgggtcagatcggtgcagtccgaatccggcaggccaaaccgcaaccagcagcaaaacaccatcgccaactaacaccccaccggagacacaactcgtcaccaggagtaccccacacaatagggccgcggcgccaacaccagaggcagaggcaaaggccgggcttcacagtcgcgaaggttctattgcctttttcacggtgaagactacgcacaccccaccagggattgctccgaaaccaaggccaccaaagatagaatggccagaaatcagccagccggtaaccaacgagttgttgcgcatacctaccatccccagcaataccaccaacaacaattccacaacgatccaatccatcaccagcccaatcatatgtaccatcaacaccaagagatccaagtcctccctccacctccacaccactaaaatcctccaccacccccaccagca

SEQ ID NO: 5040 - DNA, 642 bp, Zea Mays
tccactttatgaacaggtagatgtttacactttgcagacaatgtcatcacttatagtgcatcactgtcaggtgtactggagtcaacagtaattatgaatcgctctcatggtaaggtgaggattaaaaactggtgagaaagctaatcacccagcaacgatggctcctatcactcctagttgaaaccactatctcacagttacatattactaccgattcaagccacgagccggcaatgatagctaagatatcataatagactcatgctacgaccttatctctactaactattaagaaggtaatgtagaccaaaacgtgcccctactcatcatacacctactctctcactcacactgcatgcaagcatgcaacctactctcccactcacactacatgcaagcatgcaactatgcaagctacggttgtccccctcatccactcatgctgcatgcaagcatgcaactagcctccgaagctaggcctcgtggctcccttccctcacgctgcatgggttcttgtcgaggcaaagttttgcatgtgttcttaattcaaatgaaaatttgaagaagctaagtgtagctcggttggtcgacagtatgcatgtacgcccacaaccgatccctcaagtccaagtcattgtcgag

SEQ ID NO: 5041 - DNA, 849 bp, Zea Mays
gccaggactgctacataagtcatcagaagaaggtgccttatgagtttgacaattgcttgtagcaacccatctttttacctgataagtggtcacgtagacactctttatatcttgcagttcatcaaccatcttgtcaatcaacttgctgctcacctatttctaaagatagcctgccagctcgaagaacagataaaaatatcgagtgcctactcatttctgaaagctgtagaattggaattgcagggctacttctcagcttttgatggccgcctggtattgtagccgagttcatccgttaagacagcatattatttagcctcttatcatttccacttgtgttcttacaaattagagtgtctactacatggatatatagggccggtacaatttaattgatcaagcagcatctgaaatgtttgaagagggatcagttgacgacagtgattcttatcttcatgctgtgagggatatccttagcagtcactcgagtaagctggctccacctacaattcctatatccacatgtacttgggatgttcttttgactatcaagctggagtaatccattcagcttttcaaaaaaattttttgtaggttcccaagcaacgtcaccagaatatgtgtcatcatatggtttgatcgggcagataacagagctgcaggatgagctccagtaccttcagcatgagaccgaaaatgtccttccacgtgagcgaggaagatgcaccgacgaactgtgagttgtcctagctcattgtgccttgcaattcccccccaacgattatgtcacagctgaacttgacattaacaaacccctactgctagaataatatgctacccccttggtct

SEQ ID NO: 5042 - DNA, 443 bp, Zea Mays
gagaaagatctgctacataaaagtgtagttttgttaaatacgaagctaaaacatttacgaatccagatcttaacagaaacatatacctatatgcctttctcgctatgcagcttcttcagctctcttagcttcttctgaagcacgatgggcctcttcctcactccgtctgatagcttcgtccgctatttcccttccaccgttcacccatattttggagtaaaatctcccacctaaggcagttgcttcagctgaaggctctttgatgtcgtttactgaaattgtaaattctggctggattacatctttcatatgctcgcagccagatttttcaagtaatgacgcagcccctcgggcacctacataggcacagaaatctcctctgccaatgaggacttcatcaaaagcttcaacttcaccttcgatccatttgactacaccttcgg

SEQ ID NO: 5043 - DNA, 303 bp, Zea Mays
agagaagggtcgcacgggtggcgaagcaaccgatagagatgagcaaggtatacaccaggactgaggtggaggcggccgcggttgaagagctctagcgcacgcggcggcgggagcgacgagggagaggtgagcggaacacactaattggttggatgaatgagtatggctgagctcgtgcgagcttggcccgctaaaaatggagtgctccctatgtacctgcccatgtagggagaggaagtgatatttatcctatgttgtagctgcaggtgcagctttagccccacgaatgcaggcagagtcatc

SEQ ID NO: 5044 - DNA, 694 bp, Zea Mays
ctacggccaggtatagtacgatggtattcaataccggctatggggttggattgtgcaagcaatcagtcgcatggtagtcgtctgtaaaattaaatgggttagagaataccttctggggagcacactgcagcgaggagatggcttcagagactcaaaatctgggtgcgtggggtccgatttggtgaaggcagactctccctgaagatcttgtacctcgccgcatatcgccgggaagacggcagctcgtagagacgccatcatgttgacggcaacagccggacgtcgacacctgcttggccgccgtgctgatggagtgcagccgtggtcgccctaaccacggtcgaaaatgatccgccgcggttgaagatgcctgcacgtcggatcgagggaggctgcatcgccaacgcgagcggctgaggaacgaagcggcgaccagatttttactaaccctatgcggtgggatgtgagaaggtttggctgaggtaagcagggagttgtgagtcacagcgtcaggcttgcgagtgtagttgcgtcaagcccaagcgagtgtaaaaaataaaaataaaagagggagacaaggagcgtgatgacctgtatgtttgtgggccgaatatagactggactgatatctgagaacgagtcaggaattgagtggagattcggccaatagaattagaaatgaggtaattaatag

SEQ ID NO: 5045 - DNA, 484 bp, Zea Mays
catgcagtcttgttagctggaacaacacatagtatgctgaaagggggcatgcaaacctctggacgagaacggtcatgcacaaactgatttactatctgcttgaacagtggttcaacagcatctggaggtacctaacatttacacatacattttgcattcagaaaaaaagtaatgtaagtggaaccaatagttgcaaagcaatgaacttttgaagacgcgcaaccatatcatggcaagcctgaactgctgcagcgagtagagtcgtcacatctcgttgatgaggctgcacatggatgtaccaaaaattatacatgagttagtattaccaaactagttggtgtttcaaaggacgacacaaacaaaaataccatcttaaataacatacttgaacgtatctttgaagatacgggtagaagttcaacaaaaccaagtgatgcagcccaatggtcctcgcgattacttttagcatcatcatccttacctg

SEQ ID NO: 5046 - DNA, 623 bp, Zea Mays
atggaatgcataatttgcctatccccacctaacatcaagcaaacttttaacctatatcatgtagtctatctcacccatatctattttaaccatattccccagcccgataatatacactaactcctaatcaatgagacgagaccggagaagatgatcaacctcatcaagaagggatgagcaccaactcaattcttcaaggatcaagtgagatcaccaagatgagtcagcatccacaatcttggatggagtcttttcttaccccactccttacccaaaactatatatactttaaagatatctttcatcctgcataataaagtgactatacttatatacacccaggccttcctaatcacccactattgtctataaaaaaatatatgaaactccggatcttgaacctattatagactaaaagccgaatcacaaaccaatccttatgtatcccttttcttacaaatctcggggacgagatttctgttaagggggataggatttgtaacacccagtttgtaatatataataaaagaggagaaaagttatttcctatattttatgtgtgtgttgaatctatttatcatcccatgtgaagaccatattcaaacaacaaataaataataaaa

SEQ ID NO: 5047 - DNA, 401 bp, Zea Mays
cggcgttttcccggagtttgcgcaggtccggccaggtccactcgccaggctgagctcgcggtttgttgagtctgttgtggatgcgccggtattgacgcggcagaggactcgggtgaagccatggcggccaaggctcccgagcgcgcggtgttggacgagatccacccaaggcggtgctccgggtgcgggatggcgcagggtagaggagggttcggcccaggtcgatgggcacccccgagccgcacgcggatttcggctaggagcgcgccatgcgcgggatctatggcgaggttgctcaccgacgcgaggggaaaggggatgagtgaggttggtgcgtgcgcgcgcccccgccatgctcgggtgagtccgttgaagaggggaagagatgaatccgaacagcg

SEQ ID NO: 5048 - DNA, 508 bp, Zea Mays
ttaaaaaacctgagggacatttagtggctttccaagtttttccccaaggaaaatggaaactgaaatcttgttccagatcctcacacctagtctctccctcaatgactttcaccaatcctaaaaaactttttctaggtttcttagcagcattttttgcaaactgagaagcatagaaacctaacccatcagccgccatacccactataggtatggtaggtttgctttgtttaggccaaacacatttagcagtcacatgtgtttccttcctgcagatctcacaccagaggggtttggaacattctctagcacggtgcccttcctccccacatttctggcaaaaaaatcggcgacctagatctagatccataggaacggggggagtggggtggttcatgttacctggatccgcactctcaccagatgttgcagcctgcaggtccggtttggactcagccttcatcggagggggtctcaagcgccagctaaggtttcggtgtcttccccaagg

SEQ ID NO: 5049 - DNA, 682 bp, Zea Mays
atgcatcattgtcatggtgggctacaagacagagagattgtgcacctacacatggaggatgtagatgtgattgcttcctctgttcaccttagtgggaaggcggcgatggtgatcctagatacacaacaccccatggtcgatcttcatgtgtgagccattcttatccaactaccataaactggtgatggaattcctcagtgtgggtatgtagtagacatgggtgagcagtcgttgctcaccaatcttggtggtgaagatgacagagtcgacacccttgatctctatgatgaaggcatcccaaacttgatgaagcctcccacaccaaagttcatgttagagaagtactcctacgtgtcgatcatgtggtgggtggcatattgagatactagccatcgatcttgttgatgctcgaaccattacctaggaagatgtgggcacatgactcaccaaggtggagaatagcagagcaaccagtgtgggagggagtttaccttgatgcccctgagtactaggaatagaaccagcatgtcactctcatgtgtttatgtgacatgtgcatgtcaattacctcctcgatcatcacctcaaagaggtctagcaatgtcttcatcactaaggcaacctacatgcactttttatggatggcgtggaggaacttatcgatgagtttcttcttactgat

SEQ ID NO: 5050 - DNA, 486 bp, Zea Mays
gagcgcttgtgcaatcgactcaattccaccggagaactcagacagaccacaaatctcctcctccctgttcttagcgccgccgtaaaggacctcttcgtgggcagcccttctcgggttagtactcgcccgattgtctcttgttctagtgtgtcgttagcttcctattgctctcggtgccaaccaattgaagtttaccagagtcccaccactggaacacctcgttgttccgtagaacaccgtcgtatacaccctctctgtcgacccgcttccctaccctcgttcgacctaaattcaatcgtgtacctagtccctggtgaactcgtgaagcttccccaagcttcaattttagcatcgatcccgttaatcgcccggaacacgatctccagggtcgttccgccgccgtgaccatgaacaagcttcacttatggtcaaattgttcaaattaaatgagggcttttgcttggactgacttatgcttgatgtttg

SEQ ID NO: 5051 - DNA, 540 bp, Zea Mays
aggagatctcatcctccgccgaattctaacgagggaaggacggcacaagttgtcacctctatgggacagaccattcatagtagcagaagtcactcggccgggatcatatcgcatcacttagatggacgacacggaaattgggaactcatggaacatagaacacctcaggaagttttacccctagccgtatttcaaaagctattgggacgacaatgtactctgtaaactgggaaatatatcatcaataaaaagacttcaagagcgctcaaattattcattgtcgacctgcattcttacttaactcggggtgaccactatacccttctaacggagcaatcggcttaagtcggcgatgacttaagacggtgcaacatgctcgcgcttacttaactcagggtgaccactataccatactaacggagcaatcagcttaagtcggcgatgacttaaggtggtgcaacatgctcatgcttacttaactcagggtgaccactataccctactaacgaagcaatcggcttaagtcggcgatgacttaag

SEQ ID NO: 5052 - DNA, 619 bp, Zea Mays
caacccatttatcgacctagctgtaggattcgttcgaggagggaaccaaagagaaaagggctcgagagtgaccaacgaacggacgcccgcctgaacttataaaggggcaaggcaatgcctgacccgagagaagcatgtgaggggagatactccccgtcgagggctactatcggggataagatccccgttccttggggcccatcgatcagcaagaacactgggaagaagcctctggtaaccagggcccatcggctaataagaggaggaaggaaacatctgccctaaaagcacccacccctggacgaaccctgaggcaccaagcctgggatcgggcatggtgaagctagacaaggggcagtcgaactgaagggaaacccctcgagtggatccctcacccggtccgagacttacccgcgtaagtgatcggtcgtgttaactacgcctagcactgagccgtggaagaggcgtcgtttgcctcccactcatgacctacaagcccctcgggctacaatgcactcatgaactacaaacccctcctactatgaagcatttatggcccatgcgccctcggcctgtgacacactcatgccctatcagggctaggcctgagtgcacaggc

SEQ ID NO: 5053 - DNA, 549 bp, Zea Mays
gacgaagcagaagatggccagagcgaccgccgccgcgagagccgggaagaggacggcgttgatgagcaccttgcgcattggtctccgttctagacttgggcgcgcgctctactctagatcggagggagggagggagcacggaccgcggcgtgcttggttgctcttgcttgggggggcaaatgggcaatgtggaaggaggaagggggtgcggtgattgtgggggtttggaatttgagagaggtttgcttgacttggtgaaccgtgaacgtgcttcttttgggctggcctgcttctgcttttcctctgtcctgctcctgcgaagacggcagagactgctattcttgccgttgggatggaggagaggctacacctacagtacacacagactattttaaacttgctgtctttatcaatggcatctctcctatcgctagttttatacacgaaatttacgtatttatcactcgaaatttctacgtatatacgtaccgcttttgctgacgtaacatatcgagtagtcgggcagcgtagcagcgcctctcaaaaacc

SEQ ID NO: 5054 - DNA, 517 bp, Zea Mays
ggtcgccatggtacactgtctgaaaaagatctgaggcgcagtgcacctcaccgccgatcccacgacgcaattcgcaccgtcagaaaagattgcggtgagctcggcatggataaacatcgtattgaaaagatcgtggaagggcagtgaacatggaccctggcactggttcatcaatcgtgattcactagctccgtgacgtggctgagcgatcgacgttgtcatggctcccggtgatctcggttgcaccatgccatagaccatgttaccatgtcgtcgtaggtcatgtgagacatccaattaccccccatcgagaccttaccccattgagcgccacgattgatgaactccgatgactcatctcttcaccgccctgagatcatctttgtccaaaactcagagcacccatagccggcctctataaattgagtgttctccctatttcgccctcttgttacgcgctcagtgcaccactcctcacctcaatccacccaccatatcccgagaattcggaatttcc

SEQ ID NO: 5055 - DNA, 538 bp, Zea Mays
caagcgcccaccatggaacgaaacttgtcttgtctcgctcgcccacgtgacgtgagcactccgcgcgctgcagaacgatgatttgatgatgatcctgtctgatcacataagctcttcttcctcttttgtacacggccagagaatgctgatctgtgcctgcatgtctgattggattggatcggatcgcgacgtgatgaagtggtagtaggagcggccgctagagggttccattcgcaggaccagccgaccaggctatgaacaaatgcttcagccaccctgctgccttggaatgcaagtgcattgcactgctgcgctattattctgttaaacaacaaggatcactcattacatcagctcacgccgtgcacagtgcgacgacacatacaaagtgcctcatctgtcgtcctttcagagttgatcaaacagaacctaaaataatattgtggtccggccgtgcgtcaaatgactaggcacagaatgattgtcaagtggtcgggctggctgttgatgattagtatagcagctttgcagagggatc

SEQ ID NO: 5056 - DNA, 423 bp, Zea Mays
ctcgtataagggatggtgagcacagcgcgccgtgcagcacgggcacactgtttgacaatggactggacaggtgcaccgtctgtaggatggccctggtgccgcctaccagcggagtggataggacgcattaaatgctgagggggcacatcgcctgtcagcagggtggagaggcggcgcgtcctctctgcaataaatgcagagaccgtgcgacctagaggccttacgtcaggctccgcccgttggcttatgtcacgggcaacaagccacgtggcagcatcgggtctctgcttgagcggggagcgcaaacacacaagataaggcctagacacgtgtcagtaccggacccttgcttatgccagggtctcccctgtcccgggaccttgttgtagcccggaccttactcggagggatctagaccccatc

SEQ ID NO: 5057 - DNA, 496 bp, Zea Mays
atagtttgtatgatgaggctgtgtgccttcacgtatccggctatgtctataggggcgttgcgcgcttggtctggcgcattcattatgttggtctggctgcgcctgtggttggtctgtgcgcggatagttttttggtgtagacttgtgcatggatgtaatgcgcttgcgttttggcgcgcttgttgatttagtccggctgcaccctaaggcgacttttgcacggatagtcttttgagaaggacttcgattttgcgcacttgttgtgctagtccggctgcacccttaggcggcttttgcacggatagtcttttgaagaagacttcgattttgcgcacttgttgtgctagtccggctgcacccttaggcgacttttgcacggatagtcttttgaagaagacttcgattttgcgcacttattgtgctagtccggctgcacccttaggcgacttttgcacggattgtcttttgaagaagacttcgattttgcgcacttgtt

SEQ ID NO: 5058 - DNA, 299 bp, Zea Mays
taacaagtaacaaactgaattggataattatgtacggaaggagaaagagagaccggggtacctctgctcgctcggctacccttgatctgcttcctttttgcttggtgctgtgagattgaactctgaactttaaactggatactcagctggctgacctcctatggggtttataaacccttttacagcaccgttacatccacagaacagcactaggcttagcttgaccgccggtgaagagaagaccgtgagtccgtcaaactcgtcatttacttgccgtcacttttctgcttccatcccgt

SEQ ID NO: 5059 - DNA, 682 bp, Zea Mays
tgtgccatctcggagaggcttgtaccccacacggtcggcccaaagcagagggagcacagctcatgaaagcgctcccatgagggcataccctcgtcctactcaagggcatattaccacatctaggctacgcctgtgatgtggtaggaggccagccatatgcgatctgaggccatcgtccgatgtcctcggaagaatttctcgcactgattgagcaagtggagggggtctgcagtgccgtcgtaggtggggaactccagcttgtagaagcgcggtggggcgaggccgaggtttggatctggagagacgttgtgggaatgtgtggccggaatgccatgatcaccagacgacccaccgtacactagggtgtcgtcccccaccatagaatactcgactcgtactagggttgggtggcacatacgggtttgggagcgtcgccatcgtgaattgggggcgtgtgttgaggcgagagcgtattatgggatgggcgagggcaatggcggcatggataggaggtgaatggggacggggggggctaggtgtgcggatcgagcctggaaggggagcaacgccaatgccggtggcattggcaatgcatgcagcggcgacgaaagggtggtatgggacatgtgcccttgcggtgggaaattggtggagatgaaggtggtgatggccgcctcggaac

SEQ ID NO: 5060 - DNA, 313 bp, Zea Mays
cgtgaactcatacagtccatacttggtgatgaatgttgtcttcggtatatccgaaggtcggattctgagctgatggtagcctgacctcagatctatcttcgagaacacactggctcccctcaactgatcgaataagtcttcaattctagacagggggtacttgttcttgatagtaacctcatccaaggctcgataatcgatgcacattctcttcgtgccatccttcttctccacaaacagcattggggctgcccaaggcgaggtactcggtctgatgtagcctttctctgacaactcatcaatctgcttcttg

SEQ ID NO: 5061 - DNA, 353 bp, Zea Mays
cactaatctacattaatgtatggagctgcagtttggttccaagatatagatgaaaatagtgtgcttagaaccatatgctcttgtcacatgacatgtttgggatcattaaaatctactatcttctgatacaagttgatggctgcttcttctactgctgcacttacaatattaaaatgaacgtacatcatgcacaatacatgcatgataacataactgccgggattagggttacggaggtcgtacgagtggtaggtttgggatctagggccaggactccgactcttgggcagcccctaacaaactaaccaactctatctagggagttccaaactaatgcttatccattgaaacaa

SEQ ID NO: 5062 - DNA, 458 bp, Zea Mays
ccgctcgtcagacttatctccctcctcacaacaacctccgctcaacgcgccgagaactccgagctcctcccttggtcggtgcgttcccgtagggattcctagacagcttcgggctcttgggggtataaatcctgagccgaggtgcctcatgaccatactcatcgggtgcctcgcaagacatacgcgttgtggtgccgggtcacagtgcttccatcgccgagccaagcttaccgccgccattgttgactatcgcgagcgcctccacgggagtcttcctactgtgtcgcaaggcctctatgagttgtctcctaggttctcattggcatcccgtggccgtattaccgcgttgacggtggtaatccctcaccgttgtacccatatcgtcgtagatccgtctggtccgcgggcaacctcgctggcgccactgtttcgggtaagtacaccctaatctgtgtcgc

SEQ ID NO: 5063 - DNA, 459 bp, Zea Mays
gcgcggcagaatcacgtgtccgatgacaaattctgagccacggtttgggtgtctacgagcctgacttgatggaatacgatcaagggaaggaaaggggcgcagaggatgtaaatctcacaggcggctgacatgcagatacactggcaccggtgcacggcggatccacggagattctccttgcgacggttaacggcgcaaggcacggtagtgatgcgccactacacaacaacaccacggtcgaatactggacgcagggcagcgactatggtggctagctttgaggtgaggctctcttccccaatccctggacacactgatggtgcataggggaaacagagcaacgagtgcccccgtcgggtctaaatagcccagaccccacgaatcgcggagcgggtggtttcgtccacagtcatcgggcgcaaggcgaggtcatctcacgggtggtttcaacctccacaa

SEQ ID NO: 5064 - DNA, 314 bp, Zea Mays
gtactatttatcaagcagtattagcacttatctgtgtaccacttgtccctgttgtgtgtggtgtaactgattcttccttggtacctggcccccctaggatgtaggctcgatttgtcgaggctgcagaccagcatacctaagaaagagtttggcggtggcccccaggaggtagcctcaactgggacctaggcctgcacacagcttcggctagggagcattagtagtacacccacatgacccgtcatctgacactagccatcctttgatacatgctcgggacctgcagggtctagtctgggaggccaagttgtgcg

SEQ ID NO: 5065 - DNA, 480 bp, Zea Mays
taccactctaaactccacttcggctacatggcatggggagccaagctgcatgtggcacaagggcctcgtcattccgaagcttaaagtcaatggactcataaccatactcatcagcttctctatctttttctcgtctgctttcatgtaaaaccattcactcttccaaccagttggccacttggtgcagtagctaagaactggtgcctttgtatcctttcgatacgcaaaattgtagcagccaaaattttcatgaaggccatctgccctagccttcgtctggtaatgcagcttgtgcacccagcagaaagcttcggcattaggactcatcccctggcttcggagggcccagatgtagacactaagtctaacaattgcattgggtgtcaattgatgaaggtatatttcaaaattcttcaaaacctctcctatcatatcatagagagggaaccgaagccccgccctgaagaagcttttaaacac

SEQ ID NO: 5066 - DNA, 582 bp, Zea Mays
gtcctagagtcgtatggaactatggatatgtagatttttaaggacaaaagtttgaaaacggattcttcggttttctttccttgttaacaatcaaccattatagagtgtggatatctttagtacttctcttgaattctaggaaaattagaattagaattttgtatgcacatctttggcacatgtttatcaaaattgagcaaaaacctattgatgggtatttgatgtatataccgtcataccgtgtataatccatatgctcagttttgcatggacttgttgctaagtgagaattctgttgtgtctgatgctatctgtgctaacttaacccttgtgatgcttttttctgcaaacatttgatctttaattgtattctaagttagctaggaactttgaataatatgcttcttacatttgtggtaggcattctacatgagcatgaatactaaatgttatttcttctgatactaatcctacatgagcatattgcactagctaatctctactatgtccgattccattagtaaaaaactgttacattactaaacccttgtgctgtccataacagaccgtgtaaattaagag

SEQ ID NO: 5067 - DNA, 792 bp, Zea Mays
ccacgatacccctccccttggctcaccgcccgcggtaaagtgctcaccgtcgaccaccgcctcccggccgtgcgccgcgtggctcaacactttcaccgtgtcgccgtgacctcctctgaactctccgtagctcaccggagttactgccacggcgataaacacgtgttcactacacgcggttcttcctcctctccggccgccacacatcttcatccaaattaagcgccgccgtcgaagccccctataaattgagcccctgggcagctgcgctaagccatcccgaagctatagcacctgctcccaccctcgattatccaccagcacgcgcggatttcccattctccccaaatccgatttccgccaccgcgaaaccaagttcaccgtcgccagcccaattccggtcagtccccgtcccatgctttctcgtttgtgcactctcacatcgttgtgatgcctgccaaacccttaatttgcatggagtagcctctggtcgccgggaacgcgtcggtcttgccgcgctgctcacggccatcgtggccagagctccataattgatgaatagccaaattaagttgggggaaatggttggggtagtgttaatttcgtgtccgttgctcggagaacccggccgttgccctaatcggccggcgtagatgctcgccggagcgtggcggtgcgcgagcgccgtcggggacctcgaacacagaatagggaaaagagaaaggacttttgtgcaaacagtcagtgacttgaataaacagtaaaagaacctggtcgcagttagtctaaagc

SEQ ID NO: 5068 - DNA, 276 bp, Zea Mays
gccttctcttccaagcgtctctccccaccagctattgggtggaggcgttgaatactagcacccatctcctcaaccgtctccccaccaaggcggtcaatcatcctacgtcttccttcgctctctttggcactgcccctttctatacacacctccgcgtcttttggctgtgaatgctatcctaacacccccaccatcgctctccacaaactttcccctgatccacttgctgccttttcctcgggtacccctctaaccacaaggggtaccagtgttttc

SEQ ID NO: 5069 - DNA, 412 bp, Zea Mays
cagacgagcacgctacgtgcgctgcgggtcgctagcacgtgggaccagttggtgactgcgatccgagaactccgcagccgccttgtgggacactgtcgtgtggaccccatcagttcgtctctggtgcacgcgctcgaccgcaggcactcccgcgagtcactaggtggcgggccccactcgtcaggtccatcccctccaccgaactgctctcgtgcatggtgcacatcccgcctgaaattcagctcgattcggtgggagtggggattatgaccggggtataaattggtcttgggtacccttgcccctagttaacccttgtcatttgccctgggaaccaccatcaccaggaagctcgtgcgcgacaagggaaccccactagaccccgccgccttcgtgtttctcgccgctgccg

SEQ ID NO: 5070 - DNA, 530 bp, Zea Mays
gttctacggagcagaggagtgttccggtgatgggactctggcaaacttcaactggtcggctccgagggcaataggaagctataaacaagctagaacaggaagcaatcggggagttactgaccagaggagtgctggccacgaaggagttcttcacggcagcacgaagagcagggcagaatggttttgtggactgtgtgagttcttctggtgaaattgagtcgattgctcaagtgcttgtgtgcgtgatgtggtgaagaagcaggatccgagctcaatttataggccgatggctggaattggatgagaattgtggagctgtaaccgcgctggtgagctcacccgcgcgggcagagccacgacgatggtccggtgaccgccgattaaccgggcagtgccaccgcaacattttaacgccacatcgcggatgatctttaccgtggccgcagacccatccccaaccatggtggcgttcttatcgccggtgagatctttctgaagttcgatgaacagtgcgcgagtttcagttaaaa

SEQ ID NO: 5071 - DNA, 519 bp, Zea Mays
gaagaaggatgaagttgtcgttttcaagagcttcttcagagcagggctgcgattccccctgaatgaaatgataggggtagttttaaagaacattgagatatatcttcatcagctgactcccaacgctattgttagactcagcgtctatatctgggccctccaaagccaggggatgagtccagatgccgaagctttctgccgagtgcatgagctgcattatcagacgaaggccagggcagatggccttcatgaaaattttggctgttacaatttcgcgtatcgaaaggatataaaggcaccagttcttagctaccgcacgaagtggccaactggttagaagagtgagtggttctacatgaaggctgacgagaaaaagagggagaagctgatgaccatggttatgagtccactgtctttgagcttcggaatgactaggcccttatgtaatatgcaactggggtcaccctgtcagttggctgaagtaaaatttagagtggtagctaagcagatcagtactag

SEQ ID NO: 5072 - DNA, 382 bp, Zea Mays
gcgaggatgggcattatgggacaaggcggtggatgacgacatgactccaacgtacgatgacgacaccatcgagtatgtccacttcgagggagctagggagtaggcaactcttcttctccgagcaggtccccaagtctccactgactccgtgctatgctctccagccacgacttcggctacagtgagctcttcgccaccacgtactccagcaccgacagtaaccccttcgggaatgtcctccccgacgccagctcgtgtcgagcacgacttggtggggcttgttaccccgctctcccacgaagaggagcgcatcgacgcgtgccacgacgacgagccgttgcggtttcgtacggtggagggccttctcattgacccgtcggtg

SEQ ID NO: 5073 - DNA, 1224 bp, Zea Mays
ataagaaattcattttataaatcaatttccctgattttctattttccctggattgcgccctaaaatctatgaagtgcatgggtctcggtgtaataattccaagacacaggatataaactaggtggacggcgggttggtataggaaaagccgagggtctcttatgcgaaattgccacgccgaaggggtatcggatcgcgctggccgcacgatcaggaatctagggctacgattagattcatcctaacaatgaaacggtacacgcatggttccgtcggatcgacgatctacgatctagatttaaaacgactacgatcgaatcctgatcgcaagatcctagatccacggcccgtattcgatcacgcgaaggggtgtacgcgtgctcgaatcacatccgttcaattctaatcaacggctcgtatttggttacccctagatctaatccagtgcgcacaacgtggatccgacggcaggaggggcttcttccccaaacagggtccacggcggatcccgcacagttccacggtggcgccattgtcggcaactacgcgcaacataaatccaagcaaggctctcgattactattgcgcgaaaataaagttcaggtcatagtgaatcagatgggagagatcttactgtcgattgacgcacggacagcaccatccacggtgaagtgcggttccacggtggcgcccgagatccgacgacaaattcctgtcgattcccccgatccattgcctggagcttctatcatccatcttccttacaacacccttaagctcccaagcttgaatctggacctcgaacggcggcgtccatcagtttcactcccggcggctccccactcattcgctcgactgcgccaactgggttcacgggttccacacagcacgaccgcgcgccccagacgaaaagaaaatgcttcgctgtcgatctttatagccacagggagagggccgcgaggcttgggcgaagggaccagagggattttcgggcttgaaccccaacaacccccggtttgtcgccccgtctgttacgaaggtgaagaatccgacaggctggtcccacgcgccagcgtcttaggtgccagagcgtccagcgctagtgaggatgagcagtggagcccacatgccggcaggagaagtgagcgcgcgctgggctgtgtgggggaaaggatggagtgggccgcgcagatttggcccatccggtcatggggagtatgccct

SEQ ID NO: 5074 - DNA, 757 bp, Zea Mays
atattttgggagtcagattttgaaaactggtggagaaactaaacaaatatggtctggaccatatgcggatggtccgggctttgaggtcggacggtctggaccttatgcagatagtccgacacctaccgtggacaatctgttgatgaccagagacaccagcgaccccggacctttagaccatgatgtctagagataggtacatggaagcaaaatacatccaaagcatatggtcggttcattagtgttgactctacttttgatcaacttctttctaaatacgtcaacaagaaggtcgctccgagagatcggccaacaaagtgacctcattcaccaacattagaaagacaagcaaaagaaacacgaccaactcaaacatcccaaaaggtagtccaacaggttccaccaccgacgccatggatagcaccacctatttatcaaccacacccatatccaccacatgtgtatacaccactcatatttccacctacatatccatccacctgcatacccatccatgtggggagactacaccatactcacagtatccttatgatacttataaactaccatatcactcgaatttgggggcaccacaaacttcagtatttgataggctagctccatcaatgcaggaccaattgaaaatccataattcggtcctcaaacacatcaagatgcatgtcgcaatttttagccacaaatgttgacagatctggaaggggcataaggggagaacccccacctttgtagtacccga

SEQ ID NO: 5075 - DNA, 279 bp, Zea Mays
actgacatggtgccctacttaagcgacagaaactcctttatcttcatcagtccaacaggaatgtgatagtttctaaactaagtagcaaaatctaaccaagtgatagtatcagcaacatcttggtcagcggtgtaagaatcccaccaatctgtagcaggaccagtaagacgaccagaagcataaagaaccttctctcggtcagagcactgagcaataatcagcatcttgtccactgacttcagccaatcattagcgtgcagaggatctggagagctggcg

SEQ ID NO: 5076 - DNA, 455 bp, Zea Mays
gccacgatgaaggggtatcatgaaaccctagccgtcagatcttaaacgtgcgccctggattagacctgagtcttccctgaaccggtacagaatcctagccgttggatttaaaaacaaatgcatagattagatctcaactagtatgttctagcagccatcggatcatcgatcagtggcctaaatgccacccatgaccttccccaacactagacgtccaactggtgatctacgatcgcgattaagtacaacgaaggggtatgggacttctaatcatgaccacccgatctcaatcgacgctcaggattataagccaccgaggtcaaatctcagtcgctggccttggatctactggccaacatgctttcttctcccctcgacaacaccaggcgggggcgctgccctcccaacacgacggcgccgcactggaaaagcccatacgacatctagcgttcgaa

SEQ ID NO: 5077 - DNA, 285 bp, Zea Mays
ggagtacacagataacaggtgcttggtggaggtcagagaagaattcctacctaacttctccgcatacacagataacaggtgcttggtggaggtccgagaagaattcctacttagcatctccgcatcctatttgagtagttaatcaagtaaggcaaatgcgaacacccatcagacccatctatctggagttttatagcacattctccgtcgatggaacctaagatgtcaaaagcagatacgacgtacccaaggggtagcttggattgaaacagtaggaccatcctg

SEQ ID NO: 5078 - DNA, 513 bp, Zea Mays
gtggtattcaaagactcaggtattaccgtcaggcttaccctagtttagtttaggtttttcatcctataactccagataattggcatacaaaaaaatattccgctgtcctagaacccttgtttagccttgcaatttcgtttcagattgctttgttgagtttgtgtccgtgtcgagtcttgttgctggtttaggtcgtgtcgtcatcgtagtcaaccgctccatcgctgttatttgtttccgccgctatcccatccaccttacccagattacaagtcgagacaccacattactcgatttgccctcgctagccgccttgtgtgaattctcgccacgctagccctagattaggttgcaagccgcattgcattatagcccctccttgtttcatcatctagcgcttacctattgtttataccagggaggtttgtgcccctgtgctctatagccgccgctacggttcctaccaatttgtgccctggaaaaccataacttgaggtaccttccataaaacgg

SEQ ID NO: 5079 - DNA, 462 bp, Zea Mays
gcgagggagagcaagagaaccaaatcgaggagctcaccaggcttgggagacctcaccgaaaagaaggatgtcggcaacgagggaggctgtggtggcgctgggagggcacaacgatggtggtggtgcagagagctagcttgggagcacgtgcgagaaagcaacaaaaagagagcaggtgactagcaagcagacccgagtgagaagaggaatttgaatttgtagttatgggaacatctggaagtgaatagaacactgtctggtgcacaccaaacatcttacatagaggcggtgtcaaatagccgccaagcccaagcaccggacaatgcacaatgcattgtctactgcacaccaaactgtccggtgagctcagacaaagaaaagttttgaaaaaaaatcagattgcgcaccataccaaatcccaacttataagcacacataagaacacctattgggacaggtctt

SEQ ID NO: 5080 - DNA, 766 bp, Zea Mays
gcagatgccttaagtcgaaaggcccagtgcaactatgtaactatggactccaaggttgccactctgtgtgacgagttgtgcaagctgaacctggaagttgtttcctcaggtaccttgagttacatctcagtggagcccactctacatgagcaaatagtcctggcacaaattggtgacaagggtgttcaagtcattaaggatatgctcgaacaaaaggtggataagtacaaatgttttcgttaggacagcaagggagttctatggtttgaagaccgattggttgttcctaagaatcccgaactcaggaagaaaatattggatgaagctcatctttccaaattttccatgcaccccggcagtaacaagatgtatcatgatctcagatccttgtattggtggaccagaatgaagagggaaattgctaagtatgtatctgaatgcgacacttgccaaagaatcaaggctagtcatttgaaggtagcgggtaccttacagccccttcccataccatcttggaaatgggaggacctcagcatggattttattgtgggttaacccaacacatcctgacaccatgattctatttgggtcattgtggacaggctaactaaaacagctcatttcttgccagtacataccacccacagggcagaaaagtatgcagaaatctatattgaccagatagtgcgtttgcagggaataccaaggactatcgtgtcagacagaggggcaccgttcgtagcacatttctgggagcaactgcaag

SEQ ID NO: 5081 - DNA, 554 bp, Zea Mays
ttcggaggttcaaccacggttgaggaattctgctttaactgcagtcttcttttgaaaaaaaaaacgaaatcaatttcaaatggcctccaaaaattagtaaacctgcatacatactaattaatccatttcgaagccatcaccaagagattatatcaatcacaaggcctttacacctaaagatcaatcaagaacgttaaaaaaacctaagcacaaaatgcttcaagaaattcaccaaaatatgttaaattattggttacaatgtcgcatataacgatgaaatagtcacaatactggttaagtatcacgataggtcccttgatctccgtatgcgagtacaaaatgaacattccaggcagagtctcagggtgcatctaatctaaagtattaaaacccgacgcggtttgaaggcctccccgcacttcgcgggctcacagcccatctgtcttcaacacgtgtgtcgttctgctcggactcgaaatacagtcttcgacagtcgtcgcatacagtcgtcacagtccctcgcgtagacgcgcacccacctccatccctcccat

SEQ ID NO: 5082 - DNA, 497 bp, Zea Mays
tggcgtctaacacgctggccattcttctcctcttgggagttgtggcgggagcttttgcaaccttcggcaattctgcttctaccggcgggctcagaatttctggcttcttggccgccccatcttcggcttcgactggctcaactataggcaccttcggcactatagttgattcctcagcgctccgagcgatgggagcagcttgttccgcttcgacagcggaagatgtctcttcaccaaattttggcactgtggccgtctcaatgtaccacggccgatgcgtcagaaccttgatctttttgcccttcggcacagcagagatggccaaagcgacagttttcctcttttttccctgcctttgcgaggggtagcagtaatcagggtatataaaaccaattgcatcgaaaaccctgttcaatcttttcttgccccgaccccgaaggctgaggataaagcatcatcttcggctctggtatatgccccaagtaactcgtcgcttg

SEQ ID NO: 5083 - DNA, 706 bp, Zea Mays
cccgagtgcttgggcccacgtgtcaggacccaacatttggcacccaccatgtctacttccacaaccaatcccataatgcctaccaagaagatcaacagtaggtccagctcctcccccactgacgaggctgtgaaggcaagttgaccttcacttgccaaatcccacatgaccctgcaaaggctgcttccatcaccatcaacaaaccaatcaccaacaaccaatcttcccctcgccacaaagatccactcaccccaagggaagtgttcacacatacagtttggagacccaagactccatgagcatccccattcaacccccagagccacccctactaggtcaaagtttggcccaacatatctaggaacctgccatcccattcccacgaacctgaagatacctttaggtcttcattcattccactagcccccattctagagcaccacaaatggttgcttccacctaagcccaccactcaggaagacaaagaaatcctccacaatagcgaggacctcaacatcaataccgaggagcaattactgttaaggagtctgcgcatgaggaatggacacctccaaaaagaagaaagaatctagcagctaaaaggtagtgcagtgaggtctaggctagaattcaatgactgatacaagaagaaaaagaacgatccagagctctacaacatgagatagcatagttgcaaggtaaggac

SEQ ID NO: 5084 - DNA, 1551 bp, Zea Mays
atgcccctagatattttaggttaaaccactcaactcgagcagcaaaatggtccatcttgagattgatgcatttgacattattgatgggctctttatgacttcacttcaactttatgtaagctttgtgacgataccacatgtcgcctctagttcccgccggaactccaaccaagttctaatgcccctcatgagtagcgtatttgatacactctctatgatctcgacatgtgtcaccaccaatccttgaccgcctaattatcacgtcctccattgcctttgcttgacttggtcaatcgtcttgacctgatcaacatagactactggtccatgtactcttgtgcttgttgattttctcaagtgttagacactacggtcaatcttttagcttctcttgtccctcactccaactccaagcctcggcgtctgttcttcactgctctaagtatattggcatgaacctgcttgaccttcactattgactatcttggaccttcaaacctacgcaccacaagccaagatatatgttgcacatatcatactcatgttatggttagtcaatgctaaaccaaagctaatcatttccttaacaatcatttatcacacttgaacaccatcgacatatctcgatcatgtgttcgcacatatgttggaaaacacctaaaaatagcgtgttactgtaagttaaatgttagtgttaatcaaatatatttcattacaaatgtcacacatttgaattctactattactattcatcacgtttgaatagtgccattttggttcttcacctctctaaaccatctcactttccaaagatagttttgtatagaccaaaatgctcccatgggcttgtttctatctaccttcataacttctttgttaccctcctctatgtatatcaagcttgagctcatctgctttcccaccctaaatgatgggtgttagacctccttgccctttcccgctagtggcccattgcgatcgccgccgatattggtctcactatgctatactcctcgtgcttcacttggcatattcgcaaaggtgttgaacccatagagcacaatgatctcacgtatggcgcgacgatgaaaagcgcacaccacttggtgagctcaagtgctttgtccctactaccactaagcgagatgcaagagagcaccacaacgaagagcatagagatcagggaggtttcaacaacgtagatgtcacctagcatgaggcaaagagagatgaggccaacaatgtcatagagcatgggcttggtcatcgtcatggatgttcatcgagcgttcctgcctttctcccattctcataggcttctcaatctcgctcgcactcattgtgttatgtggggatacatcaagagagggagagaaattgtgtggtagggaatacatataagtttgattagtggggtcaatggattagtgagtgtgagtggtacacaacatggtcttttttttccatacaaaaatatggtagcctaagagtgagccaaactgagacaaatctttatcccaaacatgtggcgtgatacaacttagttagacg

SEQ ID NO: 5085 - DNA, 845 bp, Zea Mays
tgacggtggcctcaagactgccaagtatagtggcaatgcgcagcggcgtccgcgcagtccccacaagaagcaggggcaacaagacaatgccaagggtagcaaaaaccatgaagaccacaataaatgtagagattttggtcggtttgggcattgagcaaaggattgccccaaacccaagaaggcgtaggctcacctcacccatgcatacgaggaggacgatgaaccgacactactcatggcgcaagtgtgcacactctcggtcgcaccagaatgtgttcgcctcgatgagccacacacacaagtgttccttgtagcaacagaggacgatgtcaagcgtcttgaatgatggtacctcgacacaggtcttcttcatctccccctgcgcaactgcatcattagcctcggcacatcaatgacgacgagctccatatttgggggtccgcaacaatgctcctcaacaaggtgcaacacggtaacatcgcctctacattctgcgccacaacaccacgcgctcgatgtgccttgccgcccaccacgttaatgttgtctcctagtggtgtcatgatccactcaaccacatctctttcaactacctgcaacgcatgtccaaggatgacatggtgtgcggaatgctgacgctcgagcatgtcaatcaacattgtgacgccggcattacgacaaagaagagatgtgtgcccatcctaaagaaggccaagtacagcgtgcagcaatcattcgatcttgtccatggtgatgtctgtgggcccatctctacacctactcccgatggacgtcgttacttcgtgctactcgttaacgaccacattcactatatgttggcggtg

SEQ ID NO: 5086 - DNA, 370 bp, Zea Mays
ggtgttgtcaggttgagctagcactggggctgttgtcaaatgctgcctcaaggtatgaaaggcaccttcacacttttggctccactcaaatttgactcccttcttcaacagttcagtcattggcttggcaattctggagaaatccggaataaatcgtcgataataccctgccaaacccagaaaactccgaatctgctttactgtagtcgggggtttccaatccattacctcctgcaccttctcaggatcaactgatatcccatcctaagaaattgtgtgacccagaaatttaatctccctcagccagaactcacacttactcaacttagcgtacaactgatgatcacgcagtctctgaagtacagtatgc

SEQ ID NO: 5087 - DNA, 692 bp, Zea Mays
ccgcgtcgggagctccggcgtcgggaggaagggagtgtgtgtcgtgccgttgcgctaggggccaggccacgagtgccttcgtcatcgggttctccggccaccgctgcttgcgatagagaaggattggcgggtgtaattggttggagccgatagaattcctcgccgggcatcgacccatgctgcgaatctgctgtccgccgtgggcactcgtctgtgggtcatctctcgctctggtaagtcctttcttagattcgcggagtccgtagcgtcgtgtagccagcttgggttagggaagtactgtgcccaggcatcgattcgagtttcccagtgattgcgccgctgggcatgcgtgcgccgtcgttttggaccaccaaggttgggggagatgtgttggggtcgtgtgtccgtggatcgacggtggtgatcgagcggtcgtagtgttttggccgaaccaagaaatagtcattgattctcgatccatggggtaggattgaaggctggatatcgcttcaccctgatggattatgaccaaggatcctcgtgtggacggacccgatgcaatcttgtgctaatgaaattggaaccgaagattcccaatcgtgcggtcatcatctcctactggttcgggcttgtgccagatctaatctgggtcgtagcttttaaatccaacgactctcgttcatccatacccc

SEQ ID NO: 5088 - DNA, 4294 bp, Zea Mays
aaacccgacaacataaaacagatgcacagttgactgctagatccagaaatgagttcttaaggctgcccgtgagagcatgtgtcagagcattgccgtcaatgataagagcaaatgaagttgaagttcctttttgggaaatctttcctctagcatcttttaattttctatcaatttcctcaaatgtggcctgtatggtaagatacaaaggttacaaacgttattgtatacagctatacatagcatcaaccgatcttatacagcccacccgtttgccctaaacactactcagatgatctaatagtactgatacttattgacatttatgtgcatttcatgacaaaagaacatataggacttcactagcatttcaaaaattgtgtaaattctgcaattatttatacatacatgcaagtaagaaaatgtgtcgtcgtttctagattacatacaattttgtttccttctccactggacccctctgaagcacttgtacttgagttctccagtgtgataaaaatttcctccatctctttcctcagtaggttacaagcgtaactaaataccaatcatcaacatacattaaacattaaggtattgtaatctcagttttcagatatgtatcagcatatggaatggaactaaccctatgtttacagctgtctccaacttgtctccagttaaaatccagatcttaattccagcttgtgcaagtttataaatacactcagggacctgcaaggatagagttgatacaagcaatgatttgaccatgagttaaacaattgtttacattttgacacataaaaactgctaatttttcctcaaatatcaaaacaaggttacaaatgaaattatgtgacaaactacctaaaaataaagcatactatgtgacactatctaaaaatcatagaaattaagtgacagtcacccaataaatatattgtgcacaggaaaagagtaaatcagaaatagaaagaagtttgtctattcagaatttcagataaatataagactctttagaaaataagaaacgccaagtagatgtcaacgcaccccattttgcaatctatcctctacagcagtagcacccaaaagaaccaaatccttctcaatgtcttctgacaccttctcaacagctgcaacatgatcagtatgtacagaattcttggcagacgagtaatcctgattccatacaacatattgttcttcagtaagttcacaatatgcaagtgccagggtccggagacctgcctcagaatactcatcaatgtgacactttgttttggtcagatgagctgttccattatccttggagagcctttcgaatattacactggagcacagagatgaaaagataatgatacttatttgaacaggacttgaaggttgaaaattttagcatgtgatgtttacaactctgaagaaaggtacacttcagaatagctggaatagtttaaatatgttgcacaactttaaggctaacactatcatgatatagataattagatatgtacttataaacgggaaatgcagtgtcaaacatagaagattttcatcacatgtaaaaacaattattgaacctgtcagctcctttgcagaacagaaatagccgaccctcttctgtcctcacaataacagacatacgcttacgagcactgctgaattctaagatgttgagtagtttatatgttctgaaacaaaaatagcatcatgacgttggcaacgttgacacttttaaagaataatcactaagaacagtggaaatgataagcacctatcaacctttccaccaacgacaggatcgtactcatgcactgatatagttgtttgtgtcctatgataaaattcaaagccaaactctcttgcagctgtaacaagagctgcttcatcaggagactcagcttcataaggcataccagcagaatttccatctgccacaggaatcgcagtatggcaaacagctaagactcggaaaaacatttctatagcatccctagaacattctttggcccatcttccattcatcaaatgactatcagtgaaattaaatcccttgactgatctcttgaattcagtagtgtccttgcgcccaaaactgccattagtttcaactatttctccataacacgtttcaacttctgtaggcctacttccataagcaacaccagcaatggaacatttcaagaactccattgaattgcatgttaatgtccctgttttgtcagacagtatagtatggacttgaccaagttcttcattcaaatttgaagtgcgagctcttgcaggtttatcagactcggcgcaatacatattctggtcttgatttataaatgtgctctgtaaaaccttgacaatttctatcgatatatacaatgaaataggcaccaagcacacatacagcatcaggcttgtaagaaaatggcagaatgctgcaaacgatgcattgtttggatcaaagaatatatttgcttgatccggcctgaggtaccatgcatagcttcctggacttatctcatgctttgttctcattccaaacacaattgacccaaacgttgcaataacaaagagaatcacaaaaaggagatatattattttatccattcttcgttcaactgaactcctctttgatggtggctccattgcattttgcatcacctttgtatcatgtcccgtaaatattatggtgccatatatatacattgtattacgaagttttgaatcccttagcaggacctgttccggagacagagaatattgttgcccattgtagtatagtgttcctaagaaagaatacaatttctcattcggatcctcacaccgaatgaaagccttgaaactatggaaatggtcatcattcaagcccatagtcacctctaatgcctgtttccgcttcaagtttgtctcaccatcaagattcatcgtctccacatagcataatccatcacaagagctagacgaaaggaaaataagatcagcagggaagaactcatcctttttaactttaattatatcgccaactcgaagcttcttccattctgtctcatgaaatgattggatcccatcatacacctcaaccttcctattgttcacttctatgtcctatgtaaaagaagggcaaacaaattcagttcagtaaatattaaacaaaataatgtgtatatattgctgggaaattacttcaacacaatatgttttggttcaaatttcattaccacagcagaaatagcttaaatagatttatgttaattaaagaaaattttgtgtgggtatccaagagaaaaaggaaacacatttgctgaggccttatcaacacagcttgataagagataggattaccctaggtatttaaacgactatgttatggcgcaaatgttttaagacagtaagcgagtagtaagcacaactaaacgtacagttatctttctctcccctacattgtaaccacaagacaagcattctcattgcgctagagcagaaattaagtaattagcacaagcccttcgatcacaaacacagacaaagtacggccatccacaatcccaggcagctaaacatgccataatgacactatacagccaaatgataatacatttgcatgactgaaaaaaggcattaaattctctaactacccactagggatctggacactgcacgtttgagaatctcgtaaaataaaatgtcgcagagatgcactgcagctaataaactgccttgcaggtgcataaaattgttgtattgaggtgacaatcgtgccacatttcatatcaaaaccacccggtatctccgggcattagagcatgtacaatacaattaaatgaggtgtctcttaagaggtctctggtgggctaagctgtctctacacgactctatatatattgtgtcttttataatttaggaggataggattgtatcatgctcatgctgtctcttttccttggaaaaaccgaggagtttctggttgcacgtgcccttacgcaacaaatccaatgggccccatttgcctacccaataccgtcaagccaaccaatcggcctacggacgaggcatcagcatctgccagtcccaatgccttgctcgactcgaggaggtacagcatagcagagactgaagagcagtgcgctcacctgctgcttccggcgccagtcctcgacggcctccttggccatggcggcgctgacgacgacgacgagcgggagcaggacggagacggcgcggtagggcgcaagagggctgaaggagacgcaggcgacgacgaggaagaaacagttcgcggcgcggcggaactgctcgaagagcg

SEQ ID NO: 5089 - DNA, 545 bp, Zea Mays
cctggaaggttctgaacatgtagacaaaagagttcctcttcatgagaaggatctcccggtctatgtttgctttgagcagctccttgccactcacaccataccttgtggtggttagtgcggctgggtggcttttgctcttatcgaacggaacggcaagctcatttgctaaagctctccctgtgtgggatgacttgaatgcagtcgcaagttccttcacagacacaaacctgtagggctcatcaggtcgcgcccagtactgtttctgatcttttttcgaagtcacctgcccagcatttcaaaggagataagataacaagaactttatgcggttatgtatacttaaatatggtggcatggtacatacttcttgcaggaaatcagcgacacccttcctctcagggcatctgaaacctacagactcgaaaaactcaaccacttcttctctgggaccctgatagacaacctgaccatctgagaggagtatgatgtcatcgaacaagttataagtctcaggtgccggctgcagtagggagataacagctgtg

SEQ ID NO: 5090 - DNA, 1015 bp, Zea Mays
tttgactgccgcatgtgcttcagcttcagtgaatggcgcaattagcggctcagggtcaactctcggcaaggtgctgtacatcgcaaagacatcaaaatcccaaactggctctatgtttgctccaagcaaggcggaaaaatgattgtccagaatcaaggctttgtccacatggctcgtgcagcgaacaccatcaagctcgagcactctgatctgattctggcgcatccggtgtgaggcatacgcatggtgaaacttagtgttctcgtctgcctctttgacgactttgatttttccacgttgcttccagtacgcagcacgagctttgatcagctgcaagagcttttcacggcagtgagcacgtaggaccatctctcctgtagacagaagacgcctctcctcaagcaggtcaagcagttttataataaatttgcagttattgataaggagtggagtgtggttgtgtttggaccaaaccttagcgacacggcgggtgtcctttaacctagcgacaaatgcacccgtggcacaacctgcatggttagtaactgttgtccaaaccggttcaatgacagggaggaaggaggggttatggagccaagcattctcaaaacggaagcagcgagttttggggatagaggtgtctatggtgatttttagaggggtgtgatctgaggtggcgtgagagagggaggtgagggaggtgttgggtgcagtagactcaaattcaccattgaagaaagtatgatcaagtcgagccagaacaggagacgtacgtttgtttgaccaagtgaaaagccgatcaaggagtgggagctcgactagagataaatcatgaatggtactgttaaaagcgctcgctaaggagacatcaaagttatcattgtttttgtcagaggggtcgcgaataagattaaagtcacctgttatcatccagggaccagaaattgagttggcgagagagcgaagctcgtccaggaaggcagcagtgtagaggtggtcagcaggagcgtatacg

SEQ ID NO: 5091 - DNA, 685 bp, Zea Mays
cttctggatgaggtccatactgggcaatgcgggatacacgcagcatccacgaccctggttgggaaggtcttcaggtcgggtttctactggccaacagcaaagagtgatgcagccgagttagtccagaggtgcgaagcctgccagtacttatcaaaacagcagcatttacctgcacagcaactgcaaaccatacatgtaacctggtcgttcgcatgctggggactggatatgattggacccttcaagaaagctcaaggaggatacactcatgtactggttgctatcgacaaattcactaaatggatagagttcaaacccattgcctctctaacttcagctaaggcagtggaattcatacaagacataatattcaggtttggaataccaaatagcactataaccgacctgggatccaatttcacaagctcagagttttttgatttctgcgaacaaaaaagcattcagatcaaatatgcctcggtggcgcacccaagagccaacgggcaggtagaaagagccaacgggatgatattagaagcactcagaaaaaaagttttcgacaagaatgaaaagttcgcaggaaagtggattagagagttgtcgtacgtcgtttggagcctgagaactcaacctagccgagctctacatggaaacactcctttcttcatggtctatggttcggagg

SEQ ID NO: 5092 - DNA, 842 bp, Zea Mays
cgggagaaaagaagcgacgccacagatgactccgacttagcatccaacggcccacaacccttttcccacatccatgcaccgaagatcaacctttggcaacatttttttgggatattacactctaccccccttaaaaagaattcgtcctcgaattcatccactccaaacaaagcatccaaggtaccccatatagcaccaccattgcaaaacattggtccattattggtcttaattaacacaagaacttctacctcagactaaatgtctaaggaaactacaccacctgacatcaagcatgaaccaacatgtaatgaagctcaaaccaagtcatagatgcaatcaacactacgatttcacaacatcgaatttggatgcagccatacatctgcatcaatgtcttaaaacgacactcttttatgaaggggtaatatgcactaagcacaacctttaccaacttcaacaattcattttaatttaatggtgaaacatccacaccagatgaatgtataagaagatcaaacacctcacctcacagcaccacgaaacaagtagttctattgaaacaaaactcctaatcttcctaaaccttgttcttgccataatgaaaagataatcatgtaatctaacattctttgtaccccaccgaaagggagaaaatctacagaactaatggagcaataaaaccgacaagaagccaataacattctacgcggcacagttcatcgaagaaatgccaaaaactccacatagtgcactgatagcccaacgacaacacaatacttgcttaacccatgtcactatacttcatccaacaactcaactaagaaaaatatccaaactag

SEQ ID NO: 5093 - DNA, 634 bp, Zea Mays
ctctgacatggcccatggtccattggtcagcagtttctagaatcgcaaatggagtgtctaggtatgggacaagagcacaggtatcacattggaatcagttctgaataccaccagaggtaacaacaagttagggaggtaaagccaagatggccaaaaaggagaagcatacaggataaatcagagtatggatgtatgaagcaagtgcaaacgtaacaagtaaaccataacaattaaccaaagcacaggaaataacatggagcacgcagaacctgcgacatacctgatacgtagcagcgtatcggttgagcgagcacgtgggcagaagacgaagcacgctgcaaattcctgaagcaacaattgtaaataataagaacaagtaaatacataaacaataagaacacatagatgtaaaaaaagaaaacacggatagaaccaacaaaaggagggcaaaaaaatagacaaagcacaattatacagcaccaaaagcctgcattcaggtgacgccggcatcaaaagaaaatattcccaaccgtaggtaagcaaaggaagttaaactaaggcagcaccagtatgtggtaagggtctatgagaggaagcgaaggacacaaaatcaatctcagaatatataacctaa

SEQ ID NO: 5094 - DNA, 665 bp, Zea Mays
atgtccctatcgggtggtgcttaccaaagcaaaggaaacatcggggactcatcagtggtgcggaacactggcttgtcggcgacgacgtgcagcgtgcaggagcattggaactacggagtgcctgggtgtgtgaggagcgggggcacgcacagagctcagatcctcctacttaggttgtgtttggttgaagagcggacgagaatggagcggttacattactgtttttttaatgtttggtttccaacgaaagaggattggagcagctcctagagtctatatatggtaattatttatgatgcttccacttcactgaaactacttgatacgagcgttttcctcccctccacacatcattaaggaccgagggacatgggatggcaccgacaggcgggcccagcgtgacagcaaggtagaggacacgggtgagattgtgagaaggtggtttgggtgaggaggtgggtcgtagaccgatcaaggaggtaggtgagggttttttcttttctctttttgttttggtgtttaggcttaagttttaccaagtggttgattgttccatcccacatagatttggttggtagtcccacctgaggacaacgggtgtgtgtcctatgtatcccgacccaatcattcgaatagtttacattaacggtatattgagtttctat

SEQ ID NO: 5095 - DNA, 559 bp, Zea Mays
gccgcacgtggacgaggccctcgcaggcagactccggtcgggacggccgcaatcagcagcaggtgcacaacatcgccaaccaaaaccccgctggcgaggcccctcgccgtcgggagtatccccccagggtcgcggaaacggaactcgtggtcggggccagggacgcgcgcagcagccgcgcagattttactgcctgttccacggcgaagacagcgtccaccctacaagagactgcccagaaacgaaggccaccagagacaggatggcacgagcgcaaccagccgacaaccctagagttgtcgcgcacacatatcagcaaccccctcaaccatacaaccacgaccccgctccgcatccaccgcaccacgcataccaacaccaccaggaggtacaaatcgtacctcccccacccccacctccacaccagcaacagcaaaacgtccaccaccccaaccacccccaagccccaaagcaagaagacttcgccgatcagccgtatcgcggagtcattcatatgatcactggggggtccaacgccgacttcgacacaaagcggcag

SEQ ID NO: 5096 - DNA, 353 bp, Zea Mays
tgatgctagtgggattgggataggaggagtcactactagaaaaccccccttgtagctatgcttttttggacaataggcacgctttaattcgtctctatatgaatgtacgcacgctttccaaaaacgtgttagaagcgtcttcgtatggaccgtatcagactttgtagaaacgattgtcgtaagcgtatatattagatgaatagacgtttcatagacacgttagatgcatgtttagacacattgatacgcttttatagatgcacatataacatgtgtctattattgttgttacgtcatatagtaacgttttattatgtgtgaaaaaatatagatacgatattatagatacattc

SEQ ID NO: 5097 - DNA, 340 bp, Zea Mays
ccacaacctcttcacgaagttgcttcaccttgacgcaccctatgcgatgataccacatgctatttccaattctctctggaatcgcatcgtcgagttttaaggcctaaacctggtgaaacatgcgaactgtcaagttgcatggtttaactatcgaaacccccgcagatagcgtactccatacgcgtcactcacgtcctaaacatgtgtctcgctggttcgcaaccgcatcagtgacacgatccgctccaccatgtacttgcgcctgttggtgtccctaggtgtcagccaccacaggtagtcatctggcttctccaatccctcggtcaagacttaacgatcg

SEQ ID NO: 5098 - DNA, 386 bp, Zea Mays
cgggcgtcaaattccagaaaacacaggggcctcggggtaagttttccgtgacacagtgaatagtaacacatggacggcgggttgattcatgtgaagtgcggggtctctttagcaaatttacccggccgaaggggtacggtggtattctggccgtccgatcactcacgggcggtagggattagatctgcgcggtcgcgaagcggtacgcgcagagagccgttggatctccatctacggtccggatttaaaataactagacgcgctcgcaaccgacggatcgcagatctacggtcgcggatctattggacgaaggggtacgctacttctaatctcggccgttcaaccagagatcgacagtccaccgccctccttcaacccacggccac

SEQ ID NO: 5099 - DNA, 557 bp, Zea Mays
gagtttcccatggtacagtagcagaaataactcagatgcaatgcatctcaccgctggtgaccctccgccatgattaacgtcgatcgtcgtgattcgtgcgccgtgacttgcggataaccgtgggcaaggaaagatctcaactcggggaagggagagaggcttatcaccggactattcaccgtgacacttgctgcgcagtggatagtggtgtcctcgtcggagttcgccggtgattgtaaccgcgccacgtgcttagaaggtgtaccacgtcgtagtagatatccgtaggaggtcagttcgtcgtcggaggcattaccccggggagcgccacgatagtttacgccggtgactcacctctcctctcggccgcctttctcccctttcaaaattggacaccaccgcttagcgctcctataaattgttggccgggtctgttgcgccatgttatcatgaagccaaagcacccattcccgccttcaattagccaccatagccggagaatttccttcttccccccaattcggtcgactgcgccgctgtgaaccgccttatcgtgg

SEQ ID NO: 5100 - DNA, 446 bp, Zea Mays
cagaaagatgatgagaagatcaatgaaatccggctgctgatcttagatgggaaagtcaaggatttctgggaagacgcggaaggcatagtatggtttaaagataggttgtgtgttcctgacgtcaaatcgattcaggagctgatcctcaaggaagcccatgaaacaacttattccatacaccctggcaccgagaaaatgtaccaagacataaagaaaagattctagtgctatgggatgtaaaaagagattacagagtatgttgccctatgcgatagctatcagagaattaaggcagaacatcaaaggctcgtaggattgttggagtcgttgcagattcctcaatggaagtgggatgagattgggatgtactttataggcagtttgtctcgcactcgagtcggttatgactccatctgggtagtagtggactgcataacaaaggcggc

SEQ ID NO: 5101 - DNA, 945 bp, Zea Mays
tggttaacccactgcccagcttcagtatcctctgtgcccaggaaatctggtgcagcaagcacataagcctcatacccataaagggccttgaacagagaacatcccaatgaagagtgataggtagtattataccaaaactcagccatagccaaccaagacttccacttgtggggcgttgcgtgaacagcacaccttaagtacatttcaaggcactggttaaccctctcactctgcccatcagtttgtggatgataagctgtgctcaaagctagcttaatcttcagcatatcaaacaaatgtctccaaaatgcactggtgaacactttatccctgtcagacaccactgaattagggaccccatgtagcttaacgacattgtccaatatcacctgtgccaccatttgagcagagaatggatgtctcagaggtaaaaaatgggcatattttgaaaatctatccaccaccaccagtatagtatcatagccttctgactttggcaatttttcaatgaaatccatggtaatatccttccaggcccctgttggcaccagcaagggttgtaacaaaccagtaggcagctgtttttcacttttggcctgctgacacaccgaacactgtttgacaaaactctccacatcggggctatacccttgccaccaaaacattcgtttaaccctttgataagtagcggtaatacccgaatgcccaccaaccactgagtcatgaaaagcataaatgactttagttctaagagctgaattctgcccaatccaaatttgttgctgctttctaataactccttgatgcaaagagaaccttgcctcatcggggctatgcaccgcgagcttttgtagcaattgttgagcctgtgaatccgttacataggaattagtaacctcttggatccaaacaggttgcaactctgtaactgtggatatagccatc

SEQ ID NO: 5102 - DNA, 560 bp, Zea Mays
atttggatcatttgcgtgtagtttgcgatgctttgcgcgttgcatgcttatttggtaatttggaaaaatgcaacttctgcacaacacgtgtgtcatttcttgtctatgttgttactccgcagggcattgaggtggacagtagcaataatgaggccatccaatcctcgcccacgccgatgacagttacacaaatttggagtttccttgggcttgcatgattctaccgacattttgtgcgtgattttagctccattaccgccccgttgcatgagctcaccaagaagggcatccctttgtcctggggtacggcacaagtcgagacattcaccatcctaaaagataagttaacacatgccccattactatagctgcctgatttcaataagatgtttgaacttgaatgcgatgctagtggtattgagttgggcggtgtgttgcttcaagagggaaaaaccagtggcttactttagcgaaaaattaagcggtgctcatctgaattattcgacttatgataaagaactttacgccttggttcgcactctacaaacttggcagcatta

SEQ ID NO: 5103 - DNA, 401 bp, Zea Mays
gtcggtggccagctatacaagaaggggatcagtcaacccatgctaaaatgcgtcaccgagaccgaaggcattcagatcctacgcgaagtccatagcagaacttgcggctctaactcagggcccagggccctcgctgccaaggtaattcgtcaaggattttactggcacgctataatctgcgccgcgaatcgagtcacgaggtcgtgcgaagcttgccagaaattttctcctcgctcaggaaacccttcacaattcaccaagctgattgcccacacatggccacttcaacgctgggggctggatattgtcgggccactacctacggctcaagggaacctcaagttcaccttcgtcgccgtcgaatattttaccaagtggatcgaggccagggcagtatccac

SEQ ID NO: 5104 - DNA, 675 bp, Zea Mays
gatgagatcgaggagtaagacaatatatagctctttatcttcagttcatgttttgttatgctcagtggatgaatccatgtcttgccatgctattgttacagaaaccgagaaaatgattctttttggggggtttggatttagatttgtatcgttttttcatcttatttcaagcctgatttatctggttggttggacatatggggtgattggggtagtgtattgtagtgtgtctcagtgatggactcttacctatctgctccagctccatacttgcgctaaaactgaacatggactttgggaattggggcagcaccagctaattcaaattgttgcttaaaattatggaaatgatcactgattttaggaacaacaatgttggctgcatggggggcatgtccatttagaagaaatcattgatatagtggtacctcagagtagatagagtaaaccaatcattgtactccttccttcctcggacttgaaggtagcttcagcttggtttcctgttcctcggtgtcttctgaagaaacaagagaaacatgtttcagttgctggtcctactttcttgtcctgccagaataccctaattcacgctctgtcgatactatctccgcctgcctcaaggctggcatgttcagtatttgttcactccctgtatctacaacacgataatcg

SEQ ID NO: 5105 - DNA, 353 bp, Zea Mays
cttggtgccactcatgttgtacttgtcgcataagagggtactaactccaacaaatgtgtattactgaatgactgacaagttgatcaattgctaaacattagctctgatatcacctttctccgtagtttgacttcgacaaaaatatgctttattgactcatacgaaataaatggtaccaaatgcatgtttgtctatttgaattttggcgcatgtctcactattattttattgacacagaaacatgaggggtttgaatatacctaattttgtggttcttaaatccttaacatgtcacagctgagctagtttgggaaacaaaaaggtttgggttgaaggagctgccaagttatgtt

SEQ ID NO: 5106 - DNA, 341 bp, Zea Mays
ccgtggagccgtgaagcttctccaagcaagaaccgagacccagcctcaccgaaaacctgaatcaccctcgtcggacttcttccgctcaccgacgaccgtggaccgggtaagtcactgcgccattttccaattcctcgcgtagaccacctctgcgtcacttggtaaagctctccgagccaaccgattgaaccatcccgccgtgagcaggccggatcactcgccgccgatgaactcccccgcctatgcatgaggaccgaccaactccggccatctccgacgctgaaccgtacctcgacgtgaccgctgtaacctccccgacctccctggacacctcaccggag

SEQ ID NO: 5107 - DNA, 349 bp, Zea Mays
tggtggaggcaatggcacttgttgttgttgctgctgttgttgaagttgttgttgcagctgctgttgttgcgccctcctttcttggcgtatctcctctcgctcttggcgcaactcctgtcgtatatcttctctttcctgatgcatctcctggcgttcttgctgcatctgggcacgcatatcagccatagtgtccgccatttgctgcatcaccgccatctaagcagcaaccagtgggtcaactccgcctggtggaggattaggaggattcatctctgcaggctgtggctgaggttgtctatatatccttcgagtgtgtcggttaggaggcaaatcaattccaccacccctc

SEQ ID NO: 5108 - DNA, 703 bp, Zea Mays
ccgatacaccatgatctcggtcatactccttttggtgccttatctcattttcatgatgtcggtcacgcgaagcgctgatggtgcttcgtgtgtctcgtcgactattgatggcatgacacaggtcgtttgcaggatgagtgaggggtagaagatgattggctgcctgtgtaagcagccgctggtagccctccacgtctggagtttgcggaaggtcgtcggctatctacgccagcactcctccaacttcactcggtgtgttcatcactcgagcgaagtcggggtacaagtttcgagtgagaagagggttctctcgccagagtttagcatcttattcagctagttctcgctctcgctcctgagcctgtcggtggttgcggcggcgggagttgtttctttcttggtgtaatcgttcattgggagtttcccccacttccgaggcttcgccccgggacacaggttgtgccggatcccgttctccggcttcatgatggcaccgcacattttggcgtctgtttctttgtcgccaggcgtcacgctggtgatgttcctccccatgcatggtagctcatcgtcggagatgtgcgctgactccaacctcccctggatgaagaggacgtcagggtagaaaggagcgggtatggcggtgttcttcttcccatcctcttttgagggcagaggtatcgagaggatggctcagtgtgtt

SEQ ID NO: 5109 - DNA, 783 bp, Zea Mays
gttggaactcatcaaggactatgatttggaagtgcattaccatcctggcaaagccaacattgtggctgatgctttaagtcgaaaggcccagtgcaactgtgtgatcatggactctaagatcgccactctgtgtgacgagttatgcaaattgaacctagaagtcattccctcaggtaccttgagttatatttcagtggaacccaccttacatgagcaaatagttagggcacaagttggtgacaagggttttcaagtcattaaggaaatgatcgaatagaaggtggataaatacaaatgtttccgtctggacagcaaagggatcctatggtttggagaccgattggttgttcccaagaaccccgggctcagaaagaagatattggatgaagctcacctttccaaattttccatgcacaccggcagtaacaagatgtatcatgatcccagatctttgtactggtggaccagaatgaagagggaaattgctaagtatatatctgaatgcgacacttgccagagagtcaaggccagtcatttgaaggtggcaggcaccttacagccccttcccataccatcttggaaatgggaggatatttgcatggatttcattgtgggattgcccaatacctcccggcaccacgattccatttaggtcattgtggataggttgaccaaaacaacgcatttcttgccagtacataccacccaccgggcagaaaagtatgcagaaatctatattgaccagatagttcgtctgcatggaataccaaggactattgtgtc

SEQ ID NO: 5110 - DNA, 566 bp, Zea Mays
tggacattggggctacacggccgttaggaactgtagtttcaccgtgtatactcaatttgagaggagggggcggaggcagtgcgaatttgggcttggatcatcacactgggtggaggtgtgcataccccgccgtggatcatggtgctatttatagccacggcggcccggccagctatctacggccacagataacttcattagcgcatgcataccacgtagggaagaggcacagtgagggagatcgaggcatgggtgagaccgcggcaaaagttactgagtcacggtggccgccggtgactaactccggccacgctcgactgggttcgcgggattgcgccacgttcgaagttatccatccccagatcgattcactggatcgcatgagcccatccgattcaacagtggccctgatcttatcccctgtgttcttcagatatttcagtgctttggatcttcaggatttgtctgaactgaccaccttccaacctcttgatctcttgattcttgctaaggacagagcaaccttccttaacaaaatttattcactaaacattagtctacaaatt

SEQ ID NO: 5111 - DNA, 394 bp, Zea Mays
tgagtagcatgcgaggaagaagaagaaaaaggaagacgaacatggcggcctaactggcacgcatgacaaagatgctcatcatgtgatctagtacatggaatagtggcacgacgagcaagctgcatcagggcatcgcgtccggggtgaccaaggcgacgatgccaggtagtagaagacgtggtggcagcaaaaacaggagctgtgttaggcgacgaagacgaagaggaggtggcgtgcggaagccgaagcgtgtacagggggccggtgctgtcacatctgaggagggggcgccgagttgccgagtccttcactgtaagaccagaagagtcaaactcaacagaacaagaattatcagctgtaaaacggcgaatagaaagaagattgtggaccaaag

SEQ ID NO: 5112 - DNA, 715 bp, Zea Mays
cttatgggaccatctgtgtctatgacttgtaggcctaatggtaaaccagataagcccacaactaagagtgacaaaatagcaaatggctcaagcaactcataggtaggattaggtaaaaaaatctgagaccaaacattgaacccgatcggaccgagaccgaacccgattagactaaaatatctgttatcgatttcacattaggttcctagttgctacaaaccaatatttgtttcagttcttcggttatagacatcagttacctgattaaactgaacaatccaacattcaacctagtcggcccaatgcaccggcaccgaacagacggtaaacggtaaccctagattctcaacccaatccactgtctagtctctagccccaaggagtggcggcgagccagtgacgcaccgcactaccaagtcgtacatcacgccggcacccggcaagctacagactgttgtccgctagggcgctagatgtcgtcattcaccgaaggttgtccctccctcgttgtcgctggctcactgcatctgcagctcgtgacgcgccgacgcctcccgtgaacttcaacgaccgttggtcacctcgtctgtttccggtgcccccaagtctccaacaccaagtggccaaaccccactgcttgtcgtgctcccctcaccaatgatcaaatgtcccagcccacaacagaatattttgagtcttgcaatgtaagtatgac

SEQ ID NO: 5113 - DNA, 853 bp, Zea Mays
ggttagggaggcttcggcgatcacgtcattggtcgggttttggctagtggtggtcggagctgctcggtccccatgcgcaggcggtggcggctccgaattcctataaacgacgatggtagagttcaattcgaccacctggggagcttcatgggaggtcgaggatgctaataggaattgggtggcggtgtattgggtggttctggccatgttcaccggtgagcgagtgaggctcggcgagcgatggcatgtcgctgaatggaaatagagggtgaatgggctgaacgagaatcttcactatgacttagggaagctaacggtggagctcgcgtggtggaagggtggctgtaccggttggaccacgatggtcggcgctcgggtgacaagggcggtcggtggtgcgctcggctgcggtgaactcctagcgaagtgggcttggcactggtcggggaggaagagacaagggcgggtcattatttataggcgcgggcacacgtgattgcgtttcccgaccacgcgcagggcatgaacatgggcgctggttggcgcgcgtgctgacagacatctcccgtttggctgctgccagccgacgtcgaacacttggcacgtgttcgtttggccgtcttccctcgcgtattgtcgcttgtccaagcctgatctcaacaaaatcttcatctacgatgttgcttataccctaagcttgagatgttgtatgggagtcatcgggttttgttcaccgggctgagaagatttggtactgaagtgtgatctgtcctacagaccattatcgaggtaaaatccagggtttggtcatgtcacactccgagttccaatgctaccatttggtatgtgttag

SEQ ID NO: 5114 - DNA, 522 bp, Zea Mays
ggaaaaaagaaaaaatggcgctcggtcccctgggccgcttcttcttcctcctgctcctttctctctccttcggatggtggtcgtggtgatgctgcgcggatatctgctgctgggccgctttccccgcgtcatctccaggcccagggatacagtatcccgtctcgcgcgatggaacggcccctggttgcgcgttcttcttggattgggtggagcccgggggtgtcgccgctctctcctcttttgctcctccccacgcgtgagtcgtctccttcgctgccttctccgccagaaaacccttctcccaggttagggtttcctctggatttcgttggttcgtactcttttcctcattgcgacgccttcctctcgcacctctggtcgctcccggtttcggtgaggtctagttttggcgggggctggtgcgtctcgtcctttcgtccgccggtggttgaggaggagtggcctcgtctgggttctggcgattttcgaagcccctcgaaaatctctgctatggatccgaaa

SEQ ID NO: 5115 - DNA, 457 bp, Zea Mays
gtcatgatagcgcctcagagtttgctgatatcgggctgactgaatcaccgtattcaatcgttcttcttctagtacatcgacatcttccagcctagtagcctcagcttctgctatgttttcaaagattaaccttggtgccccgaacttgagatcatcaggtagcactgcttccgaaccatagaccataaagaaaggtgtgtttccatgcagagctcgactaggttgagttatcaggctccaaacaacatacgacagctctctgatccactttcctgcgaacttttcattcttgtcgaagactttctttctgagcgcttccaatatcatctcgttggctctttctacctgcccgttggctcttgggtgtgccaccgaggcatatttgatctgaatgctcttttgctcgcagaaatcaaagaattctgaacttgtgaagttggatcccaggtcggttatg

SEQ ID NO: 5116 - DNA, 385 bp, Zea Mays
taggaagatccttgacagagcaaccaagcgggtcaaattcaacagaacagttgttatcggtggtgaattgacgaacaaaaatcaaatccttaataagggatggtgagacaagaacattattaagggatagattatgtggaaggtgagcggtgtcagtggaagtgacaggaatgagatgaccattaccgacaacaatatgtgaaggaatataacgagaagaagaggtgtgagagatgataccggcgtcagaggtcatatggctggtggcaccaatgtcaaagtgccactcatgctgaacgggttgttgaagagcaacagtctggaagttggcggccagggcctactaatcccagaccggagtgggagcaggcgggccgacgtagcc

SEQ ID NO: 5117 - DNA, 483 bp, Zea Mays
gggcaagcagctcttccttcatggcatccttccactttggatcttgtttggcacacctccaatccttcggaatagatattgtttgtagagatgcaatgaaagttctatatgcaggagagacattagagtatgagacatacttaggaatgtcatgttcataacaataacgagaaggaggtttcccagcatttactctaggaactcttctttgcgcaagaggtaattcttcatgttcaggaatgggagaaatatggattggagagacattaccagctgggtctggagaggagtctgaagagagatatgggactagagcttcaacacatccaggttgtggttgctccccctgcttcttcgtctgctttcgatagtatactataggttgctccccctgtttgtcattcacctttgccccaatggaacaatcatgttgctccccctgtttctcattcagcttccctgccatagaacatgggattgacc

SEQ ID NO: 5118 - DNA, 2713 bp, Zea Mays
gagacccttgccaatggcgtcggttatcccctgaatggattcacaacgcaattccttttggtgatccgctatgaattgcaaccgagacgcctcgatcgtagaatatgcatcaaccgctagctggttgctcagcctgccgtagcaagtgaatgggttcggttcgttgagtctgtaatgggaacgatgtctaacaaattcaagcattgtaacatacttgcggcctgagacatcgcctcctcccacgtcagaatattttattccaaggtggtatccacgatcaccgtaagggaaaagaagcgggtactgtaaggccatgtaggatgggtgcaagcacgaaacatgtttgaggccaccctctctagcatgcacgagaacatcgtacttgaactgtgaaggtgagcaatcgcccactattatagcagcaacctcaccattggccggtaggttatattgtgcatcatgtcgtgtgttgcagcctaacaatcgtaacgtcaccttttggttgcctgcttcatctaaacgttctttagcaaagcgaaatgctgcgaccagactgttatgctcatctagcatgttaagcaataaacgggccacctctgggtctggacgatcatggacgtcagcctcattctcaaacatgcccaacctattttgtacctcgtgttcagtgtcatatatgtaaagctgtgcaaactgtggtcgcaatccatggctgggtagcagcgagccaatgcgatggtgtacgacaccattgattttgaaaacataaggtgctgtaccgttatttatcgatctatcaacgacggcacccagtgaggtaaacgcgaaaagggaattgtatgagcgaatttgcctaaggaaccttttggcacgattatcaccatcgaatcgcagcaggtcacttaagggaggcggcggacatttgtaaggctccaaaacaatcttacctcctctgcaacacaggttgtacacaagcctgcgctgcgtaattgtagaagcgcttttgacccgttcttgaaaccagaaaacagcgccacaatgtcggcactcgtctgatgggccaccatagtatgagcgatctttgtaggtctctacatgcaaagatgggtccaggatgcatggattacttgaggaatacgtagacaaaataatctaggcaggcggaacataagcacctttaagcaactcgacatacgatcgttgaagaggcggtgaggctgcatccgtgctaactataagcagcaagttggccataaaattcttagattttttgaacgcccatcagatatgaaagctaaagctgttttttgaaaaggtaggtggtagggaacagccattgctggcacctttttcagtagacgcaagcgtacaacgcatcttctgtctgcgatgttgtctgttagcagcggcaagcgacgcaggaaagtcgagtaaggaattgtcgcctgcaatcgacgtgcgcacacgtctcagtatgcgcatagagatgtagcagataaaggcagcagcaaaagccctagagccactaacctggtcgctttcgacgtaccggctatgagtggaatggaactgcataacgcgacgcatgtgccggcgccgaagtggatggccgatcaagtgtgttcatgtgtttgatagcagctgttcaaagacataacgaatgtttggttggctatgcgaaagggaaagagagagattggctttaattaaggccatattcaacccaaagaacgcataatatcagtatagactttgtgaaactgcaaaacgttgggtaacggggcctcgacgtcaacaccatatatggctaaccggtcactgccacatctccgcgaaaaactaacagggtcgtatggaagggaggatgccactgccacatctccgcgaaaaaggaggcagcaagcgcagcaataggaccaatgagaaagcagcaagcacgcaacaccatatatggctaactggtcactgcgcactgcgctatgcgaaccacatagaaacacaacaacagtactgctagctagatgtgcaaaacccatcagtaaggaaggctaacactttacaatgatcttcctcaatgggttttgggtatttattgtgttctgcctttgtaagtaaagctccaatttgggtgtgctatattaacaaattttataagaaacaaacaacaagttctatggagttttgttcatttaaagtgaggactggtggaacgactacctcaaccaactgaagttgattgagcctaactgaaccgacaccttaataaaaatcacagttctgttttcagttctgtgttcaggtgttttggaccaaaggcacctgtacaagacaactcaggttgaacaggacaaccaaccgaaccaagagatttctgcagggatgctcttagtatctcaagaataggctatgacacggaagacgataattgggcagatatttctcctcagcaagtaaacaaactggatattctttctctaggtttgcctaggctaaccacaggtagaaatttgtgcatgctttatttgttatgctcttattcttctttagatatagatacccagaatcatagatataggaatatatgatagcatatagattacttgatatgttttctagtttctaccctgttttctagagctaattctatcctttcttttttaactcaggaactgtctgatgatgatatatgggaaacagcttatgaggtccttcc

SEQ ID NO: 5119 - DNA, 336 bp, Zea Mays
cacttccccggtagcaggagcagaagggccggcatcctgattcaagcatgacactcgccgaagacgtctctttttctttttcttcccctcagtaggagaagttggatgattgattcggcgaggacgcttcgggcgaatactatcagatctctgaatgtccaaagtttttccagactctgggatgggtgctacagctagtgtttcaacagggaccgaatcagaggaatcctcagccaacatgtctagcatggcacttatttctatgtcactcggatttaaaggcatctcaaaatgaacctgcctctcgtcatcggggatttcaccaagcgaaataac

SEQ ID NO: 5120 - DNA, 390 bp, Zea Mays
ttgctatttaatatagtctctgtctttctggtttatggtctctgttaacagaagcttctagtagagttttgattcttgctcacagcctcgatcgtttccttttctccccaatcccaagagagctagctgctcctgctcctatccttcccctcctgcaaccgtggactaaaagttcagggttcatgtatttttttaagcagacgcataagggaatatagatatacaacttgcaacgttgtaccaatcacatcaaacaaccagataaaactaataaaggtagcgactagcgtatcgttatcagccagcctgacaattaatttgtagcctaatgaactgaatagttgcaatgagggcctgtaacctccacaccaggataacttgaagtttcaa

SEQ ID NO: 5121 - DNA, 431 bp, Zea Mays
cgcatgtccttgtggtaggggcactgggcgttgaggatttcatccagtgtctgtacaccttcgcgaggcgcaccacgggctcgagcgacgggtggtccggcggtgtgcaccttcttgcgaggcctcttctcccagcgcttgtcaggttgctggttcatgtcgcgtcgtggcacgggtggtgtaggtttcgtacctccgatgaggtcctggtcccgctcatctgcggtgatgcctctcgaaacagttgttcggaggtggtgggcgctttctgtagtatggctcggatgaaggccgagtcattggatccccggtagaaatcttcaatcaccgctgccttggcgactttggggatgcggttcctcatggtctgaaacctcttgaggtatgaccggagtgtttcatcgttctggcgcctgatggatttgaggtcc

SEQ ID NO: 5122 - DNA, 398 bp, Zea Mays
gggacactgcgcgagaatgttttcaatgacccatgccgcttcgtgcgcatttttcagtataaaagcggccgagggggtgagggaaaatcacatttactgcccttacctacttgctgccaaaatttgttgtgcctccaaagcatttcgttcaaaagcacttcgagagctagctttgacttagtaatatttagtgagagttccttacttcactcagatggcctttattggctccaccacatgactgattagtactacctcctaagaggcgcaacaagtcaccatgcctatttttgatgcaacgagggcctcatcatcgagagtggataaagaattgccaaaggacgggccttcgaagccaagcaacattgagattgggcgatctactctgaaggaaaagg

SEQ ID NO: 5123 - DNA, 457 bp, Zea Mays
ctggaccagagggaggaggtcatcacagagctccaggccaagctggatgccttcaacaaaatcctggaggagcagcgggctcaacagaccacggctgtggagagcctgcaaaggctgcagcgggagctggatgacagggccagcagcattgccctgaccgaggagaacctcaaggaaaaagatgcctccctggataagcgggcgacggatctcgcctggcaggagaaggacctcaccttcagggaggagatgtttgaaaggcgggagaagcagctggctgatcatgagctcgaggcggagcagaaggagaaggagctagaggagcgggtccgtcggttctaggcggcgtaggcggctccgggcccccaggtggtggaggcgctgaagaagacactttaagatctctaggcggagcagcgcgccggggtccagcgcatcgccgtatgggccagcgagg

SEQ ID NO: 5124 - DNA, 751 bp, Zea Mays
catgattcaatataattttggtcctaacaatattatttgttttacaatatcaaaataattacaattaaaaataaacgtgcaaccgtgaataatatggtgaaattaattgttttttgttgaatttaaagggaaaaaagaaaggtggtagttgagataaaaatgatattatatatttacggtggagcatgcatagagagataatatatttacggtggagcatgcatagtgaaattaattgttttttttgttgaatttaaaggaaaaaatgtggtagttggtaaaaatgatattatatatttatggtggagcatagagggataatatagaggtaagcacaacggaaagaggtgaatataggggatggaaacttaatgacgtggcgggatggtgagatataggacaagaaatttagaggatactgttgaacacagtcataaaactaacgcaatatcgtacatgctcccaaccagaggcggagcggctcctcctgtatgcataggcatggtgcgaccagctggtgggcgagctgacactgtcaccggacagaactgaggggatgtttgtttcaatttaaaatcgaattttcaatgtcagaatcggcttcttgcagttaaatattttgctttgtcatcctacttttgtgaaaatcgttttgatgaaaaacattcaaatcacgtgaacatagaaccccactgagtcgtcgcgataggatgaattcatcacttcctatatctttaaccttatgaatatc

SEQ ID NO: 5125 - DNA, 745 bp, Zea Mays
ctcacgaaggagttccatgccttcgacttctatgatacatttgagcatgggttggcttattcccttcttgtatagttgtacgtctatcacaacgaagtcacggcttctgtgtttcaaccttttggctttgctttggtcagatgggtgataatgaccttgaaggtataaggtgataggttcccgctagtcttcgatcattatcacatgtacgattcggtggccatcgaagtcttgtgttatatgtaggccttcggggtttcttacaactagtgtgccgattgtgtggaaaaacacgtcagatggcagtgggtcgccttttgctgctgctttcaccaacatgtgggcctcttcattcttgttccactctctgtgttgcaatgtaaatcctttgagttgcatgaggacaggctctttagcggtgcagtccttttcgatttggctggcgataatcttagaatcagtttttacgatgcatgttgtcaccctagggttgtagcttgtggagtccgaggatgacatcttcgtattctgctatattgttcgtgcaattgtctaattcaagtgcaaaatggaggcatgcgacaaatctgtatttgagacctgtgggcaatttgataaatgctgcagcaccggcgccctcatgacaccacacaacatcgagtggatggtccaaatagtctctacgtgaagctggtgtggctccaaaggtcctaccaatctactataaagtttgccaagacctggg

SEQ ID NO: 5126 - DNA, 687 bp, Zea Mays
aacaggtgccacagtgagattcacaagcgtgcagagccatgaaaacaatatgtgaattggacggtgtcttacccgagcgagctggccacgggcgagctgttcttggcggcacgacggaccgaattggggaaaattggtgattccctagctagggcagctaatcgggggtggaagcaggtgctattgcttggcaaatttagagacgaaggatggagctcggttgatttgaacggagagggtgaggatgtggtgaatttataggcgcagtgagccactgtcatggccatggtgataaccatcgccggtctttgctagcgatcaacggtggcgtcaagcgatatccattcttacgggcttgccatgtccccgccgcgacagtaacatggtcacatcggtgcggcatggatgaacggaggggagtggcgccgatgaccggatatggccggaatgatgagtggccgcgtggcagccggagttattgctctccaccgcggcgatcttacccagaacaaaaggatcttcgcgcggagaggcttaccgatcgatcatcccgaccccaacgcaaatcgcggcgcggattggtcgtcggcggtgaggttgtcgcgctggcagtctgatccacttcagttactgtaccatggcgtcccatttagacaacctgacagagcaagttcaggtcccattttc

SEQ ID NO: 5127 - DNA, 531 bp, Zea Mays
agcaggctagtagaagccttgacggatcaccttggttgctagggccctaggccccgcgtgagagccgcaagttccactgtggacttcgcgcaggatctggacgctttcggtctcggtgacgcatttaagcatgggttgactgacccccttcttgtaaagttgtccctcaatgaggacgaagtctcggcttcggtgtttgaggcgcttggcttcgttgatatcgcttggatggtaatatccctgcaggaacagggttattggtgcccgctagtcttcggtcatgatgaggttgactatgcggtggccctcggtgtcgttggttatttggaggccctctgggctgcggacggctggcgtgccgacgacatggtagaatacgtcagagggcagggcctcgcctctggcggctgccttggccaatgcgtcggcctcctcattcttggctcggtccacgtgctgcaaggtaaagcccttgaattgtctctcgagactgtggacagccgcgagatactgcataagtgcgggtccttt

SEQ ID NO: 5128 - DNA, 576 bp, Zea Mays
caaagttaaatggaactttcttcaaatgttagaaaaaggtttcaacaataaatggtgtgaatgggagatgaagacagtaatgggggacaaggttgctattcgaactaataatctaattggtccttacttctctacctataaaggggtgagacaatggaaccccctctcccctctccttttcaacttagtagctgacgaccttgttgttttagtaaaaaagttcaagttgaggggttgctcactaggttaattcctcacatagtagagagagggtggtgtgacttcattatgctgacgatacgattttccttcttcaagatgatctagaaatgcctagaaatttgaaactcaaccttatcctgtttgagcagatgtctggtttgaagatcatttttcacaaaagtgaagttttgttttgttttcgggaggctagaaacttcaaaaacctttacgctgacatttttacttgtcccataaaaatgctccctatgaaatatttgggtgtgccgatcgataagaaattgagtaggacccaatgggtatgcattgaagagagaaacttgaaaaaagattgag

SEQ ID NO: 5129 - DNA, 568 bp, Zea Mays
gtgaagacctgtgacgtcagtgttttagaaataacggctgagttatatcgagccacgtcggcgttttagcggtaactgccgagtgatgactgggcacttttagaattggtgcctggccctggaaaaccccatttgtaccgtgccgtcgcacacctctgctttctgagccctagccttactttccgcttccagacctcctctgcttccctttgatctcgcttccgctcagttcgccggcgggattgagatggcggccaagcgaaaaagccagaattccaccgtcgcgattattccgcccatcgatcccaacagtcaattgcctttcgtaggtaatcacatgtctgttgtttccgagtcagaccttcttcatcttgtctctgtcggagttcttcccccaaaagaggtttgctcttggcggatctgtcgtggggttaccgtcccgacggaggatacccacgagtccgttatttacgttccctttctcatccgcggccttgctcttccaatttctcctttctttcgtggtctccttgatttctaccatctaaatctgaatcatctgaatccc

SEQ ID NO: 5130 - DNA, 357 bp, Zea Mays
caagattcagcactgagctccagggcggggtccaaaaacttcctgaacttctctctgtcaagcatatttttccggaagatcgttacaagatgtgtttcatcctcgggtaatgagtcatcgagtactttccttcccgtaatcatctccattagtatcacaccgtatgcatacacatctacttttgtagtgacctttcctgtagctgtatacatatcaatggcacgtttgtcaatactacgccacaaaatggaacaaatcaaaaacatgacaatgcaaaaacatgggggggaacaactgttcacatacaattctcggcatttctttccaaaagaattaatgctgaaataacgaatttgt

SEQ ID NO: 5131 - DNA, 458 bp, Zea Mays
cccggcgaaccacgccggagtaacaccgacctaccccgccagtaagtaattcgtgctcagaatctcacagaaccaaattcgctcctacccgagttgactgggtgggttttatcccgggttgcggtcccggtgatctagtccgccacgcttcgtggctatggtacagtcacggcggtgccaagctgtccggctcactagatgtcgaaattctacacgacgatggactagggagtgcggggcggacacgagtaaggtgcgggttgctcaccgaattcgcgttgaggtggatgccggtttccgggcgggtggcgaagaaggacgtcgacagcgagaaattaacggaccgctgtaggtgctccttgccaacggatggttcctacacgtgtggcgggggcgtgcggagcagcaggccaattcgtcgtggccgataatccgaccaaggcctgattcaatggtgg

SEQ ID NO: 5132 - DNA, 320 bp, Zea Mays
gtttgttccactcgtcctgatttagtgtgtttgtaagaaactaagaaggctgctatttgtcgtcatatggtgatatctactctcagtgctgatttcgaagatttcatttttcttccagcaattggcacccgtgggggaattttgttggcttggagatgttcttgtcggatcatcaattctagaattgacactttctcggtttctgttcaatttaagcttgaagatgggtattcctggtggtttactggggtttatggaccacaaaccatggatatctgttgtagccgtggctcctctgagcgcctctgtcatgcttgtta

SEQ ID NO: 5133 - DNA, 372 bp, Zea Mays
caatgtactgtgaaaaggagaattgttgatgtaggtgcttctatcctactcggctgcatcagatggtcggcgtcaaccctagcagcaaggcggatgtagagcgtttccccatctccactagaagaagcatcagactgttgtttcacgttgtacagtttcccacgccttgccttgtcctagcatcagcgaccctgccttgccctagcacctagcaccggcgaccttgccgtgccgatgactaaaccctatcgagcagctagccggcgtcaaccctagcaaccagagcaacagtttgggatcatacctggcctggcgatcagcaagtgcgcgtctccctagcgaccgtggcgatccgcttcctggcgatgcgtc

SEQ ID NO: 5134 - DNA, 600 bp, Zea Mays
atcatctcgacctgccgggcaagactcatggaagcggcgagggtctccgggtagtggatgtggacggcgtggctcatcggaggtaggagaccgcccgtgtagagctgaacacgctgggcctccgctagtcgaccagcacggggcagtagggcctgaaatttgttggagtagtcctccactgtcccagtttggcggcactcggccaactcaaatagaggtgctgctcggaggggtggccggaaccgaagatttagcagctccttgaaccgcccccatggaggtgtgcccttgtcctcctgaagttggatgtaccacagctgggcgacatcctccaagttgtaagacgccatccaacgcgttcttccgccaaggtacgctgttggcgaaagtacgattcacacttgttgatgaagagcattgggtcggccttgccgtcgtagcgaggcagatccaatttctggaatttgggggggcgatcgaggtcacggggcccctcccggcacacccccccatctgcagccgcggatgaggacgatttctccttcagtgtcgccatctcggcctccatggtggacatcttcatggtgagagattgcagcg

SEQ ID NO: 5135 - DNA, 937 bp, Zea Mays
agggctagattgagcaatcggtcgccaccgtgagcttcgcaagcatgcagaggcatgaaaacaacgcatggattggccagtgacttaccagagcaagccggccacggagcgcagagctttgggttcgccggagacagagaaaggggaaaacggtgtcgcggcagctctgggcaaaattgggagatgggatcggggctatagggccataagaggctatgctttcaccgtgcgcaatcgatttgggagaaggtggagagggcagtgcgaattcgacttcgaattagtcactgtgttcgcgatgatcacacctcgccgtggctccatgtcctatatataggcacggtggcccggcgattggtctgcggccacgaggtgggctgttagtgcatgtctaccacgttagaacgaagcacagtaagagagatcgaagtatggcgacagcgcggcgaaccgcgctgagtcacagcgaccgccggtgagaaaactctggctgagctcgggagatggcgccacgtatgagtcaccctttccccggcgttatccatcctataccgtgcacgaatctggacggtgatcaacgacggcgagctgagctggcgttctgatccatccgaacactgtaccatggcacatcttcatcagtcgcctgaaccagccaccatcctccccaattatctctggattcttgttaagaacatagctatctctcttaatagaatttgttcactatacctcaatcttcaaccttgctataggattctgggatcgacaccgaacggattcaaagatacagtgcatctaaaatggcttcattctgctataaccatttctatttggagttcagtttcagttttctgaaacagttctgacagagcgactttgagtagatttttctccaatttttgtataacaacagcaggagatgtctgcatcaaag

SEQ ID NO: 5136 - DNA, 606 bp, Zea Mays
gaaggggatccagtgactttttgtgagaacacattatagcaaagttatagttggattatagcactacaactttgctatagatcactggttgtgttgccacttgaaaatcagagcaaaaaacggcttaagcttgctctgtcaggctgtctgaaatgagctctgatggtacagtagtcaaaatggatcaggatgccaacatcccgtgctcgccgccggtgaccctcccccgcgtaaggattcgcgccgccgcgttaagattaatgctcactggtaaccggataacgctgcggggtagaaagatcgtcgtcgccgtcgagctggaagccaccccgggcagccgcaatactcctccccttactcaccaccgtgaataaagctgctcaccgtcgtcgtgccctcgccattgtccatcgcgtgtcccaacctcaccatcacgtcgccgtggctctctctaaactccccgtcgaccaccggagttactgccacgccggtgaacacgtgttcgatgcgccagcgttcttcctcactcccaaccgccgtgtgtcccgtccaaaattcgcagccaccgcccgtcctccctataaattaagcccgtgaccagctctg

SEQ ID NO: 5137 - DNA, 836 bp, Zea Mays
ttggagcacaggtggagcgacattcaaagggacactacgaagttttgtgctgcgtacgacaaagtgataaggttgaagcaaagtggcaaaagcgaagacgacaaggtatacgaattcgtatccttttcaaacatgttagttaccatgtaaacaacggtgggtttaatcaatctaaacttacaggtaaaagatgcactacagatgtttgaaggcatgcacaagaatcagtttaggtttatgaactgttggtacatgcttcgccgagaggtcaaatggacgacctggctctcaagttgtgaaactccacataataatactgggaatgtcaacgtcaacgaaaccgggtcctaggcgaagcagggggaagacgaatttggttcaccgtctgatacctttgtgcgaccaatgggtagggaccgtgcaaagaaggctcgtagtaccagcacttcgagcaattcaactgcctgcatggcactgctggagaagttccaagaggatagagcaaggttcgaagaaaaggctacaaagtatgaagattaggccgcagcatctacagaagaggatcgaagggatatgaagatgtacagggacagaaagatccagctttctgagaacatgttcaaactccaccaactagagcgagatgatcgtataatgaatatgtacttggacaaggttgctccttatgcaagagactactatgtgtatatgcaaaaggacattttggcaaggcttcctccaccatcagacacatgaccttcaaaatgtgtggaaattgagctcagttgagcgtcatcgtcagttgtatgcaaacgatatgtttgttagtctgtcgt

SEQ ID NO: 5138 - DNA, 661 bp, Zea Mays
tgataacagcgctctctgctccccaatcctgtaatcatttggaacaaatccttgtgggatcttgttccctataggtggaatagatggcccgtatgccatactctgataatatggctgctgtaggttaaagttcattactgaatccccactcctctcattaacagtttggtttacatcattatgcgcagctgctccgttataactaggcgcatatgaaagattttctacatgcttaccctgcaatactccttgaacctgttgaactatagatcggatttgtctaggcatattattattcatatcttgcttaaactcggatctaaatgtgtcaaaagaattgcgcactccctcagaaatcatgtgtgttatttctgtgacatcagtcccatatttgctagctacagcggtatcaatcatgtgagctagttcttcacaagtgacagatgaacttaccttcttgttggacgtgcttgccccaccaatctgtttgatcacaccattcttggtttttcgaaagcaagacaatctctcgttccgtttctcctccatctctcgtgcgatttcttcttcaatctccttctggtccgcctctgtaaggtcctccatcgtgaccttgatcacgttcaagggatgaactttagatttgtccggcgccgccttc

SEQ ID NO: 5139 - DNA, 480 bp, Zea Mays
ctcagaaccaccagttcgactgttcacttctggcattgacaggggtggcgaggtggtatactgagaacgattgggctgctttgatgctgcttgttcaggccctttttgatggttagacttgatgtgtggtgtcaacaattcttcctgcaataaggcgagagaaacagcagtatccaaatccaaaggtcgatgaatgaaaacaacttgtttaatatctgaacgtaagccatctacgaaacgattaacaattgtcgagatactgaaaaggcggtcatgggctaaaatctgatgcatcaaagaatcaaactggtccacatactcagacacactatcaagctgtcgaatatggaagaattgacggataaggtggttgtgatgatccctctcaaaacgagcacacactgcagaacataattcttgccaggaaggggggcgagcagttggatcaaccgactgccaccaaaaggctgttgatcccac

SEQ ID NO: 5140 - DNA, 351 bp, Zea Mays
agcgagggcaccacacatcacattggttcaaccttcaggatgatacccatctccctatagttaaacaacattatcctcagctcttcaccctcaaaaagatttcgcaactccccctcacctacgctcaccccagccggcgaggccaacaattcccgcttgccagccctgtccacacgaagacgaccaccctcaacctcactcaacctacgcttcgccaccgccctttgccgcctacgcccagcactcggaccgggaacaacatccatcacacgcggagaagtctccaccgcagccacatccaatgccgcgaaataatccaaatcctcatccgaagactcctccgtccacacc

SEQ ID NO: 5141 - DNA, 476 bp, Zea Mays
gagctccggaggcagtcatcatggcttcatcttcgacctttgaatatgctccaagcagctcgtcgctagtcgcctctatggcatctagccagtcatcattcggttcatcaaattggctcctgtacctgaaggtatacttcatatacaccaaaccattttggctggagccagcggcagtctcctttggcatttcccatccatgagcaagtggccacactctgtaagcaatatgctcctgcaccaggtctcttgtgccaatgtaagtacacactgtattaaaagttgtttggcacgcttgcatgttgtttccaaccgcaatggtcggcctcctgatgtcgaagcgagaccatttaggtcgttgaatcaccccttttacatcttctcgctcactcaaatcaaccttcacataaaaccattcttgcatccaggagcctggccacttttttcgaaatgttggcacaggatagctggcctcg

SEQ ID NO: 5142 - DNA, 527 bp, Zea Mays
cgagatcctcgatgcccagtgtctgtaccataaggagatgcatcataccctgcgtaattgcggggacttaaagaactcagtcagccatggtcgaccattctaaccgttgtcgctgcccctccatgaagaaaaccagtcgtacaagaacaaccatcacaataggatgggggtggtggcgccgccttctagcgcattgacagggaggtcattgtcatctttggggaccatgggtcctaggagagaaaacagcaatagaagctcactgaccgataggtccctgtggcaacccatagtgccctgacgccgtatcggtggtcagagctctccatcacattcagtcgagctgaccagtggctcaactttgatcatcccagcaagtacccactacttgtcgaccctgtgatccaagagagccgggtcaagaaggttttggtggacgacggtagcagcaccaatgtcaccttccctagaatactccaggccttggggatcccgattgcagacctgattgagtcggataccgcatt

SEQ ID NO: 5143 - DNA, 757 bp, Zea Mays
ccagcttccctattaggtcatgaacaacatggcacgttgctatgtagctctagcattcttcaacccaaaagtcatgaccaaatattcgaacaatcctaccgagccgggtaccctgaatgtggttttgtgcacgtcttccgaggccatgaaaatttgattatacccagcattcccatccatgaagctcaagatcttgtggcaggcagctgcattgatcaacacttctgtgactggcatgggggattcatccttcggtgtggccctgttgaggtctctgaaatccaagcaaaccctccatcgaccatctttcttttaaacagacactacagtggaaatccattcggcatatcggcatggcctaatgaaccctgcctccaacatcttctttacctctttcttgacttcatgtagcacttcatctttcatcaaccgttctcattgctaaaaaggccgaaacccgttcttcagtgggagccaatgttctacaatgcccctatcaagccatggcttctccatgtaatcccaagcaaagcaacccgaatgttcctttagcagtcttatcatcggctcttgtaactatgggtctaacctcttgctgatgaatgtgggccgcgacttatccccagggccaatgtcaacttcttctagctcgtcagcagaggtgaacccatatcctagttttccatcgccctgcaaatcaacagtatacacgggcaagaagtaagactgaaaaaattcaggccaatcgcatggatcg

SEQ ID NO: 5144 - DNA, 852 bp, Zea Mays
ggagaagtgggttgatcggctcggcgagaacgtttcgggcgaacattgtcagacccctgagtgtccaaagctttgccggcctcagggatgggcgccaccaccagtttttcagcaggagcggcatcagaagaatcctcagctaacatatccagcatggcacttatctctgcgtcacttggattcaaaggcacctcaaaatgaacctgcctctcgtcgtcaggaatttctccgagtgaggcaaccaaagcactaacttcttcgggatagggtcgcactctaaggcccaaaccgctatcaccagcaggaggatttgacatgaaactggtaaaggcctgggaaggaggcagattccaggccgagtatgcaacatgagcgccgatgttcgacaccttgcctctgagtatcatctcgagccggctcaccaagtccacagcaggaattcttctgttatttaccagggttgaatcagccaagcctcggtacagataggctagatatgctctgtctttcagcggctgaatgttcttgaaaacaaagtcagcgaccacaacttctaccttcagacccctttctttcaaaaatccaacttctgctaacagagcccctgcctcagccacctcctggtctatgggggattcggtctagctcggagtgcgaacatccggctgtctccctgaccgtggggggagggaattcccatgattctccacgatgaaccattccaggcgccatcccttgatgttgtccttgagtgggatgtcgaggtagtcagtcttcctcccacgacgcatctccaagcttgcgccccccaccagctggtgctgccctccggccatcctaggccgacagtgg

SEQ ID NO: 5145 - DNA, 361 bp, Zea Mays
aaataatatgtgctcatgtcagttgtatgttcattgctcagtcttgctggtacacaaatcattgttcatattgtaatgccaacaacaaagcacgaattaccgtttatttggtcatgacaacccctttgtttgatgcatatcactttttttgtattatgcataagttactctgtttatgaactccacttagttaacatagaacccctttgtttgatacatcagtaaacattgcatgcaactaacgaacccttcacttattatgcagcttcaaatatttatttcattatttgacgtccacttcaactaactgaggttctaaatcctttttcgctttagttatttgtttataaagaacttgtta

SEQ ID NO: 5146 - DNA, 774 bp, Zea Mays
aaaaccaaccccatatcctctatagtcagattatgtaattgtgctccacctcttttaaggcatttagcttgatgccctggctcgtacttctctccacaaccaaaacataaaccatttagcctctgaaaatctctcagttgcctctccttagccaaatcagcagggccagttattgctctaggatctcctttcgctgtgttaaccatcactttgccccctaaataattcctctgaaatttggccttgttcatctccacaacttcttgatgtatctgcgccggaagtattgctcgatccagtgttcgaggtaattgtgccaacacatgtccctgcaattcccccttcaagcctttcacaaattgagaaacaaagaaagtttctcccaacccggggttgtgtaaagtattagtatacttggcctcttcaaaagcgtgaacgtactcctctaaactggacctctgtgtcagctgcaacaaacccctcattgcttgggaatcctcttctgccccaaacttttcctgaactgcttgagtaaactggacccaatttcccaatccttaactcctcttgtattctcgcacccaccgtgctgcatttccttccatgtgcagagaagctgaggacggccacaagagctcaggcacctgataaatatggtaatactccaagcacttatcgaaccaaatcttaggttcaacaccctaaaatttgggaaatgccatctttggcaaatctgaaggccgataatctctattccctccttgtggatcaatc

SEQ ID NO: 5147 - DNA, 676 bp, Zea Mays
ttgtgctgtgccatcagctcttgcatcgtgggaggttgtggtggcagcggaggaacttgctcgttctatccacggcgttgacgtccagccatctaaaatttaggaatccctgttgttatactcatggttcatatgtgcgaaataggattaaatgagtgagtagtaagattctcaaatttccagtttatcttgtattttatgactcgtgccaaaacaggggtggatcttggattacattttgaaacttaaaccattcattccacaaaagatgttcatctagggtttcatcatagttagaaggactcaactctctagcctagtacatcatgaggtgcaaaagctaagctattttgaggagtacaacttcctaacacttctactactaatcacaactgatcaacgagcaactgaggttgcactagactcaagtgacggggtccaccagagtgagctaagttggcggtgtccaagctagatgttggctctagctcctcggggtcctcctcctccttgatgtccccgtccacctccatgccctgctgcatttcttgatgatgcatctccatgtaggcatttgcctcatctagctcaatctgcaagtcgtggagctggttctccaggacttcaatggtgttgtcctggacctccacttgctccttgagctcgcgggtgcgag

SEQ ID NO: 5148 - DNA, 716 bp, Zea Mays
acaagatgtaaaacgagagaagcaataaacaacaaaaggaagctgtagacccaataaccaaagttcgaggcctttagatcatctatttgccactggagcaggagaagattccactacatcaaggacaaaacttgatcggggataggggcactacatgatttcaactgggccgacacagagttgaggacattctgcaagctcaaaagttagcgagggaacctatttgtcaacataaataatgcgaggcaaagatcagctcacttggagattagaaaggaataagggaaattccagagccggaggcatcgatgcactgtctgatgatggagtataggctgagacaatgttgagagcttcacttaggaggacctcagctccgatagcaggtggttggttcccagcatccgggtcactggcctctaaagtgaccggaccgacaagagcagtagaaggactcatcatcataggttcctcagattggaccggtggcgatccgacatgaacgtccatggaagcagccgaagaggaaccaagctcggcacccttgggggctgggtcatcctgagcaccaccctcgggggctgggttatcctcagcggcaccttcggaagctgaagcaccctcagtcgtacccacaggagctgggtgaccctggccgcaacgtcaagagccagtgtgttcttgcgagctagaccgccctccaaggttgaagaaga

SEQ ID NO: 5149 - DNA, 505 bp, Zea Mays
gtgcaacacttgtgtgcagcctggttagtgtgtctccctgttttatggggcctaattttagacgcgatgtagtgtttaccaatgaggttttcattttgcacactggtttctacacagctaataatttgcataatttactaaataggaactcggccatgaacaattaatttgagtgctactttaacccttctatcaagaaacataacgttttgagcagaaactaattatgtggtgagccctccctgtcctcgtgctaagcccagttatgtagccaaaagctgggattagatccactcagctaaccccgatcgttgtcatcagttttccccctctctccaaggcttcgagtcgagctgctaatgcggtgccctgtcctttctatcttcccctcaagtccatggccacgattcccctgacatatgattatgatggggggggggcaagaacgatcggcgttgatggtgcagtgcatgcaccatcaccttcatgaaacctaaatatagtt

SEQ ID NO: 5150 - DNA, 496 bp, Zea Mays
catagtgaacactatatatgtatacagtggaaggcatcgccatctggcacctgaacgtagaaattgtcaaaaaaaattgggtgtccgaacctcactaaggtaaagaagtgaaaccgaattacaaaccaattaacatattagttgatgacgagggaaaaaagcacacattgtcagaaccagtttacttatgaccataaacaatacacatatatttaatgtccagacagcacacataataaatctagcaacaatctatttgttttgtactcagtacgcccaatatgaacggtactgaaactcaccaaatggagcacatcacgcagctgccggtagaaaccccaaacccaagaccaattattggggtatcctttttcgtcagttcgttcattcatagatagtttgtggtccaattgaatatccatctactcattctgctagctatacttaaaaaaagaactgatctaggaacgaaacgaaaaaatggcagggagctgtt

SEQ ID NO: 5151 - DNA, 1173 bp, Zea Mays
gatttttctaacattttctataggttttcaaagttctactgaaaaagaaaaaggaaaaataggaacagtgctgggccgattctggttcaaacggcccatgacacagggaaaaatcgggcgcgcccacgcccgcggtggttgtttcgcgtaaaagcccttggggttttcactaactgggaaccggtctctttactgttacccagggtcactgacaacttacggataggtccttaaacttctatttcttcgcagatcaaggtccatgacgaggatcagccctcgccgcaccccgacgagccaattccgaccggccgccgccatggctggagcttccgggcgacaggaacaccattgaacctccaccgaacacttcccctaagttaattctaggaacggcacacagaaacgccctgaccatggtgaccgcgggtaaggcgaacgatcacaagcgttcatggtgatctaaggcaacctagttcaattgagcgggtcgacgagcatgatgagggcctagggatgctagaacaagtgacagagagccttggattaacctgagttaggctggccgcagtacgattgttttcacggtggccaagactgtaattggggaaacgaacgattctcggtcccaggtgaataattcggggcaaagtttggtgcactgatgcgtgattaccctacggagccgcggggacactcaatttatagtgagggtaagcggtggcgtctaatttttgtgcagagagaccgacggccgagacgaagggtgagtcatcggcgcggtctatcgtggcgcgccccggggtgattcctccggcgaggagctaaccttcacaggatgtccatggcgacgtggtaagacgctcggatacgtggcaatcgaccggcagtcagccaacgccggtgaccttatccacacaggccgcaattcatgggggcacgacggctggccaccggagttatccaaaggtgaagatttttccttgccttggagtattatccggttactggggagcgcgaatcataacggcgatgagggttcacggcgaggattcaccggtggtgaggttcactgaacctgacccgcccagggcactgtaccatggcgtatcttcatcagtcgcctgaaccagccaccatccaccccagttatctctggattcttgttaagaa

SEQ ID NO: 5152 - DNA, 558 bp, Zea Mays
ggacactgcaacatccatcaatttgaggtttatgtttgagctagagatcaatccagacctgcaggatctgtttagctgggtgcattcctgcttccgtacttgtccagatttcatcaagccatgtatcttctacctatcattttttccaagagaccacaacattcgacgaaggcgtctagtaaggcgttggatcgctgagggttactgcagggacagtgatgataaatctgcagaggagaatggggagttcttcttctccaaactcctcggtatgagcataatccaaccggagtccagtgacgcgaggatggtctcgtgtcaaatcaatggatttttccgtgagtgcatcctctcacggtcaggggaaatggaagaccttgtcattgaactggccgacagatgcaacctaaccacccaacgcagtgggcgtcatcttgtcatatcggaaagctgggacagagataagattttattcgagagcatcgacttctcacggctacggtcaatgacagtgtttggaatgtggaaatcattcttcatctccaaaagtatgaagct

SEQ ID NO: 5153 - DNA, 542 bp, Zea Mays
cacctcttaagctggttagagtcttgcacttttaatgtgggattaaccctattttacttactagcattattattgaaaacaatcctttcattggtaggacgtgaaactttggtgaagacagtcctttcagcgcacctatctaccatgtcactgttttctcaactaaaaatggttaatcaagaaaatcgatcaatattggagaagtttcttgtggaaaggcaaggagatagaaaatgttaatggtggtcgctgcttggtaagttggccaacagtatgtgcaccaaaagacttagggggactaggcatcttagaccttgagcagttcgctagggcactaaggctaagatggtattggtttaaatggaagcatagtgacaggccctgagcaaacatggatatcccttgcgacaaaagcgatagagacttatttcacacttccacgattgttactgctcgtattggcaacaaatccctcttcttgcattcaagttggttaaatggacaagccccaaaaacctagcacctcatgtctttagcaaatc

SEQ ID NO: 5154 - DNA, 563 bp, Zea Mays
gatatttatagctagcataccaaaactagtcatttgagactgggtggacaaacctggcctagataggttggaaacttggtctcgctaggtactcaaaccaactagcagttagcccaaaatttagcctagctgaccctaacctagcctagccgatatgccaactcgggctggccggttggtgctagggctacaatttgagtggtgttttacttcccctctctcaatcttgggtttctcttgagcaccattttgcttctctcaatcttggtatctagaacatctaagattaatagtatggtgctcgtgcgttgcaacgaaacacaaactattcgttaaatgtttattacctgtgcatatctatgttcttgaagcgtcatggtagactggttacctcatttaaactattgttccatgaaataagaacttgcaaaatatcagtcattaggtttgcaaagaagtgtcatttataaatatcagtcataagaacctgcgtctcccgcccgatggtggcctcgaacgagctgtgactgcatctcctgcccaaggttggcctcgggcgaggc

SEQ ID NO: 5155 - DNA, 473 bp, Zea Mays
cccatccacagttacaaaagcgatatgcttcctatcttgcctagacatctggatctgatggaaaccagagtaagcatctaggaaggacaggaggtcgcacccagaggtagaatccacgatttgatctattcgtggaagtgtatatgggtccttgggacaggccttattgaggttggtgtagtcgatgcacatccgaagcttcccgttagccttgagaacgatgactggattggccagccatactggatgatggacctcttcgatgaagccagcgcgcagcagcttccgtacctcctcacggatgaaatcctgtcgctcaatggactgtctccgaggcttctgactcaccggtttggcgtcagggtggatcttcatatggtgctcgatcacctccttggggatcctaggcatctgcgacggttcccatgcgaatacgtcggcatttgcctggaggaaggcgacgagcgcgattt

SEQ ID NO: 5156 - DNA, 894 bp, Zea Mays
agtccaagtgtggtcggtagtgttcatcgtccatcggggatcgtgctcggaccaactaatccaacctcaagacatccggcccggaggaatttctcaacggagagtggcggtcactgtgacccacacctcgtcgtggtcggagcctagtaccccgaaatttgtggtaagcgccatatctctcgtcttgatttcataccctcgtcgagtagagtcgattagaatagagggtagcttacacgtgtccccagtattgctcaccggagctttggttcgccgcagttccacttcgcatcgcgggaggcatggtagtcaccataatcctcacaaagtaactccctatcgtgttcgtcgttgcccacactttgtttcgcacagagcggatgccggggtaatgcaccagtcaacggagtaagcggggcgccgccgtggagacctccgccgctgtggtacaacgcgtgcgcgctgtcgccaggtagaagaaaacccactggccgttggatgcgcgatatggggctagatctttacttgtcgctcgttggatgaccgcttcgtgtgtccgttagatcaaaaatgggtggctcacatcgatttgagaccagcgctattaaggatcggtctattgaatctggaccgctggggggaagaagttgatcaggtccatcggtcctagattgggcagccaccagtggttgcatactcatgtgagttgagagataatcgggatcgtccagttgtaatcggtcggcccacatcgagcgataccccttcgcgattgcgctttatcatatgaacccttacaatttacagttatcaacccgcggttcgcagggctattctctgagtcttaggattttacccgcaacccccctgtctttcccagaaaatgaggcccag

SEQ ID NO: 5157 - DNA, 491 bp, Zea Mays
caggaggtcctgacaagatcgatggcaccactggagcgtgaagcggaggaggtggagcagactgaaccagaggtgctgagataccagaatgctgaagcataagagccatgaatgccctactctcagcccgatcctgaagtaactgctgctgaagagcatcctgcctgtcctgcatgctctgaaacatcaagagcatcgtctcggataaccgtgcctgctcggctgccaggttggctagaatcgtcgcaagagcagggtccatagccggaggaggagcaggggcagcacgagaactcccagcctcatgatcatgtgagcgtggaggcataggaggcggaggcggaggaggaaccccaaaatcatcatcatcatcatcatcatcagctgttgtaccctgagtgtcaaactgtcgaagagctgcatcctcgacctgagactcaaacacagaagcagaagctggcactggaatctcaggagtaggacgataagat

SEQ ID NO: 5158 - DNA, 436 bp, Zea Mays
tgtttgtccactttattatgtaggatagaagatacctttaaagcatagattggtttgggcaagaaaggatagggtaaggaaatactccatccaagattgtggatcttgattcctttgaagatctggcttgaatcttatccttccttgatttgatgaggtcgatcgccttcaatcttcgttctcgaagttgttatccgaatttgggacatgtagtgaaggcagatttttaggtaaacaaaataggttaataggtggttatgagttaaataagtttaagcaaagtctgtctcgttgttttgcttttagattggttggataagttatgtaacctattatatcggtcaagttgggtgttatcatcaaggataatgggtattggtgttaccataactagggacatagttgagataggtgtgggtacctgggctaggtagat

SEQ ID NO: 5159 - DNA, 1114 bp, Zea Mays
gaactgggaaggaatagagaaaagataggatgtgcccccagacggatcctccgtaatgagcaagggacccgaggacccgccccacagaaaaagaggctcgtcgtaatctccgttgtcaacaaggagcatgagatagctcactcttcctctttcggtgaacagaatgcatgggaagggacaatgcaccctcccaaggcgaacccataatcaatagaaagaaatccaagcaacaccgtggctaaaccctgctacccacgatctaacacttcctattacctcagagacgtgagggacgccgaaaattagggatggctgccttagcgcaaggtaggacagaagcttgtaaaaccgcttctcggggtcgatgaggcatgccaaatctgcttggtgcgtgatcggagagtaagagaggccccaaaataagtatgccaaaagtcatttcctatgctaagtaccaagaaaaacggggaggtaaccattttcacttattccatagggaacattacaaaagcattaaggccgacacgcccgggccgtcccacgactaaagccacctacaaacgcttcctaactagggagatccattgactacattcgttagcgggatgatgttgacatgcccaggccgtccgcccgtcccatggctaaagctagtgccaagctcgtagcccgaccggaacttcagaaagctagggctctagcagcaccacgatgaaccaccaattgcacccgattaatgatgtctaggaggcgctctccttgatcggcgccctaggcccgaacaaagtcaaccacctcgtacacaccctcacgaaggtcagcaagctccagctctaactctaaaagtggcacaagacaatcagagagagagaggagtgagacaaatagaaatggagtcctccctgataccacctacccacgatgcgacagtctgcctcctctaggcgagcacggagactatccacctcaccatgagcatccttgagcacagtgttggtggcgaccaatctctcctgaaggtccaaggaggtctgtaacgaaagagttggcatcccgcccaggctgaaggacatccaaagtctttcccctgtcccgtcgagatcacttggctgag

SEQ ID NO: 5160 - DNA, 633 bp, Zea Mays
gccgcggcgctgttccggacgatcatcggcggcatgtgcctcgccgggatcatcatttctccctctcagaacctctcgaaccctaattcctgccgcctcagtagcttctttccatttgttcactggcacatgcgtagtatctatctcccgcctcacggacaaagaacaggcggcgccaatcctattcctatatggagatgtataccttgcctgccaagtaacaacacgaccaacaacagatctagcgatcgacaaggtagcccagacaaccttcgctgcgagctgacgactggcagtgagatctagcagaagagctacatatgttcgtgtgcctatgcaaaaatagaactccgatcgatctctggctgcatgcagctctcaaggcgtgcgtgcagcaaaaactttgcaagctcagaagggtagctagcaggaggtggcgagataagccgggaggagactagcttgagaagctataggcggccatggaaggggaggcgaggaggaggaggaagaggaggagaggaaaggggaacgggcggaggtggaagagaatgtggagaagggaggaaggagttattgcgaacgagttgaggtggtgcaatccacatttatgagagggcgtatcgtaattgc

SEQ ID NO: 5161 - DNA, 883 bp, Zea Mays
aggaaaatcctgatcaccaatatcaggaagaggaagcttaagcagattcaaatgccttgccttattaataatgctctgaagaagatcagccgccaagacaaacaaaagtggtgaaagaggatcgccttgtcgaactcctcgtttgcagtgaaaggatttaccagggactccattgagtaacaccgaagaagtgcctgagtgaagaatgctccggacccagttaatccacttagacccaaaacctttatacgttagaacctgcagaatcagttcgtgctctaaagtgtcaaaagccttttcgaagtctagtttgagaacaatgatttccttctttgatgaatgacaaaggtggatgtactcataggcccaagccaagcgatcctgaattgttcttccttttatgaaaccatattggttcttgtgaaccaaccaagtcatgaatgattgcaatcggttcgccaaaagcttcgttaaaattttcatactgttgtttagtaacgaaattggcctatagtctcccaccttttgcggattttccttcttcgggatcaaaacaatgaatgatccattaatacttcttaggcaaacttcttcttgataaaacttttcacacagatcatagaagtcttgggcaatgatgtgccagcactttttaataaaattggtattgaaaccatcaggaccaggggttatccgaaggaagtgctttgacaatgttgtcaatctccagcttagagaaaggggaatctaattcatgaagatcttcatttctgattaaaagctctaacaaatcaaaatcaataccaataaaatcagacgatcccagtctgttcttgaaagcttcccagagaagatttgatttgtgctcatgctcaaaatgtat

SEQ ID NO: 5162 - DNA, 928 bp, Zea Mays
tgatccaagcctcccaagtagcgattggatggagcctccaggaacaaattccagtagaatatttagcgtgttttcctcccatgtcatcccaatatacctctgatcaaacaacacaacctagatcaaacaccacaaccaaaaaaagaggataacaatgttgaaatgacagtgtacttacaacaatatcaggctaggagaagttcctcgagctatgttacatgtgcctagtaaaaagactcccgtgtaagaaatttagagtggaatgaatgaatagatacatagataaactgagtcagcgagaaaacaacacaagatccatcaaatcaccagactcgagatgtaagactaacctgtttgacaacgaggatctcactggactcgaggtccatgccgaggtagacatgcctgaatgctccactcgtgatgaggtcgcctacggtccctaacacattcgtcggaagccaagatcgtggccaagggcgagggcggttgcggcatgatgcaacacgtgggtgacgtgcccgagtctgctccctgttgcccccagcaccacccgcagtgacagaggaggagagcaatgtggcgagcttgttgagggctagggcgtccgcatggaaggagatggagcggcgcacggagtagaatcctaatcctcgaggtgtcgacgacgaagtagcgcgaggcggcgtggcacacgacgataacagtcgcagagaggagcacaatcccaatgtcgtctaaatcattgctgagaggaccttgatgcttcacttatggcgacgcgtgatgagctggacctgactggcgacgtgatcgaaggtaacctgggcaccggccgcgtcgagcttggtcttgagctcatggatctcccacaccttgcgcaggtcacacacctccatcgctcccatcgccgaatcaccgacacacg

SEQ ID NO: 5163 - DNA, 721 bp, Zea Mays
gtcagtgtttcagcaggggctgcatcagaggaatcttcagccaacatgtccaacatggcacttatctctgcatcacttggattcaaaggtacctcgaaatgaacctgcttctcatcatcagggatttcgccaagtgaggcaaccaaagcatcaacctcttcggaagaaggtcgcactctaaggcctaaaccgctatcaccagcaggaggatttgacacaaaactgataaaggccttggaaggaggcaggttccagactgagtatgcaacaggagcgccgatgttcgacaccttgcctctaagtatcatctcgagccggctcaccaaatccacagcaggaatccttctgttggtaacccgggttgaatcagcgaggcctcgatacagataagctgggtatgctctgtcttttagtggctgaatgttcttgaaaatgaaatcagcgaccacagcctctacagtcagacccctctctttcaacaatccaacctcagcaagcagagcccctgccttagccacctccaggtctgtgggggattcggtccaactcggagtgcgaacatctggctgtctccctgaccgcggggggagggaatttccgtgattctccacgataaaccattccaggcgccatcctttgatgttgtccttgagtgggatgtcgaggtagtcggtcttcctcccacggcgcatctccaaactcgcaccccccacaagctggt

SEQ ID NO: 5164 - DNA, 526 bp, Zea Mays
gccagaacaagaaaagctgaattacctgaagattagagaagaatgacggaaatcccaagtcacgagaagctaggtggtggctcgatgaaggaatatcaactggggcaatttgaagaacatcaccagggatcaattcaacaccactaacaggcatcagaactccagcatccggtgcgccgacctctaaggcgactccctcacttgaagcaggcgctgctagtacaccactagagtgtggtggagaagacccaacgtggacatccatggaggtatgagaaggggagcccgctcggacacccttgggggctgggttgcagcccgtactgcccatcagagccggatcaccaccggcaacaccctcgggggctgggttgcagcttgtgctacccactcgagccggatcattaccggcaacacccttgggggttgggtaaccgctggaaccacccttgagaactgagttctctacaacagccacctctaaggctgaagaattctcagtcacctccatggaaattgaacaacc

SEQ ID NO: 5165 - DNA, 1004 bp, Zea Mays
ctggctctttctcccgcttttggtccttctgccatgctaacgtctgaagcctgtggatcagctttatcttcaggcgtgacgactttcgtctcgatagacgctaaaggcccagcttcggccacatcttggactttggtagcttcaacaattttcttagaagcagggctcaaggtcttcgtagtctctatgcgctggccatccccctcctctcgggggttgcaataggagctctatgcatcttcgacaaatctgccactgccggtgggctcaggatttctggcatttctatcactttttccacctgtggctcttcggcctcatcatctttagctttggctgacccaactgtaggcaccttcggcactatagttggctcttcagcgctctgcacaatcggaacaatttcttttgcttcggcagctgaagaggtccctttgccaaattcaggtatcatggccggttcaatataacgcggtcggtaggtcagaaccttcatcttcttgccctttgactcagcgggtagtgataatcagggtatacaaagccaatagcatcaaataccctgttcaatctcttcttgccccaaccccgaaagttgcggacagagcattgtcttcggccttggagtatgccccaactagctcatcgctagtagcttcaatacacttcagccagtcatcgtttggctcatcaaacttctccctaaatctgaaggtatacttcaatcggaccagaccaccctcactggagtcggcggtggtttccttcggcatatcccagctctccacaagtggccataccctgaaggctatgtgctcttgaattaaatctctcatgccaataaaggagcacacagtgctaaaggccttctgacactcttcaacaccgctatcaatattcaccttcggccttcggaggccaaagcgggaccagatggggcactggataacttccttgatatcttctctcttctttaaatcattcttaacgtaaaaccactcctc

SEQ ID NO: 5166 - DNA, 589 bp, Zea Mays
gtttctggaaccgaacctgcttgaatgcgagtttgttgccgggatatgtgttgtgccgaagcttcaggcaccgtagcatgtgcaaattggcgagggccaccaggtcgtcctgcgtgagcaaggtgttactcagagttaacttgatcagtggagtgctcttgtcggtcagctctgacggaagaatccgcttcggtgttatgtgtacgtctccactgatgctgaggctctcaagaaccttgggatgctctttcatgatcttcttctcatcgcggcccgtggaagagccttccagctctcttcgacctctgatggtactgaaagtccccttgtggctggtggtggcgtcaagagtaatcgatagagaccggaggcactcatgcaggttagtgacagccttaagcagtgtgtccttgtccttgacattgataaccaccccgagctttctcagctgccatagccttccgatgccttccaagtctttgtcactcttcaccctgacattggatagcacctccatgtctgacattttgtcgatcttcccaggaaccaggacatggccgtgggtgcgtggacttggatttctgtttcc

SEQ ID NO: 5167 - DNA, 381 bp, Zea Mays
agtccggcgtggttgttggaccggacgtgcccattcgggggaagcggaagccgggccgggaagagcaggagcagtgtagcagcctcaccacagagcacacgtactggcacagccacagtggtttggtttcatctcacgtcgtgttcaccttctccacatccgatgggaatggtgctgcatcctcacccaagtgtgctgcttccggcaaacagtacagacgggaacatctgcatcattgacatcggcaaacactagccagtcaactttaataatatggagtatgtatactaatctattaaaaacataatgtaggcatttggtgctactatgctgcatcctcccccgtgacactctggactcaccccacgcgtcccacctgat

SEQ ID NO: 5168 - DNA, 761 bp, Zea Mays
ctgcggtctggacccgcgcagccagtgggatcgtggtgtcatcggcgcgaggtcaggacctacgccggtgggctagtgttttgagcagtccagtggaggcccacgcactgttgcgtgcggcaccgtgtgcggaacccatccagtagggtggccgtcgtagacctatctatgctcgtcgaaagttgggaagcaaatgccactacgtacggacgtgccgctaatgtttgttgcgagcatcgagattcgagaggcgcacgtttgaatcgttctcatacctctatacgtacgggcctggacgaaacggaactgcattgagccattgacagcgacccccactgcaagcagtcgccgttgcccgttggcaacacggccattgatggatggatccgtgatcgtttgtttatctatcacgccgtacgctcgactcgatggtgatctgtattgttttcgctcggtcgggtgctgcggtatgatcgcgtcgtacggacgggactggaggacacgagagcgaggcgatatccaatcagcaagcgaaacgtctttcgtccctctgggcaatatccgggcgaaggggggcaccagtatagtatccactcctgacagccacaccccctgtcctttgcgcactaatctcatcggcggcgtcgcgcacgaggtgtcctagtgtcctaggccgcctcggccccacaacgtcagtggcatccgtcccactcccacgttctccggtactaatcccgcccagaacgggtcaccgggtctac

SEQ ID NO: 5169 - DNA, 1039 bp, Zea Mays
ctggagccacgcatggttgtgcgggagacgatgaagccatgcatggttgcaggagacgacagagccatgcatggcagtgcgggagactccagagccacacttggtagcacgagagactctagtactcatcgcagcgcaggggatgctggatctacatgagggggcacgtgcgacgctagagccgtgcatggttgtgcgggagacgacaaagccatgcatggtggcgtgggaatgacattatcgtatggtagcgcatgagactctagggtcggtgggggtagcatagggggcatcagggatgtgtgtagcgtggtgggggaccaaccatgggtgcaatagggggcaccatagagtcagcctcgagaatggtgttcaacttaagagggagaggcagtggaaggagaggtagagaaagggaagtcggactcgtcgaagatgacgtgacaggagataaggactctatgtgtggagaggtcgaggcacttgtatcccttgtgatcagggagtacaaaaaagacacaaacaagtggagtggggtggaagctttgtgggggcactggtagagataatatgatagcaggcgcacttgaacacacgaagatggttgtaagaaggagaggtaccaaagattgcaaagaagggggtagggtgatgaaccgccttggtaatgaagcgattgagtagataggtggcatttgtcagcccctcagtttagtactaagtaacaagggaggcctgaaacaaccgagagtgtatgacattattcgtggtgtgaatcatacgctcagccctaccattctaagaagaagtgtaggagcccgatatctgtagatggacaccgtgagaaagggagaagtcatgggacacggagttatcaagcttatgtctattgtcaaaccggacactccggatggtgcgaccaaactgagtggaaacccaagcaaataagtgaaagagcgtaggaaatgtattcgcaccagggaatgagcatgtaatatttatagctagaaatgttgagaacaagggatgtacaaacatc

SEQ ID NO: 5170 - DNA, 678 bp, Zea Mays
gctaggtgatgttcggccggcgacaggtacaagcacagtgagaagggcgttctgctctaggttcgggatgcacgaagaagacatcacggtggtgcagcattacccagaggatttcttcatcaacttcgagcaccagcaccaccgtgacgcggcggtggcatgacgcgatttcacctacgacaacattgacattcgggttaggccatggcagctccctattcacggtgaccgcatcaacttcgactaccatgttcgtctctgcctcgaaggcattccctctacatgcgtggaacgagggcatcaccaagcgggcggtggctaagagctgcgtgctagactacgtcgagtctcagtcactgcgaaaggaggacacaaggacactcaacctctgggcgtggacgcggaacccttcagacatcccaaaggtaacttggctaaccattgttggcaggaacatcattgtccacaatgtgccaccggcgggacaaagtggcttaaccttcagggtcatcgtccaccttgaccttgtggagggttccccgggcaacgagggtcaaggaagtacacatgtgttcgactggaggcttggagttgttgatggcaagagtgctccacgcgacaggcacgacccttcacctcgacgcaacgatcatcaccgggacgacggcgacaacgacc

SEQ ID NO: 5171 - DNA, 727 bp, Zea Mays
gagaccttaagggtgtacaacgggtcaaagggtgcttagcctcccttagccgcttcatttcgtgcctcagagagcgggtattaccactctataagttgctgcaaaagaccgactacttcgagtggacagcggaggcatagacgacccttgacagtctcaaggaactcttgatcaaaggtaccgttctcgtcccaccggagggtggagagctgctcttgctctacatagcgaccaccgcctaggtggtcaatttggtactcgtcatcaaaagacagggaaggatgcgcacgcccgctccagtgccccatctacttcataaacaaggtcttgacccgcgcaaaggtccgataccctcaaaggtctgataccctcagatgcaaaagcttttgtaagccatcctcatcaataagtggaagctaaaacactacttttaatcgcacctcatcaccatcgtaacaacgtttcccctaggggaggtgatccataacccagaggctgctgagagaatcgctaaatgggccctcgagctaatggggtagaggatttcatatgctctgtgaacgacgttcaagtcgcaagtcctcgccgacttcgtcgtggaatggatcgagacctagatggaggcgacgtcggtgaacgacagatcatgggtcatgtactttgatggctcgctaatgaaagtgggggacgatgtcggtctagtctttgtctctccctcaggagaaca

SEQ ID NO: 5172 - DNA, 405 bp, Zea Mays
gggtaagtgattgatagggatgaggttggtgagggagagaatttctctggcggttgttgaagcatggcggctatggtgacggctcacaacgaccgcggtgagagaatcttctggcgacgtaggcctgcctggcggtgacacagtattgtgatgcgtgaagaagtaagcgactgacacgtggctagttgaaacatggcggctatggtgacgtctcgcaacgaccatagtgagagaatcttttggcgacgtaggcctgcctgatggtgacacagttttgtgatgcgtgaataagtaagcggctgacgcgtgactcgcccggctaatggcacaaggcgagagactgcacgggggatggctaattgggttggcggggatggctaattgggctagggtgagggaataggc

SEQ ID NO: 5173 - DNA, 699 bp, Zea Mays
tttacgttaccatccgcgaaccaaacagcacctaagtggctacacttcacctgagctgaagacatcttaaattttattttgagccccttacatccttctggcatgccttattcaagcaagtccgaggtcgaattttcgtctacactgcttggaccactagttaaactggtccgatgcctatttccaccggttgacttcaagtttcaccgctcagattgcttcaaggcggcgttgctcaaattaatgatacaaggcgctcggggactagctgtgggggatatacccctgggtacccacggctatagacatgggttgcaccaccagaggaggcccaccccatgacatcaaggcttgcggcacaaggcactagtctgcgtgcaccgcaagacatctagattacttaccatataactgattaggatacttttcttgtaaccctacccctctagagtatataaggagggactggggtcccctaggcggcaacatctctcatgatctctcatgaatacaatacatcggaacacaggatgtaggtattacgtcatactgacggccgaacttgtctaaatcttatgtctcgatgctctttgtgttatgtctggatcgcctcaagcgcacctctaccgattcatctactaccgcggacatacccctcggtagactatcgacaataaaccatcgacaacgaccccccgt

SEQ ID NO: 5174 - DNA, 418 bp, Zea Mays
cttccgaccgccgtgtgtctcgtccaaaattcgtggccaccgctcgctccgcctataaattgagccctcccctagctgcgtaacatcatcacccacccagcaactaacaaccgtgcctccgagagcttgaattttggtttctccccaaattcagtttccgccacccgaaaccgacctcatcgcggccagctcccttcccggtcagtccaaccctccctctcccttgtttaagctttctcacatgtctacgatgcttgctgactcgtccaattggactaggggtccactgaccgtcgggaacgcgtggttctttggttcatccgcgcgctcaccgtggccagaccaaattagatcgccattcttgaaattaagttgggggaaaggctcgggatgggttcaatccggtgtatgtcgctcg

SEQ ID NO: 5175 - DNA, 664 bp, Zea Mays
gtgtccacgtcatcctttctcacctcagtcacacgattctcctttaacggccagtgctccttcaacagccatcgtcccaggataggacgaattttggcttctccacacgacggaagcattctagaagacgcgattggaaaaaagaaaacccgtttgtatgaccatcgtcgtttcggttgctcggatggggagtggcactgaaactgaatcaatggcagcgacggggacgtgctttgttccgctagcctggtggcagcgctcttcttcgacggagcggaggcggcagggaataccggaggccagccactgacgctgaggcagtgccgttggcagctacatgcgacggcaccaggtgcgtaaccacctcaaacggctcaacaaggccccgctcgccaccattgaggtactgttgtttgtctcctccaccgcgcgaccatgcgttttgcatttcctcggtttcagttattgtaagagttgtagtaaatgtgaatccaagtgaatcgattccatgggtgggaaaaggtgctgcatttggtatggaagtaggagcccgacaaagatgcctctttcgataaagggttctgaaagagttgttctctctattttttgagaaaaactaacgatctcaaatttgtccttggtccaccttagaatataatgtttt

SEQ ID NO: 5176 - DNA, 424 bp, Zea Mays
gtttcttgcgccgctcggcccatctctttccttccccctcaaacgcgtgccagcccatttctgcctatactcgcacacctgcgccttaatcactgacaatcgggccccacggataggcactcaccctcgcgcgcacgatcatggctacggcgcgctggcgcgcgggcccagcgacacttttcctttttccccgcaccctgcctaggccaattgggctcatttgcctctgcactgggcctcatcagtgggccaccagcctggtgctcgttaaccataaatacgctgtcactcgggccccacttgtcatcttcttcgtccacgcccgcatacttgaacggactcgtgtgaacagcgcactgttacaaccgaccgcgctagtcggcctcccaatctgggctctgctccgatataaagcccagattcc

SEQ ID NO: 5177 - DNA, 600 bp, Zea Mays
ccttacccgctcactccccgcgatgaccagggacctagccttcatatatacccggagtcggtgggagggatttcggtcccaagcttgtaacggcggacgagagagaaccggccagcccctgagtccgcgcccgaggaatccggtcgatcccaacaacaacacggtagatgatttctgcggcagtgggttgaagatgagcctagcgaacggggcccacatggaagggaattgacttatacgcagcagggcgactcgcgtggagacggttagctcagctcgatttgcgggcggaggtcgttggggagatctggcatcaccggcagaggacccaattcgtgcggcatggtgaggtgaggaggatgaagcacgagttggcgctaaggctgacaaattggacccacggggcagtgtgagacgcgagggtgtaaacgggccggccagcgcgaagggaataaaaagaagatgggccgagcggtgtggattcagcccaggcgcgaatttcctattttcttctctttttttatttatattccctaatttgcaattctttcctaatttcaaactctagtaattaaattcaaattcgttggtgaattccac

SEQ ID NO: 5178 - DNA, 684 bp, Zea Mays
ccaaaattgagtgccaccacccttggacactataaattggtgccccagcctgctccgctaagtaattgtgcacccagtgaaccagccctcacctccaatcgtcccccataactcctcaatttgggatttcccccaaatcagtcaagaaccctgccgtgtgtaagctcgccgtggccagctctccaaaggtccgatcacgccctcctcgctcttgttttagcactcttgtgtgctcttgatgcttgtcgacccgaccaattgagctagaacacgtaggatcaccaggaacgcctcggttcatccgtagttcgcgctatcaccatggacagagagattaggagctagaactttgcaattgtttgatcggtaatgatcattaggggttgaattaggtgtcagccatacctgagcaccggtcgttgcgttttccgactggtacaggctcgccggagccactgctccgccgccgtgatcagggatctcgacttgtgaagaaatagaaaagggaagggcctatctgcgaatgtcagtgacacagagaaatagtacgatggactctttaaaggtttttcaaatacctagggtcctctatgtaaacctgacaccgcgggcgcgcgcgggtgcgctttcacctatgtgtgggccgactcgagccagtttcagcccaccactattcaccatttc

SEQ ID NO: 5179 - DNA, 611 bp, Zea Mays
gcgagcacaagcatggccacggtaccggcacagaggcatcggagggtagcagtccacggtggggtggctcactggcggcgcgacctcactccagtgagcaatcgcgcgcaaccgagagtggggaagggaaaaataggggctggggtgattggttacctcaatgggaggctccgggacccttgaacggtggtagaggcacggcgagggctcgggtcgatgacggcggagttgcggctacgtggaggagggacgatgaacatggcagagagaaacagagggggagggggcgaattgaagtgttcgtgagtcacagacgtcgaggtgaaactcaccgaggcaaaagacatggcgagggctcaacgacgacggcggaacaagcgtgtgaccacggtggacggcggtgacgcttctctagcgtgtgcacggtgcgaggtgagggtgggagctctgcgggtgcgtgaatgagggagggggagtgagtgggggtttggggagctagaaatggcctgggtagggcggtcgtggcctaggcgtgcgacgtgggcattgagtccatggcatgcgcgtgggtcatgcacacggacagttggggaggacggggcttacaggtg

SEQ ID NO: 5180 - DNA, 882 bp, Zea Mays
cagccttgagggcaggtgtcacctttctccctttctttttgttcttcgttgtcttcacaatatcttgatttatcaactccaagattgcctccatatgcttcttgggaagaggttttgtgaaaaaacttgccacctgttcaagtgaatcatcgaaatcagcatgattagaagaattagagcgaccgacattttttgctgccgagttgttaagcttggccagtaggatttcctgggctttggatattgcatctctgttattcccggacttaaaacgatgttttgcagccagcctaacacttgcccttttagtggtggattgcttctggagttttaaagtatgtctttttggtggggtcggaatcagaggtggctctggcggatgggtaatctcagcaatgaaattaagcagctgtggatgggaccctgttcccagagcaggcgaagcccctaaaggaacctgatagccgctatcagcaggaacagcctaatcagcaacagacgcggtgcaatctgtatattgattaacaatcgcaaggtgaggctctaaactcccggtcggaccgtcagtgccaagaataacactagggcaggtctccagggcactgtttaaacagttttgaaatgtaaacaattctgaatccttactaaactcaatcggttgggcagctggtgtgttggctggattatttgtgcacagattgagaaggttgtcgctagtatcttgattaacgatcgcaggaagaggctctaaacacccggccggactgacagcgcccagatcaacacctgggcagacccccagggcgctgtttaaacagttttgaaatgaaaacaattctgaatcctcactaagctcaatcggttgggcagctggtgtgttgg

SEQ ID NO: 5181 - DNA, 383 bp, Zea Mays
aaaatccatagatataaccctattattattggcacttaattgtttataactgaatttttatttaaaagtgtatactgtgtaaaaccgacgggtgacccgtaacctgacgggtttgggtgtgagtttataattgcatccgtggttgtgatcgtgggcatatttaggtagattttacgggtgcgatcgcggacgggttttctacccaaacctgacccataggtactagcgcagttgcgcctaaaagaaaagaaaggtgactaaggtctggcccacgtctaacaatacgatgttgggcctggttgggcttgatctccgtcctgattgagatcgtcaccggttcaccgcatcaggtatcagccacgcaggctgcaggcagaccatcc

SEQ ID NO: 5182 - DNA, 464 bp, Zea Mays
gagaagcacacggtgacaggcgccgccacaaggtagcccgacaagaagtgttcgcagcagcccaccgtcccacgatacctctggtggtcatagtccccgatcgacttcgaccgccgtgaccacccagacaggatcccgcatctcgggacctgccccctcatcgttgagtcaatcgtaggctcaaagtgtctcaacaaggtactgatggatgggggaagcggtctcgacatcatgtacattgagaccttcgactatttgggcatcacacactcagcaatgtgccatagctcggcacggttcgatggcatcatcctaggctatcaggcctaccccctcaggcagatcactctgcccgtcacattcggggaccccgccaacttccacaacaaacgacaacaatttgaggtggtggacttcccttcgatgctacaacaccatcctcgggagaccgtgctatgccaagt

SEQ ID NO: 5183 - DNA, 555 bp, Zea Mays
gtgccacggctctgccccagcattgtgtcggtgttaggctcctacactcgcatccagtccctctcggtcatttcaccatacgatgcaccgtgccacacggttaatcaggccgagcgcgccgggacggtgttctccggtgagcacgcgggcatgaaattgggtgccctgctcggcctcggtcggaggaagaaggacatgtgggagtcctcggatccgaaatggagggctgggatttgatcggttgcaaacaagatctgggctgcatgcgtttggattggcggtcacgattaggtaattccataccccttcgctcaacaggtttatggccgttcgatctggatcgggtgtgcgtcattagatctgggtatttacaattagaaccgtaggatttaatcgggcggctcaggtgtgttggcggggttagatcccttgaaaatagatccaacgaccgtgatccttgcgtaccccttcactgtgtactcttcacaaaaagcccctcgggttttgtagaataaacctgccatccacatcaattcgaaagtaattacaattgtg

SEQ ID NO: 5184 - DNA, 511 bp, Zea Mays
aacagagttctgtctcttttagccggaactcctctcccatgatgattaaagctccagcgaagataaatcgatcaccatgaactctcaagagcacgatgaataatctaaccacgacaacttctcacaagactctgctaaggaagagcaacacactagtggacctcttcgttgtatcaatatcaccacccatgttaccgctaaggaagagcaacacactagtggacctcttcgttgtatcaatatcaccacccatgttaccatcgatgtacctgagcaactttagctcctttctcgtcatgcttgtaatatatgccatggtcaatcatgcatgtatgtagtgtaggatccaattcatcgtgttaaggtgcgtggtggtggggttctccatgaattagctgacatagcagacaacaaaggcgatgtccgattaggtatgtgccaattaatgaacacaactgataaggcctctgtacttagtggcatccaccatgctattgtactagactttgat

SEQ ID NO: 5185 - DNA, 357 bp, Zea Mays
cgaatttctaggaatcctgcatcagtcaaacagacaacaaagaaaatagaggtattagtgcggccttgctcaggcataaacattacacttactagaaggacaaagattcgtttatcaagaggggaggttagtagttttttaggtgctgctctgcctattactccccccctcccttcctggcacctgagctctcggttgagatcgggggcaagtaggtttggggagcgttggagtcttgttatgggtagaaccgttgtagttgctcgatgttccatacgttggtgattgtccttcccttctcgtccttcaaattgtaggtgcccggccaaagtagctcaccaaccacgaacggtccct

SEQ ID NO: 5186 - DNA, 462 bp, Zea Mays
tggcataggggtagtcggtgcaggagtaggcgcaaccagatactgaggaaaaccctgcaccggcacgaactgagaagtcccaggcacacaaaactgctgcggaggaagtggaactgaaaattgctgctcagcgcttgacatcatgttgacagtgccctgagaagaggaggaagtcactggctcccatgtgagcttcccactgggattcctcctacacaccacatccttatggtcttgactgcagattgaacacctgccgttccactggcactctgcacggcgatgcgcatcaccacaacggaaacacaccagccccagcccaggcttaggaacagcccgaaacctctgagtacttcctcctgaagtacccgagtcaaaggatttgacacgatagggatggtggcactgatgctgagacttgcccctcttgtgggctggacctccagtgttgcccctcctcgc

SEQ ID NO: 5187 - DNA, 331 bp, Zea Mays
gctggggcaaccgaagacgtgatgaccgcatacttgcctatcgtgctcgggcaggatgcactgcaatggctgtgacacctaccccgacactgcatcgacgactggagcgatttcagtcggcgcttcaccgccaacttccaatctctctccgacaaaccggcgcagcaatgggacctcaaatccatcaagcgccgaggggatgagactctccggtcatacctcaaaagatttcagaccatgagaaatcgtatccccgaggtcgcagaagcagcagtgatcgaggacttctaccggggatctaatgacttggccttcgtccgcgccatactgc

SEQ ID NO: 5188 - DNA, 431 bp, Zea Mays
tgtttgcctccatgggattcctcaatccatggtgtcgaacagggaccccgtgttcacctcgacgttttggcaagagttgatgaggctatccggggccaaactacagatgacgtccgccttccacccctagtcggacggccaaacagaggcggccaacaaagtcatcgtcatgtacctccggtgcttcacgggggaccggcccaagcagtggctgcgttggctgccatgggctgagtacgtctacaacacggcgtaccagtcgtcgctccgggacacccccttcaaggtggtgtatggtcgggatcctccatccatccggtcctacgaatcgggggagacgcgggtggctgctgtggccaagaccatggctgctcgggaagagctcctcgcggatgtccgctatcgactggagcaagctcaagccgtccaga

SEQ ID NO: 5189 - DNA, 1171 bp, Zea Mays
cttcctctagctttgaaataaaattccgcttcttacggtaacaagcctgtcggtggaagaattgagtattggcatgaccttcttttaaaaattgaatacgtgaccttagacatgcaactgtcctttgcaaagaagccaggaccaagcaatgttgttttagctgtctcaataaccaaatttcctccctggacaaaattctgctatcttgcgccatctccaatctaatgcagtacctcacgagcacgacccaactggacattcacattgcccacttctttatgcccccaggattgcaaacacttagctaatctttttaacttcaatgatatcttctccatagggcaagaatcctgtaatggctgattccacgatgcagccaccacatccaaaaacccagggatcttaggcccaaaactctcgaaatgaaaccgtcgcttacccaagcacacctctctgactttaagagttaggggacactgggacagtgatatgaaactgaggtagcgttactgtgaagagaacaatcaggaaaagaatcttcccaacctgtagtgcagaaaacatgatccaatttcacaagggtaggctcatccctctgattcgatcaagtaaaccttctaccaatcaaaggaatctcctttagctccaaggaattaacaagacctctgaaattacccaacattgtcctgtttatgttggaaatattcttatcctcctctctgtaaatcaggttaaaatcaccacacaagatccatggccccgcacactcctccctgaccaatcttaattcatggagaaaagcttgtttaaggttgtcctgatgaggtccataaacacatgtgaaccaccagcaagaaccagactcctcctgaaactggactgagacagagaagttcttcacaacagaatccacagagacaaaagacccatcacaccaagcaattaacacccctcctctagtcccctgagatgagctataaacaaaattactaaatccagccctaagaatagacagaatatcaaaatcagagatggaacataatttgatctcctggagacaatggaaggtttgatatcaagaaccagagttttaaccgaatccctcttggcacgatcattgagacccctcacattccatattagaaaacaactatactccataaaaacaaac

SEQ ID NO: 5190 - DNA, 857 bp, Zea Mays
atcaggggcacataagaacgctaaaacgggggggcagagggtatgagctctggccacggtgaggtcaaaccgagcggtgttcttgagtgatttgggggaaatgagcgattcgcggtctctagtggacaattgaagacaagcgtgggtgctatggatgggtgattaccctatggagctcgcagtgcgctcaatttataacgggcttaagcggtggtcggggatttggacgaagacgcgcggcggtcggagaaataggaggtcactggcgcagttgattcgtggagaataccgtggcggactcactggtgatgatcggatggctaatgtgagtcacggcggcgcggttaaaagctagagacgtggcgcaaggccgtgaagcggctgtctccggcgaactcatccaaatcagccgtggtctggtcgggtacggtggccggaataaaataatggttggagtgtttccacagcgtgatatttactgacccccggcgctatccaactgatctgagcgcgaatcacggcggcgatagcacgaattcgcgcgcggctcgtcggcggcgagggggctgaacttgggattctgtctgttactgtaccatgggaagcatttgacagagtgcctgacagaccactttgcagggcttagatcttaggtttttacataataacatgttaatctgccagtagcaaagttgttgtccgatgatcccgctacaattttggtataacaatcttagccaaattatgactagatcatgatcgaatccaagctcaaagattgctcaatcacactgtcagtctgaattcagacataaggcagtctgacagtccatctttgggtccaattttctcaaaac

SEQ ID NO: 5191 - DNA, 428 bp, Zea Mays
ggtaagcgccaccaccatcctggagggccgaattctctgcagcagccacctctaaggctgaaggtccctcagtcacttccatgggagcagtgcaatccagaccagcttcctgaccctcaagaccgcgctccaaggtcgatgaggcgcgggaagctgcccgggatgaccccaacccggtgtcgagcacatcaacacaaacatccatcgcgccaccatctgccggttctgacaacagatcttctggaaccatgtcttcaagagctcgatcaaagttcgctagagataattcttgcagaccaatgagggcagacaaggcaggagaaggaacaccactactttccccactagctatgtaacgccggctgttcttccgaatcagagggatttcgtcctcttcttcatcatcctcatcaacaacacggataaca

SEQ ID NO: 5192 - DNA, 689 bp, Zea Mays
agccgatctccggcgagctcgtactggccggaatacgcaacggctagtcctttcctttgttcgacatcaaattctacccctggtgactctaatcccccaaccaatttcactaatccggaccggagcactcctgctcacgacgacggcaaaaaccgagaagaaacaatggtgttcagggaaatccgttacgatctagttcaatcaatcaagcctacaagcaataggagactctagagatgctagaacatttaacagaggggcatgaatcaacctcaggcaggctgaccacggtgagagactttcacggcaggattccgactgatttggggaaaatggtcgattgggcggctctagtggacgatagaaggcaagagctggtgctttggatgcgcaatgacttagcggagctcactagggcagtaatttatagggtctatcggtggtggcgtccaattttgtgatgctgcgctggcggccggagagagagaagagtcaccggcggtgatctatcgtggcgattgcggggtaataagctacagcggtcactgggtaacgaccatgactcacatcgacgtggtaagatatccaaaggcgtggcgcgactgaggaaaacggcgatagccacgacaatgactgtgcggccacatcaccggcaagtggatgggtgacagagcggctatagggctctg

SEQ ID NO: 5193 - DNA, 608 bp, Zea Mays
taggacgcaaaatgctgtagtactctagttcgtgtaaaagaagcccctacatattaggggcaattgtaattttctcatgccccaagtatggcctataattacggggtgggcactaccttgatcggtgatgaattaataaccattcactccagaattcattgttgtcccattctatctagcattgtgtcaccttcgcctctttcccttctctatggttcatcctcagtcacctccgcgttattcctagtgatggtaggaggcagagtgacaagtacccgtacactaggtacctcaagatagcatagattgttaccttaactaggtcgaacccgaccataacaaactcaacaatactagacctgacctaaacccatagccataggccagtccccacctaaaccctaagttggtcctaaccatagatttcatgacctggactccccgctaggtcggttccgacctcaatcaccttatacaaactctaacctaggtctccccaatcaatatacggaccttagggccaaaccatattgtacgtcctcaatgggacaccatgatccaaaagtaacataaaaagatagtggaattaaaatccactgacctttcgg

SEQ ID NO: 5194 - DNA, 411 bp, Zea Mays
tatatgccgtcggtcgcggattcgcgaatggacggctgggattagtccccgtttaccctttcgcgttgggttgatttggtccgttcatctggctttgaacggtgtagattagatgccacttaaccctccgcgcgcctcgaccggtgccgttggatctggatcgcgtggcgcttagtctggctaggagattttaaatctggtgcgttcacctatgatcgcacggttgtggcgcgatgcaccaccagtctaatctgcgccgtctgttctaatccgacggcggggaaacacccataccccttcgcggctaacattttacgtatgaaccgctctggtttttagaattgaacccgtagtccgtagcccagtggtctgtgtctcggcatatttagcgccagggcccctacacttttc

SEQ ID NO: 5195 - DNA, 654 bp, Zea Mays
gtaacgacttagaatcgtcgagtcacgtttcagattgccttcttcgcgatgttggcgctttagtggtaccggccgagtcctttggagccacattgccgctttaggaataacagccgagtgattaccggcgacgtcgacgtttttagaggtaatagccgagtgataacgagccacgtcggtgttttagaaataacgaccgagcggttacaagcgatgtcggcgttttagaagtaacagtcgagtcctttggagccacgtcgccgctttaggaataacagccgagtgactactggcgatgtcggcgttttagaagtaacagccgagtgacaacggaccacgtcggccgctttggaaacagtggccgagtgaagtctggtaacgtcagcgtttttagaaatagcagctgagttatattgggccgcgtcggccgttttggaaataacggccgagtgatgacatggcacgccagcgttttagaaataatagttgggtgatgactgggcactttttagaaatggcgtctggcccgggaaaaccccatatgtactgcactgtcgcatgcctatgcattctgagccctagttttgcttttctgcatccagatcttctctgctctcttgcgatattgcttccgctccgctcgccagcaagatt

SEQ ID NO: 5196 - DNA, 1115 bp, Zea Mays
cacgaacggcgctcccgagcagcggacacaaacttggatctactccgaccgtttcccctaagttaattgcacggatggcgacctacaccgccctgcccacgggaacagcggaggcatcggatagaatcgcgtgttccccgtgatctacggcggtttagttcaatctacaaggtcgaggagtttgagaagagcttagggatgctagaacgagcaacagcgcaacatgagttgacctgaatcgggccggccgcggtgagctcgatcccgcggtgcttcagaacatagttggggaaaatttgaaattggagcacccggttgcaggattgggggtgatactggacggtggggtacgtgatgaggttgcggagctaacggcgggctcgatttatagcttccaggaacggtggcgctcgaattgaggatggcgcggtggcggccggagaagggaggcgagctcaatccggggaaaagtggctttcaccgtggcagcgattccggtgatcgccgggcatgcaaccggtgagtcaccgcgaggaagttccgcgctgagacacgtggtgcgcgacggcggtagcttatcggtgacgaggtcattcaaccggcggtgagctggggcggtgaagtgtggcggtcttagccgtagccaagcttgagtagatcagacgccgagatctttactgggttgtgcttatccatggcgacggcgcacgaatcacggcaagcggtgatcaacggcgacgggccaccggcgacgagcagagggataggatcttcttcagtttactttttactgtaccatgggacattcagtttatgacgcctgacagagcaagtttaagccactttttctctgattttcaaatgacaacccaatcagtgacctatatcaaagttgtagagttatatactatctacaattcgactatagggatttcatttgtttgagcactggatcaaggtttaaatcaaccccaaagatggctctgtcacactgaacatcagaattttagactgaatcagcctgacagcttaacttcaggcctgattatttccaaacttctcttagcaactatgctcacacccttaaacaaagttgttctcctttaattggtcta

SEQ ID NO: 5197 - DNA, 544 bp, Zea Mays
gtgataaataaatagacctatagcatcgaccagtgacaaaacacgaacggtcccaggataggagtgtccatatttgctaggaggcgagccgggcgttgtgagccccaggacaccaatggatcatgcagtacaccggaaaagtacatgtctttcctggcgttccgaaccgctggtccaatgggatgccaaatccgccaattattgacgcacagaggcagagcagagctagcgagggtgataggcagtagtggcgcacagtgcagtggccgcaatgcattgcatgcactggctcacattttcaccaggtgaacctgataggcactgcactaaacactactcctacagcatgtgccattcagttactgcagcagcagttgctgccgcatatcatgcttcacatcttcccctcatttccttcgccccctatgcctacctgctgtctgtcctcttgcctttgaggaatacgcaataatatagttgctcaaatgtaaggtcagatggagatgggatgaggctgcagcagccagcagccagcagcttcttg

SEQ ID NO: 5198 - DNA, 401 bp, Zea Mays
gtcgtgtttagggcccataccacttcaggtagttggtcggcccatttgccctttttatcgtcgaggagtcttttcttgatggcagtaaaaaacttgccattggcacgctcaacgacgccgttggattgtgggtggtacaccgaggcgaagacaggcttggtgccgatggaaaagcagaaatccctgaagtcttggttgtcgaactgtttgtcattgtcgactgtgagtcggatgggactccgaagcggcagacaatgttttgccagaagaatttttgagcggtcttcgatgttattgtggatactgctctggcctcgatccactttgtgaaatattcaacggcgacgaaggtgaatttgaggttcccttgagccataggcagtggtccaacgatgtccagc

SEQ ID NO: 5199 - DNA, 507 bp, Zea Mays
tgattctagagagctaccaggagtaaatagcgctggtcatgaagtagacggggtcttatattagcactgctaaaattctgtgtggctatatcgaacaatggttttagtgagctaaagtgtcatttgctgttttatcaaccctgctggatgttcaaacttttgggggggactacatacactttaggctagcaatggacatgtcagcaatggcggtagtggaccaagattcgtgtgcatgtacctgcccctcgagaaacccgtgttatatatctcgcacatgatgaactcgtcgtccccatgcatccttgcagctgtactattttgtagtgcgtgtgtgctaaggcatgccgcatgcatgtatgaatgaacctaactatatcatgaaccaacaaaagctggaggggacaaatcgagatacacggacacacacaaaaaagagagcatatatgagtctatataccactgcgccgctacttgtttaattctttaaggacacaccgtaccaac

SEQ ID NO: 5200 - DNA, 453 bp, Zea Mays
gtggtcaccctaagtcgagtaagcgtgagcatgttgcaccgtcttaagtcattgccgacttaagtcgattgctccgttagtagggtatagtggtcaccctaagtcgagtaagcgtgagcatgttgcaccatcttaagtcattgccgacttaagtccattgctccgttagtagggtatagtggtcactctaagtcgagtaaacgtgagcatgttgcaccgtcttaagtcattgccgacttaagccgattgctccgttagtagggcatagtggtcaccctaagtcgagtaagcgttctgattgataataaatagttcgagtgtccttgagaacgaaatcttttattgatgaggtatttaccaattacaaaatacaatgctcccccgatagtttttgaaaccttgctaagggtaaaatttcatgacatgctctatattccatgaattccatatttc

SEQ ID NO: 5201 - DNA, 365 bp, Zea Mays
cacacactgacacacacgtaatttaattaggtgaacctattacatcgctgctgtaaactcagacttgatcgctaatgctatctgataatcatgttggtcgtcgtaccacgtttgtatggcatttatcttcaagccgagcacgctaaatcaatagctccataaatcgtctcagacttgtcggggaaagtgccggtcatgttctgaatttgtgaacgtctgcatcaccacacaattaacatgcagatcacttcgtcgtagtcacggatcacacgtcttaaccgctaatgatgcgggcagcatgaccacctgaatcggactgtattgtattcgcagaatcatttgactgcccggacattccattccat

SEQ ID NO: 5202 - DNA, 373 bp, Zea Mays
catctccatggcatcaacacgatgattcaccggcgctaatcttgctcctagtcatgtaatgtcagctcctcactccaagactccaatcgcacactcgtggaaatggaaagagaagtccacgaccaaccactgtgaaacttccccatggactggatcggccaggacatccaaggtgactaggcatggaggcgatgaatgatgatccatccagcggagacgaagcacccccacacacatgacacacattccctaagcctccaatagtccaaccatcaaccaagtagatatgtgccttgctggagtcactccacgcctccactctgccggatcaggagtttagacacactgcaaccttgctagtttgtgatttgca

SEQ ID NO: 5203 - DNA, 413 bp, Zea Mays
tgaagatcatgtgggctcgcgccaatgggctaggagcgacgaaggatgagggctaggccttgatcgagggactagagaagtcgggtgaccagccgaagtgactgacacttgggacatgcaccagcgtgaagacatgatagagcggatcgtgtcaccaacgtggtcgaggactagcgggacatgtgtccaggacatgggggatgcgtatgcggtatgctactcacgatggtttctgttattgactctcaaaaccactcagcgttgtggagggcttgtttcgctgagtttgggtctcaaaactcagtggtgcggttctagcgggaattgcaaagcgtgcatcgaggtgaaccaactttgtgtggagcatgtggccgtcagatgcatattctaggagttggtccattgtgcctctg

SEQ ID NO: 5204 - DNA, 704 bp, Zea Mays
tctcggtatggagtatgagaagattgatgtgttgcaaggacaactgcatgctcttttgaaaggaacatggcatagagcagaaatgctaaaaatgtggcaagtcaaggtacatggatcttgtaaatgaagatggggagaaggtggtgacaaaggttgcacataaacaccttcggtacatgcctctcactcctagagtgaaacgtttgtttcactcgaggaataccgctataccatgagataacatagagaccgtacggacagacaaaatgtgtttatggtgcacccatcatatggtgatgcatggaaggctcttgacaattttgatctagagtttgccagtgatgtaagaaacgttcgtatcgacttggcaactggtggtttcacgcctttcaatatgaccgctatgtcgtactcgtgttggtctatcattgccatacagtacaaccttccacctgatctttgcatgaaatatgaatttatgttcttatgtcttgctatacctgggcctaagcatcctagcgtacgcgctcaatgtgatgcttcaaccactaattgaagagttaaagaagttatgggaaggagtggaagcctatgactgcttcaagaagcataaattcaatctccgggttgcgtatctgttctcggttcatgattttatggcgtgtgatattttctctggatagcgcgtgcatgttagattgata

SEQ ID NO: 5205 - DNA, 704 bp, Zea Mays
cgcgtgactgagagtccaaccagtggggcccacctattggttgcaccggtgctaacacgcgagggaggtgagatcggttgtgcaggcatcagccgttaatgggtcagcggtagaactgacccaggttagggaagttagggatgaaaagtaggaacctctatttgtgactctggtgacgactcttcttgctctccgaccactcctcccgtctgggctagccacgcacaccacccgagagacagtgtagatctgaaactgcggcgtggaccttctctccctctcgttcgtcactcggttcacggtggcactctcaactccttgggtcattgcgacatttggctcctcggcgttggcacaagatggatgaggagggggtgctcaggttatatagccaagaggagatgcctacgattgtaatggtcggtccctgatcgtaaccaacttgttcggttgtatttcccttattattaaagcctgatggaaacgacgcctatgagcccatccaagtcaccaaaaaaattcctagtcgttcgattgtggatcgttggttcattttccctgcattctctcccgtgcgcccgtcgtttttatcgcctttagagatttcaaggctgctctcctcgcttgccctcgctttctctcttcatcctccgtctctcttcctctagctcacgctctgtgaggggctcctggcgtcgtgtcct

SEQ ID NO: 5206 - DNA, 621 bp, Zea Mays
accggattatattaagtccaattgtatgtttcattcaaggcttttcacgagaggccactatacctggtcagattctgtctcacagagtcacagtatacaccattagccatcacttgtcagtaagagctctgagcaaccatggcggagatagtcaccggggcgatgggcactctcctgcccaagctggccaacctcatcaaggaggagtataacctacagaagaaagtgaggggtgagatcatgttcctggagactgagctcaagagcatggaggctgctctcatcaaggtctccgaggcacccatcgaccacccacctgacgtccaagtcaagctctggacaagggaggtgagagagctgtcctacgacctcgaggacagcatcgacagattcatggtgcgagttggcgatggcaagccacatagtttcaagggattcattgatagaagcctccacctgctgacaaggggcaggattcaacacagcatcggcatagacatcaaggagatcaggagccgcataaaggatgtgagtgaacggcgtgacaggtacaaggttgatctggttccttccaagcctgttggcagaagcattgacaacctgcggctgtcggctctttac

SEQ ID NO: 5207 - DNA, 687 bp, Zea Mays
cgacagttccaccaccgcacgcgggcgcatggactcactgcgtcgtgggcccaaactgttagacatccacatcgtgcgcttcgtgggtgtgacgctgctggtggccctgcctcccagtgactccctctccgcaattgtgtcatggtggatcctgcctcgcaccagcataactgcctccctagggattgcggggaatctgttgaggccagctgaccgccctcggggaatataaaccccagccgtagccctcaggtcccaccgaatcaccatgaggtagagagagaagtcagggaagcagggatcgcacggggagccgaccttgagccgccgtcaacgactgccttgcaccccctcgttctggtctggggaagtggtcagggagattagtggggatgccaggggtctatccacatcgagcatttgtgtgggggaaaaccggcgccaacgagattcctcgccgtcgcgcctggcgcctctatgccactgaaccaccgtgccccgtggtagacccattcaccgtctccaacgttcgatgaggccctatccactcttttcggcttgatgtacactgcgcttagcaaaggaatcgggggccctaacctgtcgagtggccgtgaatttctcatcggggccattcctccgtcgcgggtccatgcttggccgtggggagggcataccatcgcatcg

SEQ ID NO: 5208 - DNA, 281 bp, Zea Mays
tctcttaggaattatgtagatgaacaacgtgaacaaatgcaaaatatcataggggatatgcaaaacgactatagaagactagtacgtgcatttgacaaatctagtattgcaaattttccttcgcacgaggttgaattaggggataacatgtgtaatacatcggctataggttgtcacgaccagtcacaacccctttatgggatgccgatggacacataccctgagcaaccgcaaatcggcagtaaatcagtcgatctgcacatgcccggaccgtccgcacg

SEQ ID NO: 5209 - DNA, 1030 bp, Zea Mays
actaccgtatgtagtctggagcttgcgaacccaactaagtcgggccttgcatggaaacactccgttcttcatggtgtatggatcagaagcggtgttgctagcagatttgatttttggagcactcaggttaacattcaaaagcatcgtcgaggtagaggcaactagactagaggatgtcgacgtattggaagaagaacgtctgaatgttgtcatccaatcagccaggtaccagcaaactctaaggtggtaccacgataaagcagtacgacactgagtaggaaactcgtggaatattgagcacctcaggaaattatatctatagtgaatacctcaaactccagtctaagccacacattgtaaacaaaaggtctcatgtggttagatgcccccgtgtcgggatgaagaaggtgttggagagatcccgtgccctttgatgcacaccatagatccgtcaccgaaacagaccatcccagatacacctatgtcaaggttggagaaggcgttgtggcaccctatcatgtggttggatgtccccgtgtcgaagatccagcgccatggatcccgctcctcctttttgtcgagcgcgacgaagacctcctgctccaccagatggacgcgctcttcccgaacgcatgccaccatggtgctcgatgtgttgtagatcactgccacgtcgctcggtgcttgcagcttggtctagctgggtgaggggttgattgcgacattagcaacattggcaacaagaagagacgactcattaccttgggccacatgggcctggtgactttgttgagcctgctgctccttcttcctcccccggcactcccacgcccaatggccggtcttgccacagtagttgcagatatcatccgccttggtgcctcgcccttgccttttggaccacgtcgcctatcgcaactgccagagccaccagcggtgcggctactctctgcttccttcttcttgtagctctctagccactattcctcggttaggtacaacttgccccctgcttgggatgactctggct

SEQ ID NO: 5210 - DNA, 513 bp, Zea Mays
gacgaaggtccacagaagtagctgaccacgaaagatcgttggacgacggttcttgtggatcccggtgatcaatcgccaaggctcaggtcaccgcacgcccctggattctcgcccacaccgccacgattatccgcgccctcctccgaattacgcaaccgggtcggattggcggccaaccgaggctgcccgcgtctgcggcgcttccttaactacggcggcggcaatggtgaataggcatcggtggtccagcacacgtgagagggttgtagaagagagaagaaagaaaaggccgcaggggaggttccacttattccccgaggtcacggttcggaaaaggaggagcgtgcccatgacaccggcgatggcggcgacccatgcgtggtttgttgcggggaggatagcgacctgacgcatggaccttaccaggtagtccttccgccagtcagcgcgtgcggggcagattccgagtcctagccgctttctccgtgctgaccctccacacgcactctctcc

SEQ ID NO: 5211 - DNA, 1125 bp, Zea Mays
aagaccctaagacacataccgcactgcacagaggactgcgggttgaatctctaaatttataaggggttttctgcaaagtggttacgcgaaggggtatcggtccgttctggccgttagatcgtactccaagggcctcgattagatttactcaatactgaatcaggacactgcgagccgttggattagagatctagggttcagattacttcacgaagcggtacgcaatctataccaccggatttaaaaacaacggtcccgatttcatcttaacctgatctaatcctattcgcacgcaggtagatcaacgaccacgattcactggttcgaatcgttaccctatcttctaatcaaggccgtccatcacaaattttacggctaggactcccaacaccatcttcccccaacgccgcgacggccaccgcgttggccacggcggcgaccccgctggagggaggcaatgctgtgctccagggctccaaactcaaattcgataggcgtagcgtgacctagagacgaaggcaatttaagagaggagaatttcaccggaatagtggtgctgaggtccctgaccgcgccgaagggtagattcatggcggatttcagccaccggtgacgaattggcatctggccgcccgatttcgtgcccgctgtcgcccacgtataccttctacgtgcccttctctccgtctcaaaccggttgccgaggctggaccgacgaccccggcgaggtcccgcggcggcggcagttttcccagcagtaatggcggcggcacatggttggagcgtgggagatgttagagtgggctacgatcccagtgaaggcggcagtagttatgcgccccgcgactccgaaatccccggctcgatcgcgagcttgcgcggtcaaagcggagcaccagtgcgtgcgagatctctggaggggaagcgcctgacagtccgggcccaactggtagtgccagagcgcggtcagtgaagggataaggagagcgttggcgagtgggagctatgcgtagttgcgaggagagaagaactgaggctgacttgtgggccccgagtgtcgggcgccagggcgcgtgcggtaagtgagtttgggccgcgtagttcagctttgagagtgggccaaat

SEQ ID NO: 5212 - DNA, 355 bp, Zea Mays
agcaaaccacgcgccgctgccgacggtacgtagcaatgtcgacttcttcatcatctgctgcgaatgcaccatcggctgattcgtcgaccgaggataccctgagcgatttggcagcaatggagttatagccgggccacacggtggagttcggtgtctcgaggatttcctcggtccgtgtgcaggacatgcagcagttagggtattttggtaacggtgttgggcgcgtcccgggggcggaagaggttcctgagcctgagggtgagttagttgtgttcgaggcgttcttcatcgccagccttcgcctaccagcgcattgtttcgtggcggaggtcttgtagaggttcgacgtccagat

SEQ ID NO: 5213 - DNA, 509 bp, Zea Mays
gttgtactgagtttgggtgtttgatgtcaggtgactgccttcgccgagcaagttgcctcgtggacggtgacctcgcagtttgtttccgagaggagacgactcgagggaaggattgagcgccttcgaacgcagcacactgaggcggtgagggataagtcggtggccaaaaaaagaaccagaacctcctcgagaagctaacaacagtggagaaagaaaaggaggacctcgaccactgacttactgatgagaaggaggacacggaaaaagctcgcgcggaggctcaggctgcccgcaagtgcaccaccgacctaaagctagagttaaagaatatgcgcggtcaccgcgaaaggatcgattcttccacccacgttggggttgaatgggcgcacacgcttttcgtggatgcgtactgtgaccttggcacgcataccgccccctttgacgaatcgggggaggaggtggggatccgctttctagggtggttgcaagatgagctagagtcgctcccg

SEQ ID NO: 5214 - DNA, 385 bp, Zea Mays
gaagattacctccacgtagaggcagtgctagaggcagccgctgtggcgctagcgggcgccctgtagccggcatgcaagctacagggtaaggggagggggcgtcgtgcggcgtcccctgcagacagtttaaggatctgtccaggtgctccttgagtcagccatctattttttgctgacgactcactaattttcatcaaagcatcggtttcaggggttgcacatctgcaacagattctatctttgtatgaaaatgcctccacaaataaggaccaggtgataaacaaggataaaactgcagttattttcagtaagaatacacctccacaaaataaggacccaaatgatggctgaactaggcataactcaaatcgctagtaatgataag

SEQ ID NO: 5215 - DNA, 321 bp, Zea Mays
cacctgcagccacggagggcgacgccgggggcgggggctcggtgcggggcctcggatgtagcgaaggcgctcggctgaagccggcgaggacagggccggagtgtcgggagagacggaagagtggcgatgaggtgagcggagatggcgaccatggcgaagagacgaggggaatggaggagataggagagcactggccgcagaaatggatctgttgctgcggtttgtcagtttgctgtggtggcctctagctgtagccactgaaagatgtgcagtacctgagtgacctgatttcctcctgtttcagttcaggagatgtataat

SEQ ID NO: 5216 - DNA, 598 bp, Zea Mays
gtcaccggcttttcaatatggagatcattcaataaagcaccaatgcataaaggccgttttggattgtatctttctcggccatgaccatttgatcaatggatcaaaatgaatagaatggaggtgccccccagcctggatagacaaagggactacaaatgtaccatggattcatcgtcgtgccattccacatttgagtaggacaatataccgacgatgaataaatggttggaaagtaccctggtctcataggatggacaggcgatgcttgtcgcgtcgccttttgggccgttgtgttcggccgtttcgttttagcaggtgaccggggtttcttcgttgaccgatcacgtggaacagtctttttgctagcatttttggagagcaactgatcaaaactagagtcggctttgatcagccgactatatgttctttgcccttgcgtctctttccttgcttcgtgtagaggctgacgcttttggtcataggtggactgtccggctggattagccagaccgtttgtctgagcaccagaccatccgcacataggtgtcggaccatctgcgatgctcaggccaggctgatgtgtttggtctattaattg

SEQ ID NO: 5217 - DNA, 794 bp, Zea Mays
cgtgcccatatcagcgtccctgggacccgtccgcgccatcccgacctctagaaaccctaccctcgttgagaaccagagagagagagtgggtggggtagcgcggtgccgccgcggaggaatctccgattcaatcgtcttccgcaccgtcggggcttcatcgggctcggggaaaggctgccgtggccgcttcaccaaggattggacgcttgtggtgccggaattgctcaccggagctcggcatccgccgctcaccgtgggcagagcagggcgcttctagattcgatgtgagcttccgttccctgttatcgtgtagttgttcactatgtaatgtcgcattcaattcgaagttcgagtggatatggcgagttttggccagggccggccatggcgccgccgtaggaacccggacgccaccgtgtgcgcggcatcggaggggtggcgcgtgcgccggtgtgttgtgggccgttgattctctgcgtaacggccaggattagacaaacgtgtacccgttcgcgcgattgatctggcgccgtggatccgtgatcctgcggtccatgttgggactggcttcattaaatctggaccgtacattcggaatctgatggtgtctggtgagagcgagggtttattcgggtttgatctaatcgtggtcgttcacaatcaatcggacggctcagattcaccgataccctttcgtcgtgcccatattgctaaagagcccctctgtttatttagaaacaacccgcggtccatactcctgtaccgtgagtctttgttttcttagcatcggggcc

SEQ ID NO: 5218 - DNA, 638 bp, Zea Mays
taccagcagggaccttcctcagttgctcaagagttagtagaggtctcctcgacacatattatttagccacatttttttataatctgccttagttgggatctttatctttgtggccatttccttagccttttctgcagactcctcgtgctcggccaaatcaacaatatgtgacatgagatcccatgcaatcccttttaaaaaatcgagctgtgcagcagtagtagctttactcttctttttcttgaatgtggacaccaattttggtacagggaatttagatttttttgattgtcgtgaatcccttgatggctgtggagaaggtggtggtgtcctaaatgttgatgcttgtggcggagacgatggattagaaagaggatgaggagcaacatgggaagattgtggaggtgatgatggatgtacaggtactaaagtttgaggagacggagatggttggggatgagatgatgacgtcgttggtggatcaaccaattcgacatcccttcgaggccaaaggatgaaatttttgatggcttgtccaagtgtctcgattccttcgggcccagggatgtctagcatgtcgtcctcggatccttggacgaccgtcatcacttctacccttcaataatcatctggtatgt

SEQ ID NO: 5219 - DNA, 378 bp, Zea Mays
ggaagatgaggcggcggtgtgaagtgaaggaaagggtaaggatggaatgttgtacggtgcggacaggagagatgggctgagtggcgtcaaagtgcatggacaaataaaatgggctaaaacgcctaagtcacgaggacggagggagtacatggtagttgtcacaccataaacaaacacacagttgttgtggtattacaagactacaaatcctttggtgtacaatcatgatacgctgaagtatctaatagcacgaggtatgcaaacctcactaacgttaaagctaaaactagagcaagcatggtttaactagctagcataagtacttcacaaaacaactatattaatcaccacgtgaatcactagacaccacgtacgtgg

SEQ ID NO: 5220 - DNA, 663 bp, Zea Mays
ttcgatcattcgccatgcccactgaactggatctacgaggaggctcaggtggccaagaaaagcagctgccccacccttcgtcgctcgctagtccccgagggatggccatggctaggctcaccgctgaccctggtgaagcgctcggacccaacgccaagacctcgatgttggtatacttgcaaggctacaacgacgaaaatctctcttcctctctctactgtttttttcttcttccacgggtgcgcttggttcatcggtgcccgcttaggatggagaaagcagggatagcgacgtaaatatatatcccggggcgtggccaacaggcacgagtgcgcgaggtcaagtccgtgtctcccggcagctggtgagggattcggttgggcagttgttggagatctgcggtgcccagcttctgtatccgccgcgaggctcagagtctgttgcgctgtccacgcgaggacgacggaatccagttgagacgagtccaagcaaggatatggctatgacaaggagggcccaccgtgaagcgtctacgcacgcacccggtcagatcgctgtgagacggatggagtacgcggagggtgctgcatgggagatgggctggcacgggtgggctagctggctggcccatcacgtgaacttccctccccttttcttttattc

SEQ ID NO: 5221 - DNA, 624 bp, Zea Mays
gcggagtgtacgtgcatggacgttactatattatttattagtagagggtagagcgaatcgtatacgtatgtgtatatactgtggcacgtacgtactacgctgctaggtgctgcatgccggcatggcgttgcaatccgtgccagtgccaccagagcacggggaggacgtccagaaactattaactgcagatgccccgcctgcccagtctcctgctcgtccctgccactgcactctcagctacagtatgtagtagtaggagtacgtgcgagcgagcagcccagagacggatcggcagcattcccgtggccgtggacggcatgcatggtgtgtccagtaatggagcccggtgacggcacgtgtattacgtacgcgtgcgtgtgtttacgtgctgcatggaactgtgcgtgcggtactagtgcagtcgtgcacgcgtacgcacggttatatacgtatgttcagcgcacgcgtgcatggcagcgcgatcaatgcatggtttgcttcatgtatgtatatatgtacgtacgtacacgtcaccgttcacgtgcccttgcccctgcccctgcccctgcccgatacgacggcggcgggcaggccagatgccctacgccgtgccgccgatcggat

SEQ ID NO: 5222 - DNA, 403 bp, Zea Mays
gggcgacctaaacaaggaagcgatgataggtttcttccaaattaacctagctaccgtacgtgtcgtcgtccttgtagttgtactctccttgaacttaacttctctcgttacttccaaccaattaaggatttgtataaatcttcacgacagccacgccattgcaatgcaagagtgcattactgggatagcatctcaatatatcatccaagccacgcgtatacaaatggccaaggtttcccctcgagctcgagctctggccgtggcaataaccctagtcctccgtgtcgtcaccctaggcctcctcgcagcgtctctcgccgtcatagcgaccagagatagaactcactacgacccgatctatgtgcttggtacagaccttggcctcctacctctttattctgat

SEQ ID NO: 5223 - DNA, 310 bp, Zea Mays
cagctccaaggggtggaatccgcagaaagtggtcaacccgtgaagagcaatcgcctcgatcgtatcctcagctcggtatccaaaggactcagagtccagtgaacgccagcctggctgtaggggatgaggctccaaggtcatcctcaccctacagcggggcactcggtgcttctcgaactgctgcaccgcgtactgaggaggcgtcgtataaccggccccctgaagtacctcccacaaaatacggggaaaaccctcccgtgcaagcccgtcagtgtgggtcagtgcattcccttcgtccgaggatccgtga

SEQ ID NO: 5224 - DNA, 554 bp, Zea Mays
tggtaaaaagatctccgactcggattcgatgatcgaattaccgctctagccacggacaccacgtgtcctcaccgtgaatcatccaccgtcgccgtagccagccaccggacgctccggccgtccacgtagctggttggaggctcgcgtattgaaccaccgtaaagggttcgcggtaagtccgccacgttactggcctgtggacacagttgaggctaacgtggagctccttgggctatcacctccgccgcgagtcagcgatcaaattgcccaccgtcatggtgacttccttcaaattgagcctacgctcagtcccgcatctccgttacgcaccctagccaccctttgtttccgccgttccaccatcgatagccaagaacaccagtttttccccatcggtggtcactagcgtcgccgagcagtgcaaccgcgtggtcagcctttcctaaggttagtcatagttgtttaactcgtgtttcgtggtctatagatcatggtgaagcttatgcgcttgcccgtttgaactctaccgcacaggattaactggaacaccgtcg

SEQ ID NO: 5225 - DNA, 618 bp, Zea Mays
gtggggtggggaggggaggagagagagagggaagaggggtggccacggtgtgcgcgcgcatcatttccttctttattgccgccctgtctgtgcctgcccagcccccatgcattattattactactccgttacgattagtgttattacttcgcctcataccgacacaaagaacttttgctaagaacgcgataataataccatgccgccatggatgctttgttgtacggcaggggctaaatccatgcttccaagtgacgtttatccagcaacgaaagccattaccatttccctccacacaaatgttgcttaaggccaaggccaatccttcaccaactgcccctactgtctgttcctcttggtgatgtgcgttccctaatcattctccttttgtgtgtgtctaccagctgcccacgtataccaccatccatttcttttctttttttttttactctgctgtgcctttcagtacctaggcactatgcgttcttgctccttttttttctttgttctctcttctagtgtaacgacttaactgccactgcgtttaggtgaacatttatgcagcgtacaagttgctactactcttactacttaggctcggtttgttttagttttttt

SEQ ID NO: 5226 - DNA, 482 bp, Zea Mays
atcgtattcgaatcaccattcgcattgcgaatcatggccttgatgtgtgcgaggagcatcgtggccccgatctggcgtgctccggcgatggctccgccgcgcgtgtgggcggcaccgtcacgctctggcgtcgggggaagaagaatgggtggaccgttggattgtggttaagcggatgagattagatcacgacataggcagttctgggccgtttgatctcgaacgggcgaatctggggcgggttggagtactttaaatccgtgtcgtcggtcgtcgatcggacggttatgaatgcatatcggttcatttaaatgataggactgatctgggacgtccagattagatcgggtgactgggacatgttcttacccccttcggccctggtcgtttttcaaaagagcccctgcacctgtgttaaaacaacccgccgtcctgcgcggatgtggctgtgtcacaaacacttttgcgctcttgcccctggg

SEQ ID NO: 5227 - DNA, 461 bp, Zea Mays
tccgagccggagcggaggtctgttatggccaccgatttgttcgggattgacccaaggttcagcagtgattcccgccataccctccattgttcacggtcgcaggggctcgagaactccatctatttctagacccgttggacgagttaggggaacaagactccgcctttatgcaccaggccatgaagccaacaaagcgggatgtggttgagattgcacgagctacgtgcgttctgttaccgggcgtgcaggaacaacgaaggggataagcctgacaaggttggcccacaccacagtggaacgagggcacacaagagactatgacaacccgggtcccaccatgacagcgacagaaagggctggcgcgagagttgggctggcgtggaagggattttgggccgaacgaatggtggcccaagcgtgcaggtaacctttttctttttcttttctaattcttttccttt

SEQ ID NO: 5228 - DNA, 376 bp, Zea Mays
cggggcagctgttcgcggccgttggatgcgcagcgcacagttagatgtattcgatcgcataccctttcgccaagcggatccgtgccgtcggatcccgtgtaggggcatcatagccgtttatagtgctttaaatcatggccgcatatctccgatccgagggcagatatcgagtaccggttcagatttataaccctctaatctgggccgtgtggttttgatccaacggcatgggttcaccgatacctcttcgcttgactcaattgctaaggagaccttggcaaatgtttgaattaacccgcagtccacactgtgggagttctgtgtcttggtgtcttttgcgtagaaccccctgggtttctgttaaatagtagccgca

SEQ ID NO: 5229 - DNA, 434 bp, Zea Mays
gcgggagcacatggttgttgggcgagggcggctgcgcgcatggcggcgggtgcggatgcgggagcgggagcgagagcgaggcaatcggacggttgggatggaggggggttgatccggcaatcggacggtcaggatggaggcgggggcatggttgtgcctagtctacactattgccttaagtattagtagagatttcttatatttttggaatttaatttgatacaactatttcgttcatgccttttgcatttaatttcaaccgtggacaccacattcctctgtcgtctattatgggtaacaaaaacaatcaagaatgtaataccctaattttttaatatcttcaattaatatgtcattgattcgatttgtggagcaaggcattgattattttatgggttagaaatttataaaattgtgttttcaaacttgagtca

SEQ ID NO: 5230 - DNA, 784 bp, Zea Mays
ccggaatagcacaagtgcgttaatcgaagtattttatttaaaatacacttcgcgcaaaagtcgcctacgggtgcagccggatcaacacaggcgcgcgaatacggccaacaggccacatcatacaaattacagttacatacactcggcgagggcatcatatattacattggctcaaccttcgggatgatacccatctccttgtaattgaacaacattatcctcaattcctcaccctcaaaaagatttcacagatccccttcacctatgctcgccccaattgacgaggacaacaattcttgtttaccaatccggtccactcgaagacggtcacgctccatccccatacgacggcgcctaccacttcgcgaaaattcacccacactatgtttcgccaccacccttcgccgcctatacccagtactcgcactaggaagatccctggcaccctccacacgcggcgaagtctccgctgcagccacatccaacgcaacaaaataatccaagccttcatccgaggactcctccgtccaagaaaatgaactcccagattcaccatcagactcaaaacactcagatacagagccaaacaaattatcatcggcaggcactacggttgaggccgccacaaaatcagtattgtcagcagcggttgcttgcgcaggcccaaacgtcggaacctgcgcaacaaccgaggttcaatatcacagaaacaaaagtttacacttaaatccctaacccctattctgccacctgcgaaggccctaggtcttcggcagctggttcg

SEQ ID NO: 5231 - DNA, 716 bp, Zea Mays
tatgtagctagggttcaggcatggaattcaatgtcaaatcccatcaatacgacaatgcccaaaaataagtaatgcttctgacatcaaaggttaatagtcacaaaacatgaatatgttctaacctttcgtagcttatctagggctacacctgcatcaaatgtttcattaccatcctcatccactgtaacggctgcaagttttgataacgtgaaaccagacgcaaatgggtgcccagaattgctaggaaaaaaatcaagaaaatgttatagaatgaacagaggaaaagagaatttaaaacagatatgcaagtgctctaacaaacctgacagaatcttcatatcttatgtgtacattactgatggtgactttaagattaccaataattgtagatattaaattgtataaccatgaatttccacctggtgcctaaaacatgccgggaataataggaacagattatataggtaaacacagttgatagggaagagattaagagaatctatgataagctaatatacccagttgagatttaaaattcacaatttaccaacactaatgttgtgtggttagaaatgaaactatactttagtatggaggtttaccaccatcactttctaattagaaacaattatgaagcccagcactttacaaacaattacatgtcccatcaatgatcaatatgcttcaagagaatccaagccttcatagccatataa

SEQ ID NO: 5232 - DNA, 734 bp, Zea Mays
gccaaactagcttttgccagaatgaagatggtttccccaagttgctgagagcatgcacagttcgcctcagaatcaggagccaaccagagtatgatggtcgtgaattcgtcgagcatggcacagaaaagtgtgtcgtgactgtatacattggatgtagtccgcaccatgtggaatggagtgtcactgctgttgggcacagattcaaagacacatgccaagttgtcatccgcaaggcattgagggccctgtgtcagatctatgaacaagaagtgaccgacaccccgctcagattctttccgccctttcagagaaaccgtccagtctggatggccaggatgcgtgcattggaagggaagcggctgcttgaggacgaccccacagtcatgtacctctctacatacctgctcaccctggatgcgctatatgatttcttggctcggcaccaccgtcagatgatttcccgagcagaagatgcagagaagcgcaaccgttagctccatgtggatctcaccacaactcaagcccgtgtagctgccttggaaagtcgtgaagtcattgctgttgaagccctgaagcaagccaaggatgagcatgtccagaagctaatggaggcctacttggtaacccataaccaacgtagagccctgcggatccaagagcccgcttcatccaacccagttcaacccatgagagctgaagatccccagattcttgaaggtcacccggtctctatc

SEQ ID NO: 5233 - DNA, 543 bp, Zea Mays
gtccagtttaatactttaatgtcatgtagaggtattgctgatttaagtcttaggataaccacagttggtgaaggaatcaaaccaagaccagtgtggccattgaaagagacctcccaaccaaagtgaggtttggtcttgtacattccaacgccaatgacaagtacgaatacagaattctccttactgagctggacaaaatgtcacgtagaggtttgttctttattgtgctcttgggcaatgggggcagtagtggaacgcctgacaatcatagctcgattctcttttggcatactgttcgggtggatcatacaatatgttcaaggaagaaacagacatgctggtttcattgactaatgggtgatgctagcaggtgaccatttatgatcagtgccaagcctgccttgctggatttactattgttttctgcctgcttggagggggggaggggatcttttatgcttgatatcatttaactgttacttcagtcataagatccggagtcatttcttctatgtacgcacctgcctactgatggcctctacc

SEQ ID NO: 5234 - DNA, 739 bp, Zea Mays
actgcatcctgagtggctagcaaatcctattcttgtactcaaaaagaataaagtggattggcacatgtgcgtcgactatacagatctcaacaaacactgtccgaaggatccctttggacttcctagaatagattaagtggtagattcgaccgccgaatgttctatgttgtccttcctagactgctactctggataccatcagatcagcctggcaaaagaatatgaggaaaaaactgcattcattatcaggggttgactaaagattggagaatgatagaacacaagagctgagttacctgaagattggagaagaatgagggtaatcccaagtcaggaggagctgcgtcgtaggtcgacgaaggaagatcatccggaacaatttgaagaacattgtcaggggttgactcagccccgccagcggatatcagaattctagcatccggctcgccgacctccaaggcgacttgtttgctcgaagtcaaagaagcacgcatcgccatcaccccatcagatcgtggtggagatgacccgacatggacatccatggaggtatgggaaggagagctcacttggacaccctcgggggttgggttgcaactcgcgccacccaccagagccggatcactaccggcaacaccctcgggggctgggtcgcagcttgcgctacccaccagagccggatcactaccggcgacaccctcgggggctgggtaactgccagcaccaccctcgggggctg

SEQ ID NO: 5235 - DNA, 682 bp, Zea Mays
ctggcgcaaaataatccagactcaatgaatagccgcccaggacggcgggttggttttgataaaaccgaggggttgttctgcattttgtccaggccgaacgggtataggcagatctgagccgtccgatcgataacaaagcgtcaggattagattcttattaaaatgcgcctgcgctcattcgcattcgttggatcacgatccgatggctacaactttatatcaccctactttggaccagattcacccgatcactatcggacgcgctagaacgccccggacgaaacggtatacacgacttaatcctagccgttgatctgcaaaccaacgcccgcgggtcgtgcgccctagcctcccctactccggccgaccagggccatacggcggtgcgccatggccgacgatggctaacccaaccttctagaccacaaacacccaatctaagacgagctacgcggtgcgcaagtgaaaaaaatctacatgcactccgtactcaccgaggacaaggtcgcacacaggcagcacacggcaaggcacagacatggcgggaattccagctccgacgaggaattcaaggcgaaacgcgagtgcttttcccccaatagcgccaagggaaccttcgcctcacccggaagaagcctccccaccgacacaattgcccggagcgcctgtggtttcgcgttcc

SEQ ID NO: 5236 - DNA, 794 bp, Zea Mays
atttggaaataaactagaattgagaaaagaaaagaaaaaggaaatacaaaggaaaaaaggaaaaggatccagctaggccgctaggtcaattcggcccattagcacttcatctcccgccagcctagctaacacatgcgccgacaacctgaccccacctatcaccctcacacgcacactcgacggacttccctcagcgcgacaaagtaaaacggactgacgcgtgggccactcatcggctaacttcccacgcttacgtggtgcgtgtccctggcgcattggccctactcatagcccccttcaatccacgcatgtcctcttctctttttccgttgcgcagtgtccgaccgatagacgggcctggtttgtaagtcgcccgcgcgcgtctctgctgtgctgtcgctggttggtgggaccagggcattaggtccctcttccccacgtcaacggccacgcgaaatcggtggagtagcttgccgcaaattcgtccacctcaaccggccggagctcaaccaactttgtgcatgtcggggccgcttccccggggccgttggcctcaacccttcccttttcctaatccgcccgataaaagccgagttgcctcctctcttccctcgacctttccgtgctcgcagccaccatagacaccgccaacgaagggagccaccgccgtgggaactcgcatctgtggttgctcgggtcataagggttggccggaggggcttcacagagatgcaggaaggtggtcgtcatcacgaagaaggcattcctcggtgggtgaacccggaattcctcga

SEQ ID NO: 5237 - DNA, 441 bp, Zea Mays
gttgaatttacattgtttgtaacaaaattctaatgtctttagctatctgatctctcattctataggtgacaaggagaatctcctttttgaacaaagctttacacataattgtggtgggaggggtacccacaaggatccaactatttctgcacttttagatacatgctggcaacatatggccttgttgtggcgagtccaagctaaaaggttcatgcgctaattcacatcacatgctaagcccacaataagtgtgtcgtaaggactactctagagaagcaccccaacaatacacgatttcactatagttgctctttgtaaacctctcatggggaatgagcataaaagcatctctcacagtgatgatcgaagctgacaacaataacaaaagtcgttcaactatcctctactaccaccaagtcatctggtggtggaaaccaccaa

SEQ ID NO: 5238 - DNA, 692 bp, Zea Mays
ccgagacacagtcaacagttacaatggaccgcgggttgtttccctaaaaacagaggggtctaagtgcaactacgcagctgagggaagtgcggatagattccgaccgtcagatccgagatgagcgctcctgattagatccacccattacgaaccggtacgtagcatggtcactcggatcaagatctgacggccccggtttaatgactcctaaagcgatgaccatcagccgatcccgatcggacggatagcggtcgcccaagccgaacgggtgagtacatctaatctctaccgtccgttcaaatcaaacggcagggacgtcttctccgtccccaacgccgacggtgaggccaaccccagaaatacacggcggtgcgccatggccggcattcaccgatacccgatcccgcgcctaaaacttcgatccgaaccggaatacacgtaattctaacggtggtgaacattataggtgactcgttaccggggattggagtgccgaggtatgcagttcaaggggtggagcggatccgattgtgccgcggcgagattccggtcacccagtggtcggcttcttcctctacggcgccgagctactcaccagcaatccccgagcacccaacgggcccctggatgccaaccgcggcgagggcaatctcggcgactacccagttcgcgatgccctctctctctctctc

SEQ ID NO: 5239 - DNA, 484 bp, Zea Mays
attttattcattacatcagttcattacaagcatacaactactacaagtcgcactacacgctagcgctctctgaggtacttccgaactccttttctaaagtgtccccaaattccttgcgaaggtcatcaaggctagctagggacatatcctcgacatcgaacaagttctctatcctggcgggggtggtgctggaggggctttcttcttccgctgagtctgacatccttggctcttggtcttcttttggattttcttcgtgggcgcgagcttctttagcttcttatcgtaatccatcttcagggttcggtaggcttcacgagtgttggcctcctcgccttctgctatatcgagacactcatggagggacaccttctcctttttaagttccttgacctgttgctctaagctttccacccaggagtttaggtgggtgcagtgggaggaaaggttgtcgtagtggttatcgagagtttggagatatccg

SEQ ID NO: 5240 - DNA, 589 bp, Zea Mays
tgatgccctgtttcaacacgcccatccttcaccttcccgagtctcctagtctcgcataagtcgaggtcgctagcgcctcgcgggggacggatcgcagcagagactccgatgcagccagatccaaccccgcaaaataatctaagtcgtcctcagaagattcatcaacccacgagaaagggctccccaattccccttcctccgaagaccacaacccaaaatcagacccctccgacacattgccactaagaaacgttgcattcgcatccatcaaaatatcattaatttcaacatcatcagggtttgcttgcataggcccggacgtcggaacctgcgcagcaaccgaccttcagtatcacacaaaaatcaaaaccatcaaccctaaacccctaatgcatctcttcaacctacgccgaagcagccgccaccgcagggtcttcgctagaacctcctggaggtgccgagagcccttcagctcccgcctccgtcgggccacccatccgggtcgccgagctttcaagaccggcgaggtcatcaacttcttcttcattcatcatctgcgaagacaacacatcatttcacagctgaagca

SEQ ID NO: 5241 - DNA, 344 bp, Zea Mays
aaaggctgaaacacaggagcagggacttcgcaatagttgagggccagctttacaaaaagggtatcagccagcctatgctgaagtgcgtaacagaaactaaaggcctagagatcctccgcgaggtccacggcggagtctgcgggtcacactcaggaccaagggtcctcgcagccaaggtaattcgccagggattctattggcccgcaataatatgcacggccaaccaagtcaccagataatgcgaagcatgccagaaatttttgtctcgctcaggcaccccttcgcaatttaccaagctcatcgcacacacctggccatgtaacactccaggtgttactcagggc

SEQ ID NO: 5242 - DNA, 367 bp, Zea Mays
gaaacacggatttatggcatattcgattcagaataagatctagagcgtaggaaggattcaagtagatgtttagctctcaaattcgatgctcatgctgccctggcccaaaatgaaacgggggcagagacgttgccagaccagacggttcaaaacttacaacaaataaccctatttacgacatacacgtagtaaatagaggaggcgggggtgggcgcattgaccagttaatgtgaggatcggtgatggttggctggcagaacatatattatgtcctagtaagtcatatgattatggagtcacacagctgaaatcatattcatatggaaagtgctcaatttctcacagcagtgatgtcgttgtacccgtt

SEQ ID NO: 5243 - DNA, 629 bp, Zea Mays
gagagaagtattgtcagacgcccaaggaaaatacgtccacctatcgtggtgatcggtgatttgttcgaatgcagaatggaagtattacgtgagtaacttctccatcttaggatcctcagaggtcctggctgacacacctctggggatgctcatgccagcctccagagtgggtgatgggggtgaggcgctacccggaggacaaaggttcatcggggtgcgaccaaggggtggtgggtctcgcttgtccccgtcgtccccctcctttttcgccgcggctcctaactagggttttgttttctctagcaaacaacgttcatctcggtcctcttatgccgcacacgaggaaagtggtctccaagaggagagtgatgtctgccatcaatagggacgacggggcggtcgcgccgtcaggttcctctttgccgacacctccgccaggcgccgttagggtcggtgtattaggtttgtctctcccaatgctcccaaatggttctggcgcgagcccgacggaagcggctgaggttcacccctttctcctttttttatttttacagtgggcttggacgctgccctcatcaatgcacgagccacctttccctggatgcccttctcgccttgcgcgactgcga

SEQ ID NO: 5244 - DNA, 983 bp, Zea Mays
gtcgatatcttcaattgttttccaaacctttgttgtctgcaacatggttttcaaatcgcctagtcggctggtcgaggtctctgaccgattaggcgattaattgcgattaggacgtcgaccagggcgattaatcggtgactggtcggccacctggtcgtcctagtcatcctatatagttatatacagttatacactatagtgtatagttatatactaaataatcaagcaaaaactagcatacataaacagaaggtaataaaaaacaaatacaatagcagtaggtaatcaaagtattagatgcttacagaaacataccagaagagtagcagtagcagtcaccttcagaagtgtagcagtagcagacgatagatgttagacgtcagagatgttcttcagttcttgcttagcagttctacactcgggaaacagttggaggcttggagcagagtagcagacggccagacgccatggtccagacttgagacagatttcctcaagaacttaggataggaaggaggaagggaggagtcagccagccagattgaagaaagcaagtagcagaagtgaaaaggaaatgtgccttggttttggaaacgaggcgccagtgaggcaacgaggcaatcaatgagccaatcagtatttaatacggcacctaaaaggaaacaaaatgtttcaggcgccaaaaaggggtcaccagaccgacatttccaattccaggtttctggtcgctgtattcatgacatggacgattaatagtgattacaagacgattaatcgaacgtctagacgaccaactaacctaatctggtcgttgacccttatcgctagccactgaccgaccaagccgattaatcgcgataaatcgcgattaaacggacgatttgaaaaccatggtctgcaatttatctacccgtataatcaaacataacaatgcctgttttttaaataatttatgctagagtgttcatttggtagcagtatca

SEQ ID NO: 5245 - DNA, 415 bp, Zea Mays
agggaggaggtcgtcacagagctccaggccaagctgagtgccttcaacgaaatcctggaggagcagcgcgtttagcagaccgcgactgtggagaggatccaaaaatgggagcgggagctagaggacaaggccagcaacattgccctggccgaggagaacctcaaggagaaggatgcttccttggataagcgggcgacggatctcgcctggcgggagaaggacctcaccttcagggaggaaatgtttgaaaggcgagataagttgctagccgagcatgagctcgaggcggaggagaaggagaaaaagctagaagagcgggtcagccagttccaggcagcgcaggcagcaccgggcctctaggcggtggaggccaccaggaaggctcttgaagaccttcaggcggagcatcgcgccg

SEQ ID NO: 5246 - DNA, 286 bp, Zea Mays
aagctcgtctctcctccggccgccagcactgctcggccgaattcgtcaccgccgctcgctacgtctataaattgaccccgccgcgagcttcgtaaggtagttaagcgtccagccaccaagaattagcctcaatcgttcacctgggtgcgcgaatttggaacttcccccaaatccgcgcaagaacaccgtaggaaagacatcgccgcggtcagccccctttccggtcagtccaaccctccctctccctcgtttaagcattctcacatgtctacgatgcttgttgaac

SEQ ID NO: 5247 - DNA, 511 bp, Zea Mays
cttgtctcaccttttgttttggttgaatgagtagaattggattgtgttgtgctgatatgtttgagttcatgttagttatatttgtgactatgtttgatttgcttctttgtaatgattgatgttgtattgtttgacttttttccacaatgacatcagttagctaggaaaaaccttagatagatgggttttctctgctctctataatctgtctttgctcaagcttttcgtcccttccattcttccatacccatacagatgtcagaccttggaatgtcaactacgagtgatgtcactaaatgcaaagaatgcggtgtgttggcaagtcaaaacaacactataaataaaacaactgatgaacagacaatcaagacccaaaatgatgcacaaccaaaccaacagacaagtaaccttagaacatgttgttgttgtgagtactatggaattccttgtcgccagatcagtacaaacgaaagtgaaactacaaaacagaagaaccagattttgttttctg

SEQ ID NO: 5248 - DNA, 513 bp, Zea Mays
gcttggtaagatacattagagcgtgttcctgtgttccacctgagaggagcgtgtagtgaaattattagggataaccttcactgtttgtttcctgttttttgtgtttcgatggcaggcgacgaagaagaagcaaggatccctacagacttcaatgaatgtgttagccgccaagatcttgaggcaaacaaccagctcctaaagaagcaaatggaggagacggtccacaagtcagtgcatgatgccttcattgacatggaccttggcaagacttacgagagactggatcgatgattgtcccagatcgtcgatagacttgctatgttggagacgcaacaacaagcaccaccaccaccacctcctcgtccacgtcttcccgacgatgcggtgtttgatgaagaaggtaattatgatgaagcggccaccagagatttgcgcctacgttgccgtcttcatcaaaacacagaaggtatgccacaccgccagcaaggtaataacaatcgtgctcctgacgac

SEQ ID NO: 5249 - DNA, 450 bp, Zea Mays
agctctggtgagtaattggaggcacggcttggtggattgggtgcttgactaccttacgaacccgacgacacactcaatttataggcttcgggggcggtggcgcgtgaatttgggttggcgcggtggtggacggagaagaaaggggtcactggcgcacaagattagtggttttaaccgtggcggctctccggcgatcaccggatatagatgacccgagctattgcgacgtggttaaaggcctaaggcgtggcgcaatcacggtgaacaacacggattccggtgacggccgtaaggccacgtcgccggcgcaaatgaccgagggacagcgcggccacagtgtcccggaccaatccgcggtgtgatcttttcaccggcgagctcaatccacagacctaaagcacgaatcatggcgagcagcaccaatcacgacgaagggtcaccggcggcgag

SEQ ID NO: 5250 - DNA, 521 bp, Zea Mays
ctccccctacttctgcttcccataatctggaatcctaaacgactccaatcttcctgcgaatctcctggaaacgcagcctgctcaaagctttggtgaacgtatctgcaagctgttcatcagtcccaacttgcaccaattcaatatcaccacgttccacacattctctggtaaaatgatatttcacatcaatatgtttgcttcgatcatggtgaaccgggttctttgccaacgcaatagcagccgtgttatccatgagaataattgttggcttagcagggatgccaacgacctcctcaagtagcttctgcagccacactgcttgagctgccgcggctgcgctcgccatgtattctgcttcacacgacgatgtggccactgccttttgtttctgagacatccatgacactggactccccccaagaaaaatatagcacctgtagtactgcggcgatcatcaatgtcaccggctaagtcactgtctgaatacccaatcaatttcagactgcctcttcctcgactgt

SEQ ID NO: 5251 - DNA, 308 bp, Zea Mays
agaaaggtccgaacggagtgatgaatgctgtttttcctcgtcttcttttgccaagctaatctgatgatacccagagtagcaatccaagaaagacaacacagaacttccggcagttgagtccaccacctggtctattctagggagtccgaagggatccttcggacagtgtttgttgagatctatatagtcgacgcacatgcgccaatccactttattctttttgagtacaagaacaggattagctaaccacccaggatgtaacacctctctaatgaaccctgccgcgaccaagcgagccagctcagcac

SEQ ID NO: 5252 - DNA, 471 bp, Zea Mays
ctggggcatggagcttaacaccgaatgtggttgtgcccttgatgtagtgcataactcgtttgaggaaggaagagtggcaatcgcatggtgagtgcatgtgcagacatagttgttgcacaacatatgcaatatctagcgtagtgatgtttaggtattgtagcgtgccagccatgctacagtacgaggaatggtcttcacaaacatcctatacatccttctgtgtgtccatctggcatgcaagaaatatctgctgctttagagtatgtgggagagaaatggtcttcacaaacaccggtcaccaagggtagatgtcatcaacaaggtaatactcttagttgcactcatgaccattcaccgcgaagttcacatttgaagcttcacttttgaacatgttagtgaacaacaatgactaactaagcatgttgatggcgttgtttgaccatgccacccaaaaaagatatgccaaatccg

SEQ ID NO: 5253 - DNA, 874 bp, Zea Mays
acaatataaatttaaaatctaaagcagcctggtgatggatcctggttctccatatcagatcctcttgcggggaggggataatgccatagcggtgacttgaatttccaggggattccttccagcaagctgagcatccagggcttggatccttgcatgggcatcctctagctccatgtgtaccctagaaaggtctagggtagcactatccaggtcggtgttaagacatcccaccacaccagctagggtgttgaggcgatcttcatttgctccacctggaacaatgatggtctggttctctccctgaatacgcagaggaagatgcctatacttcgtattgtgcagctgctgccggtaggtgtggctgagagaccacaaagttcgcctagcagcatcgctgaccgaagcattgtaggtgaatagcggcgtcagagactcatgtgctgacagattcctgaaccctctatcacctgcatcaattaccctgacatgaatgcgagtgatgtagtagcaagcccgaggaggctcgtacactcgccttgtctcgtacaggggtcggaggtaggttcccaacgtgtgcaaaacatcctacaacaggttagggaagttccatgtctcgaacattgaggtgtaatgttcagtgacaggccataaccccacatagtggtcctgctgttcttcattggcttcatcgttgaggttttccccatcttcttcttcttcctcgtcgtcttcatcatcatcaccagagtcgtctgggtcgtcgcctccgagagcaagggcttggactgctggtgctggcggtgctgaagctgacgatccagctacgaaggctagtgattctgccaacggggtgggcgtaggcagaaactcctcc

SEQ ID NO: 5254 - DNA, 285 bp, Zea Mays
ggggctggtcggggctactggagaagatacacttacctttagtgacaatttttgtgcgaattactgacgctgcattgcatagatcagttccgttttgcatgtggagggcggcggaagcactccgttactagaattggggatatggatgtggttattctagtttttccgcggcggttttcagtgagtgcagaacttttaaaagttccgagaatggattatgacgtgtgcttcagttctgccgtttcttgttccaaatgtagaacgtggtatcaatagaagattcag

SEQ ID NO: 5255 - DNA, 442 bp, Zea Mays
gtgacaagggggaacgagaccgaccatccatctagtctgtcgtcaaaacgagttcgggaagggagaaggacaagggaacggtggagaagtttggcggcgatgtttcagacgacgtaccaggggaaccgtggaaggagacgagacgcagcttgcaggacgaccgatcggggattccgaggatggtgacaccgaagggagacgacggatggcgggcggctgcagctgcaggacgatggatcagggactccgaggatggcggcaccgaagggagacgagacggatggcagctgcagcctggaagacggcggatcaaggactccgaggatggttgtacgaaggggagaaagggctttgtgaaatgtcagtgggggttgagatacgagggaacaagtattgggccgctcgtccctgggtctcaaatttactgctcttgagattaggc

SEQ ID NO: 5256 - DNA, 526 bp, Zea Mays
cttgcctgctacaagcgtcggtagggcaagccatggcacatgcttcggtaggagtgaccgatcaagcggggcagcgcatgatgttggcgcgatgtagctatttcggaactcgagcttgcgggtgagactcatggatgccgccagcgactatgtgttgtggatttacacatcgtggttatgtggagggaggaggctgtcggtgaacagctggacgcgatgtgcttagtcgagacgtcccgcgcgcagtactagggcctggaacctgtcctggtactcttccatggtgttggatcggttgcaagccgcaaactcgatagtggattggattggagaggaggcccatagcgcaggtggaggatctccttgaaacggcaccaggaaggagtaccatcgtcctactggatttggtaataccatagctaggcgccaccctcgaggttgtacgacgccatccataccttctcctcctccatgattcgttgctaatgaaaatacaattcacggcgattgataaagattagaggat

SEQ ID NO: 5257 - DNA, 664 bp, Zea Mays
ggaggagcgagtctggctggcttttgaattattgtaatactaacatatatagtcagtgaccaaccatcatgtggccgatcgatcatcaaccgcaaactgacgacgatgtctgaccagtttgcttaaattctagctgactcgaaggaatctcgagtatgtaagcggcggagcaaattgcaaatacataatatatctgcacattggaagaacgcacgcatcaactctctgcagggtcgtcgtcgactggagctggagcacacgttaggcaagacgtactgttcgacacatagcttttcgagagagggacagtagaggagggtgcaaaaggatacggtggcatcgctttgcgtgtttccattccatgtgccagcctaggaaccgaaccgaacctcctctcagcagctactctctctctctctctctctctctcactcacgctcactgctcactggactggacgcagccatgctaacaacttcttcttcgctctcgccgtctgtctgctccgggtctgctgcaacaactgccagtacgtgcccccacgatcacgatgagccgtgagcgcgcgcctaaccgctctggtccaatcatccggagggagggcccccaacttgtcacgtccgttcggggtgtttgggctggaaaggtcaatgccactgctccc

SEQ ID NO: 5258 - DNA, 478 bp, Zea Mays
cacgaccggccaaccaggtgagttaagcgtagccaaacgagaccacccaaacaatcgtcagaccatttacgatctcctgcacaaacgtttatgatggttacattcccgttttacgcaaactaacacaactcagcgcgacttatggtccacggctccacgcccacgtttccgccccagtccgcacaccatggcccaccagtcgatcaacggagtctgcatcctggccagaccccaccgcatgccccaaacctaaccactcgcccgaacatctagcaaccctaattgatttcctcgtcgctctcgccgtcgtgtgctcccacaatcgccatctccaagcgccccccgcccctgcccacaccgccgtcttcgtgcgtggcgtctcgatcccccaacatcgtcgcacggtattgcctcatccatctgccatttctcgtcttcgtgcactcttctgtcgtcactccacatcaacagtgtcgtc

SEQ ID NO: 5259 - DNA, 915 bp, Zea Mays
ttcctgacagaacttgtctctcccaatgcaaaaaaaaatgtcgtcagcaggtggtcatggtggcacagagcatgagacatcgatccctgtagaagcagatgctgctccgcctccaccgagcagcaaggcaagaaacccgacagataatgaagcggtacggtaatctagcatgcattgcagtacgtaccattgcatatatcgtacgtatacgtacgtgtgtacatatatatatcgacgaattaatggagactgcttgtcttgcattatttcagacatcatcggttctgaagaacatctactggaaggagctgggtctccttgcgttcgtgtggatagcattccttgggcttcagctcacaagggtacgctggccggccttatagcttatcataacgatgctgtgtattgcactacttcttttatttgattttaataacagcttattaattaatagtacgtcttgttgttttcagacgaactacgccgcttcctgctccgtttggtactgggtgctgaattctctgcaggtatatatatctaaaaacaaataataataatattctgtatatatagctaggattttgaataggcatatatatatagtccagagcattgggggtaagtagtaataatagatctttcctcttgcatattaattgctggtcacgtttatgcgtgcaggtcccggtggcagtgggagtgacagtgtacgaagcctgtgggctaagaacagggagaagggcgctgtcgtctaataagggaggaagccagcagcagcaaagcgccctaaggattcgccagctgctggtgtactgcctgttcggcgtcctggcaggactcgtgggcggcctgctaggcatgggcggtggcttcattatggggccactcttcctggagctcggaatccctccacag

SEQ ID NO: 5260 - DNA, 405 bp, Zea Mays
gtgatatccagaccttaggtctatcttggagaaatatttggctccttgtagctggtcgaagagatcgtcgatccgagggagtggatacttgttttttattgtaacttcattcaaggatcgataatcaatacacatcctcatacttccatcctttttggtgacgaaaaggacaggtgcaccccaaggagacgagctgggatggacgtaccctttttgttgcaactctgcgatctggagttttaattctgctaactttgtgggagccatgcggtatggtctctttgcgatgggtgcagtgccaggaactagatctatgtagaactccactcctctttcaggcggcattccttgcaactcttctgggaatacatccattaattcttctattacggatatactttctgc

SEQ ID NO: 5261 - DNA, 348 bp, Zea Mays
cgacattgttcaccatgacttgatggtatgtgcagaagcacgtcggaacacaagagagttatacaagtttgggccaccaaaatgtgtaataccctacgtcatgttggtgctgagtattgagtttgatgatggtgtttgggttacaaatgagtagtggatggcggttggtgaattctctctatcaatctaatgatgtcgaggttagtactagagggatggtgagatgagatcgttttgtaggagtaacccctcagccttatataggttatcggagggatatccctttacaagttgtgaagtctatctaattctatctgagtctattttcgacattgcaggtgatcctgc

SEQ ID NO: 5262 - DNA, 576 bp, Zea Mays
tatttttttaaaacctttccttgctgaattaataatgagatctgtatgtttcttgcatgtttgtcatgtattcttccacgcaacagtatttgtttcgttcttttttgtgtggggtggggggggggggggggctctttacgcttaaatatgttgaacatgaaattctatttaatttccagcatacactggcctaccacgtctaccttgcttgctcctggcctgctaggtgctggacatgaacaatgcatttatatgcaggaaggcaatacatatgtctgagacatagaaatttgctatttgagagacagtagccgaaccttttatgcacagtttcggtgtagccattttgtcttagtaacctgcaacataacctggaaatctaggttgccttgttaaccgagggcaacgtgtatatatagttttttgtgtacattgttgccttagtgtgagttatttcagcaaaaaagtttgactggtttcttacttttgtccgtgaagttaaatttctgtttaacacttcagatcgatatatagatgtgtttgtgctgccttttatatgtcctagatacattgacc

SEQ ID NO: 5263 - DNA, 520 bp, Zea Mays
ccactctaacagatatgggacgttccattagcatgagaccggatagagaaataacatggttagaattgatgaagcagtgtgagctcctagagtccaacaaaacaaataggtctagaccttggacagtaccacgcaaccgaaaacctttagatggtgactttggtgagatggtttcttgtgacagcgggattaacaattgttcggctgaatcctcaaattcaccatcagactcgtgatgattggaagacaacatgtcccatagctcttgtactgcatgtaactgaaccgtggtagcacacttgtgtcctttagcccatttctcaacacaaaactggcaaagtcctcaggaacgacgatatgcatggagtgaagcgaccttactgtcaacagaaaaggatgaatcagccacaggggtcttgagggagtcaccagttggcttgttgaagcgatgatgcactagatacaggggcttcttggtggcacgagagtaagaagcaacctctccctagctaggatcctg

SEQ ID NO: 5264 - DNA, 271 bp, Zea Mays
atcaaagctattgataaaattagacgggctttcctctggaagggtagaaaggaaataaatggtggttgctgccttgtggcttgggagaaggttactaggccgctgcaacttggtggtcttggcctcccaaatctgctttacaaaagctgggcactgcaagccaggtggttgtggctacagaaaaccgaccctagcaggtcctggattggtcttgatatccctgttcagccacaagtcaaggcgttagttgccatttaagtgatctcccatg

SEQ ID NO: 5265 - DNA, 671 bp, Zea Mays
ctgaaatctaatctaagtcgtccgaggagaaacctacggtcactacactgtctccttccctggactgaagcacgcgactattcccctctgacggcggaggcgaccgatccggcgagcacccaaatcgccgcgccagggcccgagactcaaatttatggctacaaaatgaagcgcacagctccaggaatgaaacaggacaagggttacctgcaaatgtaaggcggtgctgctcagctacggtaccaggcgaatccgcggtgagcttgaatggccggcgagcaattcccaatcctgtggtggttcgctgactaattaatgccccgacggcttggttatgacccggactaccaccgagcagacaccaatgcgcctgatttctactgccgacatgcagtggcggctgaaacccaccccgcccctttcctgtccggagtggaaaacccctgatcccaggtggctaacgacggatcacgatgtagtggaccaagggggcgccccacgttccaggttttatgggggagagcgagcccaaagcgatcggagctgccacggccagcgtgaggagcaacaccgacggttttgcggtttagttgaagacgcctgacatctgggtcccacattccagtgacgcacgtggcgggttaggctgcacagagcatgacgagtcggtc

SEQ ID NO: 5266 - DNA, 339 bp, Zea Mays
cgggaggagagagagaaagaggtactaccgccaccgccattcttcgcattcaagggtcgattggcgtccatggtgcatccggggtgttcgggtgatggcatggatcatgcacgtgggatggtggattgtatggcttcctgggttggcgtgaattgctcatcagagcatttctttgccattgattcgccgctacatcgtggactgcatcacctgtgtgacaaccagtggtgaggacccttccacccagctcgtcttcatcttctccacatgtagcactcttcgaatcagagcttggcgcggtgtgccggaatttgtggtggtacagccatggtgccaccg

SEQ ID NO: 5267 - DNA, 856 bp, Zea Mays
cctcatcgatctggcaggttcagagagttcaagggctgaaactacaggagtacgccggaaggaaggatcttatatcaataaaagcttgctaactcttggaacggtgggcctcattcgctaatcactctcagattatacgtccctgtaatatcaccattaatgcactatggtagatgctgtgttcatgcaatcatgcttttgagattatgtgttgctgcctatgcattatttgtgcatacaagagcttaattgttttcatttttatatttcatatttgaaccataaatgtgatcaatagaaatcttgaattggatagatatatgtaactatccaaagtcctgaaacacaggtcacaccaatatatgcagcatttctttttccactgaccaggtacatttataagcattgagacaacaattgggacttgtgagaaaagattttcataagtatttctacttcatgcgatttgtcaatgcttgtctaccccatggtttatgaccaatctattaagctgagtttgtccttttatgttcttctattttgcaagatgttagccaaccatgtggataaagaaaattagcttgcatatttcaggtgatatcaaaactgactgatggaaaagctactcatgttccatttcgagattccaaattgacacggttactacagtcatccttaagtggccagggacgtgtttctgtaagttccttctcaggttataattagaataagttgctattatctcaatcttttgcattttgacttctttttgtgcagctaatatgcactgttactccagcatcaagcaattcagaagagactcgtaacacgttaaaatttgcccaccgtgcaaagc

SEQ ID NO: 5268 - DNA, 436 bp, Zea Mays
gtctgcaccgggtcgcgccaggcaaaggagaaccttcgttgttggagcagagagcatgcatttcgtcgctgaaggagggagctcatcgtggagttgcggctcgatgcgagcagcaccaccgtatccaccattgacagtatgaatgccctaagccaattcgtcgtgcctccataatatttagtgagtcgtcgggtcagaatagtgcatttgggcgaggtacgagtgacacgcaccatggtgccaccgtggtcctgaccgccgccgcctggttcatgaccggaggaggaacaaagcaacccaaccattgattggctagtgtacggtgatgattaggttcggtgaataccggttggatctctcaatccatgccattgttccgtgaccggagtgtcgtgggtcgggcggcagtattttaaatctgaactgtagatattgg

SEQ ID NO: 5269 - DNA, 352 bp, Zea Mays
cttcttctccccggcccattccccttactcccgcagcccagttctccacccgtgcacgcacttgcgccaaaccctagccgccatgtgggcccacgtcaccagtaacacccccgccgcacgaacaacttgggcacgatgcacctgggctcgccactgccactgcccgtgggtccctctgctaagcttcacgttccaaccctttgcgtggcctcactgcccgtgggtcccccttatcgaaaccatcttctcccaccggattatggcgaacttgtggccgtgaatgtcgccaccaagcgcatgagccttccggattcctcgccaacggactcttaaaccgtgtataaagctcgtg

SEQ ID NO: 5270 - DNA, 735 bp, Zea Mays
cccagggataataatatacacacctaaatgaaatcatatcatgcacgcgtggtgctcttggcattttcataaaaagcgagtttgcaaagaaggtgatcctacggcgagcatccaagtttattggaacatccattgcagaatccttcatagtcaacaataagtgcagccggacaaactgaaaccaaaacacactattcagtacgacagaaatattagcatcaatttttagaaagcagtgtaattgcagaccttctccctccaataatcttcctttatcatattcatatttaggttcatgaatctttgatttctctcatcctcatctttgaaactgcttccacaatttcccatacaagtaaatatcacattttaagaggaatggtcttacccaaactgttaaaaccaataaccatataaatcatcataaattttacctctgtccatctttcatgaaatcacgtgtcgtaatttccataaagtcttgcagggcattaacaattttcctctctccaacatcattaataggttcacttttctgcaaatgtaagacagtaagcaaaaacataacagtaaagacaaaccgcataccgaaattaatggaaaatatagcactaataatgttaccacgtaccaggagctgcaacaatctagccaatgtagaacttactttgccgatttctgccatttcgaagtcttccaagaaagttttttttatcatgctataagtcacttttt

SEQ ID NO: 5271 - DNA, 317 bp, Zea Mays
ctccaccaccgtgaactcacctcaccgcggccagccttccccaggtctgctcattcccttctcgttcttgttctagcacccttacatgttagtgatgctccccgacccctttaatcgaactgaaccacctgggatcaccgggaacacaacaccttagccgccatgctctcggtcaccgtggccagagctccgtagttgatcataagcgcaattaagttaggggaaatggccggggtggatccaattgtgtccctgtcgcttgggagctctagccgtagcggcatccggccggtccagcttgccagtgctcagctccc

SEQ ID NO: 5272 - DNA, 436 bp, Zea Mays
aaagatcttcaccgtggatgagtatgggacactgtggccgctctgtcgcctcatccacttgccggtgacgtggccgagcggccgtcatcgaggtgtatgtcgtttgccatgatcgcgccatgtcgtgaccctttcaccacgtcgttgctagccataatagttcactagtgaccgccgtagctcctcaaccagtgaatgccacggtagaacgccgcagtgactcagtccctctctccgatcgccagcacacttccttcaaattggacgccaccaccaatggagtctataaattgctgccccagtaagctccactaggttattacgcatccaaagcaccagctctcgcctccgatcgtccaccagagcctcccaatttcccatttcccccaaatcggtcagaacgccgccgtgagacatctcgccgtggccagacgtc

SEQ ID NO: 5273 - DNA, 279 bp, Zea Mays
actctttctatctgaccatcagtttgaggatggtatgctgagcttctaatcactgttgttttgagtgacttttgtagctgctcctagaaacgtgctacgaacggtgcccctctgtctgacacgatagtccttgggattccatgcaagcgcactatttagtcaatatagatctctgcgtatttttcggtcctatgggtggtatgcacgagcaagaaatgagttgtcttggttatcctatccataatgacccgaatggaatcgtggtgctgggaggtgttg

SEQ ID NO: 5274 - DNA, 353 bp, Zea Mays
tgcggtttccttgcacgtagtagccagtgcgccggttacatgacatgtgggcccgggcctccatgctggaccgctggatgcgatgaagccgaaagggtgcacaaccgtggtgtggttgcgtgcttcctgcatggcagtctgccctttcgaccgctggtttcggcaaggatggggaaatgcttataaccgcggggcagttacatgcttcgcgtgcggcggtttgccttctttgcgtttcgggtcagctcgcatgacgtgtgggacccagcccccgtgtagtagggtgggaaccctggagcacgtcggtggagactttgcccgtgacgcttggggtgcgagtgaggagatctgcc

SEQ ID NO: 5275 - DNA, 314 bp, Zea Mays
caaaacagacgttctacacaagttttctaaaacgttcagatgttccagctcctaatcacattttctcgcttaaatgacgcataaacgatgtttaagcgacgttttaataacaatggacgtcccagctggaattcttcgtcaacaccacgaccgaatgctcgaatcagatcgtggctgcaatggcttcatgggtggcggtcctggaatcaagcgtttgcggccttcgacgcctggcaccctgacatcaaatcgtcgatggcgagcatcaaggtcggtatcgaattggtcgaggtggcctttgccaaactgcctcg

SEQ ID NO: 5276 - DNA, 553 bp, Zea Mays
aggaaaaaagatcgaaagggagttggatttggtctcaaacgtgagcttatcgtccgcactcgattgccttgcgacgtggccgagtggctgatgtcgttgtgggacgccgacgatctcagtcgtgccacaccataggccatcttaccatgtcgtcgcgagtcatggagagtaactagggattgccgtaggactttgccccagtgcgtgccacggtgaactcgcctttgtaacaatatcccgtcaccgtcgtgatccgaatctcgttcaaattcggaccaaccatggtcggcttctataaattgagcgtttctcttgctctgccctttgtcacgaacccaacgcaaccccaaccacgtcctgccatccaccgtagcccgaggaatcgagatttcccccaaatctgttatccgcgcctccacgaggcatctcgccatggctagagccctctaagggtactacggtcgggcttaagagtggtttgagttatcttacatgtcgtgatgctcatcgacccgcatgattgaactctacagcagtcgaaaccctataacac

SEQ ID NO: 5277 - DNA, 620 bp, Zea Mays
caatttgatccgaacaccattctagagcttagtccacgcacccccgcggaagtgaaggtttctcggtctgttctcggtgatatagcgaagtagcgtacaaattgggagcatggtaagctttagcaacttaccagggcttaagaatggtagctaggaaggcgggtggagggacaggacgacgcgtcgacggaggggtgtccacggtggcgcggagaaccaatttgggggaaaacggaattgcttgggctatggtggatgactggccgaggttagagttgcactgggtttgttatgagggggcgaatcaagggaggtgctcaatttatagaggttggccacggttactccgattttggaagggatttggagggcgacggtgacaagacattgtaccggcgagcacgatgtggcgctcgacggcatacaaacgtagggagagtaattctgagcatgccatggttacgactacatggtaaaggaccacgtcgtggcacaatcgagttcaccggtgacctatgacaaccatgaccgttcggccacgtcgcgcaacccccaaacccctctgataagctactgcccgcgacccaatccatctccccgccagatcttttactccccgc

SEQ ID NO: 5278 - DNA, 289 bp, Zea Mays
attttgtgttttaacacttcaatgggaggtgattcgttagtacaagaaatttgtatcctcctttccttgacaaaatctatgacatcctgattcaaaatggaaatttcctacacaaacacgtaagcagttacaataagcaacgtaaaagttctataatagtgtatcagtcaccttcaaagtggcatcacattagctgatcctgatcgtcgatgttgttagttggtgtctgttgtcctacactggttgtgtaaccagataatgtgagtcaaccagtgctagcctcatcttc

SEQ ID NO: 5279 - DNA, 660 bp, Zea Mays
ccttgctcctctccaagcttgccttctggtccgtatgctacctctcactcctcctcgccttcatcctctcctgaatgacctgtctatcttggtttccttggaaatggatttttgtcatgtctatctttagtattttgtttgtgttacactagatgacctgttcatagattattgttcctattttctaaacttggtcttatgactaatagtttttaatgagtggttctaactggactgcttccaaatgtagtcattggctaagccaaaatttgtatttcataaagtaactaagatcagtgtttgtctggatcgtgataaggctgtagcatttcccataatcgattagaccatatcctaggattaaggatgtgcaacagaacccttttgttgtcgacgatatcaatgagcttcagtttttttcacatccataactatataccaagccactgtcccagcttgcccttaattgcccacatcaaacaatttggattccaattagtgcttctagttcagttgggcggttatttggcttcacatatgtttttttggcacgaattcaatcgtgttctaactgtttagttcagtgtaaatggaggtggttatacttactgataggataagctggctgatttggtttgttcaaaatttatatgttttttg

SEQ ID NO: 5280 - DNA, 358 bp, Zea Mays
gtgactgaagcctgtatggaacagcccctatcctctaaatgacttgatatggaccaatgaatttgggccccaatttggatggtgcagctgaggtgacgcccacagcagtcctttgttgcaatcataaccatacccaatcaccaatgttgaattccacctctcgatgtcgtttatcctgataactcttcatagttacttgggcttgcactagtcggtccttgatttcagcaagaaattcatcactgtcctgcaactgggcgtcaatcgcaaccacctttgagtcccctgcttgataggagaccatcggaggaggatcccacccgtagacaaccttgaatggaaaacatttcagtaccga

SEQ ID NO: 5281 - DNA, 308 bp, Zea Mays
atcgctttgcagggcctgaaggcggtatagtgcgctcatgcactgaacagtgatcctcccaacttggtcgggatgcatggcccacacgtccttcacgtggctcactcggttgcaccacatggggtcatccctcttctcagcagggaagagtcccagtgggtgcattaccatctccaagggatggtagccatagaaagttgtcagggtcttcatagctgtagcctcggtggtgtcgtccgccctgaatccaatattctcgaagtcaagggaacaccaacccggctgtagggggtgagcctccagagtca

SEQ ID NO: 5282 - DNA, 378 bp, Zea Mays
gctcatgagtcgccatggccatgaaggagaaaaagcttcccaaacctagatcccactgcttcacaaagtgacaaacagagaggagcaactaaacaaaattacctttggaatttcgtggggaggtcaccggatcacggcaaccaactgctatgagggagggtgaggaagagaggttaggtgaagaagataggtattaaatagcttctgatgcacctattaaatagcaatgattttgctgccgatgcagctaagttttgtgtctgatcagagcttctaatgcagagcttccgatgcagctaagttttgtgtctaccaaaatgtttgaatcaattccatttcattatgtttgtcatatgggcatctcatatctgtatggat

SEQ ID NO: 5283 - DNA, 546 bp, Zea Mays
taagtgtttccaagactcagagaacccccacaacggacggcgggttctattgttcagaaccccgagggttcttatgtaaaaagcacagcgaagcgctatcggttgatctgcaccgtccgatcgactatggagcgccctgattaaatccactaccctgcgaaccggtacgcaatctaagcctttcgatctaacttggacgttccagatttaaataacctaatcccactcacgtacgatcgatcggaatcgaacggcccacaacccccaaacccgaatcggtatacaggttctaatcgcagccgttggcttgacgatcgacggcaagcggtctttctcctacccccagccggctaatcgaccgaacagagcgctcgcggcggcggcgcccaccggcgcccggagaacctcaccccccgcgccctcctagacgaattcgaggagttatactcgcggccgagatgagagcgaaacaactagaggagttattaccgtggttcgggacggagaagtggttgcccacgcaccgcggcggacccgcggcggagc

SEQ ID NO: 5284 - DNA, 302 bp, Zea Mays
agttaaagagttctgggtctagtttgtaaaactcttaaggcacagggttaatcccgcggaggacggcgggttgtttatcaataaatccagagacccttttgtgaaatgagtaggccgaaggggtatcggtccccatgggatgttcgatctaaatctaatggcacggattagatacgacgcacatcaaacctgcgagtaaccctggccgtccgatttactccggacgcgccagattagaccgcccacgcgacgaagcggtacacagtgctaacctttcgatccttgatttacggcttggattt

SEQ ID NO: 5285 - DNA, 441 bp, Zea Mays
ttgcatttatgtctgctcctctccaaaggcagtgccgtctgaatttatcaatctgcttgatcactgtttttgggagtttcagggtgcacatgaaataagttgggagagaggagaataccgcattaaccatttgtagtctgccaacctgagataaaaagacagaacttgacgcaagtcttctttcgatcttctgaacgagggggagaatcgctcccaagttgggttttttaaggcccaagggaagcccgagatacattaaaggcatagctccaaccttgcagtgaaacgtatttgctaagattgccaatttctggtctgagacattgatgggataaatattagatttgtgataggcctgtagaatctgcaaatgaattaagcatcgctttgaggaagaatagttgtctagggcaagcctccaagatcaaaatagtgtcgtct

SEQ ID NO: 5286 - DNA, 704 bp, Zea Mays
gttatatagaaatcagagatccaagcctagcaaaacgctcggtcaggcactctgaataagaatcccatggtacagtacgcataaagatcttaggttcagcccccctcgccgccggtgatctcgcacccggattcgcttcggcgtcatgattcacgcccagttaaacccagataatgatcctcgggtgaaaaatctagcgctggggatgaacttgggacactgtttcgccctggtcgccgtacccactcgacttacggccggtctagataacctcaccggagttggctgcctgccgctcaggtgccacctgcctaggtgctctaccacgtcgcagtgaatcaccttagcatgttcgttcatcgccggtgctcatgccacggtgaaagccatgaatcacttgagccagtgacctctcttctctccggccgccagctcgccattccaaaattgggtgccaccacccttggacactataaattggtggcccagcctgctccgctaagaaattgtgcaccaagtgaaccaacccgcacctccaatcgtcccccacagctccccaatttgggattttccccaattatgttctctgcaccgccgtaagtgagctcgccgtggtcagctttctgcaggtccgttcacaccctcctcgctcttgtatcaacactcttgtgtgctcttgatgcttctcgacccagccaattaag

SEQ ID NO: 5287 - DNA, 376 bp, Zea Mays
acataccgtttctccagcgtcgtttatcggccggggtgcgtggttgtctctttacggatccgtcggtcgtggtgattgtggcgttggggcctctgtggcgcacggattcctcaccagaggaacaacaccaccgtggaccgcacctcgacgtggctgtgcccctgtgctccatttcctcagtaagaaatatgtccctcgtgttcgtcttgccttccgcatggtatatctcgattcaatttgatgcttagcgcccgggggacaccgattgatgacctcatcgtagctcggctgggtggggatcgaggggcgccgccgccgcattagcctggggttgggggacctggctgccgttggtttccattcggtcaggttcgcg

SEQ ID NO: 5288 - DNA, 620 bp, Zea Mays
cgaggagcaacaaaagcgctcagacgcaggagccagcctctagcgccacgggggaagtagtagggggaactatggtgttgatggttacggtggttgtggtttgttgagcaactaatacagtggtgccggcagtagtgatcggagtcagagtagaggagggaggaggaagcaagggtgaagttgggtggggatcggattccgagtcgacctcgcgcacatagaagaatgggcacgtgtccatggcacgctgcatatgttgcatgttgctctagcgagggagaagaatggggagggaggggatttcgagtcgacctcgtgcacatagaagaatgggcacgcgtccatggcacgctgcatatgttgcatgttgatctagcgagggagaagaatgaggagggaggagagcaaggaggaagaaggggtaaaatgggcaatgttaatgtacattacacacgtgggtgtagataatggttgaggccaaatttttaaaactagtaatgcagccactgtgtattatgaattataatgacatcttcagaaaacttgatttttgtaatagcatatatctaaaaaaaccaaaaccagaaagaaaaaggaagaaatgggatgtggatggtgct

SEQ ID NO: 5289 - DNA, 782 bp, Zea Mays
cacaatctctaggatgactatctctactcaaatgggatgcttggatctctcagaatggcctgaaggtgttgcacaagtgtttggaatgaaagcacaactctagtgttgattagtgtgtcgaatggactatttggggagtatttttagtcccaaatccctcaaagagttgttgtgttgattgctgaaattctgctttttcgagtgcaccgtatcggtcgagtgcagcaccggacctcctttgactgtggaatcaatgaatcctaattgggtgcctcccatctcaagtggcaatggaccggtccaatgagccatcgaactgcgccacgccagctaccctgtcagctagccattggagtcgactgttgaacctgaagtagttgttgaactcatctggtccggtacacaccagactgggctagtgcgcgaactaccttctgccctgatctgcaacatcaccgcataagtggtccaacacaccactagactggcctggtgtgccaggccacaaaagccctttgaagagctctctacatcagtggtccagcggaccaccagactggtatgatgcactaggccataaaagctcttcagtagaccactttgtgtactaggtccagtgtaccaccaaactggtccggtgcaccacaaacctgttgtgttgaagtccaaattgagcaatctccttcaaattgatttggctttctttgagagtattcccatgacatagacaatcatttctagtgactatccaactagtataagttctagatctttacttcttt

SEQ ID NO: 5290 - DNA, 1985 bp, Zea Mays
attttgttcctcaaattggataggagtcatagagcatttactaatattagtgacgaggctggtggctgatccaaacaccctcataatttccttgatcagaacaagctcatcatgacaaggttgcaggaagagaactacatcgcggcatagagggaaacacgctgaccatgaccatgtcgtagaagaggatgcaacaaacccaaatcatttgctctattgatcaaagagtttagcgcatccatcaccaaaataaaaaaatgggagagagcgggtccccctgcctaagacctcgctgatgcacaatgaggtcccatggttctccattcacaagaaccctggtagaggaagaacgcaacaactttgatagaatactacaccaaaaaggattgaaacccaagtgctgcagcatctccaaaaggaagggccaggacacagaatcgaaggctttgccaatatccaatttcagcagcaccctaggtaacttttgattgtgaattttcttagcagtgtgcttcacaagcataaaattatcatgaatgcaacgatttggttgggagagaccaatcccacaaacttacttgacaaacgatttgcaagtaactttgtgataactttcgcaaagctatgaattaaacttagtggctgaaagtccttaacttccaaagcttctgctttcttaggcaagagagcaacatacactgaattcagaaggtgaaatctagagacatctccctgcatcagtctactaaccgcagccataaaatcaatcctaattacttgccaagcagccttgtaaaaacggcttgtatagccatccggaccgggagccttatctgagggtagggacaagatgatagtccaaacctcatgctcagtgataacctgttcaagctcagcaagatccatgcccagctgatgaaaagtgtcaagcttcagagttacatctcttgatcctgcagttcctaaaagactgttatagaagtcccagaccgcttctttcttctcttgctcaaacagcagtctatcacctacttgcagcctggtgatgaagttatttttctttctatatctagcatggtggtggaagtaggaggtattagagtcaccatgcttcaaccagcacaagcctgatttcacacaagccatggttccctcccaagacgccagtgcaagagaatgatgtttaatacgatgcctaagccattcctcatgccaagacaaagctctaatatctctagccatctccaacaggtgcagaatctccttggcatacaaaatttgctgcttaacatttcctgtttttttctgactccatgattgtaaatgaccagccaacctcttcagcttgtcagcgaaacattggaaagggcactgcatatcaagaggtatggaccaagagcgttccacctcatccatgaagccagggagcttaggccagaaattttcaaagacaaaacgtcgcctaccttgagtgaattcctgcagtcccagaataagcgggctatgatcagacaacatagaggccgagctttgcaacatacagtctgggaacaaatcctcccaatccaccatgaagaaaaccatgtccagccgcaccggcatcggagcagcctgctcatttgactaagtgtatttccttccatgcagaggaagctcgataagatgcagatcattcaaaagcctttgaaatctccccatcattgccctattcaggttgttgttattcttgtcttcagcgcgataaatcaagttgaaatctccgccgatcacccatggcccaccacaaagagaacgaatagcttgcaactcttgaagaaattgaaatttgagttcatctgattgggggccataaacacccgtgaaccaccagctggagccatcagcatacacaatctcaaccgtgaccgaaaaggagtccaccctggagttgaggattttacatggagtccctttccaagccaataacaccaccccgagtgccaatt

SEQ ID NO: 5291 - DNA, 482 bp, Zea Mays
ggatggtccagcgagccaacaagacgacgcacaagacttagggggagaattgttggaataagtctcgtggtttgtgggaaggactataacagtcttttggtctttgctacaggacagtagccctgcagtctgttggtccttgctacaggacagcagtcctttggtctttgttgaagttggtctttactacaggacaacagtcctttggtctttgctgcagtatggacagcagcagtccttgctgcagtgtggtgtggacagtccttttggtctttgctgcagtatggacagcagcagtccttgctgcagtgtggtgcgggcggttagcatctgcttttgtaaagcagtccttgctgcagtgtggtgtggacagcagttagcatctgcttttgtaaaggtgtaggacatcatctagtgtagccatagtgtaggacagcacctcaggagcatatgctcggcacctcggcaactccttgggctat

SEQ ID NO: 5292 - DNA, 492 bp, Zea Mays
gaatttgagagatggggaaggaggattggagagtgattgtcgtggtttttgtacttgtgacaaataaatttatacgttagaggggattttatggagttaccgaccaaaaggttttgctctaataagcttggagagagaggatttatactggtcaggaaagtcttctacatctagcatggtgctgaagtctttattgatatttgatcgtgttacaaggtgaagcttgagctatcatgcttgtgcatctactaggtgctaaatgcttgctggcttgttacgcttgtatggtaagttcactcttcacttggcttgtttagatatcgattgacttgggtttctataggaggccctattccccttatatagtcgagggaggaggtggtctttgttacatggagaaattggtggggtgtatcatttcccacctttaggttgtaggtcatgtcctatgctttcgaaggcctatcatcgttcgcacatttggtctgacgg

SEQ ID NO: 5293 - DNA, 606 bp, Zea Mays
agaaaccagaaaataataaaataaaaagaaaaacttacttgggccgggaatgccattttggcccatctcggtcgtccccgccagcccactgctcgcgcgtgcgtttgcctctggctcactgaccactggaccgctccctggccagacacgcccacgacgcgttgccaccgccaggtgggccacctccgtcagcttcacctcctcaaccggatcgcgtaacagattcaccgcagagctcgtttcatccccgagatcaccgctaaccaattgcaatcaatcgcccatcgatggctggttcggtgtataaatgtggacccctcccaagctcctcggatcatccgccccaaaagcttccattgggcgtggctccgaatccatcccaagggaatcgaacgccaccgctggtggctgtttggttgggtttccgccgccgtcatcgtctggcaataatacgggtgctcgcgccactgagtttgggtcagcgtgcttgcaaagagatcccggaggtgttcgcggaccccactgccccagaactcaaaccatcgcaccgtaatttctcgtcgccgccctgcgcatcgcctggatccgccgctcgccgtggccaag

SEQ ID NO: 5294 - DNA, 412 bp, Zea Mays
ccggcaccagaagactcgatcatttgggtttccacccaaagggcccaacttcagtagaccagctggacccactccgtcgtgattcagccaccagagtcagagctccttccattccccctcagtggcaagcaaccaacccccggcaaatgcatgttggcactgtggtgatcccagtcacttcaagaacaactgtccgcagctgaagccaccaggaccgtcctcctcaccgaccagcagggaaagtcagtctcttgtcaggcacagccacccgccagtgacccaatgatgttcaatctaacaacagaaagtatatcagtagtagaggaattcatggacgtgtttccagaagaattgccaggaatgccaccagagagagaagtggagttctacatagatctgattcctggaacag

SEQ ID NO: 5295 - DNA, 357 bp, Zea Mays
cgggtgaccacgccgatgtacgaggccgcgatgatgtgtctgtcctccgagcaattcatggcgccccatggttcctccttcccacgcgatgctagaaaccctcctagagatcaggagaaacacccagagccaaagacgagcccatgaagacggcgcaggcgcatatccatgacatcgacttcatcatcgacggcggatccccttttctccctctcatgcactcacaatgtcgcccacccagacaacccgctagaccacgcagaaggtctgagtgactgcgcagacgagatctggttgcagtggttccatccaacttgccctttccactcggtggcactgctacgaggcgaaagaagc

SEQ ID NO: 5296 - DNA, 584 bp, Zea Mays
ctcagatcggtgcttgtcagcatactttttcattcgactttgagttctgagcagatgctgctgtattagtttggaaaccacttccctttcctgcatccactgttccagatctgtcacaagaatagctgaattttgatgtagaccgaagtgtttaggaggatgcccatataacacctcaaatggagatcgatccagcgaggaatgagaattggtgttgtaccagaattcagctataggaagccactgactccatttgcttgggcatgcatgaacgaaacatcggaggtatgtctcaatgcattgattcacccgttccgtctgaccatccgattgtggatgatacgatgaactcatgcaaagttgtgtgccagacagtgcaaacagttgctgccagaaggcgctgatgaagacacgatcacggtctgacacaatgttgtctggcataccatgtagccaataaacctaatccaaaaagagcttggcaactttgggggctgaaaaggggtgagacaaagccagaagtgtccatacttggaaaaacgatccaccaccacctatatacagtctaccgcaccagacttcgg

SEQ ID NO: 5297 - DNA, 709 bp, Zea Mays
gtcttttgctgctttttctgtttacatgcttgatagttcacccgtgtgcctaatgctgccggtgtttttagaagtaatcgctgagtgatgtttgatactgctggcgttttagaggtaaccgccgagtaatgtctgacactgccggcgttttagaggtaaccgccgagtgatgcttgatactgttggcgttttagagagccgggtaatgcctgaaactttgctttcccgagtagtgacctgacacttttagaaatagtgctcgaccaaggaaaccccatttatacccgcaccgacgtgcttttttgatttctgagccctaacttcactttttgccttcgaaccactcctccgcttccttgagatttcgagcatgttcattccgccagagaaattgcgatggcgccaaaacggaagaggaagagtaccgctgctgcgctcatcccgctcatcgaccccaatagccagcttccctttgctggtaatcacatgtgtgttgtttctgaatctgaccttcttcatctcattgaagttggggttttgctcccaaaagagctctgctcttggtggatttgctgcggtatcaccgttctgacagaggatactcatgaatctgttgtgtacgttcctttccttattcatggacttgctcttcccatccctccctttttccgcggtcttctttatttctaagaattgaatttaacgcatc

SEQ ID NO: 5298 - DNA, 387 bp, Zea Mays
ccaggatcagacctcctgtgcaaactcaggtgctctcaagtcagaattcttctaagtggggtagtgttcctggcagacttaaccatcttgccgtcctaagggattgatgtgatactaggaatggattggctagctaagcacaaaggtatcatcagctgcgcaaacaaaactgttcttctcacagatcaccaaggaaaggcagtttcctgtcaagcccagccgccagtaaacgatccgatgatgttcaatctggcaacagaaaacatgtctgtaatcgaagagtttgaggatgtatttccagaagagttgcccgggatgccaccagaaagaggagtagagttctatatagatctccttcctggcactgcgcccatcgcaaagagacca

SEQ ID NO: 5299 - DNA, 660 bp, Zea Mays
tcctcgtgcacgctagagagggtggcctcaaacatgtttcgtgcttgcacccatcctacatggccttacagtacccgcttcttttcccttacggtgatcgtggataccaccttggaataaaatattctgacatgggaggaggtgatgtctcaggccgcaagtatgttacaatgcttgaatttgttagacatcgttcccattacaggctcaacgaaccgaacccattcacttgctacggcaggctgagcaaccagctagcggttgatgcatattctacgatcgaggcgtctcggttgcagttcatagcggaccaccaaaaggaattgcgttgtgaatccgttcaggggataaccgacgccattggcaagggtctcaccagtgcagattcggttggtggaagagttattgtgccggcgtcttttacaggcgggcgcaggtaccatgtaatgaactaccaggacgcgatggccatatgcagagtatacggcccaccagatctctttgtcacgttcacatgcaaccctaaatggaaggagatagtcgatgcgctgcgcttcgagcctggtcagcaaccatgcgatcgttctgatatcgttgtaagggtcttccatatgaaggtcgatgaattcatagcagacattagagaaactaagattttcg

SEQ ID NO: 5300 - DNA, 756 bp, Zea Mays
agcttcagcagttttcttagtaggaccagggctcaaggcctttgtagtctccataacagtgtctagcacgctggccatcctcctcctcttgggagttgcggcaggagcttttttgcatcttcggcaaatttgcctctgccggtgggctcaggatttctggcatttttattatttttccacctgtggctcttcggccttatcatccttagcttcgactgggctaactataggcaccttcggcactacaatcggctcttcaacgctctatacaatcggtgcagcttgttttgcttcggcagttgaagaggtcccttcgccaaattcaggcactatggccggttcaatatatcgcggccggtgggtcagaaccttcattttcttgcccttcggcatagcagtggtggacaaagcgactgtttttctcttcttcccttgccttcgtaacaggtagagataatcagggtatacgaagccaatcgcatcaaataccctgttcaatcttttcttgccccgacccccggaggctgcggacaatgcatcatcttcggccttcgaatatgtcccaaccagctcgtcactagtagcttcaatacatttcaaccagtcagcatttggttcatcaaacttctctctaaatctgaaggtatatttcaatcgaaccaggccaccttcactagattcgacagtagtttccttcggcatatcccagctctccacaagtggccacaccctgaaggatatgtgctcttgaattaa

SEQ ID NO: 5301 - DNA, 495 bp, Zea Mays
tccagtggacagcgtcgatgttggtagagagatgagggggccttggctttcgggtactcggctgtggctagagggcggcataatgacgagatgcggaggcggcaacaggtcccagttttctttatacgctcacgctggtaaagcctgattccaagggctgttcgagcgatccgatttcagcagacgacaaagcggtgtaggcgagtttgttacgaggaagacgaagtttccggcagcgctggcgtggggaaagtgaagaggagtttcagtccgatggggtccacccgccattgccacaaatgcggccatcgacgtggagtcggagccagggagtgggcctcacaggtcggttaaggtggagagcggtgagactagcctgcatccatgcggacagtgccagaggtttatgtactcgcgtgatggctcggctgagctgctgccacgcgggcccgacctggtagtgacacgaggtgaaggtggactggctaattcctg

SEQ ID NO: 5302 - DNA, 436 bp, Zea Mays
tacgaatttgaacggagggagcatgggtggaccagtcgatgtgagggcgctctcgggagtgctctgtggctgcgacgcgatgttctcgatgcccagctacagtggcattcaatcagttaagcctgtgagcttcactcgcactagaggttgataaaccatggctcagagggatgtgatctaacctgagaagggctggccatggcgaggtgtcttacggcgacgttggtgaccgattttgggaaaactcggaattctcgaactacggtggatgtgtaatatcccaaaaaaaatattgaccaaaagttgatcttcggtgcgtggatgtgggaaagggttgtgggatgttggatgctaagtcagaagacatctgaggcgtcgtatcttttctcccacaaaagccctaggtggccacccccctttcccctttctggccgcc

SEQ ID NO: 5303 - DNA, 403 bp, Zea Mays
gttcgatcccatgtaaccctaacctcgttggatatataaggccggttagggacccctacaagacgatggaatcatgtgatatgcgtagctagagcatagttctcacgtactctataacctcgaactcaagagcaattccatcttagcagcacataggatgtacaatattacacatctctgcgacacgaacctatatagacctttgtgtctcatcgtgctttgcacgaaccatcgagctaatcgttgatctctccaaccacaaaaggactatgtgggatgtcctgtaatgtgttgctagtgctaaacaccgacagtaggggcaccaataaggattagtaagaacctttcaaggttcttgatacctcaataaaaaatattgcaacatcgatgggagtttgcatat

SEQ ID NO: 5304 - DNA, 490 bp, Zea Mays
ctttgctgactttcggtggtcgatatgttgaggagtgggtccgagtgttctatgctacagtttggatcgaccctaaccatctatggatgaggttccggttcgagcgtgaggacatcactttgcatacagctcagatccgggagttattttgattccctgagtcgacgatgaggcttcacagcatgtgatatggtacctcaggccctcctcatcgtcctcacggtggagtagctcctgacacctctcacatcgccgctctgttcagacctccattcatagacgtgtctcagcgttctcctgttgacttcaccccagcgacgaagttcttatatgagctcatgaggcgtaccctgctaccgaggatgggatacagagaagccaccacacatattcaactctggctccttggtgctctggtatctcactctgtgttcaatgtggttgatttcctaatctgtgagatagaggacatagtgttggatggtcttcg

SEQ ID NO: 5305 - DNA, 1811 bp, Zea Mays
ctcgacgacctgaaggatgaccaggtccactagaccctgtacgccgacaacgtcgtgcaacaacgtgctccttacggccttttgtccctatgcttttaagacagggactattggccgactaggaaaccgctcgtcttcgacatcttcgtggaggagcacgttgtgcaccgggtcctccgccagttcgggctgttccaggcctcctcattgcctgtgcagcacatcattcctgcgaacgtacacaggtatctgctactagccgttgcaattcgttcaataaaaaaagacaaaaaatcatcctctcaaaggacgacaggaccatatttctacaaattttaaaattcgtacaatatttttacaaacaaaattaatttaaatataaaaataaaaaaaattggagagctagcattggcaagaacgacgctcaaggaaaaacgcgagcgctcgcggcctgtggaatgatggcgcggaaggcaaaagaaacgacggttgagatcaagcccaagatccatccaaaggtcctgattttggaacgtggagtggccaggttcgagagctcatggtgcagagatatttcgctattagtagatatgctaaaccagcaccaaacagtgcatctgtcctgtgcgcttaacctactggtcgtgaagccccagacctacatcatcaaacgtggcaaaaccatcacaatttgtcaaattacagtttaacactttccctaaaaaacaaattgtgttgcaattgttttggattctggtgcaaaacactcaatcatttgtcacatcatcatcacatcacatttgaccgaagagactcctggctgcagtggaagactggttaggtttggcttgcgacttcattccctcctcaacaacatccctattgtttgatagtggaaaaaagaaaggattaatgagtagagcatcaaagtatggcaaagcatggccctgtccactctaatggaagccatgttctttggacaggaaatgatactacatgaaggcgctgagatattcttggttctctggtttaagattagccccttcataaaaggcaattgcagcttcaaaaaacctctgccacaattgcacatatcaccatctaaagataaacaagtgggggatgaattgctaatcaaatcagagctccaaaacccacaaacctgtagctcgtgcaatgccgcaccttccctgtagcaagctatccccgaatctggtctcaatgttcgagattgctttgcatcctccaaggcagtttcagccatcccaagcaacaaccagcaaaggctcttgtttgaccagagtgtggcattgctaggatccaagtcaatggcctgaaatgcatcgttatcccaatcatttagataatctgttaaacttttgatgctgagcgaaagaactttacataggattgtgctgaaccctctgaagtcaggtaaacttataactctcattattttgttttgctctacacagtagctatctatgtggaaaaaatgtttgattcatagttacctgtgtgtaagcatccaccgctccaatgtaattttcatttttataggcatcataacctctcaaattagcttccatcgaatccccttttgcgctagatgacacctgacaatatattatcagagttcattagttaaaaacaacagttacattgagtcttccattatttaagatgatgtaccatggttatctgccatataaaatctataacctaagatagtagaatccttgactcatcgaatgtatatatgatcatgacataccccagcagattgcggtccggctaaactggctgaattc

SEQ ID NO: 5306 - DNA, 347 bp, Zea Mays
atgaacaatcgtgttttaagacttatgtgttgtgtgttaaaatttaagagtggacatgtatgagtgtatgaccaattatatgtagacaagattgtgtttgtgtacttttgtgaatgagacttgtatgtggatgtgaatgaacatatgtgtggttaggatttgtttattgtgagcttttccgattacagttaccgtttcccgatcaatttcgagctattttgcttggatttatccgttttcgatataccggaatttaccgaacggtctctgtttccgactttcccgtttaccgattccgaccgaacaaaaatttatgcgggtgaaaacggtgagaggttttttccgac

SEQ ID NO: 5307 - DNA, 384 bp, Zea Mays
gtcgtgcttatgaaacgaaacaggtgcacgttctgccgagagagatgttcggggcctcaacgttcggcatcgccatgaaactgctccgatggctgccgatcaagatggtggacaggctcctgctcctggtggcgaggatggtcctgggtgacaccgagaagcacgggctgaggaggcccaagctaggcccgctggagatcaagaacgtcaccggcaagagccctgttctggacgtgggagcatggtcgttcatcaaatctggaaacatcaaggtgagggctgctgtcaaagggtcacactgaaataaagaagagtgacgtcgttcgtgcatgggaatggaggagtgtactaggagtgcatccatccatgcatctttcattcatt

SEQ ID NO: 5308 - DNA, 538 bp, Zea Mays
caaaaagagtgagggcggacctggaagcagctagccatgatgaagtggttcaaggcggcgcagtcgaccaaattgggggaagaaggaaattctccggctatggtggctaattgaaggcgggaatgggtgctttggcttcgtgataacatggcgcaacaaacctggccatcaatttataggagcgctaagcggtggtgtcaaattttgcaaggggagaccggcgaccgaaaggagaggtgagtcaccggcgtaaactatcgtggcgctccccggggtaatgcctccggtgacgaactgacctcctacgaatatctactgtgacatggtagatcttctaagcacgtcgcgcggctacaatcaccggcgaactccgacgaggacaccattgtccactgcaaggcaagtgtcacggtgaacagtccggcaataagtctctctcccttccctgatttgagatctttccttgcccacggttatccgcaagtcacggcgcacggatcgcgatgattgacgtcaatcgcggcggagggtcaccggc

SEQ ID NO: 5309 - DNA, 410 bp, Zea Mays
aatggagtggcaggtgctctatctacaaccaggatcacaaggatgtggtgtaggaggaatccaaatgggaaacataattgggatctagtgacttcttcccctttcgtagagcactatcaacacgatggcaaacactgagcagcaattttctgtaccgccccctcagtagcagttttatatgcccaggactccttagtacttgcctatgccaggtcttcctcagtacttggtcgcacctactcctgcactgaccgctcctttaccacctcagtttggagctcctcgtctgcctcatcctgcaactccttgggggttcttcttctgttaatttcactccgggagcttcctatttggcgggtgttcctagagcatatgtgctatcatttgcggatggcagagatcatggagac

SEQ ID NO: 5310 - DNA, 821 bp, Zea Mays
ggattcggttcacgtaggtggcgtcgacaaaggcgagtgagcaagtatagtcagtatgggagtggttgagcaagagggagaggcggtgataatgggagtgcacgacgttagggtcgtgggaggccaagacagtggagtcgaggccaagaactttgtaggggtcgaggggctcgaatgggaggcatcgacgctggccagcgaggagagcatcaatggcagtgaggaggtcttcagcacacgagatgttgtggtcgaaagaaatggtttaggtgacgaaaggatccaagagggcatgtgggggagtcaaatacccgcagtcagatcgaggccttggggtgcttagttgtagctagccaatatttttgttgttcttatataattgcatgtatgaaagcttatctattaggcgagaagcgggggagtaatagatatatgtgctacacgcgtgatgcacaacggtggaaattagtgttctgtaggagtagagaagtgtttcttccttatatgttatgaccttgtcatatcttctattctgataagctatttgacacagttgttcttttagaatcctcctagcgaaaggcctcctcctagtattgattgttgagtctctcggctcttggcctcataagtcaacatgcatttaatctgattcaagtattcatgagttcacacattgccttttagcagtagtggtgtgagttagtcaaacaatagatttgttatcataatgtttttatagatattatgtagacttgttcaccctaaaattcaaccatatggaccttataacatgctctcgtagattgtcatggtttttg

SEQ ID NO: 5311 - DNA, 550 bp, Zea Mays
gtgggtatctcaccacaattccccgagtagaacgccctgcactcgacgcggtgtgggtccacgacggagggagagcttcaacgataaatttcgggcatgtcaaggattctcactttcaattgacgcggccgaataatcccacacgtgatgggtacccaccatgccccatcccgatcgcctagcagtggtgaagacatgcgtctacggtggcggcttgacctccatctctctgcttgcttaggttatggtggctcagggatgtggcttgggttccaaggaggtcgtagggcttatgttttatagcacatcagtggagtctgaaccggttgcgagagaccgaagcgggtacgatttggtcgttgttagatcccagcaaacgcggtgagttcacacggaattctgttacgatctgacaaaagggagatgggacctctgcgtgctggggaccacatgggagtgacgacgacgtaagcgtgaaacgggggagacaggtgcgtggggcccacgatgccagcgacccggtgtggcgcgtggctgcacggtttgggca

SEQ ID NO: 5312 - DNA, 554 bp, Zea Mays
caaaaaaaaacagtgagcgccctgttgagaaacgctgaggaccggtcgtcgcagggctcggcctcgcgcggtgcaatccgggggagtacgcatcggctgggggctttcactggtgctcggtgatggttggctggggagctcggcctcgccgccggacgtgagtacgggagagagaagaggagcagtgggctgctgccgccatggacccttgtcgatggtgtccgcttgtgtgtgagggagctgtcgctcgtgccaccgtgggaaacactgccccattcctgatgaactattcgttggagtcctcggaccaccaccaaaccgcctcctgccatgattgttggtctccgcgacgtgatctccggtaataccctgaccagcgtgtccattcgattccccgctttgttttaagtcggattagattcccggtagtgcaccattcggggcggatcgacacacaccggtggcgccgccgccgtgaaggttcggttgacgccatcgcccgatgccaggtggaagacgcctgcccagccgttgaagcctaatcggacgtccag

SEQ ID NO: 5313 - DNA, 533 bp, Zea Mays
ctccgatctcgtggcacccctttcgttgcctcaacgatatgcttgtggcctgctcccggtgcctgtctcgtgcagcggtatctcgtatccggagtcccgagccgccggtgggcttggtcctctagctatccgtttcgggcatggtttcttagttcgtgtgatcaagtcgcctcgtaaacgcatcgatcgccgagctgacatgtataatgatcgatgcatcgtatgcgttcgagctaggcaggcatgccctggcctatctatatggtatccatggtccatgcttccgtagttccgtcgtgatgcaaaccaccaccagtgatggagattgccggcctgctggggactagacagtgtcttcgttttgtgcgcttgtgttgttgtacttgaaccactgctttcacctgaagctctgaattgatctgtcagccgtggctattgctgtacgttggaagagttgccagttctgagtttctgactgtagtgcacatatgtttcccattcagcaatgcatatgattttagaaattcatgaga

SEQ ID NO: 5314 - DNA, 275 bp, Zea Mays
tgacgaatagtgggggacgggtttctaagaaatccaagtatgaagtttcacggggtccttgcggataagccctcccgccttgttgttgaagttgctgtcccaccatttcacgtaggaagcgggtgttgtcagcggttgcggtgatcaaggcggcgatagcctcggccagcgtgggcggtaccggcggtggattgggtgtatcatcttgaccacgggatgttcccgcgccgtcatgtgcacgagttcgagatggcatctgaagcaaagaaatattt

SEQ ID NO: 5315 - DNA, 649 bp, Zea Mays
cggacgatcagtttgtctgcgtttggaaaatatcgattttggaccattttgttttttttgttacgttcgttttggcccactccactgcagcccactaaaccatccacagcccacgcacagaagcattgagtttgagacgcagacagagcagcacgcacgcacggacgccatggaaagttcgaaaccctagaccggagcacatcacacaggcgacggtgggcgacggcacgccaccggcgactggcgccccctcctcggtccccagcgcagcggagccttgctgcaacaggtgacttgttctcccactccccagtccctagtccccgacttcctgttcaccgacaaccgaccgaccggcgagtggcttgctccctggctgtattgatgtgctcatgttctgtacacctatattgatgtaatgttgtgtttgttgttgctcagttgctcactcgttgcctatcccaaatggatgaaaaactagctctctagttggttgattaggcctggtcatactcatacacgcgtcaggcctggttgattaggctcctgatttatctctgtattctgtaatatgcctattgcctactgagaaatgtggcaaatgcctgaggctctcaaacaactccccagtccccagtgcccaactgcc

SEQ ID NO: 5316 - DNA, 762 bp, Zea Mays
tcccccactgcgctgctttcctctcgcgtctttggtcgctccctgtctcctctagatctgattttcatggtgggtggtgcgtaacctcttttcgcccccccggtgcctgaagaagagtggcctcggttggggtcgggttttgctcgtgacatcaagaatcttggattgatggattcgaaaaacaagaacatccctaatccttcctgggatcgatggggacagaaagattctggccaaggatcccaatcttggactcagaatcgcaatcttagctggagattgaaaccgcagatggggaaagctgatccacatgagggattgatgtcttcttcctcgggtgatggcactcaatctggtaatcccatcctgtcccctacttctttgaagaaagaaattgatttcgctcgtcccgcgttttgtcaaaaatgtggagtggatggacatcatgctagaaattgtttcaatactttgtggtgtgatatttgccgtaaggatactcatgttactgctagatgtgttttaccaaaacaaagcaaacctaatatgcccatagttggtatggcagctgatggtctgggtttttatctctctcacttcgctaaacctatttccaaaaaaccaaagaggtttttcattggattggttaaagtgattgagggtctggtgtctgctgaggatttggtgaaggactttggtttccactttccctggggaaaaacttggaaggctaccaaatgtcattctggattcttaatgcagttt

SEQ ID NO: 5317 - DNA, 616 bp, Zea Mays
tgcgcgcaccgaattggtgaagggcgggtgtaatccacgcgacaatttctcactagacggggacgaccaccgcggggttcctcgtgccgcggctagcttgggtcgttgctccaaaccagtggtaagcacgtatattctcttcaaaaccttcccatcttcgcgtaggaccgtccagggagggaatggaatctgaccggtagacgcaatttctcattggaggaattcccgccgccgtgtggatacaccctgtcacgacccggcgacgaacaccggctcggacgagaaggaagaggagaatagaaggaatcagaagataagagttcgaggaagagcaggtatgtattctattattccataattccttctggaatacacaggctggctttatatatcagctgccgaccaacacagtacaggcccaaaagaattcaacaacctggcccactggcccagacttcactgcacaccacaacaacaattatcgctccgtctctacagggcctccggtgatacctgtcaacctccggcgatctgggttgtgacaataccaccctctgaagtaccatctggcccctagatggttgtgctgggaaaacgagcacgaactacagtataa

SEQ ID NO: 5318 - DNA, 724 bp, Zea Mays
agggggagcagtggggagcgccgcgggcagtggtgttgcgccgttacatcggtggggtgcataccgtagaagcatcgctagctcgggccgaacgcagcagtggcggtggcggactctggcggtggaggttgaagcgcgaattgctcgccggagatcggcttacgctcctgtccgctccacgcctggttctgtgagcacatcatcttgatttctggtacgaatcccttctatagtctcgctttgagccccgctttgtttagacgtgatccgcgtagagaatcatacaccgtattagcctcgggctagctccggcgaagtcccccgtcgcgggtgcgcgttgcgccaccgtcctcgccgtcggccgaagagagttaccaggaaccgtagatttaaatattgacggtcgagatagattccagaggtaacgattcggtcaagtatagcgtgaaccgtcgattctgtaatccacggttctggatagatcgctcatgcattaaatcctatccttggatcatagatccaacggtgcatagcgcataccagttgggtgatgtggtcttataatccgagccctcaagcgccgatccaacggttgaaatctctgcgtaccccttcggcgctgcaaccttgctaaagagtccctgaaatttatataaaccaacccgcggtccagtcctctgttcgctaggtctctggattcttgcgccgaggccccttccttctc

SEQ ID NO: 5319 - DNA, 1238 bp, Zea Mays
ccatcattgtaacgagggggtggattatgcacgctcggtagtttgtcaccatagtaagttgttgtgaagtttgacacctcctctagagtatgcctctgcaatggaagcctcgattttgcatttatttctacatttctttcgaatagtctttagacatctctcgattggatagcaccaacgtccctgcacgggcccccacattcgtgcctcatagaggagtgaagaatcaaatgctgcattggattgaagaagctgggtggaaatatcttctcaagcttacacagtaacacgggtgccaatctttccaagtctgcaaccacggtccgagataactcttttgcacaaagatgacggaacaaatagctcaattctaaaagcgctagccagacatgctctgggacatagcctcgaaccatcgcaggaagaatccgttcaatccatatgtgaaagtcatgactcttcatctcgcagagtagataagttcaccccctactcaggttagctgcatacccgtcagggaacatcaacatcttgatccactgaagtacttccttcctctaggccctgcttaggatgaaatcggccttaggccttctccatgtcttcccaccacttggcggcttcatctcttggtttggtctatcacataacgctgccagatccactgttgcctttacgttatcctttgacttatcagggaatgtccataattgttgcccaaagtgcctcggcaacattttttcagtgtgcatcacgtcaatgttgtgtggaaggagcaggtcgtcatgataggggagccgagtcaagcccgacttatgtgtccacatatgctgctcaccatatcccataaaaccaccttctgtattggccacgagcccatctatctgttgacgaattttggcaccagtcatcgttgcaagtgggcggtctgtcactatgacacctttcgtaaagttcttgatgtctaggcaaaatggatggtcaggagagagaaattgtcgatgtttatcgaaggacaaatatttgccaccctttttcaaccaaatgaacctaagagcttccttgcaaactgggcatgggaacttaccgtgaacacaccaggcgcagaatagctcatatgccggtaagtcatgcatggagtattggtaccaaacatgcatttttgaagtttgtcttcgtagctcggtcatacgtccataccccttcctcccaagcacgtaccaattcatcgatcaaag

SEQ ID NO: 5320 - DNA, 771 bp, Zea Mays
atccagaggcataggtagacaccagagtaccacaaaggttggtgctgccaaagcttagcgaacatggaatattgcatgattttgccacagaggcttcagaattacctagtaaagtagagtgtgacattataaagccctcagcatgctcaagaaattcgccttgcccaataaacttcaaaacatatggaagtattacagcttcagcatacaggctagaccctggcatgtttgaacattgaatctgaaatggcaaatcaaaaacatagacactatttaggggcatgactatgctaaaaaggtcaagattattaatatatgagaaatgactcacgttgctattcacaggaaatatgtgggacaacttcagcaagtgaaacaacctgatcctataattaatataagaaggaatacacgaggaagggccaatatgaattaattgcctccattgaactataacataaatattgaggtgatgcaatctttttttgtaaggaagcttctgaaacacagctttacaggatagggcatcagcaacatcataatgatctatgtaagccatcgggccttcaagagctagtttgtaattgacaatctgaatggcaaaatgaaaacaagataacaattgtttaatatatacagacattagataaaacggcagctttactgttatgcgaattttctttatcatacagcagaagataacctaagtataccaaacatcaccggattggtgaagatgtcgacgaactgcagcgtggtggggacgctgag

SEQ ID NO: 5321 - DNA, 366 bp, Zea Mays
gaactggtctagctccaactccatgaggtgggaagcgagctgagctgcggctccatctctttggctttgatggcttcggtgccgcctccaacagtgaccgctggcccatctctttcaaggatgttcatcagcctcgcggagatggtggccacgcacttccaacgcgaccctactgatgtcaagtaggtcatacctgtagacataagactagggccccgcttgaaggcggatgtaataacttttgttttcgtaaggtacttttgagtactacttatcgagaagtattagcacttatctgcatactatttgtccctgttgtgtgtggtgttgccgactcctccctggtacctgccccctaggatgtag

SEQ ID NO: 5322 - DNA, 1012 bp, Zea Mays
gccgggttcgagcggcttaccgagctcacccacctcaacctctcctacaccgacttcgtaggcaagataccgcacgggatgcggcggctcagcaagctggtgtctctggacttcaccaactggatctacctcgttgagggcgacaacgactacttcctgccgctcggggatgggaggtggcctatcgtagagccagacatcggagcgctcgtcgccaacctcagcaacctcaaggagcttcacctcggcaacgtcgacttgtctggcaacggggcagcgtggtgcagtgccttcgctaactccactccccagctccaggttctcagcctacagaacacccacatcgacgctccgatttgtgagtcgctgtcagccattcgctcgctgaccaagatcaacctgaactacaacaaagtgtacggccggattccagagtccttcgctgacatgccttccctcagtgttcttcgtcttgcctataatcgcctcgaaggacggttccccatgaggatcttccagaacagaaacttgacggttgttgatgtcagttataattctaaagtatccggtctactgcccaacttctcatctgccagtattatgacggaactgctttgtagcaacactaacttctctggtcccattcctagttcaataagtaatctcaaagccctcaagaaattaggtattgcagcagctgacgacctacaccaggagcacctccccacttcgatcggtgagctcagatcgttgacatcattacaggtttctggggctggtgtggtaggagaaataccatcttgggtcgcaaatttaacttctctggagactctacagttctcgagctgtggcttatctggccaaataccttcattcataggtaacctcaagaacctgagtacattgaaattgtatgcatgcaacttttctggccaggttcctccacatctatttaatctgactcaactacagatcataaatttgcattccaacagtttcagtggtaccatcg

SEQ ID NO: 5323 - DNA, 428 bp, Zea Mays
tatagagaaacaaagagcggagggggtggtacccgattgaaggagcatctcacgcatagagggaataatgtcaagaaatgtccctctgttcctatagacataaaggcatacttccgatttgacataaataagacaaaggaaaagaagagttctaggttcaggcagcagctgagggcgggtgaggcagcacgaacccattttggggacaatgagtatgaggatgaacttaaagtggctctgcatcagtcacgtgtggaacatgaatttagtcagagggctagtgcaaggtatgacaggggtggtggatcctctagccagagggtatctcgagggccacttgataggatgatgggaaggagtagggaacaagtacctaagcgtgttagagattacaatcttgctcaagcctctgaccaaggcaacaatat

SEQ ID NO: 5324 - DNA, 358 bp, Zea Mays
cgtcaattaaaccatgggtccctccaactaatacccaactaccctgatattatcctggttgtgaagtcataaacagagccatgcctttggtagtggcatggtgtcagagatgttcttttgttactgccatgctcatcgtaacggcacgtgttttatattgcctccatggatgctggtgtctgtgccattgggtatgacatagttggtagccggtgtagccttttatacttgataatacttcatggtatactgacatacgcacgtgtgactacaacgttgatgcacatattgaatagtgatcttgagtacattgctgcctaagtcgtggcgataatgcacctatcgaactgtaatgccg

SEQ ID NO: 5325 - DNA, 403 bp, Zea Mays
ataagactctggccccaccaacaggatcgtatcccctcctaaggcgggtccgggggccactgtcggtaccctaaatcaggggtaccctcttctacagcatgaagacgccgcacccatgcgacgtctccaggccacgcggaggacggcgcctgaccccaccgcatgggcaggccaaagggcgccacgtggcaagaaaagacaatacatcccagtatgtatcgtggggtccggacctccacagaaggacaccggacccctatacgtataagtccggagcctccgagtaaggtctgaacctcagcaaggtcccggaacgaggaggaccctggcgtgagtaggggtccggtgctgacacatgtccaggccttgcccttcacttcccgctcaggtggagacccgctgc

SEQ ID NO: 5326 - DNA, 784 bp, Zea Mays
cttctacaacaagcccgacccctcggcagaaggggaaacaagaaggcccccgacaccagagacaacgatgacaagggcgacagcttccccaatgtgcataattgctacatgatcttcggaggggacaccgtcaacatgtccccaaggcagcgcaagcaggagcaccgggaagtcttcttgatcgaggcagcgaccccggtgtacctagactggtcagatcacgccatcaccttcgaccgggatgaccacccggaccacgtcctgaaccctaggaagtatccactcgttgtcgacccatcatcgacaacacgtgcctcacaaaggtgctcatggatggaggcagcagcattaacatcatctatgcagacactctagatctcctaggggtcgggcactctcaaatctgacctcggaccgtgcctttccacgggatcaccccaagcaagagggtgcatcccctcgggcagattgatctacatgtctacttcgggacccccactaattttttaaaggaaaccctcacgttcgaggtggtagggtttcgaggtacgtaccacgctgggctcgggcggccatggtatgccaagttgatggccgtcccaaactacatgtacttaaaactaaagattcatgggcccacgggcatcatcaccgtaggctccacttaccaccatgcctatgagtgcaatgtcgaatgcattgaatacgctgaggcgctcgttaactcagaggccctcatcaccgatctggagaaccttgctaaagagatgcccgacgccaagaa

SEQ ID NO: 5327 - DNA, 560 bp, Zea Mays
gtgctagtgtgtggaagaaagaatgttccgtccttttatagctcaagggtggactttaccgttgaaacttatattctactcgagggtccttggcttgttgcccctaggccgctctagccctcctagcgtcgtctatgggggtgtgcgttgtcgtcctcccgatacgacgttatgtcatgtctgctctccatacggggcactgtagcttgctcggtgtcaaactgtcaatgttgcggtaccgggtcctgcaaagtggactcacggcgaggttctgggttgtgtctaatatagcttcatcttccgtcataccccttacatcaccttccagcatgtgtaggtatacatccactatggggtattgtgtctaatatagcttcatctgctcgttgcggtcccacacgtcggtcccgcctccatcctggcctccctcccattcgctcctcgcgacatcgcctcctcctcgatgcccgcgcctctgctaaggatttctcgggttgtgccagtttcagggaacccacttcctccacgaagaattccgttgatagccatgagcatgtcga

SEQ ID NO: 5328 - DNA, 300 bp, Zea Mays
ttcggtttcaaggatgttcatcagccttgcggaggtggaaagtgagttgagctgcggctccatctttcgcgtgagcttcaccagtgcctcatggtacaccgccatgaactggtctagctccaactccatggggtgggaagcgagccgagctacggctctatctctttggctttgatggcttcggtgccgcctccaatggtgaccgttggcccggctgctgaagacgccacctagaaggtcgtacaagatgtcgcggagatggcggtcgcgcgcttccatcgtgaccctactgatatcgag

SEQ ID NO: 5329 - DNA, 714 bp, Zea Mays
ctggaattcaaccatgatctagtgagagtttggctatggttgctatagcaagattgtagctggatcaccaggcaacaactttgctactagtggattagtaagtcaccacagggaaaattgagatccaggccttgcaagttgggctgtcaggcgcactgaatagagactccattgtacagtgactgaacaagatcccatgttcatcccccttcgccgccggtgaccatcgcgtcgtgattcacgccggccgctgcgattcgtgcgccgtgacttgtggatagctgtgggcgagtaaagatcttgggaccagatcgactagcgctcggttatggctaagctcaccgtacccacttgctcgtcgatcgatcaggatagacctcgccaccgttggccgcttaccactgtgtgccacgtgctaaagcgctagaccacgtcgcagtgaatcacatcgtgcatgcccggtgatcgccagagagccgccacggtgaaagccactaatctcgagcgccagtaaccttcttcctctccggccgccagcgtgacttcgtgaaattggatgccaccgctgatggagcctataaattgccgcccccgcctgctccattaagtagctgtgtacccagtaaaccaaccctcgcctcgaatcatccactagagctccccaatttgggatttcccccaaatcaaccaaaaacaccgagcggtgtgacctcg

SEQ ID NO: 5330 - DNA, 428 bp, Zea Mays
gggaaggtcgcgtcggcgccggtccccgtcggctgtgtggaagacgaagtcgaggtgctcagcaggcaggtccggtcgcgagcgaagacgaagaggccgcaaatccgattccgccgaggttcgtcgcgaccgcttccttcgtttcccgctccgagcatcgacggcttcctcggatccggacatcatcacttcgattcctcttgtttcggtcgtaatcttcgcttcttgaggtacgcccttcgtcttctatgctttgtgtacttcatgcgcctccgtttgatgaactaatttctacaccaatcgactattcctgttaaccgaacttcattacatgcgacaacaatcgattaatccccggtgcaaacatgtacacggatctggtgtgccttttagggtttaatttttatgggagtcaaaatcccgctgaa

SEQ ID NO: 5331 - DNA, 461 bp, Zea Mays
gaaaagtgtgcacagatgacggcgagggaaaatcgcgacgctagcatttatagagcaggggaagagccgaaggcaaggtcggtccgcaaagcagatttcgaggagttcggccatatcggtcaaagcgaccatcggttatcagggcgaatctcagcggatggggcccacacaccagggcttgaaggcgtgtggacacgcaggtcccgcggcgagcaaataggggccagccttggggagtagggagtgggttgcgcggcgaggattcagcagcatcaaaccccacgagctgctcggtaatagaccagagcgagatatcgtggcttggtccttggttagaaggtgacctgacaggtgggggcggattgtcatcgagtctaggcgaatcaaaggaggagatagaatggcccattgtggtaatggcggctggattgcaggatgggctagatgaccgccgagctggg

SEQ ID NO: 5332 - DNA, 293 bp, Zea Mays
ccagaattgtcctgcaaaaacacaattagagagaatatgttgcactgtttcatcatcttgatcacagaggacacaactctcagggaagtcaacccctctcttttttagcatgtcagctgtccaacactaattattaatagcaagccatatctatatgtagtttaacttgataatggccgccaactactggaacctttttaaagaatgaccggtgcataatacattgtatgaattatgaaagaccaaggagatatgatcaaatttagtttggagtgctaatgtgataaaaaatc

SEQ ID NO: 5333 - DNA, 590 bp, Zea Mays
ctggtttgtcagactgactcaagaagcgtttgatggtatagtgatctgaacttgatctctggtttagcccccctcgtcgccggcggcctttgcgccggccatcgggattcgtgcctcgggcgtgtggatttcgctcaccgtgaaaagatctcatcgcggatgggtttgagttactgtgtcatcgctgtcccctaccccttgcaccggcgacgtggctttacggccgtcaccggagttgccgttcttcaccacgatttggccacgctccaggcctttaaccacgtcgccactagccgcaccagctcgccgataaccgtcgtagctcctcaaccggtgagtgccactgtaaatcgtgccggtgactcaccccttctttccggccgccgcgcatcttcaccaaattcactggccaccgcttagcgccactataaattgatggcacggtctactgcgttgggtcatcaccaagcccgagcacccactcctgccaccgattagtcaccgcaactctccaatttcccgttccccccaattctgtttccgccgccgtggtagagtcctcaccgtagtcagcgaatcccaggtctgtt

SEQ ID NO: 5334 - DNA, 462 bp, Zea Mays
gaggcggacgagcctcttgaggcgcttgtacgctaggaacttgtctctccagtccgggaggctctcctccacctgcttcttgagcctcttgccaaacttcatctcttcttgttccctcgatcacaatgctagctggtggtggctcgatcaacgcatgcaacagctagctctaggatgttctagctggacagaagatatcttatgcaagagcgaggcgaatgggcagtggggggaagatgcagtcgagactgaatgaatggagaattaatgagtgcaactgcaaggtgggtttagtacgccggaatggaatatctcacggcatatgccatgcatggaggtcgggtcggtgagggggaagggaaggtgagcggattgatggtacggcgcgcaacgtcaacgtgactgaacaaggtttgttagtctccagcctgaagtctgaaccaaccgtggcccggtgacaca

SEQ ID NO: 5335 - DNA, 328 bp, Zea Mays
atgactccttactacagtgaagaaactgtatattcaaaaagtgatcttgatctggagaatgaagatggtgtatcaattatattctacctacaaaagatctttccaggttccatttttctttggtttcccttcaatctcaatgattcaattatttattattgtgttaccaattttcctccttttttatcctgattcctaatgtagatgaatggaacaatttcatggaaagaaataattgcaaaagggaaagtgaagtatggggaaacgatgaaaatgtactgcaacttcgtcattgggcttctcttagagggcagacactctgtagaac

SEQ ID NO: 5336 - DNA, 462 bp, Zea Mays
acttgctacattggctcagccttcggaataaggcctgccacacaaaaattaaacaacatcaacttcaactcttcgccctcaaaaagattccgcagatcttcctccccaatacacgtctcggacgtcgatgacagcaaatcccgctggccaccccgatctagccgaagacgggaccgttccatccccatctgtcgatgcctcccacttcgcgacatctcgccaacattgtgcttcaacaccacccttcgtcggtggtgctcttcgggcatcaccccagccgagggaacagacacttcgcgtgcttcaggctacagcaaggactccgccgtgaaatcctcatccgaagactcctcaacccacgaaaacgagctcccaaactcacccccatctgatgaccaagactcagtttcagaaccagacaaatttccactatcaggcactgtattcgcagacgccacaaaa

SEQ ID NO: 5337 - DNA, 365 bp, Zea Mays
ggacggagcaaaccatcggcaacaagggcctccagatcccccacgacgacggtggaggaaggccacgggtcgcgcggcggaacgacggtcaccttgttagccatcgctggacgaaggtggtggaggcggaggggatgaggtgcgcggttttcttttccctggctattctcttaggttgcggaaaccaaagcagaaggcgagcacaaatggcagggtaaagaaccaccgccgacccctcttctgggtatataaaggcccgagcgagatctattcaaaacttcgcccgaactcgccgcaaaattcaaattcaaaggtgaaaagcccgttcctcgaatgactcgagcacacgcaacgaccgccccgcg

SEQ ID NO: 5338 - DNA, 486 bp, Zea Mays
ttattgtaagagaactccgcatagggtagactcttgtcccaactgccaccatgcttaagcacacaagctttcaacatgtcttctagtacttggttggttctcttagtctgaccttcagtttgagcatgataggccaagctgaaattcaacttcatatttaggcactcatgcaacttctgccaaaactgggaagtgaactaggatccacggtcagacacgattcttaggtactccatgtagacaaactattcgtgccatatacaactcgactagcctagctcccatgtaattagttctcacagggatgaagtgagctactttggttagtctgtccacgattacccaaatagagtcataccctacagaagtgcggggtaggcccacgatgaagtccataccaatttcttcccacttacactcaggtatcttcagcgggtggtgcaatccagttggcctctggtgttcagcctttaccctttggcaaac

SEQ ID NO: 5339 - DNA, 351 bp, Zea Mays
aagccccctgttcttaggattaggcgggtgcatttgccacctggctagagttcactctctgatagggttcatagttcatgagtggaaggtggaccgattctccctctatggtttcaagacgcagttaatgcgggtggttacttataacgggtcagtcctaggtcaggcatggaatccacgagtggcttcccctcgatctacccgacccccttttggctctgcctcatccgaccccggctcggtgcctcgacacttaactgggggtggatccttccaaggcgaacctttccctagccttgtactgactagtggtcccgtggatcatttccccgacacttgaaacctatttac

SEQ ID NO: 5340 - DNA, 579 bp, Zea Mays
ccgaaaccagaggaatatttgcgcccacaaaaataatactactccaaccgccatgattagccctgacgatgacagcttcggaccctttcttccccaaccttcccaaaccaataaactaatctcccctcactgatcgcgctatcccccacttatatacgtacccaccacgccaccctccccatcaccattcactcatccaccaccaccaacggcgccgcaacccccacgcaatctcaccggaaaaacgcctcctccagttgagctgagcctgagctgcagctgagccgccatgtgcccgcggacccactgagccaaaacccctcgaccccgcccccactgcaggccgttccctttccaagatccgcgctttgatccgtccgccgccgcccgagaccatgccggccacggacctccagggctcctccccgttctcctccttcggccgcaccctcctctccctccgccgcgacgccccggcgtccgcgtccgcggcggctgcgatgccgccgcccggcgtcgacccggagctcgaggagttccacgcccacgtcgccgcgcacctcgcggacctgagcggcc

SEQ ID NO: 5341 - DNA, 463 bp, Zea Mays
agggcagtatccacaataacatcgaagactgcccagaaattcttctggcaaaacattgtttatcggttcagagtctcgtccgggctcacagttgacaatggcaaacaatttgacagccatgactttagggatttctgcttctccattggcaccaaacttgccttggcctcagtataccacccacaatccaacggcgtcgtggagcgcgccaacgacaagattttcacagcgatcaagaaaatgctcctcgacgacaaaaagggcaaatgggccgatctgctacctgaagcagtcttggcactgaacacgaccgagtgccgagcgaccagattcactccctttcgcctgctgtacggatcgaaggccatgaccccgcaggagatcaaacatgggtccccacggacaagcgcttcagcagtacccgacgtcgacgagccaacttccaaagacctcattgacggag

SEQ ID NO: 5342 - DNA, 455 bp, Zea Mays
gaaaaataggaactcgcgctcgtcgccttcctccaggcaaatgccgacgtgtttgcatgggagccatcgcagatgcctgggatccctagggaggtgatcgagcaccatctaaagatcaaccctgacgccaggcagtgagtcagaagcctcgcagacagtccgtcgagcggcaggacttcatccgaaaggaggtccggaagctgctagacgctggctttatcgaagaggtccatcacccagtgtggctggccaacccagtcatcgtccccaaggcaaatgggaagcttcggatgtgcatcgactacaccagccttaacaaggcttgtcccaaagacccgtatccacttccgcgaatagatcaaatcgtggattccacctccgggtgcgaccttttgtctttcttagatgcttactatggtttccatcaaatccagatgtctagggaagataggaag

SEQ ID NO: 5343 - DNA, 651 bp, Zea Mays
cggagcagaggagtgttccggtgatggggctctggcaaacttcaattggtcggttccaagagcaatagaaggttgaagacaagctaaaacagaacgcaatttggtaggtactaacccgacgagcgctggccacggaggagtccttcacggcaacgcgaagaacagggcggaatggatttgtggactgtgtaagctcttctggtgaaattgagttgattgctcaagtgcttgtgtgcgtgatgtggtgaagaagcagggtctgggctcaatctataggccgatggccggagttggatgagatttacggcggtgtaaccgcgctggcgagctcacccacgcggacagagccacatcgatggtctggtggccgccgacttaccgcgcaacgccacctcaacgttttgacgccacgccacggaagatctttaccgtggccatagacccatcccctagccgcggtggcaatcttatcgccggcgagatctttctgaagtccgatgaacagtgcgccaggtttcagttaaaaaaatcgcctgacagcccatctttggatcaagttatctccaaattcctcatggcaccaagacttaatacctgtagcaaagttgttcttctacaatggctctacaactttgttacattgacccaggg

SEQ ID NO: 5344 - DNA, 774 bp, Zea Mays
gaaaaaacccgacccgacgcgcccaatcaggaggcacgggccaacacgacccggcccgacgctatgcacgggtcgggcgcgggccatgccaaacgacccacgacccgaccttgacccgacccgaaccaacgtttgaacgggtctaactagcagtactgtacaacacatgattcagttctcacaacacagaatacaggtacataacaggcatgctggagtcctaagttcataagttaaaagataagacatgacatgacatgacatgataaagccccactaccatatcctcttcaatagggttccatatggtcatcttcatcaaacttccttcagagtcaaattcttctccttcgtaaagctgtttcactcttgtacttctacgcaactaagttgttcttctgcttccattgctgtcacgacattgtcgtatcacgtggccgccgccgccgaagagcagggcttgagactccgatgaactcaccttgccgctccttcacgaggaagacgactggaaactctgttctcaatatttttctttgattcctcatctcatgtttaggctgtcctttttgtatcaactcttgcatctcgtgttctggctgtcctttcttcgacgagtccgacattcccttctctgtctcccctttgttgcctcctcctctgagtacgacaccctcctcgaggcggactctgtggtcccccttactccctcgtttcctgcacaccccattgtgccatgtgcggctccgctaccccccgtgttgccccgcgcgg

SEQ ID NO: 5345 - DNA, 665 bp, Zea Mays
tggttatcagtctgacactcatgctaatgagctcttgtcagagttgtctattgatccttcagctatcccctcttttactttatcaggagggctgctccattacaaagaccgagtgtggattggcgacaatcctgacctgcacaagaagttgttgcacgcttgtcatgacagtgcgttaggcggccattcaggagctcctgtcacttatcggcatcttaaatagttgtttacctagtctgatatgaagaaggtggttcacacatacgttcgctcttgtttgatttgccagaaggctaaactcgacagagctcgattgctcggcttactccaaccactccctattcctgatgtggcctggcaagtcatatcgatggattttgtcgagggcctcccaaattctgcctccgctaattgcattctggtggtcattgattttttcaccaaatatgcacacttcctgccattgcgccatccgttcacagcagcagacattgctaagctattcatgcatcacatctataaactccatggccttccaggtacaatagtgatggatcgtgatagaattttcacaagccatttttggaaggagcttttccatttggccaacatggaactgaacatgtcttcaagctaccatctgaaatcagatggtcagaccgagc

SEQ ID NO: 5346 - DNA, 603 bp, Zea Mays
gatggagtgacaaggagctagaccgtattgaagaacaagttcgccctcacgcccgattgatcgtgagctaggttgacatgaagttcctcctggcgggcacttggagtctagggccgcccaccggcgtctagacaccgttaattcattgtcttgtaacaaactttgtttgaatgatgagaccaaacatatgttcatgccttttggtgtgatgttgtttcttgcttaagtactgtgcccccatcatttcctcaagtcaggggtcctgtggcacgttttcacagagtgatccctgtttcccaccccctgagcagagtgtgctgacttggttgccatgttctgcttactcgggcgtgtggacgaggacgagatcccgaaaagacttgcaaccagtagcgtatcctcagacctggctgatgcacaatagaggaaaagagctcacatcccgccgctctcactctttttcttgataagtacatgattcatgatccacactgggtgtcacattttttttggttacgaatcctgtttctaagatctttttggcgcccctcttcgctaacatctctgcgcttttctcttgtcgactgtcctggccgttagtcg

SEQ ID NO: 5347 - DNA, 671 bp, Zea Mays
tttgtagaggaaaacaacgggcttattgttagcgtcttcagaggtagcagccgagtgaatttcttgcaacaccgacgttttagaggcaacggccgagtgataatgggtcacatcggtgttttagaagtaacgaccgagtgaatactggtaacgtcagccgtttttagaaataacggccgagttatatagagccacgtcggcgttttggaaacaactgccgagtgatgactgggcgctttttggacatggctcctggcccgagaaaaccccatttgtaccgcgctgttgtatgcttctgcattccgagccctagttctgcttttttgcctccaagccttctctgcttccttgcgatcttgcttccgctcagctcatcagcgagattgggatggcgcccaagtagaaaaaccagaattcgtctgctgcgatcattcctcctatcgaccccaacagtcagttgcctttcgtaggtaaccacatgtctgttgtttttgaatccgaccttcttcaccttgtctctatcggagttcttcctccaaaagagctttgttcctggcggatctgccgtggggccactatcccgacggaggacacccacgagtccgttattttcattcctttcctcatccgcgaccttgctcttcctatttccccttttttccgcggtctcc

SEQ ID NO: 5348 - DNA, 424 bp, Zea Mays
cgagcgtccaacggtggcgacagaatgggcgtgcggacacggtgaacgacggcggccttcctgggcgcgtgcgcagggcgagggagttcggctgagcacgcaaatgagcaggggagtgggtgagcggggtgcagactaaaaaggaggtcgagtgagtgcggaggtggccaggaaacgcgtgacgtgggcacatccacggcaggaggtgagggcgagaggttagggaaacggaggggactgacgggtggggtccgcgggccaacgagaaaggactcgcgaacaggcggtcagtgctgatagaatgggtccaccgggcactgagagaacgggcgcgtgcatgaggcaatcaacaccgataggtcagccctatcgagcagcgagagagaggagagagcaaggactggcgccgataggcggggcccgc

SEQ ID NO: 5349 - DNA, 524 bp, Zea Mays
cgatcttcgcctgcgccatcaactgaaccgattttgtaccttcttcatatcctccacctctcccgtcaacgcttccatcgacctgaacatttgattccatcgctgttgcaccactcgatcggatttcgacattgcctccagaacgaatcaagtctgcatagatgggttcgtcttgggaggcatcgcgacagctgatgaatatcgcagctccgataccacttgtgacgctcgtggccggcgttgtgtcgtcgacgtgagtatcaccggcgatcgttggaaggtagttagaagatgcaaggtacgccacttttggtggagacactgtctctcctcttcatttgttggtttacatgggccactcggcctcacacgacacccggtcaacacggcgcgacaccttacatcttattgaaattcaaaattcaaacacccgcccttcatgagtaataaccccttccctcctttcctattcacaacggatgctgcctcatgacgccggaccgaccatgacccttcgatacctt

SEQ ID NO: 5350 - DNA, 437 bp, Zea Mays
ctgggtgtggagatgcaacaccagtataccatggagtcgtagaagtcttcgggtgttgatcagcctcgtggctaggacgcgaggaggggcaacactggaggtctagctcataagaggggcaagtctcagcatcagcgccaccatccctactgtggcaaatcttctgactcaggtacttcgggaggaagtactcagaggtttcgggctgttcctaagcccgggctggggctggtgtgtttccgttgtggagatgcgcatcaccgtgcagagtgccagtggagtggcaggtgttctatctgcagtcaagacaacaaggatgtggtgtgtaggaggaatcccaatgggaggctcagatgggatccagtgacttcctcctcttctcagggcactatcaacatgatgtctagcaccgagcagcaattttcagtttctcttcc

SEQ ID NO: 5351 - DNA, 330 bp, Zea Mays
caagatcagatcatacttgtgagttgtgaacctcgtctatcgctgtactaggctgtagcctattctagcctgtagaggtaggttccttggcacacagacacagtcacagcactatggacggtgtcggatgactggcacctttttattacttttatgcaccgattgctgctagaacttcagtttgttcctttgattagcgtgccagtaggcacaagcctgatgaatgattgctctatacacgagaggagcagagcagggactgggtggatatgtatggacgcctgaggggtcatggcaaaagatcacggcaaggacaaatttgcatcaact

SEQ ID NO: 5352 - DNA, 301 bp, Zea Mays
ggtcacggttggatgcggtcgaaatggtatgaggatctaatccaatccgtccaaaacgcatccaatggcctaacgtctttcttccctacttggtgtcacaccacgcggtcacgcccacggccgatcgacggcggttacaccggcgagcccacgttggccgcccgctgctccaaaaccatccccgtagagtcctacgtgaagctcacggtatggtgaataaggttggatcatttttacctgtagtaggatggcgacgcagctcggctacggtagcaggcgcactgcggcgatgagaagcgac

SEQ ID NO: 5353 - DNA, 659 bp, Zea Mays
cagaggataggacggaggataggatgtgtagtcgggaaagaaggtctgcatcatgtcttcctcgagtgaggagtccctaggaggctcatcacccgcagaaaaaccagatgcagaagacgtacgatgaggaggaggaggtggaggaggagggtggtgatggtaaccagagccagaaggccacgggtcaccaggaatgggtccctgacccgggtagggaggaggagaatagtgaccagtgccggatggcctggggtcaccgggagttggtccctgacccgaatagggaggaggaggatgaggaggatctgaggtgtagtaggggtcatcaaactcctcggcctcatcctccggggtaatgaatggcacaccaaactcctgttggtgcccctcattaaggtccatgggggaagataggggttggatgtggaggggacccgggagggagaggataacctgtctccgctgcataacaaagaaaatcctcattcagccggtcagtcctgcgacgacatacagactcctcgaccgcccgagtgcggcacatggcgaagacgccaagaaggcccttggccagacgaatgaaaagtccccgacctcgaccccgtccctggtccggaccacttcctctcccgctgtggtccatcagacgtgaggcagcg

SEQ ID NO: 5354 - DNA, 685 bp, Zea Mays
aacaccaaattcttctttggataaaccaagttcagcccttaaattgtttgcagcaacagcttcatcaatgcctaatgcctttcctcccccagcatttggtaaccccaaaataaggtgcaccgtctcctttgtaatttttagctccttccgtgggtcggctcgaattgtcatatcattatggtcaaggttttccatcagccaagctaaatgagatctactgccaagcgcgtcaactctcatatcaagtatactggagaaccccctccgtgcaatagcttgacgttgtctgtcatttaaaatctgaatgcttactataatatcttggggattgcatctcacattaagcctctgctgaaataatgtaaacaatgaataacgtaaacatttacatctacatgatcgcaactcaatgtttaaatcaaatctcaatacaacataatttcacgcagaaaatgatatattggcattgaccatcaattctaacctgtcggggggatccactgctttcctccgctttgtaactaacttcttcaagacttttggaggactgtcatcaaagttacgcttcttcgataatggcataaagtcatcgtcctcgtcaccatcctgcattggtttgtgtctaacagtattcaccggaacacggggtatgtcgacactaaagcactcttgagtagactgaatt

SEQ ID NO: 5355 - DNA, 1292 bp, Zea Mays
gtctggctgcgggggtggatcgtcgtcttggcggtgggggtcggcaggatcgacgagggagagtggaggtgtcccaaccatacccggcgcacagggaggatgcgcagaggtgcagcggaagagtgagaggggaaagactagtcccggtctcgtgataccatgaaagaggatggctgggaaatgattattggattgattattgagggagcccaaggctcagtacatataggcaaggatgtcccagaaacaggaaagtgctaatctagagaatcaggaaagtgctaatctagggacaccttgccaatcagatccaatactaccaaaaagggagagaggctgcagccgccactgcagcagcaccctctagggttgcagccgaccaccctcctgggccaaccgaacaccctcaaggcccatgggcctatacagcatgctaacactgatgataggccaaacctttttgtaaaatctacctttgtacccatctggtgtcagaaggaagtgacctgatggtgtgccaaacctcctcctcagtgaccatctgctcaagttcttggaggttcagaggacatctatgaaaagcttccagattcagggctgaaactctgggagggaccattccaagcagcgaattataaaaatcccaaacagcctcctttttctccttttgatcaacgattattctgttctgtacctggatttttccaataaaattcttcttcttcctatatctggcgtgctggtgaaaatattcagtgttggcatcactttctttcatccacagcagcctactcctcaagcgggctatgattctcgccagggaaaccaaggccagataatggtgttttaatcattgtcttagccactcttttgtggggatacggatctggaatctcttgcaatttccagcctatgaagaatttctttagccatcaacacctgtctttttatgttgcccacctttttctgactccaagattgcagatgcttagacagcctctttagtttcccagcaaaacactgcagagggcagcagcactccaaaggttgcaaccaagaatgctgcacttcttccataaaaccctccattcttgtccaaaaactctcaaaatgaaagctcctttttccttgtatgagctcatgtaaccctagcaagagggggcagtgatcagaatatacaaagttctattaattcaagcttgaggggctaacagtccctaccatttaaaccagtcaactttccttatgacactgattcttgccatgccttcaacaagtactaaaccttgccg

SEQ ID NO: 5356 - DNA, 442 bp, Zea Mays
cacggggttgcatgtgtcgggcgccagcggcctctgcagtgttcgcccctcctacgcgtcgttaagatggctccccgtcaagaaggttcaggcttttctgatctcggcccggtggagaagatgcacacatagagatatacaagttcagtaacatccacctatttattgtgcacggtcaaaatagtgggacctcacttaaaacatgagaattgacacccacatatgcttatgttttcaacgctaggtacatcaatggcctgaatgtcagccagtccttaggtgagcaggctacatcagagaattagcaagtcatcaaatacatcgacttacctgtcccaacaattactatccattttgaaatcaacacgactctgtttaccttggtcggaaggttacatcaagaatctaataatctctcaagtacacattcacatctcccacc

SEQ ID NO: 5357 - DNA, 777 bp, Zea Mays
cctatgttcacatcgcataagcccacgttctgctctgtacgcacctgtatctcgtatttgaggccgtatgttgtcgttgccattatttcttgggagctttcacgtaacagacgcgatcttcgtaattaactgaagcaaaaaaacttgggacgttataaccatccgagattcgcgtacctagtacccatcgtttcatttgaagtccgatcctaccggggtatatatgcatgcccacgagaccacgagccgccacgcatgtgagggagagaaaccaaggcggatgggacacagggtcgcagcgcttgatcccgtcgggcggccgcggagcgtatcagctcgtgcctgcgcagtgccacggtaagtcttgtgcccctgggctccctcgcccttaccttcctggcggtagtgcttgcgtagggtgggtgctaacctcggcaccttgatatcactccggtgggcgcgcatcagccatggcgctgccgccgctgtccggcgtgtgggaggaaggaggcacttgtgccatcggattagtttccagcggatgagattagaatcggtatagcgatttggtgaaatcaatctggtgcctagatctgagatcgggcggtctgtagtgggtgaattaataattaaatctggaccgttcatttataatcatacgactgtagactcaagataccccttcgccgttgcaagttcacaaaagaaaccctgggaaaaactgtgaatcaacccgcagttcacataacagtactctgtgtcttaggaacacttgcg

SEQ ID NO: 5358 - DNA, 346 bp, Zea Mays
gtagagttggccttcaatcagtgcgaagtctcggcttcgatgtctgaggcgcttggcctcactgttgtcggctggatgatagtacccctgtaggaacagggttattggtgcccgccagtcttcggtcatgataaggttgactatgcggtggccctcgctatcattggttatttggagcccttcggggctccggacggctggcgtgccgatgacatgaaagaacacgtcggagggcaaagattcgcccctggcggcagccttggccaatgcgtcggcctcttcattcttggcccgatccacatgctgcaaggtgaatcccttgaattgtctctcgagacttcggatg

SEQ ID NO: 5359 - DNA, 410 bp, Zea Mays
ccgaattcggcccacttcagtcaatctaccgcgtagcctagcctgattccctatcccgctcagcccgtgccgtgtcactgcgccgatgacatgcgggacccacggacctgcgtctcgcggtgcgcttggactcaccccattcagccgagacgcttgcacgtgggatcggttgtcaggtccgtcgtctccgcgaagagcgcggatgcgtcaacggaatcccgaacaaatcgccccagctggccacgatctccctctctgtcacatggacccgggcggacagccgcttgaccaggtttcctccgccactgacgcgtgggctcagggccactgtagatctcccccaacaatcgcggggcgttgacggagtaccagccatggccgagatccccgttggagcccgctgactttgc

SEQ ID NO: 5360 - DNA, 675 bp, Zea Mays
gcagtgattcgtgcaggactcaggcaggatagtaccgagagggtgaaaatatcgcaaagggagtggatttggtcgcggggtgaagcttatcaaccgcgcctatagccgtgcgacgtggccggatcgccggtgccgtcgtggagctctggcgacctcaattatgccatgccgtggctctttactgtgcagtagtaaccgtggcacacctaggcttaccatctcagaactgctgcaccagtgaacgccacgactgagccactagtgaccttctttctctccggctgccagcgcgccattccaaaattgagtgccaccgcccttggacactataaattggtgccccagcctgctccgctaagtaattgtgcacccagtgaaccagccctcacctccaattagtcaagaaccccgacgtgtgtaagctcgccgtggccagctctccataggtctgatcacgccctcctcgctcttgttttagcactcttgtgtgctcttgatgcttctcgacacggccaattgagctagaacacgtaggatcaccgggaatgccttggttcatccgtagttcgcgctatcactatggacaaagagattaggagctagaactttgcaattgtttgaggggtaatgaccgttaggggttgaattaggtgtcaaccatacctgagcaccggt

SEQ ID NO: 5361 - DNA, 339 bp, Zea Mays
gtttgatgtcttgtcctttcaccaagagttgatcatctcatccttaatgcatttaacttggttgaggtcactcgtcttcctttcccgaatcctagccatcttataaacgtccttttccccttcctttgtacttagtcttcagtaaagatcatcataggctcgaccctttgcatcactcacagctcgctttgcagtcttctttgccaccttatacctctctatgttgaccgcgctcctgtcatggaacaagcttatgtaacattgtttcttctcctttattgcctattgaatgtcctcggtccaccaccaagtatctttaggttcatcttttctcccttt

SEQ ID NO: 5362 - DNA, 1057 bp, Zea Mays
cgcataatccaccaccaacatcatcggtaaaaccatgagcgaagggtgtggggtggccagactcaagcgtctgcaaaccggcttcaggaggtccaagaatggaggacgtcggagctataaccgagccatggggtggctcaagagtcattttctgcacaacctgaggatccctgcagctagcttcacgaaaaccatggcaggaggacgaaccctgaacgtaatgatctgtgccttgagcatgaccaaaggaagttccactacgctgacctctgtatgccggcggagaacgggagcgcaaatgtcgacgaggttctgcaggagtgatcactgaggatggaggggggcggggagctgaattttcagtgccagcagcagccttccaccgaatgttaaccggatagaccagtgatctgacaccagaaccatccccaatacccagttgcagaggttcaacaacccaaagatctctagcaggaggtatgctgacagggtccagacaccaaacagaacaacggaagctgctgagatttcttagttgcaatgtatcttcatgcacactctctatccatgcaaaagggctgagcaaactctccacggtgggtacttcccaagcatgtacagggatgccatccagttcaacttctaacaactgagcaagggtgcttccagaggaattcatcaggcgtgaccatcttttgcaagaaagtgagaaggaattagcacgcacaactgaccatcttccacacaattgttgcaccaatccatctgaaggcagcatcagcaggaaagaagaagtagagagctgcctaataaccagggatccttcatcaacctccagacgtgatgccaggggtgccgcaatatcattggcagacacaacttccatattaccaaaaacagtgatgacaaccgccgtagcgagatcttcctccgcccgcgacatactctggttccaaccaatgatacaagggaaagaaggtggggaagagtcctccagcacaggtgaagcagaatcgtgggtcggggaagataccggcgccaactgggcatcctcatg

SEQ ID NO: 5363 - DNA, 688 bp, Zea Mays
cacatggtgaggttccgcgctgtcactagaccagtgagatgaccggagcctagccaattgcttgccggacttcgttgggcgccgctgaaccaccgcgcgccgtgggccggcctcgccatctcctcactacgggtaagaatatcctcagaagctcctataaccactccgcatcgcgtagcaaacgttagatgatagattggtaccttgcttcgccggttctcgcatctccggtgaactcgcaccgcgggggccctgtgctccgccgctctgatggcggtggtggaagggaaggttggggaggcactctgtggtcgtagattacccagccaacggccgggatgagatcaagcgtcgcggcttggctggtgccgttggatctgttgtagaaggataggattagatcttggattcattaaagcttgtccgttcatctgcaatccagtggccacctgtgcgtaccgcttcaagatctactttaggccgttggatcagcgatgggtggataggattagctccctgtttcattaaatcatgaccgtcagatccagatctaatgatgggcgctgcgtaccgattcagtgtggtgaccgatctaatctgggtcgtccagtgaggatccgatggccagatttctcccataccccttcggcctgtcagttttgcaaaagagtccctagtcttgttaaat

SEQ ID NO: 5364 - DNA, 680 bp, Zea Mays
atttggagttcatatgcattttctatgaattatacaaattctatgaattgtttttatattaaaactcattttctaattcatttttcctgattttacaactctctagacggggcctcaaatactgaaaactgcaggggctcactggtaaattaccctagactcagtgaacaatgcccccaggacggcaggttctattttcttaatccccgaggactctttaacaaaattctcggccgaaggggtatagtgagttctgggccgttggattagaatcgaagggtgacgattagatctatccaacaatcacacggccatcgacgagagccctcagatcatgatctaaaggtttcgattcaatgaacgcccaaacgccatccgaccgcccgatttcacattgacggcgatgatccagcgaccgaaacggtgtctgattctccaatccgagccgctcgttggagatcggacggtgctcgggtatcgtcttcccctgtggtttctaacagcggcaccgcgctcgcacgtcggcgcaaacgccgatgaacaccgcgctcgaccccacggtggtaatccctatgttctaacagtgttgacccaatgcgcagattaaggcgaattcacgggtggtagtattaccggcaattgcagcgcggacgacgctggccacggcgcttggcggacgc

SEQ ID NO: 5365 - DNA, 772 bp, Zea Mays
ttgagggtccatcgaggactcaactctttggtgtccccatagatgatggtcagcatgtgcatcgagtcctagaaatctatatattcttcttcgggggggggtggattcttgggtccttagtcgtagccttggggtgctcttgagtccctaggttgaagctgaatggtgaggaggttagattcggtggcaatttaagagtaagtgccctcaaagttgggaaaattatcgacatagttcttcctaggacccaattaaggccttagatatatttatgagccatgatcgggctaattcggtcagagcaacatggaagtagtttaccattacttcctcatcaccactagcggtgaggatggtagtattgatagttccatcataattcttaggaagttgaggatgaaaattttatgaccattttgcatgctataagacaagggtatgtgtcatgcactactggggctaggagataagaacgctgcaggagagcacatgcatcatgtcgactctgatagcgcgcgagggcttctcaagcaccgttgggccctctgggaccatcaaatgttctgagtgccttcatgaaaaacccatgagcggggaatggccgagtacaacataggttgttccgatgcgaattgaaggcctcatgcatcctaatcgatgcacatgtccatgatgattgtgaccaatgtatacaaggctttgcacaaccacatcctcgagttgccacaatattttctcgctctaaccctttctacctcatatttagagaaat

SEQ ID NO: 5366 - DNA, 816 bp, Zea Mays
ttcgatgatcctatgaaccgatcctacgcgtgggatgcattatcaatggctcagattttaagatgcacacaaccacccggattcgtccgatcacgatcagatctcggtcgcacaagtcgtatccgacggtcaagaatcgtcccctctattccgtctaggcacacggcagagcctccctggtcacggcggatttctcccggagaacgctaaaccgacgccagcgcacacccggactcaaactattagcctcttctcacttcgggcacgacgacggacacgaccgtaagggggcttaccaaagggttagtagcgtaggtgttctggccatggcagaggtcgatccacagcggaggaagactcctggcgagcaattaatggcgttggggtcaggatctccccacgacaacctgtccgatgacacccccacacaccgacgcccaccctggttcccaacaccacggaagaacaacaactatgagcaaccgaggtggcgacgcttcactccttcatgggcggtgtctggtggctagggcgaggcaaggaggaagggtcgacaggaatcaggcgcgcgacttttatagcccggggaacgctgctcctaacaaaccctagctggagccaggttttctcgacgatggttgcaatggccacgatcttcgcgcgtgccgttcgggcgaagctgcgcgcgagaagaagcacagggatgcggtagctgactctgacccggagaccccacacaacagcgaagttagcagagaggaaggcacacaaaggctgacaaggcacggcccacctgtcggcgcaagtgcggccaga

SEQ ID NO: 5367 - DNA, 294 bp, Zea Mays
ggcgtggcataagcgagggaaacagcggcacgacggcggtggtcgcgcagacacatcgccggtgcaagtgggtacggcgaggcaggttctacccattccccgcggatctttttacgtctaaggtaatatcctgcccgagctgagcacaaatcacggcagaccgcacggatcgtggcgcggcgatcaccagcggcgagattcaatgaatcagttatcttctttagactactgtacaatcagggtcttcgtcagagcacctgacagagcagattgagaggccaaattctccaagtt

SEQ ID NO: 5368 - DNA, 403 bp, Zea Mays
cacgaacaaacaactccacaattttatataattatctcgttagacacctcaaaaatctctatattaaaaatcacttaatgcatatagggcagcggactagcttacatgtgcagcacgcgcgagcatagcagtttccgttctgctcctactaccgcgcgagcatagattgcacgctgcctaccattgacgcgattcctcatgccgccagcttgggcagttaatacacaggcttgaatgcactccagtacttgcatgcttgcattttggcagcatacgtcactgcccttgttttttttcccgtatacagacaagaaaacgtacagtacgttattaccggaaacaaggcgtacggagtactaccgttcccatacgacccggaggccggaccggaccagtccactac

SEQ ID NO: 5369 - DNA, 1074 bp, Zea Mays
cgaaccaaaagtcgggagctcacctacctaaaaaactccactgtccacctctcccacaaaggagtggacacggatcacccgaaagaaggaagaaaacgtctcaagtcaggggacgagagcgtggcgagccatctttccggcaccttcgccctcaaaggaggacggaaagaaaaacgccatcacactagctcctttctaccccgacattctcttcctcgggggagactggagtcatcacccatctccgatgatgcgcctaccatgcaaggggaagaacctccccagcgtgaagcacgacgatggaggaacagacgccagaacatgcagtgacatcacgaggctagagaacaggaccggcacagcccgtatcccaagacgaagcctcagaagtgggagaaactcccgacgagcaagtacaccgagaaaggcggaactctcgccgtcgtgatcgccgacaagctcaggaccgagaacgggagtaagccaagctaggtgcaaggctgcatcgagagaaccctctctttgctcagaacctataccccgacttcgctcacgcaatgaacacgccgagtgaagtcggagaggtgctggcccagatagctgacggcctcccatgaactccagacgcggaaggttaccagcggctgcttacttgagcagctaatcaccttctgcccatcgctcatcctttgagcaacctacgccacgccatcaacaaccggcgagatgcgcggagctccatcaacgcttcacgcgaccgacggcacgaaagtgagataaggcaccgggagaagtatgactgggatcacgacgtcccagcctaaaatcgcgccacccgagctgagtcagctacaacctcgactagtggcccattccagggacgatcgagacgacacactaccagctcccctccccgggaccgacctcacgaacgctgataggaagaaacatgtggagtcttcatgcttactccacgtctccgggccatccagtgccccccaacttcaaggtctccaacatcgacaagtacgagcccaagcaggacccgggtggctggttggccgtctacacgac

SEQ ID NO: 5370 - DNA, 390 bp, Zea Mays
ggcggtgtcagacccatccagcagacgacacgtttgatcagtctgctggcaaacagtgcgcccgtgccgagcggcgcactgtactcatcttcccttctacaagaagcttcctctgcacaccgaggatacggagatctcgggcgtcagggtacaagaagattgcctcagaacagacattagtggctccaagcgctatattctttatgtccctgggcccatctgtcggggcccagcatctttgtgcatgccccccttcagctataaaaggggaggtatgcgacgttacacacacacacacgcaatcttaggtcacaccttagactcgcaagctcatacaagctcacaagcaatacatcccacagtggagtagggtattacgctccggcggcc

SEQ ID NO: 5371 - DNA, 432 bp, Zea Mays
ttaaaataaaaattataatcgtgtcggaccaagtcagcatttcggatcgagaaggcaaacaaaaaatgacatgaatcttgaactggatcggcactacccactttgaatcgtacttacgacactattaaatgggtcgtgtctcaagccaggttaacaagcacagcccatttgatcatctatagtctagtactccctccctcaccatccatctcacgagtgtggaaaaaaacaagagaaaatttcatcttgtctcaccccacatctacatgtcgtcatccgtcatctccacctttctccttgccacaaagccaccctgtgtctctagggcaaaactctaggtgcaccgcgaggcacagcccgaatccacatgatcaaaccctaggggcattccacccgtcatctccacctttctccttgccacaaagccacctg

SEQ ID NO: 5372 - DNA, 1026 bp, Zea Mays
atatcagccttagggccttatattgaatacaagtcttattcgtaacatggtatcggaaggactcatagatgaaagacatgtgcaatgaggagtcaaataaaaagaacacgaggctaacatctatggttaagtacctgaagtacaaggtggaggtggtcccttagtggaagattgagaagtagcagcaaaacctataggtaaagaaggctgagttacataaccaacatctcatgtcggcatagagaccacaaggcgacgaagtagcaaaagaatctcttatgtatctaaaccactgatttcaagtcgggcgaccagctagtcgatcgacaggaccgaccaggcgcctaatcgcgattagggcgacaattaggtcaactaatcggttctagtcggcctctggtcatccctagtcgtcctatgtatattcctaggcatataagtcatgtcaacagatagaggtcaagtcactactgggcactagatatgtgctactgctagactgatggaaactggtaagaataagatcattggtgctgctggactggtgggataaactggtcgctgctatgaagctaagaactatctaagtaaggcaatagaacatagaagtatagaacactagatgagcagggccagggcagactgcaaacaaatgggtactgctgcgcagaatgcaaaactgtagagtgcatacaagggggaaggaggggagcagggatgaccttcggatgacgagctcatcttgtgccttgtagatgagcagggggcagggatgacctttaaggatgagctgcacgctggcactggtggagagccctggaggctggagcagcagccgccggcagaggacataaagtttaggagaggggtgcaggcacaggggaggctttagggtttaggggtgccaacagatttattcggctactgggcccaaaaaacggtgaagcccaatagcacatctagcccgctgcgcactggtcgaccagagatggctaatcggacgactaatcggatgatttggacgcc

SEQ ID NO: 5373 - DNA, 489 bp, Zea Mays
tgaaaatttatattgatgggtgaaagtcaaccctttcgttggcttgaggcgacaggcaaaaatcatgaaaccaaacgatagacaggcaaagaccaggcagctgtcgatccaagccgtggagacgactggatgatctgatacattcaaacgggacaaggacagtacggacagttgggtgtggttggttcgagtctcgacaaaaattgcaggcaaaaactgctccaggggcaacagttgcctagccgggcggacgacgacgagcagccaggcaactcaccaaccaaacagataaacagaagcgcaggcaggactgcaggtccactttgccgtgccgattccgtgttccgacgctttcctcccgctcgcggtcgcggttgcgtcgcggatagggtggacagaaaaaaaaatcgaaaaaaaatgagcccgtccgtccaagccgcaacgcgatggtgagggttggtgaccgaccggaccgatcagcccgccggc

SEQ ID NO: 5374 - DNA, 975 bp, Zea Mays
aattattaataaaatgttagtgaacaacaattatatgaaaatgaacaatacatattgtcatcgacctcaatatatcactaatttttttgccaccaaacaatacatatctaaactggaacaaatcaaattatactataatgtgtatatcacaaatacaaagactaagaagtgaacttctttgtacacaatattctttgtatgttaaatttgagaagcattcatttctcttgctgtaaatacctttacctctcgtaattgctcgtgacaaggaaacatataatcgtgacaaggtaactagtagtgttgatgtcccagatcctagatggagaatcaattagaagcaatatcttgcagtcaaacttgagaaagacaagttgcaggatgatgatggtgattgtcacgccgagccgttcttctatcgctgatacacaccccgttattagagacattccaccaaagcacgccacgctgaaaactaatagccagatcacctgaagaacagtgattgttgtagattggggtagaacttgatgtggtaggcaaatttgctttgcgcttgaacaatgcacacgggatcaacaagagtggcggtgatctccacctgcgaaccaaacttagagaaactcagtctaagccattctgggtggtgcatcccaaaaaactgttcttggcaaaaggtacaaacctaggaggcagcagtgcttacggggatgcaggacgaaaaggaggaggcgagcggcgtgttagctgtaccttggagccgaacttgaaatctaataaattactaacaatagaaagaaacgcctcgatcaaacaaagctggacaatcatattaaagttgaaattggtactttaatatagtagaaaagagatgtgatctttaatctcttactactacagcacccgtatgctgcgacgacacacaatcatatttgatatttataaaaaaaataaatttagtatcgaagtgaacat

SEQ ID NO: 5375 - DNA, 654 bp, Zea Mays
cttttgttgggtagaccttgggaatatgataatgatgcacgttaccatggtcggagtaatacatacactttcatgcataagggcaagaaatttactttgcttcctttgactcctgctaagattgtacaagctgacaaggatagagctgcaactacaaataatgaaccacctgttaaatctgaaaatcagcaagccattcattggaaagctcatgtaatgcttgttacaatatctgatcttgctgaaatacatgctgatgatacttgctgctatgctttagtgtgcacagacgctttattttccaatgatgatattgctagcattgtgcctgcgcctgtgattaaccttttgtaggcattcaacaatgttttcccgctgagatacctcctggacttcctcccattcacgggattgagcatcaaattgatttgattcctggagcaaggtttcccaatcgtgctgcatatcgggcaaaccccgaagagactaaggagattcagcaataggtccaagaccttttggaccgtgggtatgtacgtgagagcctaagtccttgttctgtacctgtcattttggtcccaaaaaaagatggtagttggcgcatgtgtgtagattgtagagccattaacaacatcaccattaggtaccgtcatc

SEQ ID NO: 5376 - DNA, 507 bp, Zea Mays
ggtaaattcacctccctactctctgcgctgtcctcctctacgtgtagctcggttcaatttgtatatggcgctcgggaacgaccgattgcagcctcgccggcgtgcgccgccgtgcgttctgagcgcgccgccatggctcggcggtgggtagggaatgggtcttcgaacccttggattctagccaacggctgagattaagtgttgcataccgtttcggccgggcacgctgtgaccgtagatctgcgatcctacggctcagattaaacctggtctcattaaatcgtaggcgtcggagttggatcctgtggcttagatcgcgtaccgattcgcgtatacaacagtctaatctggcgcgcccaagtctgatccaacggccgggatcaaaccgtaccccttcgcgggtcacttttgttaaagagccctcagactttagtgaaatcaacccgccgtcctatatcactgtgcgctgtgtcttaggagttttactccgtagcccctgcgttttcc

SEQ ID NO: 5377 - DNA, 1294 bp, Zea Mays
ggaaaatggaaatgagaagagcaaggaaactggaaatgagactgaatatgaaaaggtagaatgcatgtttacactaatacacattatttaccagctatttatgtattattagacatgcacacacatgatactttcattaacaaattataggtgaagaacataaaactggttcacatagattatattttggagaaggctgaaactggcattcagttcgttggcaatgtcatgcgtagcagtagtcagataaggcgggcacactgttggtttccttgtgttgatagtgccagagaacgctgtccgtaagttaatttcattcgttcatgcttttgtgaatcctggtacaatatttgcctttgcgtgttaataattctctctctatttatcatgttatgctcagatttgatctagaatttacagttagcatggatttcattgctgtcagcaatggtgacttgctttaccaggtatgcgttcagtcttgatcaagagatctggagggaaaatattaatttccttgtttttgaagaactaacttttgtgaagtaacaaggaagctcttttagctttaatacacttggtattacagttcatttcttttctgtgcatgttagttatgttctgttttctgatcttagaaggtctctagtaaggaagatccttaaaaaagaacttatgtgtataaattgaacactccagttagtgcacagtggatatccttggttgttggcgcacttgaagttcttcctgacagaaatgacataaatgtctcacacatatgtttatcccctgctttggcaaagcttcagaacactattgcatttttccacaatgcatacaggtgccgatcaatctttttttttctgtgagaagtgcttagattggtgttgattttattagtatctcaataagcttattttttaattgatttctgaaatttgcatttcttttgcagctgttatgatgactatctttctgcaccatttcccttaggtttatacaagcacatttttcttccatctgaaatgacaatattaccagcaagcttaggagcctccacatgcatcctcagttctggtatcttgcatgatgagaaagttatagatcaggtgtgtttgtttctcttattttactaccctgtcccctctgatctagaccaatgatttgacaccatacattggtgctttcattgtactatgatttgataacatctgttacgttggcaattaaaagaactataatctctaagaaaaccttttttttctttgcacttgaatttcatcagatgattttt

SEQ ID NO: 5378 - DNA, 327 bp, Zea Mays
aaatctacctttccaaccagcaagtcttttatccattttttccaacattggacaccaaagagacttactgacttttttattatcaatggggactccaaggtatttcatcggaaggcttccaacaggacaagtgaaaatgtcagcatacaaattagtgcactctttagcttcccctaagcagaaaatttcacttttgtgaaaattaattttcagccccgacatatgctcgaaaaggcagaggataaatttaagatttctagcaccttccaaacaatcttgaattaaaaagatagtatcatcagcatattggagacaacaacaaccatt

SEQ ID NO: 5379 - DNA, 1249 bp, Zea Mays
ggaaaattagtttcacaattttatcatttttctgttgttttctataattgttttggtgctggagataaaagaaaaagaaaacagatgaatagtactgggctgatttcagcccagtagcccagatccacgcggaatcgcgcgcgcgtccgcgcccgcggggcgagtttgcgtagaggccctcggcgttttggctaactggagatgggttcagttactgtttttctgagtcactgacgatttgcacagagatccctcaagttctaattcttcacagtgctacgccccgatgtcgcacggcggaggtccgatcaccggcgaggttaggccggccggattacgcaaggattggcgctctcgagcggcagacaccaaatcagaccccctccgagcatttcccctaagttaattgcacgattggtgacccattccggtctgcccacgaggacagcgaaggttatggacacatgctcgtgttcccggcgatgggtggcggtctggtcaaattaaagaggtcgggaagcatcgcagatgtaggagaatgctcaaacaagggagcagaggacgggaactgaccggagttgggctggcgacagtgagctcggttccacggtggcggaaatcggatttgggggaaactctgaattcgagcagatgaggggatgattgtgcccgattagcggtggttagctagaggactagctcacggagctggacacgggctcaatttatagggaggatgggcggtggccgtgaatttcgagcaagacgcgcggcggtcggaggtggagaagaacactggcgcagtgaatacgtgttcaacgtcgtggcagctattccggtgagcaacggggagctaaagtgaatcatggcggtgcagtggcgaggctcggacacgcggcgcaaggccgagaggcggcggtcaccggcgaggtaatccactcggccgcaaagagggagagagggccacgggggtcaccggagtgatcgccagcgcacgggcggtgaagatcttttcaaggtgagcaacacccacacggccgcggcaccaatcccggcaaagaagtcgccggcggtgagatcttttctacagcggtcgatctgatccccaacagagcactgtaccatggagaacacccatcagatgaactgacagaacgatttgcaggaggtttttcttccgatttcatgtggcaacaagtctaagtctctgcatcaaagttgtagtgctatgtaccagctacaaatcgtc

SEQ ID NO: 5380 - DNA, 315 bp, Zea Mays
gacgactaggatttggtagatgatagagttcgatcagatccaatatccaccgttagatcctgtgtggacgaccgcgattagtcctgcgcataccccttcgtgtcattaaaactgtgccgtcgattttagatccagtggtcatgtatgtgtaccggttcggggatctaatctcacgcgtccacccttgatcgcacggccaagatctctgcgtaccccttcggcttgggcgatttgcgtatgagaccccgagcttgttatcaatcaacccgcagtcctactgctggctctctgagtcttagaaagttttgccccgtg

SEQ ID NO: 5381 - DNA, 354 bp, Zea Mays
tatggttgacaagattaggcacataaaataaaatcaactttgtgaaaagctggtaatgtccctaccccccttcaaaataataatggttacatgggtatgacctaataccaatatagaagttagcaatagaatgaacaccaccattggtagtaggcatgcatccttgctcactacagtactattgcaacttttttgtgtgtgcaaaattcatctagtatttaactaagaagatctgaacaggtgtaattggcacagatcaaacttaataagggcaggctaaaatgttcaggtctacattaccataatcaaatcaagttagaatgtaattatctctgatgtcacagaggatagaga

SEQ ID NO: 5382 - DNA, 1786 bp, Zea Mays
caaataaagacagtagcagtagtgactcatgtcagtggaagcctaaggctccccatcgatctgatggagggagttcaggaagtttcagtaagcagaaactcacttcacaaggcacacctaggagaaaagggagatgcagaaattgtgggatatatggtcattgggctcaagactgtaagcgtcctaagagggagaaaggcaaggaacaaaaacaaccagatgctgattcacctgtttgtttcctggcaaagcacactgatcctgcctggaaatggcatgccagatttgggcacctgaatttcaggtcacttagagaactaggtagattgaagatggtggaagggatgcccttagtagacagggtggaataggtctgtgatggatgcactttgggaaaacaacatacaacaccatttccaaggaagtctgaattcagagctcaaaagggactagaattgtttcatgcagatttgtgtgggcagatcagaccaaagacagttggtggaaaatcctatttcctgcttgtagtagatgattacagcaggtatatgtgggtagatctgttgaacacaaaggatcaggcattggcatcactacagaagataaaacaaagagctgaaattgagttgggaggtaatttgaaagctttgaggacagatagagggggagagtttaactcagggtccttcactgttttttgcaatgagcaaggaatcaaacattacaccaccactccctattctcctcagcaaaatggggttgttgagagaaggaaccaatctgtagtggagatggctagatgcctgctcaaaggtaagggtgtgccaccaagattctagggagaagcagtaacaactgcagtttacctgttaaacaggtctcctactaagagtgtgcaagggagaacaccatatgaggcctggcatggcaagaaaccacaagttggtcacttgaggacttttggttgtgtgggtcatgtgaagaagattggtccaggtgttgaaaaattgtcagacaggtccacaaaaatggttctgcttggatatgaggcagggaccaaagggtacaggatgtatgatccttcagctgggagactgtatatcagcagagatgttgtgtttgaagaagaattggggtggaattgggacagtgatgaaaatgttcagcaagctgagacagaatctggtctttgtgaattccagtttcagtacactgtgcctggtcaggtgttgcagcagccaggtgttttaggtggaagtgttgaagattcagggggtgcacaaaattctccaccctcacctcacacaccagtgacaccacaaataacagtaacaccacaagtgtcacaggggggattacaggggtcaagttccagtgcagctactaacaatagtcctcagaccccgagcactcaaagttcacaacatccaccattgagatataggtctctaactgatctgtgggatgcaacagaggaggtacatgatttccaatatagtgggctatgcttgttggctgcagatgagccagtgaatgttgaagtagctctgacagaaaagtgttggagggatgctatgaacaatgaactccagtccattgaaaacaacaacacttggatatggtctgaactacctgttgggcataaacccattggtttgaaatgggtgtacaaagtcaagaaggatgctgctggtaacattgtcaaacacaaagctagattagttgctaaagggtatgcacagaaggaaggaatagactttgatgaagtatttgcacctgttgcaag

SEQ ID NO: 5383 - DNA, 575 bp, Zea Mays
gacacttgccagggtgttgcccgaaaagcccttaaacagatatgccaaaactacagccgggaaatctctgaaaccccccttcgatattttccacccagcaacaaaaatacccccacctggaggaaaagactccaggctctgtcaggaggaaaccccacagaagatgaccccaccattgtctacatggccggatacctccacaccctagacaaccactacgatgagatctcctcccactgcatccacctaaactcccgagtggaaagcctagagcagcaggtcaaagagcttaagcaagagaaggcatctctccaggagagtctcgacatagcagaaggcgaggaagccaacacccgtgaggcctaccgaaccttaaagatggactatgacaagaagctaaggaatctcgatcccaagaagaaaatccagaagaagaccaccaaccaaggatgccaaacagagaagaagaagaagaataccactccagccccacctccccccagaatagatgattggtccgacgccaaggatatatccctagcaagccttgatgatcttctcaaggaatttgggga

SEQ ID NO: 5384 - DNA, 644 bp, Zea Mays
gccccctaggccaccaaagtcttcgacttcatcatcattcaccatctacaaaaataacaccaaacatcaatacattttcttaaaaatcaaataaaataacaacagtccgtacctgctccatcgcccggtcacacctttctcggacagtgttccgaccgtgagggccccacatcctgtcataaagtgccccaacggaccactttagcaccgcatcttcaacctggaagatctcgcggtcgaagtcttcatcgaaccgatcaaagacttcgaaatgcctgcatccctcatgggacaaggcatttgtggccccctcataggtgatgagcgaagtgaaggacatgagacccgtcacaatcaacggaagcacctccagctcctcctgcaaccacccgagaaagcgaaggcccacctccttgccagatgcatcaaagggggccgtacatgcaccaagttgtcggtacgcgtccacgagcaatgcacgcgctcggtccacccctgtgcgggtagaggccttcgccttgtctagatagccgtgaaggctcctgtggttctcctccgcctccgcaacacattggagggcaaggctagcctcgacgcgcgcaagtttagcttcggcgcgtgcagcctgagcctccgcgcaggcc

SEQ ID NO: 5385 - DNA, 739 bp, Zea Mays
tcaagggaatttcctcctcctcttcctcatcttcatcaataatgcggacggtacatccattgggatcaactttggccggattacacccattgggctcaacatcatcaaggtcacacccattgggttcagcatcagtcgggtcacacccattgggatcagcttcagcaaaaaccagcactggcatttcctcagcagcaggagcagaagggccggcatcttgattcaagcatgacactcgacaaagacgtctctttttctttttcttcccctcagcaggagaagttggatgattggttcggcgaggacgcttcgggcgaatactatcagacctctgagtatccacagctttgccagactcggggatgggtgctacagccagtgtttcagcaggggctgcatcagaggaatctttagccaacatgtccagcatggcacttatttctgcatcactcggattcaaaggcacctcgaaatgaacccgcctctcgtcgtcggggatttcgccaagtgaagcaaccaaagcctcaacctcttcgggagaaggtcgcactctaaggcccaaaccgctataaccagtagcaatatttgacacaaaactgatgaaggccttggaaggaggcagattccaggctgagtatgcaacaggagcaccaatattagacaccttgcctctgagtatcatctcaagccggctcaccaaatccacagcaggaatccttctgttggtaacccgggttga

SEQ ID NO: 5386 - DNA, 418 bp, Zea Mays
ggatgatggtgcgacggaggtttgtgctgatgtgctcgacgccgggttggggtcatcccgggcagcgtcccgcgcctcatcgaccttagagcgcggtcctgagggtcaggaaactgacttggatcgtcttgctcccatggaagtaattgagggacccttagccttagaggcggctactgcggagaacttggtcctcaaggatggtgttgacacttacccagcccccgaggatgttgtcggggatgattcggctcgtgctagaaacgcaagccactgcccagcccccgagggtactgccggaggcgatccggctcaagtgggtagcgcaagctatggcccagcctccgagggtgtccgagcggggtctccctcttgtacttccatggatgttcacgcgggatcttcgccgcactctggt

SEQ ID NO: 5387 - DNA, 520 bp, Zea Mays
agaaagaggagatcactggtgcaagtgattggtggcatctaccgtggcggctctccggcgatcactggatacaaatgacacgagctattgcgatgtggttaagggcttgaagcgtggcacaatcgcggtgaacaacgcagattcaggtgacggctgtaaggccacgtcgccggcgcaaatgaccgagggacagcgcggccacaatgtcctggacctatccgcggcgtgatcttttcaccggcgagctcaatccacagacctatagcacgaatcgtggcgatcagcaacaatcacagcggagggtcaccgacggcgagattcatggaatctgttgatatttgtgtgcactgtaccattgcgatttttcttcagaacaactgacaaagcatgtttggggtcaatttgctccatattttatgtggtgacccaaccatcactctgcatcaaagttgaagcttaataaaccagctttaactttgttacattgtgtacccacaaaaagtcacaggatcttactcaa

SEQ ID NO: 5388 - DNA, 640 bp, Zea Mays
gcagttgttcttgaagtgactagggtctccgcagtgccaacacgcattcgctggtggttggttgcttgcaactgagggggcatgaaaggagctctgactctgctgacggaaccatgacggagtgggtccagctggtctaatgaagcttggtcccttgggcggaaacctaaaggatcgagttctctggtgccggtcttgctgttgagctcggaggacttggaatttcctcttgaggtggcctttttcttcttcccttgccctttccacttgcattgctttgttggagaggtgcgagaagctgaggaaatcttggttggctaggatggtcttgagttctggtctgagccccttcaaaaagcgggccatcttcttgacttcggtgctgacgtcatccggcgcgtagcgggccaattctgtgaatttgtgcacgtactcactgacagatcttccgtcttgagttagttcccggaattcatcttccttgagctgaacgatcccttggggcacatggtgctctcggaaagcagtttcaaactctgcccaggtagcatctctgatggccgcgttgaaggtatcccaccaagctaaggccattccggaaagttgatgagcagccagttgaacacgctgattctccggg

SEQ ID NO: 5389 - DNA, 470 bp, Zea Mays
gtcgtttcgtcgccaaggtaagaaaggtaagtgtaggaccttgtagactagggctagtcggctgtcctcatgtgtgggtcaccatacatgttgtttaaggactagtagaattacttacatcagttcatgaaagatagttgacagcttgtctttattttcaattatcattgtggcatcatggggatgggctgaaaggaacttttctgcaggtacactattttgatacgagtagttagtgtagttgcgtaccaatgagtgaatgagtatgccaccgcttatgatgttagtataactaggtcgtgaggccataagttatgtgcatccattatggtataaccatcattttgatcatttgtttcatcattcccttttggaacatgggtagaggtttttgtctacgctaataaccaattaaaaattatttcctatttctcacgccaatataaccttgtaacagattgcccgccgca

SEQ ID NO: 5390 - DNA, 562 bp, Zea Mays
gctcaaaggaacaactaacctcagcagcagccacaacagtatcgctagggcaatggaaacaaatgctacacttgcggcaacacatgccattacgccaaggactaccctcggaaccaaccaagacatggaccaattgtagctcacaacaaggccaagaaatagaaagtgcaagtcaagcaggggagactgaacttcactaccttagaggaccttccagaaggagcacccgtcatgaccggtaccttttcagttcttaattggcctgcaataattctgtttgattctagtgcatcgcatagtttaattggtgcaaaattttgcgtcaaatgttaattgcctttttaccataccaagggagcctatatgatagctacgccagggcaaggttgcaacctactagctaaaccgtaatgtacctatccagttggggagcaatattttcaaaaccaccctcctgattatgagattggaaagtgtagacattatcttgggaaaagactggatgatccaacaccatgttctactaaatgtagtcgcacgagcccttaagatccattcccca

SEQ ID NO: 5391 - DNA, 345 bp, Zea Mays
ctcaagtacctggcttatccatccttttatatatatatgcagacatagtcacacacaatgtgtcagtcagtactcagtaatctccaaaaccatatgaatatcactaaaatatctgcaggttcatctggctacggaccctcctaatgaacatgtcacaagcctcatcgatgtcatcctccacgttgaactccagaccttcaacctccctattggtccttatgatctcgatgaccgatggctcctcgggattatcaagggcatgaagctcatcgtgatcgtcctcaccgttgtaatacttgtcatcgtcaaagagggaattgatccagtctgggtagccatgacaat

SEQ ID NO: 5392 - DNA, 386 bp, Zea Mays
cgcttcctggaatagctgctcgggggtagttggcgccttttgcagtatggctcggacgaagaccgagtcattagatccccggtagaagtcctcgattactgctgcttcctcaacctcggggatacgatttctcatggtctgaaaccttttgagatatgaccggagagtctcatcccctcggcgcttgatggatttgaggtcgcatggctgcgccggcttgtcggagagagattggaagttggcgatgaagcgccgactgaagtcgctccagtcgtcgatgcagtgtcggggtagatatcatagccattgcagcgcatcttgtccgaggacgatggacaagtatgcagtcatcacatcttcagtcgccccagcggctcgggcagcgg

SEQ ID NO: 5393 - DNA, 756 bp, Zea Mays
atctctccttggtttgtgtacgcttctttctaaccaatttagacctagcaatgaatgtgcctcgattgccttaagaaaaaagtatttacttagcacataatttctagctgggatgaaagaaacccatggccaactcactggtcaaccatagcattgttgtaacatagtcttggctgacgacacatttagtattaaagctcaacaatcacaaacagcggaacaaatcatgcaaaaagatcatacatattccaagtaacaaactgtgtgaaccaaagatgtagtatgcatagcccgtccctcacaaatccaggtatctggaactcatgccaacacagacacacgcaccaaagagtaaaaattcaccaaccacacacggattctgcaccggatgatagacggtaacacatttcgtgcaaagaacaaacatcctaatgcagatgcagacggcatgagggggtctagcagagcaaacgtggacttacggagtcacagacaatgtctacagggcggcgggcagcaggagcagaccacacgctgccatgacgacggtgggtgcccaaaccaaagtggcgaacaactacaaagacgggctagagaagctatcggttccaggacctaataaggcaaacttggattgaggagagagggaagaaaatattaaaggggaggaaagtactcaccgtcgtgcagcacagagcgcagtgctgttttcagccatgcctatcactggtgaggcatgggagcgagggagatgac

SEQ ID NO: 5394 - DNA, 521 bp, Zea Mays
tagagcccttgatcagtctatcgagtcgaccagggttcatttagtgggataacattatggtagggtaggaagtttagtcatctagttgcaggacgcacttggcgctctagggcagacatagactgtttagcccccaagcgagtccgtcaagtcgatcaaggttcattgagtaggacaaccttgtggttgaataaaatatttggccatctggtaatcaggcatacttggcacatatgggtggacatagacccctatgcccctaggcaagtatatcaagttgattgggattcatttggtggtagaaccttgtggtcagacaaaaaatttggtcgtctggtcgccgagcgcacttggcgcactaagacaaagacccctgagccttagagtgagtttgttatgtcgagcgggattcactaagtggtacaaccttatggtcagacaaaaaatttgggggtcgttcaatgggcataaccgttcatatcctttttaatgaatcagttaggtatctgttgttgttgttg

SEQ ID NO: 5395 - DNA, 614 bp, Zea Mays
ccccactcatgatgaacaccccacaaacttaacccaggagtgcgcaccacgcctccatgcgcccaagccccaggactgcctccgcggcgtcggcggcgtgcaccgtggctccaccctgtccctgatcagaattccgatgccgtggggtagttcgattattattctgtattctgatctttggtaattgattgttcctaatcttgatctttgaattgaattatactctctcatagtgtattagtactgttaataatgcgtgcctagtctttgaatctaggctatctcatgctgtgttggtattgataaagatgcgtgcctgtgtttgtttttcgattttattcacttcgacataaatagtgaagctattaacttaatggttgtcatcatcgattgtgaggattaagctattattatggtttccgttactgatcgctggattagctttgtgtctcatcctgacgttttcttgctgctggatgtcatttgaggtataagaaatattgagcacgagctgaagagattgagagaggtattcatagagctgggtaggaaacaaagctgaataaggcattttcccatattcatcacttattttgtagatatgaattgctata

SEQ ID NO: 5396 - DNA, 532 bp, Zea Mays
ggcgctcagaaagaaagtcttcgacaagaatgaaaagttcgcaggaaagtggatcagagagctgtcgtatgttgtttggagcctgagaactcaacctagtcgagctctgcatggaaacacacctttcttcatggtctatggttcggaggcagtgctacctgctgatctcaagttcggggcaccgaggttaatctttgaaaacatagcagaagctgaagctactaggctggaggatgttgatgtactcgaagaagagcgactgaatacgatgattcaatcagcacggtatcagcaaactctgaggcgttatcatgataaggccatacggcatcgatccttcacagtgggagatctcgtcctccgccgaattctaatggggttgggacgacacaattgtcacctctatgggaaggaccattcatagtagcagaagtcgctcggccgggatcatatcgtctcacttagatggatggcacggaaattgggaactcatggaacatagaacacctcaggaagttttacccctagctac

SEQ ID NO: 5397 - DNA, 1059 bp, Zea Mays
aacgaaggggtacgggaggatcgtggccgcttgatctaacacgtgcgcctcagattagaactaggttttccccaaaccggtaccgaatcccagccgtcagatcaagatgggcggctacgatctaacacacccaatcgttatccccccttctaatctcggacgttggctatccaatcgacggcgctgaagccatctgcgacctcaggcgaaaaatacacggcggcgtgctcacccgcggtgaacaccatcgccggtcacagtcgattccaccatccacgcccccattcacaaatcgaacccgagctacagcattactagcccatggcggagctataggagaagttctcaccggctgttgaggaggttgcgagctcgcccacgctgcgcggcggctcggccgcgagagtcggagtgcggcgacaaattcgtgggatccccgtcgaattggtggccgaagtagttcccacgctagggagggaaaagggaaagccgagtgtggccatggggaggcggcggagaagcccgggcgcaggagggagctcgccaaggaggactggccgagcggacctggcagggagccacccgccacgccatttatattcgggtgcagggagaggaagaggattacggaacccagctggcgcgaggatcggtaggtagttcgggcaggtcgttaccgctgcgaggaatcggggaagaagatccacagggcgcgcttggatggaacgacgaggaggtgaggccgagttcatattgccgcgaggtgacggctgattcgcgcaagctccgggcagggtcgttgaacccgcgcggtttttttgcggagggtttgttagcgaggaggattgcgacggagatcttgagcggcttgcaacgaaccgagcaaagtgacggatccgacgagatagccccaccactcagggtcagcgagtacgcaggtgtctgcggaacagggatcccaggcgcgcgccccgctcgcgggacccatcagccagaagcccaccgcacagaaacagggggaaaagggaaagatgggctggccgagtgggatctgggccg

SEQ ID NO: 5398 - DNA, 598 bp, Zea Mays
gttagatcctaggtctgtaatgatgctgctaggtaatccaaacctaaacattatttcttgaatgaactccactgccttttctgaggtcaaagaggcgatgggtttgtattctatccactttgtgactttatcaatgtcaaccagtatgcatgtatatcccccttgagctttcttgaagggcccaatcatgtccagcccccagcatgcaaacggccaggtcacaggaatagtctgcaactgttgcgtgggtagatgctgctgcttcgataagaattggcacaccacttctgaactaactcggctgcattattcttcgatgttggccagtagaacccggacctgaaagctttccctaccagagtctgtgacgctgcatgcacgccacattgcccagcatggatctcgtccaacagccgctttccagtagtcgagtgaatacacttcatgaggactcctcctgcacctcttatatatagtaagcccccaataatggtgtagtgggccgactgtctcgcgatgcgctccgccgcagccttgtcatctggttcttccttgtttcttatgtatctgatgattggctccctccactcattgggat

SEQ ID NO: 5399 - DNA, 610 bp, Zea Mays
aagattgcaggttcagtgtatatcgccacagatgacccgcgccccgatcctcgtcggcgctacgattcgtgcccggtggtgcgtggataatgacccggggtaaaagatcttggagttgtgatgagctcgaacccggtcactggattattcaccgtacccacttgttgtacgactaaccgaggtgtcctcaccggagtttgccgccttcgtagtcgtgccatgtgcttaggaacgttaccacatcgcaagtgaaccataagagggagtctatccattctcagaagctttgcctcagtgaaagccatgttagcgctcgccggtgattttcccccctctccgtccgcccacgtgtcttctccaaattggacgccatcgttgttgatctctataaattgagcgctcagtgtgctccgttaggttgttatgcacccagtgcactaggtctcgcctctgatcatccaccgtaaagtcctaattttgcttttcccacaattccgttttccgcgccgccgtgaacttctcaccgtggccagccatctacaggtcagttcaagcttctctgcttgatgttctagcatcccttaagtctcctattgctcgtagacccgtt

SEQ ID NO: 5400 - DNA, 886 bp, Zea Mays
gaaggtcaaagaatggctccaaaatttgggaattggggagcatatgccagtagtacatgatgaggatgaagcggatgatgtaaatgttccaccacagtctgatgataactcaattagaaataggtaaacatgtttctagattggtgatgatagtttattatagtcttatagataattaactagtaactgatatataggtatgcttttatcacatcgtatgttgccttagagcagttgagtctccatattttattccatgcatgcagtaagcaagacattgaacctgttgtggcagaaacgttccttcaagtgctgttttacctgtcattcgaccggctcttggacgtcaaaactctatttctgatcgagcaaaagttgcaatgcaagaatatctaaaccatttcttagggaacttggatatcgtcaattcacgggaggtactaaaagctttgtacatttcaaagtagacaccctcataattgaacattaaaatgttaatcagaacaccttatttggctatctttattcaatttatttgcactacaggtttgcaaatttttggaggtgtcatgtttgtcatttttacctgagtatggtcccaagttaaaagaagacaatgtttcagttggacatttaccaaagattcaaaaggaccggaaaaaacgatgctgttcatgtggattgtttaactgttgcaagagcaattggcaaaaggtattaagccttttgcagttttgctttgtttacagatatttggctgttgtatctgagttgttcaattggttattccttaacagacctgggctgtcctgaagccaggattcttggctttgcttgaagacccttttgatccaaagcttttagacgtcattatttttgatgcatt

SEQ ID NO: 5401 - DNA, 518 bp, Zea Mays
acacgacaagatgcgtcgagacccaggctacgacagctaggggtcggtgtggcacatggacgataatgttgatgtctgagctctccgcccgccataaagagcgtgaccagggaagcctagacgaccgaggcataaacggacaaacgcaactttaacaagatagaacactctattttaccacagcgcagcaactcctccttaaagaatctacaggtagccgactccccatggccaatacaaggggaggttggataggatggacatgggagacagacacaaacataagcacatgcacatgcacacagacaacgaaaccaggagacatattggccggagccaaggagcgatccaccacgacatctaagtcttagtagaaggcaccagtcctgtagtctttatgtctagccacacataagagacttaggagctcatccctctctcgcccgttagtaacccccactacaagcatttgagcaacaaggtgcagttaacacgagccaccgaagactggatgtagg

SEQ ID NO: 5402 - DNA, 419 bp, Zea Mays
aatgaagccaagattcagtttctgcaagagctgagacaaattagagcagcttgtcagggtccttggatgatttctgggaatttcaatctcatattgcaggccgaggataaaaacaactcgcatattaatcgggctatgatgggtcgattcacaaaattggtagatgatctagctcttaaagagattcgactacacgggcgcaagtttacttggtctaatcagccgaatcagcctactcttgtcaagcttgatagagtgctatgctctattgactaggaggaattgttccctaatgcaatgttacaaagtgcagcttctgaagattctggtcactgtcctttattattgggtttcagagataacaaagatgttaaaaggcgttttcattttgaatccttctggacaaagattgaagggtt

SEQ ID NO: 5403 - DNA, 539 bp, Zea Mays
tttgcacggtggcggccggagaaagaggagatcactggtgcaagtgattggtggcatctaccgtggtggctctccggcgatcaccgcatacagatgacccgagctattgcgacgtggttaagggcttgaggcgtggcacaatcgaggtgaacaatgcagattccggtgatggccgtaaggccacatcgccggcgcaaatgaccgagggaaagcgcggccacagtgtcccggacctatccgcggcatgaccttttcaccggcgagctcaattcacagacctgaagcacgaatcatggcgatcggcaacaatcacggcaaagggtcaccgacggcgagattcatggaatctgttgatatttgtgtgcattgtacgattgcgatttttcttcagaacaactgacagagcatgtttgggatcaatttgctccatattttatgtggtgacccaaccatcactctgcatcaaagttgaagcttaataaaccagctttaactttgttacattgtgtacccacaaaaagtcacaggatcttactcaa

SEQ ID NO: 5404 - DNA, 915 bp, Zea Mays
aagttgtcatgtcaaggccatcggagtagctccaatatgacaggatgttcgttttgggcaactttaggtgcactctaccctatgactccgcaatttctagccacctcgccgtggtcgtatctcggatgtggctagacctttaagtttaattccgcaattatttcggtcagccaacgttaagttttagaaaagactattcgccccctctagtccaccatatagaccctacagcagcgaccgatgacacccataagtaatggttataactagtgcttcatatatattgtatgcatctcgttcattttttattaatcatatcctagaaatgatgttcgtacctaggacgatcggatcaaaagttgctgcggcattaatccatgatcggaatgctcgacaccaatattgggaaccatccacaagtgtgtcaagtattgctcaccaatttctaaaatataattgcgcctaaaaataaaggactaataaatacatcaccgaacatacatcactcgtcaacacaagacatctcattgtttattattcaatatattgagtaggacactatatatagattcaacacatacacttaaatgtatgaaatcaaccatgaaagcaagatcagacatcacactcgcattattcaattgatgcttgcctttcatatatcaaggcataaaaaggtataaaggtagcctttgctagtaggcaatctagcctattagcaaagggtctttatacctttttatgccttgatatatggagtttcttcaacgatttcctcattagtgtttgggtccacgctgaagtagatgacaacacgtatagttccgggtgcgagttggtctgaaggcctcggggtctcgttcaaatccacatctagtgactcaaagaatgttacatctggccgctcttgttcta

SEQ ID NO: 5405 - DNA, 442 bp, Zea Mays
gtaagaaatgagcggtcttggtcaatctgtccacaataacccaaattaaatcatggtgcctgaaggtattgggcaatcccacgataaagtccatgcaaatgtcctcccatttccaagatggtatgggaaggggttgcaaagggcctgctgccttcaaatgactggctttaatcctttggcaggtgtcacactcggatatatacttggcaatttacctcttcatcctggtccaccagtataaggatctaagatcatggtacgtcttgttactaccagggtgcatggagaatttggaaaggtgagcttcatccaatatcctctttctgagttcagggtccttgggaacaaccaatcgatctccaaaccataaaatccccttgctgtcctgacggaagcacttgtatttctccgccttctgcttgatcatttctttgataacctg

SEQ ID NO: 5406 - DNA, 450 bp, Zea Mays
cgacggcgcgacgcgaaccagcaaaccaacaagcgctgggagaagaggtctcgcgaagaagtccatgccgctggaccacccgtctctcgtgcccgaggggcaccccacgggggcgaacgaacatttgatgacatcctcgatgcccagtgcccgtaccacaaggatatgcgtcataccctccggaactgcagagacttcaagcactccgtcgggaatggccgacccttccaacctctaccacctcccccaccacgaggaggatccggagaacctcgacaacctcagcagcgggaagggggagaaggcggagcgttctagcgcatcgatggagaagtcatcatcatctttggcggacacgggtcacaagagaacaaaaggcagcagaagctcaacgatcgccagatactggtggcggccaccagtgctcccgccccgtatcgatggtcagaa

SEQ ID NO: 5407 - DNA, 346 bp, Zea Mays
caacaaagcaaccaataatcgtcaaacctgattccagtagtgagagagtgtagccaatgtgtatggcggaccagcggcacgcaccaccggtgcatatggtatggtacggcggtggcccctgacccggcaggcctgtacacagtggccagtgggggtcggatcgcccgtggtccgtcctctcctatcccacgcatatgccggtgccggccggatccatgcacgcatcgacccacccccatcgatcgacccgcaggagtccggccgttcatctttgaattcaccgacgaatgacgacccagactagctagccagggcgccgcggaaaaaaaaaagaaaagaaacaagg

SEQ ID NO: 5408 - DNA, 307 bp, Zea Mays
aagaagtggcagccaagccaaacataggacatggacacgtagctgctgctgggacaaacagattataggggagcaggccacaaagtggtggtggtcaagggatgagaagcaagtgtatgaagctttatgtagtggttacacgacaaatgagtaattctgctagctaggatagggaacacaggactgaaatgattgtgaatcagtgcatagtcggtcccggtgttgtgatggatggccactatagcggagagcatcacacgtgggccgaacaacgaggttgtagtaataagcaaacaacaagagtgcc

SEQ ID NO: 5409 - DNA, 657 bp, Zea Mays
aaaagaatgaacagtgatgggctcaaaccagcccaagtcagcccatcaacagaagaaacatgcccgcgcgcgcccgcgttggaaaacttgcgtagagaccctcggtgatttgaataaccgttaaagaacccttggcactatttcactgtctctctgacgtttgcactaaggcccccggacttctatttcttcacaacactcggtccacgacggtgagcgcgccctccggcaaacttgtaccggccagaatacacaatggccggtgccctaacttggctaacaccaaatcccacccctgcgatcctaatctgacccttaattgcacgaattcggcccggagtccttctgcccacgacgacggcgaaacccgagggaaaactaaggtgttcttggtgatttagtgcagtctagttcaatcaattgggtctacgagcaacaggagactcatgggatgctagaacaccaagtagagaagcaagaaccaacctgcggatggctggccacggtgagaagctcacagcggcatgaaaaactgatttggggggaatcgtgaattgaggagctacggtgaacgattagaggcgaggagcaatgcactgggcgcataacaacctagcggagcacgctaaacgctgaacgttgaatgctgaattggga

SEQ ID NO: 5410 - DNA, 1100 bp, Zea Mays
cgcattattatcagaaactccaggggctatagcgcaaaagaatccaagactcagtggtgcacctgagtgggctgcgggtttattctgaataaatctaggggcccttatgtaaaaagggtcggtcgaaggggtaccggagcatctgagccgtccgatcaaaatctgaaggtccagattagatagccatcacaccaaaccggtaggcgctcacaaccctaggatcacgatccgacggtggtggttttaaagaggtaagaagggttctggaccgcccgatcccatccaacgactcacgatcgatcccgaagagagtatcatctgcgcgatcacgatcgtcgacaatcaatctaacggttcagattaggtgcacgaagggatgcgtccagatcggatcctaaccatcggatagagatctaacggttagaacaccatcttctatcctgacgtagccccgagcagcgcgttcccagggacggcggcgcggtgctccggcgagcagcccatccccgcctcggtgaccgattcgtgacacgacgagctgctacactaagcggagaatatggcgaacagaggggaggcaatttcacctttagattgttgtgagtctcggtcccgccatggtacggtgcggcaccgcggcaacaccccccctccgatgaacgattcccatcaagagcgctacctaggtcaagtatgcaggacggctacacaacctagcgatgagggcggagattcggaggtgattttaccggaggatggcagcgcaggggctccgctccacgtgatggcgcctctctaccatggttcttggacttcgacgagcacacacttgacccccggacgccaaacctccataacgagctcccagacactatcctcagggcgcggcggggcttctaagatcgattcaatggcggcctcgcgagcaccttccactcttcctcacgacgcagatgcacacagcggcggtggatcttttctctctcctcccctcattttggcttgctcggaattcatggcgacgtgcggtacccacggttggggcacgacttatagcccaggtcgcggtgtggcccgccccccggttcggtcggttgcgc

SEQ ID NO: 5411 - DNA, 787 bp, Zea Mays
cacatagactggtgtggatcgagctcactcgctttttgttgacgttactgcgacctgggtgctgaggcaacccccttcgataagtttcagggggagccggggacccacttccttagctagttgcaggaggagctagagaccctctcgtcgatcgtgacagggttgatgtcctatgcctcccgtgttacctgcgagggtgctgccaacgccctgtctcgtgaaggctaccgtcactttgaggtcattgatccgaggacttcgacggggtgttttccaagtcaaagacacattattgaaacagtctgctggtgcattatatgaatggatgtgggggtagcatggttgctctgtcgtcaaggagagggtcagccgagcattggagacggtgaaggtcctttttaggggatgcaaagagttttatgttcgtattctggtgttttgtttcatgttgcatgcacagaggaatgaggaggttgaagacctcgccggcctagagggctcagtggccactctagacgatggcatcttagaaaaaggtgcggaggagcagtcttcgcgcgttcaagctgacactggtgagcccgacgccgcgggggcttcacaccgtgttgctgacgagcaggtgtaatatggcgaacactgtgtgtaggagggggcagatgtgtcgtgatgcacgctaacattgaatttggtctatacgcaggtttgatgactaggcctacgtaaggagattatggctttaaggggaaggaagttgttgaggttgtcgaatgcgttactccactat

SEQ ID NO: 5412 - DNA, 433 bp, Zea Mays
cccccgccgctgccatcaaatcgcgtcaccgttacttctataccccgatagcccagtcccggtcgttcttgaggtggcgcttactacgttaaggaaggaattcgggtgtacggggtctcgtgctgacgggaattgctcaccgtcgagattggtccgccgcgggccgcacctcctccgtggccaggaccgtcctcgcaacaatcggtggtaagccgtccctactctactcgccctagatcccctctgcgtataacttcgatcaggggtcgaattagtcagtaggtgtgtggagtaccaatttctccggcgagctttgtcgcggcccggtgggcggcgccgccgtgcgagcctgccctgttgaagcgatgatcgggctccgtcggatcaatggcggacggccacgattagaagttagataccggttcggtggatc

SEQ ID NO: 5413 - DNA, 1129 bp, Zea Mays
caccggctacttcatttgaaatactataattatcgatcatgccactaatacaaggcacttcggcgcacacactcacccactgatacatcctttgcataaactggtgtttcaaaccctgctcatcacatcaaaacacaagacaacgcgtatgtttctctgaaccacatacacattcacgccactgcatgcaatttgagaatttttgtcaaacacgtaatacacatcacaatataacatctaacaagagcctgagaaacacaaagaacatcccaccctttttcacttaccttcttttcccacaagatcgtccgtactcgcacaagcactgcctcggctaggtgtgggctcgcagggagacacgacgatgccacaaggcgacacaagccgcaagcatgatgagcatccccgttcaaacatttcctcgaacacttgtcgagcgtcatgaggaacagcgcgcggtgaggacaaaagtgaggttgacgacactgtccgtgacacgacgctcttctcgagtgttttgtcgaagactacgcaagtgcggcagtgcgaggatagcaaggattgtgacgtgagtaggggcctagagcgtgcgacgccatgagtgggaggccctagccaatgccatgaccagtagcactgaagatagggtagggaactcgagggtgaagggccaggtgtgcaccggtggggttgatggccggctagacattttatcgcacgcagcgggcgtggatggcgtgctgcgctgggtgcacgagcagaggagggaggagctgcacgttgggaagaagattcaagagcagtgtgcgtccgatgtagaaggagacctaggcggctacatcatagtggaggtcgaccgatgaaggaacaggggcacgttggcgatgaggtcccagacctgctctccccatgccagggggaggaggtcatgcgccaaggggccaggtggaggtgagctcggtgatggttggaggaaattctcatcgtccttggatgggaggagcaggggcatgggcattgaagaccagtgaaggcatggccacgaaccctgggcacgaaagcacgtacgggagggcttgagaggtatgtggtgaaggtcctagcgcacgcccgacgaacggcagctgca

SEQ ID NO: 5414 - DNA, 351 bp, Zea Mays
cggatgtacgcagcaggtctggacctgctacgtggaaagcaccggaccccgtgcatgacgagcggacctccgggacagatcccggacccttccgagtgaggtccggacggttcaccaccgggtcccagaccctggggcaggaaatacccggaccctgccctggaaggggtccggtgctggcacgtgtccgaggcttgcaccacgctccccaccaaggcagtgacccgctactgccgcatggcttgtggcccatgacgtgagccaacgggaggagtctgacgtcgggccactggagccgcgcagccactgcatttattgcagaaaggacgtgccgcctgctaccaagccaac

SEQ ID NO: 5415 - DNA, 471 bp, Zea Mays
gagggggatggaggcactggtctcgtctgatagcgatgacgtggagactcgggtggaagcaaggggatggaagcgctggttggctgatacttacacattacattgtcttgctacaatatgctcatatctgtgtttttcctgcagcaatatgatattatggctcacaagtagacgactgatgttctgaacaatctttcgacgtctctatttttaggaatgaaacgacatctgaaatgtaacagataagtacactgttacttcctcatactaaagaattgaaacaaaacctcctgactctacagctacacataagtacaaaattgaagcaaaacctcctaactacatcaaaaggtgcaaaacccacccagatgcccaacgcagcagtggataatctacaattgaaaattcatactgaacgtccattttggcaaccaaaattgccaccggcctattgttgtaaaagatgacaag

SEQ ID NO: 5416 - DNA, 471 bp, Zea Mays
gtaacatccaccacatcaatggttcgatctggaacccgaagacacttcttcaattgggatacatggaacacattgtgtactgcagacgatgtttcgggtagttggagtctgtacgccactggaccacatctttcaagaataggaaacagaccaatgtatcgtggtgcaagctttccttttacactgaaacgggttacacccttcattggtgatactttcaggaacacataatctttgacttgacagtacaagggttggcgtcgtttgtctgcataactcttttgtcgagcttgtgcctctttcaagttatgtatgattcgttgaaccttttcttctatctctttctccatgtcaggcctgaaaaaccacttttctcctggttcagaccaattcaagggggtacgacaccatcgtccatacaatgcttcaaatggtgccatcttaatactttcttgataactattgttatac

SEQ ID NO: 5417 - DNA, 460 bp, Zea Mays
tttccagaatttaatagtttagttcactttctgattaccgcagatcagtagagattgccaggaactcagaacctttcatcggtgagcagttggcttctctgctctacctggagccagatagtgaacttacggtaggctatgcatttattgcctatttatcttgtttccaacgttcccattacccttctgatctcatttgcttgaagtgtctatttcctgtgtctgatatttttggatatgggttcaggctatgctaatcgcagcagaggccaaacgacaggaggaaaaagcaaaaggagtcagtgccgacgaggcagctgataatcaagatactgtgatgttcgacgataatgaagaagacgaggaagaggaaagcgaagaggaggaagaaggcgccgaccgagagcctcaagggaggggaggaagaggagggagggggatgataatgtgtttccatttt

SEQ ID NO: 5418 - DNA, 361 bp, Zea Mays
ttgctccgccgcggacccgccttcctccgtggccagggagctctgcttctcccaaccactggtaaggccatcaatcgtattctatttctccccagcttcgtgtagaacccatcgtagttcgatttagggcgctggggcaccagatcggtgatcaccggggggaccttcgccgtgtttaggtgcgacagctaccggcgttgccatcgggtggggatgacatcatgcgggccgtcggatttaaatggagggttgagattagatctagaagcgttggctgtcggccgttgatgcgtgaatgaacggtccagatcgggactcgcataccacttcgcgtcgttaaatctaagccgtggatctctga

SEQ ID NO: 5419 - DNA, 308 bp, Zea Mays
aggatgtggataatgcgttatcttctgccttggagtaagacccaagaagttcatcacttgtggcttcgatacatttcagccagtcgtcatttggttcatcaaatttatctccatatctgaaggtatacttcagccggactagttcaccttcattagattcgatgatggtctctttcggcatttcccagctatctaaaagcggccatattctgtatgttatatgttcttgaatcaaatctcttgtaccaatgaagaagcatacagtaccaatggccttctggcatgcttcggcgacttcatcgatttca

SEQ ID NO: 5420 - DNA, 907 bp, Zea Mays
ttgatgccatttaccgcgagaaagctgaagaggctcataatgtacgtgttgcgctggccacagatgggttcaatccctatggaatgagcgctgccccatacacatgttggcccgtgtttgttatcccaatcaatctccccccggtgtatgcttttaaaggcagaacatatttgtgtcgttgataattctcggacacccggggaataaaatgggcgtgtacatggagcctttgattgatgaatcgtacatgcttgggaggaaggggtatggacgtataaccgagctacgaagaaaaacttcaaaatgcatgtttggtactagtacgccatgcatgacttaccggcgtatgggctattctgtgtctattgtgttcacagtaagttcccatgcctagtttgtaaggaagctcttaagttcatttggttgaaaaagggtggcaaatattcgttgttcgataaacatcaacaatttctccctcctaaccatccattccgcctagacatcaataactttacgaaaggtgttgtagtgacagaccaaccacctgcaatgatgactggtgccgaaattcgtcaacaaatagatgggctcgtggccaatccagaaggtgtatttgtgggatatggtgagcagcatatgtggacacataagtcgggcttgactcggctcccctattatgatgacccactccttccacacaacattgacttgatgtacactgaaaagaatgtcgccgaggcactttgggcaacaattatggacattcctgataagtcaaaggataatgtaaagacaagagtggatctgacagcgttatgtgatagaccaaaccaagaaatgaagccgcctagtggtggaaagacatggagaaggtctaaggccgatttcgtcctaagtagggcccaga

SEQ ID NO: 5421 - DNA, 720 bp, Zea Mays
gaaatcgaaggcataaaaatcctccgcgaagtccacagtagaacttgcggctcccactcaggacctagagccctcgctgccaaagtaattcctcaaggattttactggcccgcaataatttgcactaccaatcgagtcacccaatcatgcgaagcttgccaaaagttctctcccctcttaggcagcccttcgcaattcaccaagctcgtcgcccatacatggccactccaacgctggggcctggatatcgtcggaccactgcctacagctcaagggaacctcaagttcaccttcgtcgccgtcgaatatttcacaaagtggattgaggccagggcaatatccacaataacatcaaaaaccattcaaaaattcttctggcaaaacattgtctgccgcttcggagtcccgtccgaactcacagtcgacaacgacaaacaatttgatagccaagacttcagggatttttgtttttccattggcaccaagcctgtcttcgcctccgtgtaccacccacaatccaacggcgttgttgaacgcgccaatggcaagatttttagtgccataaaaaaggcttcttgatgataaaaagggcaaatgggccgaccagttacctaaagttgtatgggccttgaacacgacagagtgccgggcaaccgggttcacacccttctgcctattgtatggatctgaggccatgacaccgcaagagttaaagaatag

SEQ ID NO: 5422 - DNA, 297 bp, Zea Mays
cacgtggcgttgagataaaataagaaaaggaactcaaggtttgcaagctgtaaaagcacataagcatagacacaacatcacattggcccagtgtgaaactactgtttgattactcgctagtgaattcttttgtcaagcgctctctctgccacgtcgcacagatgccgaacgacacgagcgactttaatccgtacgcttctactgtttttataatgtgttgaagatgaacgacgtaaaagcaacatccataaccatatatatcaaggtcctagctattcagaaccatgctaactaaag

SEQ ID NO: 5423 - DNA, 412 bp, Zea Mays
ggcaagggcaatggttatagcagtggctagggctaggaggcagcgtgggagaaggagggcgaggacagtgaggtagggaagaggttttctcctttctattaattgatttatttggttacaactcccttggtacttatagtcctaaggggacttgactcctaagcaatcaaggagatccttgttggattcagattctcctttccaatcctaacaactcgacttcctatcttaattgactccttccaaatttaactaagactagataaggcaggtacgattgacgacgattgcgacgacggcgatggtggcagcggtcgcgcccctcctcctctaggacaggcttgggcgatggcgccccctccttgggcccttattggccctactcattcgcgacggttgtgacagttgtgaa

SEQ ID NO: 5424 - DNA, 567 bp, Zea Mays
gtcctagatcctatagagtgtcgatgcgatagagtccagggttcctctatatcatcctctttgtaggttagataactgtggtggtgcatcggtggacggtgtagaggttgtgcttggctctactagtgccataggaagggcggttccagtcactagggcactagaaggtgatcggtactttaggaaattatggcgttagggtttgcggtggcaggaagcattggctttcgtgccaacgtccttcctcattaatataggacccatgaccggggtcacaagaggatagtgttgcacctccaatcagagtgtaggttgctaggagagatagaattaggcacgatcatccttgatcgagccagaccacatacacacctaatagactggtatcgattcgggtcgataccgatcgaaccaactaatcagtatccttcacatgtaactgatcgaccgatatcgaccctcttacccaacggatcaatcgctaccaacccgaacaaggtccaacatggttggtatcaacccgactgagcagtcgacaaccccgccgaccgaacgatactgcgagac

SEQ ID NO: 5425 - DNA, 340 bp, Zea Mays
tgctgagcgaatgagagcgagcctcagcttctggccaagtgagtgagagcttcttaagattccataggtaacacgattgtcatggttcagaaacttaccaagcagaatttactctgacactgcagaacaggttagttagtatggatagctacaatgggtacttctccatggctttacttctgtgtgcttttgttgcatggctagctgccatcataatctctattgaaattgttttggtgttttttgctagtttatctgttattattttaatttctcctaaaccttagcttagttgcttgctcagctcagttcatatggtcgctgtagtatgcttatatta

SEQ ID NO: 5426 - DNA, 541 bp, Zea Mays
ggggttaggaggttagggtttcaaaccttgggttgggatttttggatgttacaaacctaccccacttaaaggaatctcgccctcgagatttagactagatttgagaaaagataagggtattccctcctcaaggagtcctcactctcccaggtagcttcctcttctccttctctgctccactgaactttacagagcttcacttctgaggtgcgggtctttcggacagctgaatcaagaatcttgactggcttctctcggtactgaagatctttctgaatctgcactgcctcttcttcgatgtgactttctggtgcttgtaggcatttgcggagctgggatacgtgaaacacattgtggatgtcagacatggattctggtagttcaaggcggtatgctgcgggtcctactctgccaatgatgggatagggaccgacgaatcgcggtgctagttttcctattacttggaacctcctgacaccacgcatcggggagaccttgaggtagacgaaatctccttcttcaaatctgagctccctccgcc

SEQ ID NO: 5427 - DNA, 821 bp, Zea Mays
gtaggtagtttgatgagaaatgtagataaccttgaatagcaatccaacatttggtaaatattaggaaataaaaaaaaaatcgttgaataaaaaaaaatggagtcgaagtgagcgaagctggaggtaagctctaatcacccttgcacggaggaggaagttacaaccaaaaacctaacatcgaagccctaatatctagccgtgttcaatggaaccagaatgagatgcaaaagacaaaacctagcacgaagaacacatagccagagaagtctccgtacctgcggggatcgtcggcacgttgaggattgggtgtactggagatggtagcacacgtcgggaacaccacacggcggccgtcagtaacagtacagttgctgatggggaatgcggcgcgatctgttgttggaagaatcgtatgacgcagtgaacagcgtaaacacatggagaaggatggattgtgaggtacgcaccagaaacgagatcgtagttgccggcgacggagcggacactcgcggggaaggaggagcagcggcgtgcagtaggcttcgctttccagatctccgcccaggcgcccacagagaagctagcgggccaacctttttttccttttgactgggaactggcagccttatgtggaagcgtcccgtggtgtggccagcaggccaccattttttccgtttgactgggaacctggcagccttgtctggaagcatcccagggtctggggaatctcatattcacgtgctgcatcttggacgtacacgacaaatcaaacgattgagagaaattttgcagacgtggacacctctacctaccagattccc

SEQ ID NO: 5428 - DNA, 1063 bp, Zea Mays
gtgaagggtaaggaagctagtcgagccaacaagggtccgtgtaggtagttggaacgtaggttccttaacaggtaaattacgagaaatagtcaatgttgtggtgaggagacaagtaaatattttatgtgttcaagagaccaagtgcaaaggatagaaggcgaaggaagtggaaggtacaggcttcaagttgtggtacacggggactgcaggaaacaagaatggagtaggtgtcttaatcgataagagccttaaagatggggtagtagatgttaagaggcatcctagtcaaactggtcactaggacttggttctcaatgttatcagtgcggatgctcctcaagtaggccttaatgagaactcaaagagggagttctgggaaggcctggaggacatgtttagtagtgtgctagttggcgagaagctcttcataggaggagatctcaatggccatgtgggtacatctagcaccagtttcgagggtgtgcatggaagcttcggctttgggactaggaatcaagaaggagaggaaatcctgaacattgccctagcctatgacatgtttatagcaaacactttctttaggaagaggaaatcccactaggtgaccttcagtagtggccaacacactagccagattgatttcgtcctcttgagaaaagaggataggcatgcctgcttagattgcaaggttatacctggagagtgtgtggtagcccaacgtaagcttgtcgtagctgacttccgttttaagatttgtttacaacagaataagcataacaaggtcactagaacaaagtggtagaagcttaaaggggatgtggcccaaactttcaaggagagagttatcgaggagggcccttgggcagaagagggagacgcaaacatcatgtggaggaagatggcgacatgcatccaaaagatagcttcagaagagtttgggttgagtcaaggaaacagaagggaagttaaagacacttggtggtggaacgaagatgtccaaaaggctatcaacgagaagaaagattgctacaaacgcttacatcatgacaagtgtgcagacaac

SEQ ID NO: 5429 - DNA, 469 bp, Zea Mays
cacaatgggatgggtattcaggaaagtgttaaacgtgtaatctatcttcaaaaagagaagaaatgctaccatatagaacatggaccctactcttagggtgtgtttgaaatgtatgaacgaggaatacaggaactgcattttcagaattggactgctcggttctgtctgctcggttttcagaaacatacaggaactgcattttcagaaacttgctacttcagaaattactgaccagggactaactgaagctaactgaactaggactagggaaaaactgaagataactgaactgaagctaacacgattagactaggactaactgaagttaactaaaaataactgaagccaactgaattggactgaagctaactcaactgaagctaactgaattgggctgaagctaactgaagctaactcaactgaaggtaactgaaattgcagatgtgctagaactgaattatggcagctg

SEQ ID NO: 5430 - DNA, 402 bp, Zea Mays
cgacgtcagctcgtgtgtcatcgcttgacacctcgagacaccaatacgcaatcgtcgttgccgggcaagtgtgtcggtaccgcgctagggttccctcggtgggtctatgccaagctactcttatcgtgagtttgtgcatgcaactggccctagtggtccgacctctggcctcaagcctcacaatcgtgagtgtgtgcatgcaacaggcggcgacggtccggcctctggcatacctaaactggagcaacatccacggaagagagatatgcgtggcatcaagagcaactataggacacgacaccaacgggaatagaacgcgtcatcctggcgttattttagtgattagattgaggacgagtcctcgattggcaccagtagacgctaagtaaaatcctgatatgc

SEQ ID NO: 5431 - DNA, 530 bp, Zea Mays
cgccggacgggacggaggcgagcgcgacgagcggcgcccatcctcgggtgcgtgtaagtgtgttcgagttcgacaagggcacgcgcgcgacagggcacgcacacacacgcactcattgtctaccatcgtgtgcggtggcaaggacttggtgccaaaagccggcaactttacagtcgttactggacagtggacacaggtagagagaccgagatttgagagacagacagaggtgactgagggcaggcagcgaccacagaaaagacgagcatcatcactgcgctagcgctatggacactagcaactcggaaagcgagggctggtggccaggcctgcccctcctgcacacaccatgcacggctgcccgattgtttttattttgactcttttttttaaaaaataacgtatgcctagatccgtgtcatatgtcttggtgatgatgtttcaaccctgtattgccgtgcctccgttttctggttgccgcttgctcttcctctcttctccgtcctactctctccgtccacatatatttg

SEQ ID NO: 5432 - DNA, 555 bp, Zea Mays
ccggtttggggagaatctgaaattagcgctctctggtggggggtttgggatgcaggtgggtgcagtagctgctggaatatatggcaaagccgagggggctcaatttatagatcccatcgacggtggtgtccaattttgcaaggtcgtgctggcggccggagggaaacagggatactagagcaggggatgggtggctttcaccgtggcgctttctcccgtgatcaccggttgaggagctacggcggttaccggtgagctggtgcggctagggatgacgtggtggaaggcttggagcgtggcacagccgcagtaaagcacgacaactctggtgacggccatgaggccacgtcgccggtgaaaaggggcaggggacagcgaggccacattagctcatgcacatccgcgacgagatctttacccggtgaacgaaatccatacgcccgtggcacgaatcccggcgaagaggtcgccggcggtgagcattttgcgctggcgtgctgatccttatcaggtcactgtaccatggcgaaatccgattcagtgtacctgacagtc

SEQ ID NO: 5433 - DNA, 1093 bp, Zea Mays
atcccccagagatgcgcaggaattcctcgtagctcaacgccaatgggcaccagcgaccgaccacttccaatagcgaaagcctgacgagaccaccttcgaatatgtaacctgagtggaggggcatgaagagattgcccccctttaaccacctgatcagccacgacaactgaggggaagaagacgagtaaagaatttggcgtagcacgacgtaagcggagcgaccctacttcaaggcaaaacctcgaggcaatcgcatcacgcacctccgcggcgtagccagaatcttcctgtctgacaacactgacaatcagtgcacgacagagctcctcctcagcccgatcaattcttccacatcgcccgacaaagcactccggcctagccaggtcgaaggcaggcgaaggagccaaccggccccagcgcccgacttccttttcctctgaccacgacgagttctcttcttcgcgccttcaccagcagcagacccagacccggccacctgaccaccagccatacccaggccgtaaccaatctctcccgaagacttcttagccacaggccgccacactaaaatgcgtccggggatgggcggggtcgtccgccggtgcgggcacacgccgacacggtgccccggcaaccgacagaaaaagcaccgcacacgatttcggcactccgccgcacgatgctcagacgagaaacagttgaagcatctcccgcgcaaatccaccgggactggtctggggaggggcttcaaggtgctcgaacgacgacgaaccaccctcacccatccatcatcatccctggaagcagcatacttggatgaagacagggcctccttataggatttcctaaacacgtcatcctggaccagtgacgcggcagaggaggcacatactccgccgtcctcccgccagcgctgctccttcgatcttccaccacgctgaacaccaaggggataaacctccgacgctgggaaaggaagaggggtggtcgccggtcttggaataagggccggcgagaggccagtggagggagtaaacgaggcgtcgggagggggaaggtcagagggcggcagcggaaccgtcatgacgcctcc

SEQ ID NO: 5434 - DNA, 385 bp, Zea Mays
ctccattacacacttgtatcacaaacctacttgacttacttgaagtgtctactcgaaatcgtgagcacaatcatacactatatgtgaagcataatttaacgaacgcataatacgcatcgtcacgactcggcttataaatatagagaaagcgacgactactttaacatgtcaccacctctctatataagccaaaacaatttctacctacaatgatcaaacattcatgtcgagcacactttattttaccatatctcgcatacaaccatattgtagcgtgcactcgagacacttcgatcatcgtagcgtaaccactaatatatgaactccgatactcatgtcttaataatacatcctccacgcaaagtagcattttctaaactactcg

SEQ ID NO: 5435 - DNA, 1033 bp, Zea Mays
gtgcaaacgtccatcataccaccatatgttggctcggacagcagatcttcaggaaccatatcctcgagagcctgatcaaaatttgctatggacaactcttgcagaccaacgagtgcagacaaggctggaaaaggaatatcactactccccccactgactaggtagcgccgactgtttttccgaattaaggggatttcctcctcttcttcctcatcctcgtcaacaatacgaacaacacacccattggggtcagttctggccggattgcacccattgggatcagcatcgtcaaggtcacacccattggggtcagcgtcagtagggtcacacccattgggatcagctccagtaaaaagttccactggcacttcctcagcagcaggagcagaagggccggcatccttattcaaataggacactcgccgaagcctcctctttttcttattcttcccctcggcaggagcagttggatgactggtcgggcgaaggcgctttgggcgagcatcatcagttttttgagcagtcaatgtcttttcaggctcggggacagttgcaatagctatagtttcagcagggacggagtcagatgaatcctcaaccaacatgtccagcatggcacttatctccgcatcactcgggtttataggcatttcaaagtgaacttgcctttcatcgttggggagatcaccaagtgaagcaaccagagcctcgacttcttcgggagagggtcgtactctaagacctaggccactgtcgctagcaggaggattggacacaaaactggaaaaaaatcttggaaggtggctgattccaggcagaatatgcaacaggagcactaatattcgacactttgcctctaaggatcatctccagccggcttaccaaatccatagcaggaatcctcctattggtaacccgggttgatgagtcaatgacaccattgtacaaataagccgggtatgctctgtccttcagcggctgaatgttcttataaacaaagtctgcaactacagcttcggcagtcagacctctc

SEQ ID NO: 5436 - DNA, 683 bp, Zea Mays
attgaaccatggttgctatgacaaacttgtagctagtttatagctctacaatattgctgcagaaagttaattgagttgccatttgaaattgggagtaaatcagcgctaaacctgctctgtcaggcgctctgatgaagcagtgccatggtacagtgtccgatatggatcagactgccagcgttggatcctcatcgccggtgacctccctgcgcaaggattcgtgctgccaccgcccggattcgcgctagagactaacggataacatcgcggggagagggaatcttcgccaccggtgagctggactccactccggtgaccccccgcacttcccctctaccctgcggcttgagctgatatgctcgccagtgaaccgccgttctccggccttgcgtcgcgtgtcccaacctcgccaccgcatcgtcgtgactccctctagcttcccgtcgaccaccggaattactgccacgacattgaacacgtattcaccgcgccagggttctttcttatctccggccgcccgcgatgttcgatcaaattaagcgccaccgtcgaaacctcctataaattgagcccgagaccagctttgcaacatcatcacccatctcgccaccaagaatcactagcaatcgtgcaccagtgagctcgaatttcattttcccccaaatcagtcgaagagcaccgtg

SEQ ID NO: 5437 - DNA, 766 bp, Zea Mays
gcgtcgtgaagtgggagtggatgtcctcaacacgcctttcgatgttgtcacaacgtccggcgaacttctcggagagccgtgcttccatcaggcgcatttcctcgagcacctggcggttactggcgtcggtgtactccatcgctgcggctgtggcccgagtacgccgtggaccgttgccgctcggatccagaatgcctaaatctgataccagattgttagcacgtgtggaggagaggagtagcagaggcagggattggaggtagaagaagggtattggggagacggcggcggccaagacagccaacccccaggtactcgtattatctttctgttgtttgatgccctctctgtctcagcgttcccaggtttatacgccttattacaactcagcccaacaggcctacacaacccactccggcccaaatactttcacgctacgacgctttactcgttgtggacgcgcagcggcttcctcctcggactcgccctccacgtatttgtctgcacgaccgacgtcctggctgttggagctgacaccgcgccactcggtgaactaactcgccggtgggcactgccgccctgggggtcgcaccatcgcggtcatgaccaaaggaggaagaaactcggccagccgttcgatttagtagggacgcatgggattagatcctagacatcggccagcctaaagataagtgatccgtccaatcttgatcgaatgggtaaaattggattggccttcattaaattcagaccgtcgatcttcgat

SEQ ID NO: 5438 - DNA, 591 bp, Zea Mays
gcataatgtgactttagagcttgaacgacccaccacaatccatgcgagtacaagctctatcatatctggcgtcaacgcgtgtgtggccatgtgggctacgacaacgcaacaagcctccataacaagcgcaacaggcgcagttgtgactcggtaattggggtacgcgacaagtccacacaacgtgcgcaacaaacgcaattgtggctcggtgataacgacagacgaacagtgcctacatggcatgcgaaaaatacgtgactcggtgatgccggtccaactcagcaggagtgatccggttaggcgagagtacaacatagcaatcacatgacgcagccaagttcttacgacacaaataatgcgtcgtgttgcctggacgcagccaatgccatagctcagccaattaaaaatgtagtctgatcgacgtgtctaagtacccactatatcatttaatcgctcgacgtgagcccaaaagctcaacgcaacacaaatatttagagcgatttgagtatacacaatataaccatcacatgcattttaataattttctgctaattatttactacgggaaataattattaatgcagaaaaaat

SEQ ID NO: 5439 - DNA, 753 bp, Zea Mays
cttgaagggagtcagcgcaacacagagctagcacaagggcgaacacacggtaacgattgcgccaaccgtcacgcaatcggacacccctgtccgcgatacgggcgacgcccaaactacatcctgagcccataggccaaatttgtgcccaatccgcccacaattaacgatggcgcgacaatagctaggaaagggaatacagcgagggtaaagaaccgagggctcatcgaacacggaggtcgaattggcgcaagacttccgacgatggatctacgtacctgccgtgctctgatgaggaattagatggtcatcggccaaccacacgtgtgacctcccaccccaacatgtcactggcaccagggtaccgttgcaaacccagccggagcccgagcagcaagggttcaggtgaatcgtgggggcagcggtggtgaatcaatttggctccccgactaccgcaccttgtcgatggtggctggctttgggggtggaaaggcgaagagggtcagaggtaccgcgcatagcatgaggtttttattcccaagacactgcgtgcgaagctggcgagctgcaacggcatccgtggttcgcgtggcattcatcgggcaattgacgaaggagggggcctgaccagtggggatcccaagtggacgtgaccacgtgcacgcgtaacatccggggagcgctggggtttgggggcccacttgtaagtggctcggcgtacgctacgatccgacaagcccaatccagatgtcagtg

SEQ ID NO: 5440 - DNA, 424 bp, Zea Mays
atcgcttcggttgtcgaggggaaaaacggggggcaaaagaagcagcgtatgatgaatgtaatggaagctattgaacagacctcggcccctacttcagcagataaagctactatacccgccgatgctaaccgctgtagctgaagccgagaatcttgcaaccacactatcagaaatcgatagacttatttcggatttgattgttgagaaagatgtagccgcagtgccttctgataaagggaagagaattgaagagacctcttcggaagatatgaatttcgaccttcggcacctgggcggccaacaactttccgaagaggacatatcagaattgaaggaatttgccatatcctgcggctaccaacctagataaatgctcttcagcggggttgatgaagagattttgggatgcattcgcaaccatgcc

SEQ ID NO: 5441 - DNA, 706 bp, Zea Mays
ttctccatggtgaaccactcgaggtgtcgtcccttgatgttgtccttgaggggaatgccaagatattccactttcctcccccggcgaagttccaaactagcgccgccaatgagctgatgctgccctccagccatgctaggacgacagtggtaaaggtacctccagagtccaaaatgggggagaattccaagataggcctcgcacaggtgtacgaaaatggcaacttgcagaatggagttaggattcaagtgtgtaagatttaaatcgtagaagtcaaggagaccgcgaaaaaagggagaaacaggaagatcaagtccacggatgaggaatggaacgtaaacaacggactcatgggtgtcctctgttggaacagtgatcccgcgccagatccgctaggaacacagttcttgcagcggcaaaaccccagtctccacaagatgaaaaagattcgattcagaaatgatggacatgtgattaccagcgaacggaagctggctgttgggatcgatgggtggaatgatcagagcaacgatgccttgtctcttccgcttggggggccattgcaatccctcgggcggagcgagcgagctcaagaattcagaaagtgaagtggcagaggtaaaagcgagagttagggttcgaaactcaagatggcacgtcggcatgtgtataagcagactccttaggttgagcactacctctaaag

SEQ ID NO: 5442 - DNA, 401 bp, Zea Mays
tatgaagacatcttactgaagaaaagtataggctttttaacttggtggtggaggagatgcgttacttgtgatttgtgatatactccttggttacattatgctccctccatttggtgcctcgattgaagtcagcatggttaggtcatcgctgtcttgatatgatatacaccccaaatgcctgcattctgatcttcctatcatgtgctaaactttgtgtcatccaagtttgtgatgaatctttatggctgttaattcctacttatttgaagtcgagtagagaatattcagcatcagcgtggaaataaaacctagctgattggttgctgcttgcatactacttttcatccctgattactcttgttactttatacaagaggatcaacaagttcatttgcatgttc

SEQ ID NO: 5443 - DNA, 774 bp, Zea Mays
ctcatatcatggttgttgtctatgcatttcatgattaatgcaagttgtgtgataatgatttgtgtgttgtgtatgtcaatagttttgcataaatgctgttaaaattttgcaaaatttgtcaaaatttgcaacatttaaaatacatgcagccacttgtgttaaatgttgttgccaaaatccttgtcaaatctgcaaaaataatgtcaaaacctttgaatccaaacatgggtaaaagtaaaatcacaaagaaccaacaaaagcgagggcaaatctgcaagggcaaaattgttatctcacgtcaggattaacactgttataatgacttaacagaataggggcaaagtcttgcttcgatttgaaataacaggggcaaaaacacaaagttcaaaaaataggttcaaaatcaccacaaaccctaaaaccgggggtatgaatgtcaaataacctaaaattttttaaggtgcattgttcctctcattgttgtgccacttacataaatgtttagacttagttattggatggtatgaattgaatacaagcaacatctctaagagagggaagcaggtgatccaaactatttgcgactagtagataagctattctgcttgtgttttttgttctgtttggtaagacatgttttattcatcatcactaagatgattttcctccccacttctggattagtttagtatcaacacaggggctgtgcgtggtactttcctgtatccgttgatttggtaatgtaaaaatatctgttgtaacacaattatcttg

SEQ ID NO: 5444 - DNA, 429 bp, Zea Mays
ccaggtcgaaaacatcaactaatttcaacttgatgtagcatatattttcaagaaaatgcctttgtctagtgaggttgggcttgcttctggttgcagaagatgaagagcaaagctaataactttttgcacttcaacaactcacgagatgcacaaagcatcttgacatgacaacatgaaattcaggcagttggtcctggcagtctccaaacatccacaataattcacataaacaagttctgcatatgtacaatgtacttatgcatgaaaatcaaaagagcacatggtgagaactgcaatgttactgtgacaacatcatggatatagagaaactaactcattctggatatcactgttagacagatgctttttctgggcccttttaggttcacgggtatattgggcccagccttgagctcatgcactctttgt

SEQ ID NO: 5445 - DNA, 300 bp, Zea Mays
ttggggtattttgggaatggtgttgggcgtgtcctgggggcagaagagattctcgagctgagggtgagttagtcgtgtttgaggtgttcttcattgccggccttcgccttcctacgcatcgcttcatggcggaggtcctgtagaggtttgaggttcaggtccaccagctaacacctaacgtcgtggtggccctggcgaagtatgtctgggcggtgacttcgtatggcggtcagccctctgtagaggtcttcgccaagaattactatatgcattggcaaaagagaaagattggaagtaaaa

SEQ ID NO: 5446 - DNA, 876 bp, Zea Mays
acgaaaaatatgggtgtcatgttggctagatagatgtgagtttaaagcaaacaatcatggttcaaataacattcacatttacatacttgcacagctgcgcacatgcaagctttgcatgaaggagaggtgtttgcatgcatggttgcatgcaccagtttagttgcatacttgcatgcgtgatgtgtgtgcaggtttaggggttgcatgcagactgagactggctgcatgcgaggaaggagcgggggcataaatatggtctacattagactcttaatagttagtagagataggggtccaatgtcatctttggtatgtgcttagccagccatgcatgcagaagccatgggtaaaactagattatagtatgcgagagaatgcattataaaattaaatctactgcacggttcgccatcacgtcagatgtcagggcatctctcctccgaatacaagactcagcttcactacaaacgctctccttggtgtataaatagggcagtggtccctccattgacaacaacaacaacgcacgtagacgagttcttgctttctcgctctgtcttagatattgacacttgtctcaatcatctatagggacttggggacttcccttctcccgctgtgcttgtaaacccccactataggcaccacggtgcgagtaatataagcatcatcccccctgctgtaagtagggcctcgagaagcccgaaccaggataaacgcttgtgtcatctcgcacaccatctagagccggccacgcgacattctactcattggttaagaactcgtagtccaaacaccgacagttggcgtgccaggtaggggccagtcgcgtgccacatcctcagttctcgccagcgctctagatggcaggttctg

SEQ ID NO: 5447 - DNA, 441 bp, Zea Mays
ggactcccaacgtcatccagcatagggacgctgacgcttcccgtaagcaggctttttacccataccgaagccctgttacaacaactacggtatgggcatcccctcccctgggggctcgggcgtatggccgacccctcagcatcggcctcggctctcagcatgaaaacaacaagctcaagtcaactacgcagcgcatggtcatgtcacccacaggacgccaagacatctcccctaggaacacaacggcccccgactcaaacagcgtacatctcctagatgtataaatatggcagtcttagctcctccaaggggtaggcggacacttggtagttttcctccagtctttcggtattggcacttgtctcaatcagctctagggacttggggacttccactctcccattgtgcttgtaatccctactgcaggcatatcggtacgag

SEQ ID NO: 5448 - DNA, 465 bp, Zea Mays
cttcggcattgggactcataccctggcttcggagggcccatatgtagacactaagtctaacgattgcattgggtgtcaactgatgaaagtatatctcaaaatttttcaaaacttctccaatcatctcatgcagggggaaacgaagtcctgccctgaagaagcttttaaagactacgatttcatcatcttttggttctggaatcacctcttccccagcaaacaggaaaagcttgctctcggtttccccaatgtagcccaatttcttcatcataaccatggcgtctgccgtcacagtagatttaccaaattcaatgtggctgggtttcattgggctcagaatagtgtagtcctcttcatcttcattctcatttcctccttcagctccgacctattcagcttcagcaatcgaggtaccttcggcaacagcctcctctggcacaacaagacccgattgcctcatcactt

SEQ ID NO: 5449 - DNA, 463 bp, Zea Mays
gcatcgaacaccactgttttgtgacatgctctttttgttggacttggtacatattgtgaatccactaatgtcataggtttgccatgtcatgacatggtgtgatggtctagatgccaaccctttgatggtttgttcatatattgtttctccatgtggaatatccttcaccattagccatgtgttgaacacctgcttgtgttgcttcattacccatccgtatgcccatgagtttgcttgtgaagctcattgatgtgttgttggataaatggctccattatcgctagcagatgtagaatgttgtgatgtgccccatgtactgtattgtaatcaggtgggatgaaatatttctgtcccatcctcctacttccatatagtctaccctcgtgtcatgacggaggcaaacttattgcaacctggtcttttacaatactattgaagaatggacctctaaactcagtacccc

SEQ ID NO: 5450 - DNA, 613 bp, Zea Mays
tttcaatatatcaattaatacttcatctctactttaaaggcagagtatatgagtctaactgtgttcatcatacagattgaatgttctgatacatgtagatgatcatgtactggttttcttcaaggttgaaacactatgcatgcgaagatttggatggttatggcatcaagccaataactctttccaaggctcctgaatgtctatatgttgatcagaagagtgaaaaaggtatgaggcttaccagtgctgggtttcgcttataacaacaaatgaagcattacttatgttaatttttactgctctagtgcaggataaccgagtatagttttcacccttgtacttagtcatggttatggtcaaagcaagactatcaggcataaacataaggatgaatcagaaaatatacataggccatgaacagcgagaagcatatagacactccgaaaatgaagcacatcaacttggtggaatttccttacaggtttctttctttccaagtcatatattatgaattttgtgtgagtgtgacaaggaattgctgaaaacatttggtgttgatcattgattgttatgtaaatgtatccaagtagctacatggtagcttatgcaatca

SEQ ID NO: 5451 - DNA, 406 bp, Zea Mays
gggagttctcttgtcgaggggaagtttttctttctacccttgtttgtgcttgatgagttcacttgtcaacaagggggagagattttgatatttctcggttcctctatcaagggggagaaatttggtctttcgggcttcctctcatccaagggggagagatgtgttatttggagttgttggtctctaggagagatttttgggagtattgtgacaaggggaggagaattgagccttttggagcttttgctagttgtgttgtgccgtttgcctctttctagcttttgtgctgattttatgctctaaattggtttttatgcttggataaagcttcttgtgcttcgatgagcttttggcttctggctagtggtgttgagccctgcttttgcctcttattgagggctagcct

SEQ ID NO: 5452 - DNA, 534 bp, Zea Mays
atgggtcaaaacactagttgcctttttgatctttttccgttcacacataaaatattttgcaaaaagacaatctatcttagtttcccactcaatatattttcagcacctataccatcataagatggaaaagcaagaatagaatcacctgcggaagaagttgtaggctgtggtagatgagtctccatcgtatccgtctgttcaacaagtcctgaaactctcttcaacctttcagtgttcatgttgagtgcatcacacatagctctcatcatgtcgcggagctccagatgggatgttcctgtcattgttagtacaaaacagaaacaaaggcaacaagcaaaaggtgtgaaccctacaactactctcaagggtggtggtggaacacaagttgtgaagcgtcttaccccgctcttacaaggttcttaccagcactgcaggtggcaaacggtggacggtgtaacaacacttagagcgtgggtgtgattgcaaaggagtacctgttctgctcgagagaaaggtggagctttgggaaggctt

SEQ ID NO: 5453 - DNA, 308 bp, Zea Mays
agagttggtggaactcaagaagcaaattcttgagctgttggagaaaggctacatcagaccaagtacctcaccttgggcagccctagtgctatttgtggagaagaaggatggtacaaagaggatgtgcatcgattatagagctttgaatgaagtcgaatcaaggacctatttgatcagttgagaggagtcattgtgttctcaaagatagatctgaggtcaggttaccatcagctcagaatccgaccttcagatataccgaagaccacattcatcaccaagtatgggctatatgagttcatggttatgtc

SEQ ID NO: 5454 - DNA, 517 bp, Zea Mays
tacttaagtgactaagtactggtactgaacagaaattggagaaaaatgttcctaaagtttaactgtcagactgtcttaagtctgaattcagactgacagtgtgtttgagccatctctgagctgggattcgatcctaatccaataaagatttgggagtgactgctatagcaagattgaagttggatagtagggcaacaactttcttatagatgaatcacggagtcgccacatgaaaaatcgagattcaagccctacaagatggtctgtcaggttgactgatagagttgtgcgatggtacagtagccaaaagattagcatattctgtgagctggccgccggtgacccttcgccgggattagtgctactcgccgcgatttgtgcgtatgggttgtggattgagtttgccggtgaaaagatctcgtcgcagatgggttcaagtactgcgaccacgctgtccctcggttccccgcgccggcgacgtggccttacggccgtcaccagaatctgtgatactcac

SEQ ID NO: 5455 - DNA, 758 bp, Zea Mays
cgtggggatgcctgactcgaatgaactcatgttcaacactgagcaacctacttataattttggagcctataaaaattctaagctaagaaaggtaataaaaaggaacgatattatagtcacatcatctgaacaacagtgaagggaagggagggatagatggtctgaatgcctataaatgtcgttcccttggtctgcttcttaaatttgaaaccaagatactatagtcaaatacttctaaacttgaagcctgtaaattggaatcaccaagttaaataagaacaggggtaactattcatagctcagatggttgtcatccaatacgtgcgctaaggcacagacaggtgaggttgcatattcaatcccctagacagtaaaccattgaggcatattaaaacacattttccatgaggtttcctaagtgatcctttaggtaaacagaaccatacctagctccatatgaaactatttcccggtttgaagtacacctaagttaaggttcatacattggagctctggcagtaaaacaatagtccttaccttgagacagcttagattaggatggggtgatggtaatatggcatgagcaacataccgcagttcatgcatggaggaaatcatttttactttctttcctagccatggtagctgtgttgctccttaccaaggcactacatggagcatcatatggttcatgatgtaaacatggttttagatctgtctatactcaccctcaagaaccagccaaaatgtgatattcc

SEQ ID NO: 5456 - DNA, 715 bp, Zea Mays
ccaccgcgcacggcggcggggtcaccggagcccacgattccggccaacccgagcgccagacccaaattcgttcgacccccacgagattgacgactccctgaacacaattcccacccaaatttcggttgtcctcgagcgtaggacccggtacacggtgtaccgcggcgacgccatggtcggccagtgctccccggaattcggctatgccatactccaattcgctagggcataatgtgggggagaggaagacaaacacgatggaaactcacttgtgaccagccgaggtgaggtgatgcccgaccacggaagaacggtagtacagcggtgaaagctcacggcgaggaattcagtcgacgtccgaggcagtccctgcgccgatccaccagtaacatgttccacgcgtccaggcggatcaccccggcgaccgttcgacgcgggaacgacggcgaaggaacgagtcagcagcggcggtggactgtcaccgtgcggatgcgcaataagaacctaacggcggtgcaaatgcggctaggtggggtgatgagtggtcacggcaccgcgcgcagctatatggtcaacacccccaacggtccgagcgggccctgcgccgatcgcggcggccaggtttgttcgcgccgcgcgactttcgcggggaagaagctggcagcgacgctgtgactggtaaaacggtcccactagtcggcgtatcggtaggagg

SEQ ID NO: 5457 - DNA, 459 bp, Zea Mays
gcggcattgtctaggtggctgggatggcaaccatcgatcacgattgatgctgtgattgcctcggtcttttacttccatgagtagacgcatgtatttcctttatacagagataacaataaatagagaaaagggagccttcggtaaaaccaaataccatcgtgtccagtgtgttcgtgtgagtttttgcctctctccgatcggtgttctaacagcctgcactatcagcttgtttggagctgcaggcacaaggtcgccgagaccgacacagaatgctagaggaggtggtcggcgacggaagtgtcctccaatggacctgcaaggtatagtaccaccacacctcgtcctcgtctttggtaccatactgcagctggagaccattttcgtttccttgcaactcctgcgagctctccgttcggtgggtgtgtaccgatgcctgtgctcccaagcacccccgccgcg

SEQ ID NO: 5458 - DNA, 378 bp, Zea Mays
ttgtggtatctcctaacaggagatacttttgtggtacaagaatttaccttgaaggcatattggagttcataattgcgaatatttgtgctggggccagagtagctgtcaaaaattgaaaggaaaagatgattagcaccaacttacaggactggatcctatggaattgataaaatatatgtagtgtgctatactctctgatcttttctttaaggccaacaattgaaagctcctttgtccaatgggccagaagtgtctttggagcaacaatgagcaccctcttgactagacgagaatgaaacagtccagccaaaaatgcagcaacctgcagcggaaataaggttgcatgattacattaatggatttcttagctaaatgaac

SEQ ID NO: 5459 - DNA, 450 bp, Zea Mays
aaaatgaagaaacatctgtatgtggttgcaaaatgtgaatcactagcatgtaagatcaattatcatccaacaaaaccaggccatggcatgaatgtacaatcagtttcctactctgttaggacaataccgcatgacctaattcgttcctaaaaagagcaaaaagaaatagtcagcagatcagccaacagtttccccaactggttagaagctgccgtcaaccaggtgcccctgcaatgcctcagcgaaccaaatcatgcttgccaatgccaggtgattgctcgtctgattactttggcataatacgacagatgtctcaagcttttatcttctcatagaaaagaaggaaagcctcgtgcttgagaacatcatctagagagatatttctgattcttatatcatttgcttgaaaccaagaggaagagctgctgctcagctccttctcactgacaa

SEQ ID NO: 5460 - DNA, 581 bp, Zea Mays
agcaaaatgaagtaagtagacaaaaaattttgttttcctagtttaacaatactaatggacatatgaaagtaggaaataacatttactgcaggcaatgacagggtgtattatgttcaaaatagccccccttgagaatgaggacgagcttaaggttatgtttggacccattgtctgcaccaatgaaacaacccttgttcctggagttgaggatgcaaattcttcatctgatgaccacgtgcaagccaatttaggtgggggtgaaaacagcacaccagacccctgctcaaatgcgatagggaagcgtaaggtgctgcatgattctcctaaacctaagaagaaaaaatatacgaaggatgaatacatgaaacgccttgtggaggcttttgagtcgcgttccatgaacactaacaagtccatagcatcttttgagaccgacctagtacgtgtagaggttgctgctcagttgcaacaagtaattgaagatggatcagaggaaggcagcgacttacgtttctttgccactcacttgttgatggagaaacggtatagagatgtatttgcaatcctgaagaccaaagaag

SEQ ID NO: 5461 - DNA, 570 bp, Zea Mays
gagaaggtggatccctgaagggcgatgtatgtggcggagacgatgggccaccatgaagataaggagaaggagggtcggaaagaggatgaggagcagcatgtgaagtttgaggaggtgatgatggatgtacaataggaacaacaatttgagatggcggagacagttgggcctgcaacgacggctgtcgtggtggatcaaccaattcgacatcccttcgaggccaaaggataaaattcttgatagcttgtccaagtgtctcgataccttcgggcccagggatgtctagcatgtcgtcctcgtatccttggacgactatcgtcacttctaccctgcaatattcttctggaatgtcgtttccatggaacttgcgtcctaggatcgcaaggcatgtggctactttctttgtacgctgattgttaataccatatcttataactagtgtgcatgccacaggccttgtgatgtcatcaactggatagcggaccttatttcccattgacgcgacagagcttgggatggtcgtaccctcggtggaagccggcgtttgagctgctggaattatttgcatct

SEQ ID NO: 5462 - DNA, 423 bp, Zea Mays
ttcatgaactccaccccggcagaatacaagttgtcattgtaaagtctacccttgatctataaaaggaaagacaaccccatattcacagacatccaactcatccaccactgcacacaagcacccaactgtaacacgctccaagcatacaggattagcactacactagactagggctctaacctgaaccagtataaccccctgtctcagatccaccttcgagccctcgtagctcaacattcagagtgaggccgctagaacccctaccgaacaaaaatcttattgtcccccggtttccaaaaccatgacagtaagcgcgccaggtaggggaaccgttagcgtgccaaacaacattcttcactccaatggctagttcatcaacattcacccctgggagccatgtcgagttcggcaccctcgacttcc

SEQ ID NO: 5463 - DNA, 372 bp, Zea Mays
gagacccctcaagtgatagcggtggtggatctgctcgcagccggtggcctgagctctctagctactctgactcgcctatgtcctacaaggtacgcacgtacgtatgtctgattttttggctcactgattccacgggcatcatcacaggcctgcccaccgagttcgtgtcatgttcatgggtcttaaagccagcataggtggcagcgcggtggtgttcggcaccacatggatcggtggcacatcgctcatcgcggaaattgtcggtatggcgagcatcagtggaagggtggccacgggcaagatcggcggcttcgacatgacaggaatgcccgagacagcgataggagcgatggggggcggggcatgagcaag

SEQ ID NO: 5464 - DNA, 698 bp, Zea Mays
atttggctatccaactggtcttggtgccttaattgtaaaaaatggtaggcaacacgctgttatcatgtatgatggcatttatttccttctatttggcatattataggctataagctacacatctaaatgataagataaattatgtagctacaacaaattactacatagatgctggtgatcggcttcccaagcaaggagcaagatctctaatgatttcttccctattttttattcaatggcagaggctgctagtttactgaacaagacatacttcagtggaggtttgcacttagcaatgcactgcttttaagttttaatgttggtttctttgtttgttttcttattttttagtaaccttgtggaatacttatgacataggaacggtagctgcttcaattgctgacatcgactttgttcagaaaagaaaaggcattgagcaaactcttgaggatggaacaatctcattcttgagcatatcttctcttcgatatggctttaagataattgatatcctaactatctcagctattgcacggtactatcagagataggttttgctcttgttattccgtttatgatatacttctcatcggagttctcctgtaggcatactgcatctcttgctacttatgtgagaaacaaaatgctggaattgaagcatagcaatgagaaaaatgtttgcataatctatggacaag

SEQ ID NO: 5465 - DNA, 571 bp, Zea Mays
ctggattatagggctagaactttgttacagagagattaatacattctcacgcaaaaatccaagatcttggcgtcacaagttcctcgatcaggcgctctgaatcagattttccgtggtacagtgccactgaaatatcccagggttcagtccccctcgccgccggtgatccacgcgtccggatttgcgccggtcgccgggattcgtgtcaggcgcgctgtggatattcacggggagttgaaagatctcgcggggaggcagatagggtcgcaggggaagcttatcaccgtgcctgtagccgttgcgacgtggccggaccgccggtgtcatcgtggacactccggcgacctcaattatgccacgccgtgactctttactacgcggtagtaaccgtggcacacttgagcttaccctctctgacccactgcactggtgaacgccacaattgcgacaccagtgacatcttccttctctagccaccaccgcgccaactccaattcacgcgctaccgcccctggagcatataatttgagcgtaccgtcgggttcgtaaggtagttaagcacccaacccac

SEQ ID NO: 5466 - DNA, 751 bp, Zea Mays
gatgaacttgagcattgtctggaagatccaatttgtaagctgccgcaccaatcttagccaacactctgaaaggaccaaaaaacttgaaagccaactttggagaaggacggtttaccacagtcttttgagcatatggctgaagcttgagcagcaccatctccccaacctgaaactctcttaccgtccttccccgatcagccatttgtttcatccaattttgagctcgagcgagttgttctctaagatgagttgagaaagcaaccctatcagccagccaatccgttactgacccctcctccggaacaccagattgaggtaacgccaacattggagcatcatatccatatagtgctttgaaaggagtacaacccagactagtatggtaagtagtattgtaccaaaattctaccaaggccaaccacaacttccatttagacggctgagcatttactgcacatcttaaatatgtctccaaacattgattcacccgttcgctttgaccgtcagtctgtggatgataggtagtggaaaacagcaacttgacatccataagttgaaataggtgcttccagaaagagctaatgaaaatcttgtctttgtcggatacaatggacttgggaggtccatgtaacttcaccacctggtccaaaaatacttgagccactccttgggcagtgaaagggtgtttgagtggaagaaaatgccaatatttggtgaatctgtccactactaccatgatagtgtcataacc

SEQ ID NO: 5467 - DNA, 310 bp, Zea Mays
cggactagcacaacaagtgcgaaaaaccgaagtctaccacgcagactatccgtgccgaagtcgcctaagggtgcagccggactagcacaacatgtgcgaaaaaccaaagtctactgcgcagactatccgtgcctaagggtgcagccgtactagcacaacaagtgcgaaaaaacgaagtctaccacggagactatccgtgcaacagttgcccgaaggcacagccggacgaagtgtaacaaaagcgaaaacgaccacaccaaactgtccgcgcaaagaccgactacatgcgcaccagtccagcataacaatt

SEQ ID NO: 5468 - DNA, 722 bp, Zea Mays
aaagaaagtaaggcaagacacgacgaagtcgctcaagggagggatcatttatagaaagacacaaggcgtggcaaagcaggtcatatgccaagcatcgcgtatggaaagaggcgatgttttggcaccaaatacgcaaaactgtggaaatacatgctatgataaaaggcagcgcccgacccaaggaaagcccccaacaggaaatattctcccccgggggctactgtcggggatattatcctcagtccttaggggccatcggttagcgagcacaccggggaaaaggcctctagcaactagggtccactagtcagtctgaggagataggtaacgtctaccctggaagaactcgccccagacgaaccctgtggcaccaagcctaggggcaggcgtgccgaagggaaacaattcaagtgtatcccgcctggtctgagtctgacccgtcataaataactggtcgcattaactgcacgtggcaccgagccacagcgggggtgacggtctgcctcccactcatgacctacgaacccatcgggccacatagcactcatggcctacgagccccttggattgcaacacatttatggcccacacgtcccccgaccaacgacgcactcataacatatcgggactaggcatgagtgcacatgcctcttgcagggcgcaacacgacgagccacaccgagccctaggctatgaagaccagaggtcgacgtagctagaat

SEQ ID NO: 5469 - DNA, 1156 bp, Zea Mays
aacacaaatgggcctttcgctgaatataggtaataccctgtttatgtcgttgttcctcagcaaaaaaatgtttttgttggtctatgccttttgtttgatatattttggtaattaactttggttataatgttgccttttcagatatttcagcaacatccttttttaagcctgtgacaattatcaaatttgtggaggagttcctgaacctgcgtgatacatctcggccgttgtttgacagagatcgtgtgaaggtattttttacacaatgacaatcgcgataacttcttttatagaacttgtacagcacgccatcctagagaaatcttgtatggctgtaactgtgttcagataaagaaagcattgcgcggtgtccgaattgaaacaactcaccaacaggaccaaatcagaagatacaagataacagggattactcccatccctatgagccagctgatgtaagtatttatctgcaaatgatactcttcttttctgttctctctacagcattttctgtaatattaatatcaatattaattctggttttctgaattgctagtacatctcttactaactgctaaatagttgtagtattacagttatcacaatttgaacgatctgacctatgtcaacagtgccataaacttatttttcctttttgtcattgtcatcaactgaccgcttcttttttgtcactttagattccctgttgatgataaaggaacaagaaagactgtagtgcagtacttcttggacaaatatgactacagattgaagtatgtctcttggccttgccttcaggctggcagtgattcacgacctgtatatttgcctatggaggtactgtgtccatgatcattcagttgtacctgaattattcatgttatgttcatagtttcaataaaaatggttgtaggtttgcaagattgtagaagggcagagatactctaagaagcttaatgacagacaagtgacgaacatacttagagcaacttgtaaacgtccccaggagagagagaagagcatacgtgatgtatgcttctagacctttattcctctgctgtttttagaataattattatctcttttggatatcatttttattgacattttttatgtgctgcatagatggttctgcataacaagtatgcagatgata

SEQ ID NO: 5470 - DNA, 1717 bp, Zea Mays
ggcgaccggatctgccgcgacggagcgacgcgccccgaggacggcgcggggctgcggccggcgcttcgccgttaaccaggtgagtgcgccgcctccgcttctccagcagcgccaccggggtacgggcccgtgcgccgctgtagatctagggtgtccaaattcgccgtcgccgttagccagattaggtggtgctgtagatcccctgttgacctcgacgcgcgtcactgtcctccgctgccctatgcccatgacgttaggtgaggcctgttcaccgtatttacaaatcccgctcatccgcgcgttgccttgcctccatcgcctgtgcttttccaacagcgccggctccctgttcttctgtacttgaacacagcgtccatcccgctgctaggtagtatatagagccccttcgctgctgtcttcctctttccgtcgtcctggtacccggcggaagcgtttttctcatcctcgacttcgtcgccgtcgtccgttcctttcttcggaccctactttctgttgtttcggttccttcattgcgtcatgtgtgttagctcatagtgtatgttgctcttgtagatctgctacgtacccaaagggcagacacaagcacatcctcccgctgtcctctcggtctcttctgcagctattcgaggtgagccactccttcctccattgctctcttttagatgttactttggtgtccatggatagattgtctgcatttttccaaattaggtgcacatcagtttcttatagctctgttttttttggggagaaacagggtgctgtcgtgtcgtggttcattttttcctacacgttttaccgctactttctcttctgcttgcatgcgtagatagttttttcacatttcgctgagcaagaactggacatgaggttcacttcacctgtttcctgcaactgcaaaggatcataggatatgtaaaagggctaacagacagttctactgagtgaaaccgtaactttgaaactagaaaatagaaaacagtgaagaaatacagcatgccttccaggcttattatcaggacataaaaagaaaacaaactgacatggcataatggtaccattgagtaacaaatatggaactgcaggcatatgatttatgacaatctatttagctgccaagaaacaataaatagcaatgacaccaccctttctcatctctgcaaacagctgaagttccttaactgacagcccatgcattgtgaaaccagaaattattgatgtccatgaagaacagccttttctggatcttcaacagataactggtccccctttcttcagtcagccctttctccataatttaattaagaacagggcgatcaccagtaacagagcttgtcattagaaaatgagcgcttttacacgcctctggccccaaaaatagaaacagcccaggtcgtacagcaccattgtaaccaatttctaagaaatgtttcaaaatcttattctaaattgaatctgcgtccagccaaacaaaatttcgattttgtgttcagggtgccgtttggaactttgctctaaatgataatatctaaacaagcagaagagtagaagcagcaggaagcagggtagcaaaactcaattacagatatagacatttaacaggtgaagagaagaatcacattctgttggattagtatacaaagtggaatcatttctatccttcatggcacccaaacaacctgactgtggaattagt

SEQ ID NO: 5471 - DNA, 386 bp, Zea Mays
tggatggtaagctggactaaagtccaacttggtgccaagagcttcgtgcaacttcttcaaaaatctggaggtgaactgggtacctcgatcagatacgatcctcctgggtatgccatgcagctttacaatacgatcaatgtacaacttggccaacttatcctcaccaaaggtagtccgcactgggatgaaatgagccaccttagtgagacggtcgactatcacccaaattgagtcatgaccattcttggtacggggcagaccagtgatgaaatccataccaacttcgtcccacttccagactgggattggcagtggctgaagtttaccactaggcttctgatgttctgccttgattcgctggcacacatcacactcagcaacaaatc

SEQ ID NO: 5472 - DNA, 369 bp, Zea Mays
ggggggtattaacaaattccagcaaactgtttatgtagagaatgagggaaacaccacacacccattgtgtggggtgacttttgattatatatgtcgtatgtcttggtgtacaggtaagtccatatgtcttggtgtaccgaggcggtgaggatgatgtcgtcgacgtacaagaggtaggatgtggcaaccccctccttgtagatagagggaggtgtcgggcatggcagagacgaagccaaggcgtcaaatgtaggtggcgaaccatgggtaccacacacaaggtgtctgctttagcgtgcatcccggtggcgctcgtgtccaacgtgttgcggcctaacaaatgacaggaccaatccatccccacttatc

SEQ ID NO: 5473 - DNA, 713 bp, Zea Mays
gatcaaggaggccgaggcgaagtacctggccaatttcaaggtggagaagcatcagaaagtagtccggcaaagggagactgaccgagcattgctcttacctattgcacccgcccccaatgtaagtaaaacaaacgatatttaatctattagagcttgcatatatgaacagcaagagcaaatgcatcaagtaatagggggtatgcaagaggatataaaagaatagcgtgcgcatttgaaaaatctgttgttcccaattttttaacgtatgatgttgaagctaggaacgatgcacaaaattctttggctgcaaacgggtattcacaaccccaaccattgtatggtatgctaatgaactcctatgccgggcaaccacagcctccgccaccaatctggggtaaacccacaaacctgcacacaaacggaccgtctgggactgagctcgtaccatctgggccagctgtggctggctatttttgtgacgagccgccgagatccacgtctggaccactgtactccacgcaagggctaactgacatgcttagatcgtccgtgtatcacgctgaaccgtccgagtacacattgggaccatctgtgtatcataccagaccatctggcggagggtacgcagaacatgatgtaggttattaccagcaatatttacacccgcctcagccaagcttccccttacctcccacagctcctcaaaatcatgg

SEQ ID NO: 5474 - DNA, 489 bp, Zea Mays
gccgggtgaggcagacgcggagctccaaactgagatggcataggggtagtcggtgcaggagtaggcgcagccagatactgaggaaaaccctgcaccagcacgaactaagaagtcccaggcacataaaactgctgcggaggaagtggaactgaaaattgctgctcagtgcttgacatcatgttgacagtgccctgagaagaggaggaagtcactggctccgatctgagcttcccattgggattcctcctacacaccacatccttgtggtcttgactgcagattgaacacctgccattccactggcactctgcacggcgatgcgcatcaccacaacggaaacacaccagccccagcccgggcttaggaacagcctgaaacctctgagtacttcctcccgatgtaccccgagtcagaggatttgccacgatagggatggtggcgctgatgctgagacttgcccctcttgtgggctggacctccagtgttgcc

SEQ ID NO: 5475 - DNA, 703 bp, Zea Mays
tttttctagcttgcataacaacactggtatttctttctccaacttctccatcatatttttacttatttctttggcacagatctgcctgtagaaataagttagctcagctattgcttgacacatggcgtcgggcatataaccacgaaacatgacagggataatcctctccattaatatatggaagccatggctctttaacccagttagttttcccgtttcaaattcacagctcttttcaagcccgcagcatatccatcgggaaatttaatttttttcatccatctcattacctcgatcttgtctttagaggtaagacaaaacaaggcacgtggcggcttaccgttggcattgagcacttgggttggtcggtcacaaagcattgctagatctcttcgagctttcagattgtcctttgttttttcaaaatgcatgcaggtgtgtatgagggcttcagcaacattactttcttggtgcatgacatcaatgttgtgcacaagaatcaatgacgacatataagggagtcccatagaccacatatatgtgtccagttgtggtccactctgaatccttcatacttgtcccccttttcatttaaggcaaggttgttcagctgagcatatatttctgctgtgttaagacgtttaggcggtcctttggtgaccacagtgttctttataaagtttttcttatcgctcctaaaggg

SEQ ID NO: 5476 - DNA, 273 bp, Zea Mays
ctcaagttcagaaactattgtatgcagtacttctaactgcacgcaagctccgtcactacttcgacgatcacaaagtcatagtagtcactggatttccaataggtgatattctcgacaataaagaagccatcagaagaatagccaagtgggcctgtgaactgggagctcatgacattgagtttcgacctcgcactgcaatcaagactcaagcactagttgacttcgtatcagaatggaccgagcaacaagtgcccgattacccggaaactgcag

SEQ ID NO: 5477 - DNA, 551 bp, Zea Mays
atagcatttgctgcaccattttagctgtgtacactgtgctcatcattctaaattttcttgctcttctgagctttgattgaattgtgagctttggcaatcgtgcaaccgttgtctaaatggctgaagagaagaagattgctgaccctgcattggccgggttttacgaagctatggagaagacaaatacagagaagattaccaatgagatgtcggctggattatctgaagattccggtgagagtgaaagttttgacttagaaagtgggaacgaaggtgctgaagattggccctggcggtcgagtcataccatcttcgggaaatcaaccatcaaatagagtcaaattgatgcaatgaaaggaagatacttccgcaatatttctattgtgagggctggaggagatagcaatgccctatgcccgaaggagacaaagttgttgtctataggtgttttatgaaagcagggcttcgattccccctagacaaatttttagttgaagtattaaagacttttgaaatttatcttcatcagatcaccccgaagctatcatcag

SEQ ID NO: 5478 - DNA, 325 bp, Zea Mays
gaaagatgtgaggtggttcatactttgtttagaccattgaagaatgggattgctttcctccataggccattgacttcattcccatatcaagagcagggtgtggatgatgatgaggaagaataagatgtgtctgaggatgcaacaactcagtaaatgccccctcttccaccaccttagcatgagtagtactagcaaccacacctaggtacttgatccatatttccaaaatacgcagtaggggattcaggactacatggtaccttagttccaaaacttgaggactcacatgaatgagtaatacaatgattttgactttagacttcaa

SEQ ID NO: 5479 - DNA, 758 bp, Zea Mays
gcagggtctaactcataaaagttcttaagacttagtgaacaccgccagaggacggcgggttgatttcttaaaaagtcggggtctcttttacaaaatctgctcagcgaaggggtaagttctaatctggaccgtccgatcaacaatgtgtggcgcagattagatgtaactcaaatgaaacggtaagcgctattaaccgcgggatccgagatccacgaccacgatttaatgaagctagatctagtctgagccgagggatggcagatctacggtgcctgttgatcgcgcgaacgggtaagggaatacctaatctcgatcacccatcatcagatcaacggctagtggccatcatccaatcgtgatcgcccgagttaaatcggacggcgcaggcatagcctcaccaacccgacggcgaaacagaggcgccgctggtccttacggcggcggacactccggtgacggccatccggccaagcccccggccactccttacgcccacgaggctaaatgcagaacagaaagcgaagaacgcgtgagaacggttgataccaggatcagtggcgcgaagtcccctggccatggcagggtgatgtcccatggcggagagaagattccggcgagaaatcccccacgccaggccaagctccgggcacgaaaaattccgtggacaggtcctagacatcccggcgattctccatggtcacatcacgagtcttcaccgtcgaagccctctcagttccccgatggcggcaatcggcggc

SEQ ID NO: 5480 - DNA, 794 bp, Zea Mays
cttcatcctgattctttcggatgaggatgctgcaacaaaggtgctcaatggaggaagagttctcagagggcctcagtttaatattcagttcaagcgctggacaaggctggctcatgcaacggcagctccattgccgtcgctggtcgacatcgagatacaagggattccgttgcacgcttgggggcggtccacagctgaacagctacttggtaattcctgttggatcacagatgtgcacccggctacttccctgaaaagtgatttttcatccttcaggcttcgggcttggtgttgcgagttagagaagcttcaacgtgccatgaatctggtcattgttgagccaacgccagcggatcatgtgaaacggtgtttatcctacagtattgaagtgactgtcaccccagtcgagaagccactgtcagatgggacccctccacttcctcctcctggcaacgacaacaggcatgaagatggcgatcgtcgccgtcctgaggctccaccccctcgacgccggcgagaagaccttcggaggggacccatccaccgacgcctgggccctcttgctcctgtgaatgactgtggtaggggctctgctaaccacagcaccagcgatgctctagaggcgccaagatccgctgagacagagacggttcaggtcccaagggcaacaagatccaaagaggcagcggcggtccaggttctagctttggacaatgaagtcctttcaacaccccttcctgttctcgagttgtcggctctctcgggggacgtgttctggccggcggcgattggag

SEQ ID NO: 5481 - DNA, 1013 bp, Zea Mays
cgaccacggcgcgcacgccgatcatccccgacgtggttcgtacaggccatggtcggcgacggcggttacggccaactaccggggaggcatcactgacctatgacggcctcggaacacacatcaatttgacccgaacaccccgagaacggccggtccacgtgcacggcggaaaccgagcacgggagtacatgttcccgccaaaccatggtcgatcagagcaaatgggcgccaccatgagcttcgcaagcatacagaggcatggaaacgacacttgaattgaataggaactcaccagagtggcccagccacgtgcgggctgttttttgcgatgcggcggaccaatttgggggaaatcggcgtcgcggtggctctggttgaaattggggttggggattgaggctacttggccataagaagctgtgctatcaccgtgcgcaaacgatttgggagaaggtggagggagcggtgcgaatttgactttgatttagtctctgtgtttgcgatgatcacccttcgccgtgaacccaatggctatttatagccgtggcggtccgacgatcaccacacgaccacggacaacatcactagcgcatgccgaccacgtcgatagaaggtacagtgagggaaaactacggcatgagtgccaccacggcggaatccactgagtcacggcggccgccggtgagtaactccggccgagctcaggagatggtgccacgtacgagttactcttttcccggcgttatccatccttcaccgtgcacgaatccgggtggcgatcaacggcggcgagatgagatggcgttctgatccacccaaaacactgtaccatggcacatcttcttcaggcgcctgaactggccacgatccaacccaattatctcgggattcttgttagcaacagagcgatctctcttaataaaatttgttcactaaacatcagtctacaaacttactataggattcttgggtcaaaaccgaacgtatttaaagttatggcgtgctcaaattgg

SEQ ID NO: 5482 - DNA, 2053 bp, Zea Mays
gctacactcaatgaatcaaagcataaaaaactgcactcaaagaaatacgatcaaatagcttaattcattcttagacgtgtcctcgggggtttgtgggagatatatatcccatgggtcatcacaacacgaatatgttccatgggccacctaaaaagcctctgataagtcgcccaacagtgcatactatcgagaagcattcaggcaaaacaagatcaggcaaaacaagatcaggagaaacaaaatgacgtggccagcggggaacaaactcgaagaatatggcacgagaacgctatccatgcgccattgtcgtaggggaatggtggggattctgagacgcgtcctggacacgactagatagcgacctactcagaggataactcagaggaaaagcaactgaacatcggaagagtaggcacactcgcaatagaagatgatagactcaaatgatctataagataggatatctctctagtcagctatataaggctgcagagattaccctaccaaaaccctctctctctctcttgcccaccattggattgataggaactctttcaatcacttccacagctacctataatctgcaaactcaaagcaatctaatactcaacaccacacatgatgtatggtgttacacgttcacgtggcccgaacctatataaatcttgtgtttcgacatgcatcgcacatagcattgagcagtgatcgacgttgacgtcctcctaaaaagcactacgtgagctaccccatagtgcgcagtcgagactaaacaccaacaacggttaccgcccctggacccttcgcctttgagttgtgcgatagtgggccactcgaccgaggcgatgtcaatggcggcggacgtcgttgaggtccagcttccatatgcaccaggtccctaccctcctgctgcacagagggtggtggtctctttgctacttgctctagaggagggctccgaggatcttcccgccttatccttgaagggactggagtcgaggagatggaggcagaggagagaaggtttgttgagggggctccatccgggcaactaagagcctagagatcatcgagggctctaacacctctgccatggaagtagcggtgattgtgcgtgtgtcgatcacgcaagagttgctccctttcgatgtggtaagtctcatctcctttttgccccttagtgtttctaggattcctcacctgagtatcactcctagttgtagcgtctcctaacccagtcgtcgacccggagtgacgcactgcttgcagcgcagtaggaggtggagcacttgctcactgaagctgccagttcggaggagcgggagctgttcgtgctcactcttaggctgagaagccttgggcggaggtgacgcgcctacgcacatagcgaaatgaggcgcggggtgacgtggatcgccttcggggggagaggtcatgcttttagggagctctgtcggagttgacccgacataccgatgacaccgagttggcactaaactcagctaacgctcacctagaggggttggatgcagatctctcgcgagaacgtgaggcatccagaggtacacccttttgggaacggggttgttcttgattggtctatgtctaaggttacttacatttcttcttttgcagagctctaaaagatgtcctctgtggctcgggacacccaaaatgtggtagacgatgagaagcacaagctctcaattgcttgtgacgccaccgtaatcgcatggctccaagccgaggattcactctcggagtagagcgtggagcttcatgctctatggttggccacgggcatgtcatgtgtgcacctttgtccttcgatgacgacaatggtcttgttgaccgagcaactgggaatgttgtggggccacatggaatttgtcgtcctagaggacgcgttcttcatgagcaatatgccccttggacagatggtccctcacttcgatgagatcgaccctgtcatgagtcgcatcgaagaaaagttgcatcggatcgaagctcaagtcatccctcatgctcagctaatagtgtggtgagtcaacatggg

SEQ ID NO: 5483 - DNA, 613 bp, Zea Mays
gatgaagagccattcttcgacaaggaatttcgagttgccatccctagagagccaagatgatcttgacatgtctgacgtccaatcttgacggttgcacgtcgccttctcacgtggagtacctaatgtaacttgggtggttgcatgccactctctctagacctggtcagatttgttgctggaggatcgatcacatgcatgcaagtgtagacatccccatacgtgtaagcatgtaacagtccatgtttgtaggcagccaaggccacgatgcggaaagaatggtcccctttggctaaagatgtcacgatatgagacaaaccctcacgccgatctgctcagctcaatgtcccatctctctccttcatcttctgatctgacgccgcgaccttcgatcttctccagctccgacgccgacgacctggatcctgcactgcgtacctcacgatgagaaccggcggctggagatcagccgtttttataataggcaagtcaaaggtttcattgatcagttcatcgatcatatagtactcatacggatcgatcgatgggtgtgtgcatgcatgcagcggcggagatcggcgagcgcttcgctttctacgcagtggcctcaactctg

SEQ ID NO: 5484 - DNA, 620 bp, Zea Mays
cgataacttgcaaaggagtcttgctttgaagtttgagtaaaataagctaccaatgatgtgccgacgtctatagcagctaattaccttttcaagcatcgggaatccaatgctcttagacaaagtgcttataatcttagcctcggcgtagtcatgaatgcagcccacaatttcttcatcaaccccgccgaagagcattgatctaggttggtagccgcaggatatggcaaattcctttaattctgatatgtcctcttcaaaaagttgttggccgcccaggtgccgaaggtcgaaattcatattttccgaagaggtttcttcaattcttttccccttatcagaaggcactgcggctacatctttctccgcaaccacgtccgaaataagtctgtcgatttccaccagggtggacgcgagattctcggctttggctgcggcggtatcttcgacatcaacgggtatagtagctttgtccgccgaagctgagggtggggtttgttcaatagcttccattatattcatcatacgccgctacttttgcccccccccccccccgtttttccccttggcatccgaagcgatttcctttgactgcaagaggctagtcagatccaacctcagag

SEQ ID NO: 5485 - DNA, 976 bp, Zea Mays
tggccagttcaacccaaaagtttaagatgatggagagaggtgtgcaattcactcgtattccaacaattgtcaccggctaaatatgggccaccatgataggccaagagggtcgagcgaggcctagcgctaggccttggctagtcgtggcctcagcttgggcgtcgccaaggccctaggggcgcatgcgatgtggggtgacgattgatgccccactggtctcctcccacttgggagaatttggaatatatggaaacttgagataattctggattagtttggaataaataaaatagagattggtttagaaaataagattgagtttgtttaggaattaggattggtttgcatggaaatgagtccatatctataaggacaccttggaaatcaagtcctatatggaatataaatataaggactccatggaaatcaagtccatatctataaggactccttgtacaaggtgcaggagcactttgtcaatgttgactcctgcttgagcaacatgtcatggaccaacgaggatgtcgacgtcgctgatatggccaaggaaaagctagagcgcgaggctaccaccacaaagctcgaggcagagactaagcatgccatggagactgttagacgtgccttcctcaggaaaaggcaacgagatcaacatcctcgggcatccctaagatcatggaagaatctcgaagtccctaatgcgtgaggctacctgatgggccgatctcgaagtccctacgaggaatggtttgaacgctgccctcgatcatcagtgtgagttgtgtcaggtgacgcaattgacgtgacttttttgagtggtgggcccatttattattatttttgttttgggtgtataaaaatggggtatccagggttcgttttctatgtgctctcagacaccctgtttctcgaacattccctctcccattcatgtgtcgctcaccgccgctgtcacagttgcccccgtcgctcgagt

SEQ ID NO: 5486 - DNA, 844 bp, Zea Mays
taagtataaacacatacatgacataaaactctgtttagataataagaatgaagctcatgaacaagtattgcatgacaggtgaagttagcaagtgaaaaaatataatcaaacataaagtcatcaaaatctcatgagagcatatcattaagttttggggcacaaaagagtaacatgcatataatacaacaaaagccaatatctctttcaactagctccccctagctctcataactcatctctcccactttagcatcaagcaccaaaaaggttcgacctaacctagatatcatagaaagaaggaggaggggcagacacattagggcatggacaatcattagtgcatagtctggaacaaggtcggagtcagtcttgggtctaggatctgctatagaggctagagctggtgctgactcagatgctggagcactggaaggatctaactgatgagcctatgacgatggcgctagagctagagctggagctggtactaaaaccgccactactagagtagacattgtagagcagactagtggcactaatggctgaatactcataactctggcggcctgagttgagaaatctagggtgattggttggagaggagggggcatcagaccaaaagagtgcaattgagctcctgactaaatggctggcaccactgaagtatgaagagatggaggtagagccgattgaaataggggcataggagcaccgatatgctgatgtatgtgagtcatacaagtcaggtgctttgccctatctgctagtagctaatgttgaagagtgtcttgaatggtctgaaacatcaaaagcttccactcgcacatcttctactgaatagctg

SEQ ID NO: 5487 - DNA, 377 bp, Zea Mays
tcacggccagagaaatggtgagcttcggtgatgccaacacgactaaccgcagcgggaaacgatggccggaccggccagtgactatgttcactcctccccggagcttttcaccccatcccagcgttatctatctctcccgcggcacgaatctcctaggtgagcacgaattgcagcggaagatcatcggcgtcaggttcacggcactggagatctttccagcaactgtaccatggcaatcttcgttagtccctctgtccgagcaacttgcagggcctcgttctccaattttcgtgttgcaactcactaacctgcctgtatcaaagttgttgtccaatgtaccagatgtaactttgttacaaagaccttgctcaaacacc

SEQ ID NO: 5488 - DNA, 727 bp, Zea Mays
gaggagattcttgtgacacccaccccgttgtcggagtcacaagcctttgcaactggagcatcatcttcagcatcgccaacactagcagcctaagccctgatcctagaggcaacgatccagatgattctggtgatggtggagacgatgaagaagaagaagaagaagaggaagaggaaatcaacaatgaagaagccaacaatgagcaggaggacaactttgttgggatatggcctgtcactaagcattacacttcaatcttcgagacgggacacttcccaaacctgttgtaggatgtactgcatgcgctaggaacctacgcccgacctctatatgacacaaggcgagtgtttgagcctccttgggcttgttactacatcactcgtgtgcatatcagagtgatggatgcaggagacagaggttttaggactctatcagcccatgagtctctaacgtcgttgtctacatacgctatttcggtcagcaatgctgctagaagagctctgtggtctctcaggcacacttatcggcagcagctgcacgacacgaaggtacagacatcttcctctacgtctttgtggagaaaaccagactagtgttgttctaggtgaaggtggagaagatcgcctcaacacccttgtaggtgtggtggcaggtcttaacactgacttggacagcgctaccctagatctctcaagggtacatggaaaacttgaagaatcacatgcca

SEQ ID NO: 5489 - DNA, 885 bp, Zea Mays
ggaggaggcggcgggcggggtgcagtacgcggccaccgccgccgcgtcgccctcctactacggcctcaggctgcttcacagcttgctgcacccggatctcgtcctgcgcctcgagcgcggggagtgccgcgccggtggcgggaacggaggcgggcgcagctacgcgctcgtcccggccgacgagctctccagggcgctcgccaggtgagctcctccgcgcctttcctctgtgcctgcggcttgtaggggtcccagattttgatgcaccagctcaacggctgcccatccgtagcagcgcgatggtgcagcttgcagtgtttaggatgtactgtactgaatgaggcaatgattgatatagtatattcagctgtagtgtagttagttgtcaacgtagtgattgtagcggcaagtgaatctcgtcctgagtcctgacaccatttttagttgtgatcaattgggccttaaggttttcagtgttcacacgtgtctctagcaatgtcttaagcttgagcgcacttccccaagtccagtctcggtatgcagcaccgatcaaacctgaggcacgagtgttcagcattgttcatgagaatgctgtcctcatctagatgggcaaggtgataccaacttgctagggagatgagggcatgcgtgtcggagcaaatcctttattagttgctgacttggcgtgttgtgtgtgttttcgacacgtgtcctgccgttgctagttttgtcagaattccatgcacgacgagcactttgacgatgacatactaaaacaggacaattgcttatctccggaacactcaagcacaacataggactggtagttaaggcatgcggttactggtctatcaaatctagctttcaaaaccttacgtgtttcgc

SEQ ID NO: 5490 - DNA, 1005 bp, Zea Mays
aagttgatctgtcaggttgactgaataggggattccaatggtacagtgccctaaacaagatcgctggtgcagcgcacctgaccgctggcgactgtgcgcctagatccacgccgctgttgcgattcatgctcaccggtgactggataatgctcctaggtaaaaagatcttcgcttggggataactccggtggctggccgtcgtacccccttgtcttgcggccgacgcagataagctcaccggcgttggcagcctgccgatcgtttgccatgtgcccaggcgtcttaccacgtcacggttagtcgtgttaggcatatccggtgattgccggagggtccgccacggtgaaagccactaagagcttgtgccagtgcccctcttcctctccggccgccgtgcgtcttcgtccaattcaccggccaccgctcgtggatgctataaattgagcacaccatcgagtccgtagggtaatcacgcaccaagccaccaagtcgtgcctccaattgttcaccagagctcgctaatttctcattctccccaaatctgttctccgccaccgtaaaagatccctcaccgcggtcagcgtattccaggtctgctcgtactccctgctcttttgttctagcatccttaagtcctcctcaagctcctcgaccaattcaattgaactagaccgccctggatcaccgagaacgcccatgttcatccattgtccgcgctgtctccgtggacaggatgatttagagtctcattagtgaaattgagtgaggggaaacgatcggtgggtcttgaattcggtcttggccaaagtagggtgccggtcattaagtgaatcggctggtgtaagctcgccggagctcggccatgcgctgtccaccgtcgtggacctcaacctgcgaagaaatagaacatgggggaggtttctgtaaagtgtcagtgactctagaaatagtactgcgaacccgctttcagttattcataacttcagggacatatttgcaaagtct

SEQ ID NO: 5491 - DNA, 434 bp, Zea Mays
cccgggtatcacactctacctccttaaaaagaattcgacctcgaattctgacgcttctatcggaacgacaaaagggaaaaaattaatgaatcaacaacacttacccacaacaaaaagttccggatatttctgccgcatcagctcctcaagttcctatgtagcctcgcgctcaaactgattagtccataagaccttgacatacttaattgatctcttcctcaaaacacgctccgaggattccaagatacgcaccggacgacactccaaggtaaaattctgctgcaccgcaattggttccatctcaatctgatggtccggatcccgcaagaacttcctcaccatagacatgaaaaactgggtgtacccctgccatggaattcggcaattgcaagcgataagccaagctgcccacccgggccaagatagtgaacgat

SEQ ID NO: 5492 - DNA, 672 bp, Zea Mays
cgtcgctcacttgcggcttgcctgcatctggatggatggaactctcggagagagagaagaatcgaatggatcattgttcattcagattccagtcggatcttgtgactgtaatctgctgtcgtcagagagagctcttgctgttcccaaagagaagaagtcaaggcgcctgctctccggaaatgccgctacgaaaattcagtgcaagttcagttgcggcgagaacgtgaggttccatccggtgagcacaagcatccccggtggacggtggtggattaggcaggtgaaagcagactcgcagtgattctcgtcgccacccatgctcaacgaacctgacaacgagagagagagaggagaaatgatggttggtgcatggtgcttacggagacggtggtccagtcagtcacagcctcaccactctcgctccttgtctgatctggtcaggtgcccgtgcctccgctccgcaagagacaaggtaacatgccaatagctcagccctccctgagaggctgagagaaccggtggggcccggtgtcagccatccagatgtatggtcatgccatgtcagccagatctacacagccgcttccggaggagatgcatgattacacagctaatcttaagtacatcactgttcaaacctgtcgacacgtgatgggcatgtcggatccctct

SEQ ID NO: 5493 - DNA, 503 bp, Zea Mays
ctcgtactcctttgcctcttgctctctctttatgaaatacagattagtagtttagcaaaaaatttatagggggtattgagtagcgctactttttgttgggcctgtagctatggctgctgctgtacattgtaaaataactatgttgtgttgtagaaaaagccatagcgcagccacaacaatctgaagcgaacaaggcaatgtaatgcaatcataccttagagtaagttttttcattgtccattctgaattcttgattttgtggctcaacatatacacgctgatgaaaaataactacaagatgaagtagtaggtactaaaatgtaagaaagtgcggatgtgtaaattccatacagatgcctactttacgttttgaagacgttggaaattgattcgctggaagatcgtccaaacatccctgtcatagcaaacaaataaccaaatggattagatgttacacatagacctactgtatgaactgattgtgaaatggagttcaataattt

SEQ ID NO: 5494 - DNA, 947 bp, Zea Mays
aggtgcaaaggccaccaaaactattcctgtcccgagtgatcatagcaacgattcgatcccacagttgtgattgaggaccggatgaaatagctgatgcccatgtctgctctccataaggtcgcaggtgaacgacacgatactcttgaggtttcctcggacagcgcctggagcaagatttcttcgttaccaggaaaaaatctgctggggaggtagagtggagggtcatcttactccgcaaaggccgcgacggaggtggaggcaagcaaacaaatgacacgacgttgaacatacatgatgatctccaccgtgcgctcgaactcgtcggcgtcggccgcgccccagcagcacgctcgcaccaacacggacaaacactgtcgctcgttctccgactccgaccactgcagctcgaggggcgcggggagaggtccgtctcacctgcaccagccgcgggctcgccatcttctcttacctgcacaagattcccactccccgtttcacacacaatggttcacctgcaataatgggacatgaagtccttcgtgaatcgcctgtggtccaaaccgccatgtcacccccatcgccggcagcagccgagcagaggcagcagcatcaacgcccattgtggctgacacactccgcctggtgcctgcatcctcacctcttagcgaggctgttggagacatcgtggccgccaccatggcacatgtagaaggagaccggacaaggtgcccgtcaatggacccctcggcgccgtcggggctatgatgtgagtatgcgacccaagtcacagcgggtcgtcttgcacgataagggccaccgcttcttgtccaggaagaattgcggaggggaagaccgcagggaggagttagggctcgaatgtagggagggaaatgcagcctggtgctagggttagggttttacctggtcgatttgggagcgagaggagc

SEQ ID NO: 5495 - DNA, 278 bp, Zea Mays
gagtaaaagtatgatccttcgccttcatgaagaatactcaagaatagcaagaaaaatcatcaacggccacaagcacataccacatacccccgaaagagcaaaccgagctagaccaataatgtccatatgaagcaatccaccggggaatgggaagcagcaaccatcttgtcatgatgacaagggtgataaacaagatccttctcaaatttcaacttggacaatccttggatcaggccaagtgagctcagtctacacaaaatatcaaagctcaagtgtca

SEQ ID NO: 5496 - DNA, 538 bp, Zea Mays
ggccgcctctgagccgccaagcctcgcccagacagggtgcacagcggtggtggtatgaactcgtgccttaggctccggagaggtggcagggctcccgggacaggacgcagccttatggcccagcgcaaggcaactgaaacaccttgtttccaagcggcattggcgggccaggtgtcgaggtgaaaggcagttgaagcaaacgccattgaagacagagggggagggcccatgacgacggacccgaagcgccctaagacgcagcctcttcgccctcctcgactccaccaactcccacccctcgacatccgcccccccagggagtcgaggcgtcgtacggaaggtggaacgccgaacatggggagacggacgggactccggctgaagacgaaccgcagcggtggccggaggtctggaagaaagcacgacgtcgcaaaggggagcccagaggatggcacgctgcccgggctatctcctccccatcgctcgaacttagtcctcccgcctgacttcaatggagcagcaccccggaaaagaggag

SEQ ID NO: 5497 - DNA, 696 bp, Zea Mays
atatgataatgtggcagcttgttcgaggccgtcacaaaacagagaaatctgagcggcacggagaactgcagtttcgttgtggccaaccttcaatgcaaagattgccacttatctggcccctttgctctgcaaattggcttcatcacctgtttctttgagctttctaaccaacaaaccaattgaaagcaagagatcaaaaacaaagccgcactaattttcgctccatgacccattcgagggaagaaagaaatatgccaatgtcagaagggagataaactcgagaaccatcagaatccattacatttgacctcaaataaaattcagtccgcatcatggttggatcggcagacccacatcatctagttctccgagatcactccacagctccattaatcaaacgcaataagatcagtgtcacagtaagcagcaagaaaaaagaaaagccagggagacaataaagaaatcggatgtaatcacaaggctcagacgaaaaatgggtagaagtccgtttgtcagcccaaagagaggataatcccctcattcagagtggtgcatgactttgcatcatcatttgcccttacagaggaagaaagcgggataacagaggaaatcaagcgataaacacaggacgacggcaaaaggagagattgaaggcacgagacgagacgtcgtttcctagcggcggcggcggcggcg

SEQ ID NO: 5498 - DNA, 707 bp, Zea Mays
ggcaagatccctatagcaaaattgtagctggtatatagagctacaagtttgttacagatgaattagcaagttctcacacgaaaatccaagatctgggcactgcaattctgtctgtcaagcgctctaaacatgtttcccatggtacagtagctaaaaaagatcctgggttcagatccccttgccgccggtgatctcatgccgtgatcctcgtcgtcgttgcgattcgtgctctgtggggtgcagataactcttaagggtaagaaatatcgcatcgtggatgaactcaggccactgttccgccccagccgccgtgttctcttgactcgcgaccaattcagatgactcaccggagttagccgcctatccaccatgcgccacgtacttgggtgctctaccacgtcgcagtaactggtcttaggtgtattcgttgccactggtgaccttgccacggtgaaggccaccaatcctttgcgccagtgcacccccttctcttcggccgccaccgcgccatctccaattcacaggccactgcccccggatcctataaattgagtgtgccgtcgactccgctaggtaattacgcgtccaacacaccagcacttgcctccaattgtccaccagagccgcccaattgcccttttcccccaaatcggtctaaacaccatcgcgtgagcacctcgtcgtggccagcgtgctacatgtccgat

SEQ ID NO: 5499 - DNA, 360 bp, Zea Mays
cacaattctaggcgcgttgagttaaaataggaaataggaacacgaggagtcgaggagagaaagaaacggctcggcggcactttatatatggaccgaaaaaatagcgaagtcgttgtctcgatgatgcaaggtactataaacatgtggagccgaagccgagtcaacatcacagacaaaaaccacgtccttgcttcaccatccaaccgaaacattacatgtcggttggaccgccgagccagggagcagactttcagcgcacagccaaaattgctcagactttccgagtcactgctcctttggaggaagaaaattctgtacgtaccggacgtaaacgttatctttacagcccctcacatccac

SEQ ID NO: 5500 - DNA, 1120 bp, Zea Mays
gtggtttcaaaaaccgaggacatagtagaatttttgtttggtgagagaggcaagcatggactcatttcgaatggtgaatcaggagactcaaacaggaggtttatattggttcaggctcgtgccagtgtagtgttgattgtggtattgttcaaaggagcgtgttacaaggaactcttttatagtttaaggagaggctcttacataggggacttgttgtctaaagcagggtgcgacctgttgtctaaggttgtcctactgacatagttctcttggcgtcgtcttctagtacgtgtgtagtcgtatgtctggcatggctggtcactctgtctatccggtatacgagtcactgtagaaaccatggtgctaaggccccgtgtagcggtgcctagcgggacccacgaggcagagttgggggatactgaggccgtacacggcaacgtctcatcccattgtcaaagatactccatcacccctatggcgcatcgtggcgccatgcaagacggtctatggtggtgacatgccttactgtgtgccttgccttcacgtcaggtgggtataggcatgctcctgtcgcacgagtgatagggggacatggcaccagggcccataagtgtatgggctcgtcatggacctttgcttctccgccgtgcagagttgctcagcaggacagccaacctacctcgcagagttgctaagttggacttggtcggcccgtccgtctcgcagagttgctcgacaagacttgttcggtcagtacgtctcgctgagttgctcgaaaagacttggatggccagtccacctcatagagttgttctgcatggcttggtcgacctaggtgggctgccatgagttatgggcatactttgggtaccctgttccttggtatgcatcagcaggcctcgtgccttcgtgcaacttcttggagttgtgcggaggctttcttgttgggaactgaaatcttaggtgcacgcaagcgcatcttctagatgtagcccccaagcccccccctcgagtaatctgtgaggattgcatgggggtttaactgtcgttatttgcagttttggcatggacccttttttgtgatagtcagcatggttcccacttagcggcttcaatctca

SEQ ID NO: 5501 - DNA, 695 bp, Zea Mays
aggtgaggtccatacatcatagtgtatcagatcaataatgtctaccgctctgaaagaggaggtagggaaagggatccgaacatggcgaccaagctaacatgcatgagagagatgctcaaaagagccccgactacaagacaaagtggagttgctagatatcttggaaaacacatcacgcccggggtggccaagtcgatggtgccaagtgacggacaaagtagcaacagcgagggcgtgtggtgtaggggtcatagaagaggtagcaggcatgtgaagggtatatagtggcctggagctgtcacatctagcgagaagggtcctggtagccagatccttcacggacaaaccaaataggtcaaactccatggaacaagaattgtcagtagtgaactgacgaacagaaagaagattttgaatgatgttgggagcagcaaggacattgtttaagcgaaagggaccgggaaggaccacattgcctactgaggtgatgggaaggatagacccatttttcgacaatgatagaagaagggagataggggtgagggggagaggtggaggaaaggatacctgcatccagagtggtgtggtacgacgtgccagagtcggacacctagtcaaggacactggtgggcggagcgagcgtcatcatgctgaagaagcgggcaaggactattggtcccacccgccaccccaag

SEQ ID NO: 5502 - DNA, 469 bp, Zea Mays
aatacctcaatgtctccccaatgcgcggggtcaaaagatttcaagtgaaagggaagctagctccgtgattcgtcggcccctatcctatcattggcagagtagggcccgcagcctaccgccttaaattgccagaatccatgtcagatatccataatgtgtttcatgtatcccagctccgcaaatgcatgaaagtgccagaaagtcacatcgaagaagagataattcagattcagaaggatctgcagtaccgagagaagccagtgaagattctcgattcagccatccgaaagactcgaaactcagaagtaaaactctgtaaagttcaatggagcagagaaagagaagaggaggctacctgagagagtgaggactctttgaggagggaatacccttaccttttctcaagcccagtctgaatctcgagggcaagattcttttaagtggggtaggtttgtaacatcccaatttt

SEQ ID NO: 5503 - DNA, 948 bp, Zea Mays
cggtaatcaatacatattctcatacttccatcctttttagtaacgaaaaggatgggtgctccccagggagacgaactgggacagatgtacccttttttgttgcagctctgcaatcgggagttttaattctgctaactctgtgggggccatgcggtatggtctctttgcgatgggcgcagttccaggaatgagatctatatagaactccactcctctttccggtggcattcccggcaactcttccaggaatacatccacgaactcttctattacagacatgttttctgctaccagattaaacatcattggatcattggcgggcggttgggcttgacaggaaactgcttttccttggcggtcggtgagaaggacggtcttacttgcgcagttatgatacctttgtgcttagttagccaatccattcctaggatcacatcaatcccttggatggcaagacggttaagtctgccaggaacactaccccacttaagagaattctgacttgggagcacctgagttggcataggaggtctgaccccggggttcgggtgaccaaagggattgctaggggtgtagaggggatgtcatgcttttccacaaacttagtggctataaaggaatgggatgctcctgaatcaaaaagcacagtagcgggagtaaattcaacaagaaactcaccgagcactactcccggagcttgctgggcctcttgagcgtcgacgtggttgactcgtgctctgccctggtactgggtcctgctctgctgactgttggaaggaggtgccttggaggtaggtgccgagggaatcttggggccattcaccgagttggagtaggtaggtccaggtgccttcaactgggggcagttattcttgaagtgactggggtctccgcagtgccaacaggcatttgctggcggctggttgcttgcaacagagggggcctgaa

SEQ ID NO: 5504 - DNA, 492 bp, Zea Mays
aaccatacttgaagaagttgttgtatgctcctccagcaaatgaggacttgcttgatgaattgtggagaggctacacagtggatggcagcacggcctttgtgcctggagatgattatggtgacaatgatggccaagacgcagggacagaggatgaagaagaagggtttcaggcaacacctactagtacccagaggagcctgaaaggcaagaggccattgagcagcactactagcactttgactagtccagtaaagaagagtaagagcccgatggtgaagattgtcaaggacatagcaagtaccttcaaagagtctgttgtagccaacactaagcaaatggagaaacgtgcaaatcagaaggcagagttttctgtcaagaggtgtcaagaacttgcatttgagtgtggcattgagagaacagttgacaacgtgtatgctatgtcaaagttgttcgcaacagagtttcaaagggagttcttttgtggccagttaa

SEQ ID NO: 5505 - DNA, 381 bp, Zea Mays
tgtgggtgcgtccgtacatggccatagctcgggttgcgacctgaggtaccctaagacatatccgagacccccgggagcgattcatgacggtatcccatcgtagggagacatcgagcccttgaatcctatcaaacgggttcgggacctggtgaatcacccgcatatactttttggggcgtgtctccagaccgctagccgacccctatcgaaaggagctcataccccccactcggatcacctaataacaactcaacgaaaatgtcatgctcgttgcccatcgagggtagcatgacgcattccccccttcctcctcgcgtagaggcgacgaaggggcgtacaaatcaaaagtcaaggcacccctcaaccgttcttttgctccgc

SEQ ID NO: 5506 - DNA, 282 bp, Zea Mays
catggccttgcaagttcatcccgagcgtgtccagattgagtggatgctcgacatggtgtgctgcctgcttggatggagtgcgccgtcgtttggtggaaggattcgtaccgatggcatccccctcggcgatctcgctgtcgaggagtttgtgctcttccgccggtgcctagcttcaaggatattcatcagcctcgcgggggtggagagcgagctgagctgcggctccatctctttggctttgatggcttcggtgccgcctccaatggtgaccactggcccggc

SEQ ID NO: 5507 - DNA, 524 bp, Zea Mays
ccaggagatgcgtcaggaaagagaagagacacgccaggagttgcgccaggagagagaagagatacgtcaggagagaagggcgcaatagcagctgcaacaacaacttcaacaacagcagcaacagcaacaagtaccattgcctccaccaccaccaccagttccacctcgtgataagcaccgggaatttatgagtcataagccaccgaccttcgccagttcgtcggatccaattgatgcagatgattggttgaaatcaattgagaagatgctcaacatcgcccaatgctcagacaaggagaaagttctatatgcctctggtcgtctaacaggtcctgctgctgactggtgggattcttatactgctgcccacgatgctgctgacactattacttgggcagagttcagtacacagttcaggaactaccatattccagctggtttgataaagatcaagaagaaggagtttctatcattgaagcaaggcaacatgtcggtcagcgagtatagagacaaatttattcagc

SEQ ID NO: 5508 - DNA, 463 bp, Zea Mays
ggacatgagcggacctagagcatgttgaccacggttaggtcacaaggcgcggtgtttcagaccgaattgggggaaatctgaaattggggctcgctagtgagcaattagtggcatggcttggtggattgggtgcttaactaccttacggacccgacggcacactcaatttataggctccgggggcggtggcctgtgaatttggagttggcgcggtggcgtccggagagaagagttgcactggcgcaagcgattagtggctttcaccatggcgggttcaccggcgatcaccggacatgcataacgcgagcgactgcgacgtggtaaatgccgaggcacgtggcgcaaggccgcaaggtggctaactccggcgaacctatccaaatcggccgtgacatactcgggtacggtggccggagttcaaccacggcgtgatatttccttacccctcggcgttatctaactg

SEQ ID NO: 5509 - DNA, 362 bp, Zea Mays
tgatgaaggcgacgtgggagttcctgtaggggcggctgaggtaggtctccacaccgtcaaggtccacgcccggcgccgcttccatggtgcacatgtggaacgagaagtcggactcgtggctagcgttgttgcagccctacgccgtcagcacattgtgcttgcctttcggtgggcggcgcaccagcagcgtgcagctctggaacatggcctgggcattgccaaacacaaattaagtccacagtgccccagatcaaggtctgcaggtagaactggatcccgttctccacgtacaaggtgtcctcatgaccttccatgctgcaccggtagacgaccgacttggtcgaatttgaccttagcgccac

SEQ ID NO: 5510 - DNA, 336 bp, Zea Mays
ggctcaacactgacgggtcgacgagaaggccctccattctacgacatcgcaacgactcgtcatcgtgccacgcgtcgatgcgctcctcgtcttgggagagtggggtaatgagttccaccgggtcatgctcgacccgagctggtgttggagtggaagggtccggaggtgttaccgtcggtgctggagtgcgtggtggggaagagttcgtcgtagttggagtcgtggctggagagcgtggcgctggatttggtgaagacttggggactgtggtaaacttgctcggtgaagaagaggtgcctactcttctaggtcccttgaagtggacgtactcgatgg

SEQ ID NO: 5511 - DNA, 314 bp, Zea Mays
tcgcacattcggctatgctcgtgaaggcgttatgtactcggtctttgcgcggacagtttggtgtggtcgttttcgcttttgttatgcttcgtccggctgtgccttcgggcaactgttgcacggatagtctccgtggtagacttcagtttttcgcgcttgttgtgctagtccggctgcacccttaggcgacttcggcacggatagtctgcgcggtagacttcgatttttcgcacttgttgtgctagtccggctgcacccttaggcgacttctgcacggatagtcttcgcggtagactttggtttttcgcacttgt

SEQ ID NO: 5512 - DNA, 723 bp, Zea Mays
gttgaggctttggttgtttcgcttggtgaaatccccgatgacgagaggcaggttcattttgagatgcctttgaatccgagcaacgcagaaataagtgccatgctggacatgttggctgaggatctctctgattcggtccctgctgaaacactagctgtggcacccatcccagagtctggaaaagctttggacattcagagatctgatagtattcgcccgaagcgccctcgccgaaccaatcatccaacttctcctgctaaggggaagaaaaataaaaagagacgtcttcggcgagtgtcatgcttgaatcaggatgccggcccttctgctcctgctgtcggggaagtgccagtgccaatttttactgaagctgaacccaatgggtgtgacctgactgatgctgaccccaatgggtgtgacccgactgatgctgaccccaatgggtgtagccttgatgatgctgaccccaatgggtgtactatccgtattattgatgaggatgaggaagaggaggaggaaatccccttaatttggaagaacagccggcgctacatagccagcggggacagtagtggtgttccttctctagctttgtctgctctcgttggtctgcaagaattgtctctggcaaattttgatcagactctcgaagatatggtcccagaagatctgttgtcggagccggcagatggtgggatgatggaaatttgtgttgatgtgcct

SEQ ID NO: 5513 - DNA, 430 bp, Zea Mays
ctagatcgcttggattcatggggtgagtgtggagactacgcacgtcccctatcctctgatcggtgatcgtattgtcggtctttaggaggcgagagagcaacacatcgcctcaatcgtcatggggctgggctgctggtggaagctaccgctgactcggtcctcgttgcacagctgcgagctggtgctccgtggtcccaaccatactcctctcgatgccttatctcgttctcatgtcggcgatcgcatgaagcgctgatgttgcttcgcatgtctcaccgtctgttgatggcgtgacgtaggtcagtcaatgggtgggcgagaggtagaaggtgattttccgcctgggtgagcacttgtcgatagcccttcgcgtctagggtgcgtggcaggccattggcaatctacaccaggaccactcctacctcgcttg

SEQ ID NO: 5514 - DNA, 510 bp, Zea Mays
gctcagatagagtcaacgcatacgatggtccaaaacgagacggtgcgagtaaccaaacatacgcagagcgtcctcgcctccaacccctccacgcaacgtgtaattccgagaagatacgagagacgacgactgctccggaccttgtcctgttcccctactgtatacttgtatttttgtttgaggttttcaagccatctcggggcataaggcagggtgatccaatttcaccctatttattcttgttatgtgcggaaggtctgacgtgtatgttaaagaacactgggccacaatatattgcgagggggattcgtattagtctgcggacaccttgggtatcccacttgatgtttgctgatgattgtgtggtctgtggtcaggcaaataagaggagcgctgaccggattgcttcgattctggatctctataataagatctcaggtcagttggttaataagcagaaatctggtgtcttgttcagtgctaactgcgatcaggaagggaaacaggagg

SEQ ID NO: 5515 - DNA, 771 bp, Zea Mays
cttatttttgttagccaattttatattatggtggtgttacggatctagcgtagcctagcacattatgcttattaggattagaaagatcttaggcatatatattgtaactttttcaccaattaaaattatttttgcactattctttctaacacggtatcgtccatctaatagttgacgcccaagatccatctaatagttgacgctaccattgtccttcctcctaatatctaggtagccaccatcttctccatggtagaccctaccattgtccttcctcctaatagttgacgcccaagattcctcttctcctctaacttttgtttgctgctaggtctatgtggctccctgttcctcttctcatgtctcctcttcacttcccctaccctacgagcgtcgagcatgacgacgattgcctgctcccctctcgggtctgtcgcttcctcctccctatagtgctccatcccttggtccgcctccccgtccactatcgctcccctcccctagggtcggacacatgtggctatggtttgagcgcaccaaaattgttgtcggactgccccctagttcgtctccctctatcgcccctcccttaggctgtgggtataggcgactatggcctgggcgcactaggtgctaccatcctaggagcccttggtggcttagacgccactggattgagcctcctaccagtctaggcacacagagttctgatgtcgtgggtgcgctcggtaaccccctttagcccatgggctttacttcgaccggtactcc

SEQ ID NO: 5516 - DNA, 332 bp, Zea Mays
tgcaacttaatgctcaagttataacatactattgagaacaatgtgtgtagagatcattgattggattattctttatgatggtgagctcatcgaggatgctcatctcatttgggccaaactttgtgaaaagtttggacatcacaaatgtaatgaggagcatggcaaggacaaggccaacaccaccattaccagtgcattaccctactataagaataaggaagaaaaattgagcaaacaatcatggattacttgctaccacactagcatacctagccagggtgggtgtgtatgtcaacaaagctaccttatcgattaggctagattctagtgct

SEQ ID NO: 5517 - DNA, 599 bp, Zea Mays
tacccatgcgcacggcagaaaccgtgacgtcgagcccgcgttcccattcactcacgcccgaattggtcaaatggctgctacgatgagcttcatgggtatacagagctgctaaaacaacactcgagaggtgtagagccctaacagagtggtccggccacggagcgcggagaacttgtgcttcccagtgacagaaaaaggggaaaatggcaccgcgacaactctgggtggaattgggaggtgagattggggctacacggccgtaaggaactatagtttaaccgtgcacactcaatttgggaagaggtggcagaggcagtgtgaattttgggcttcaatcaactcactggtggagatgtgaatacctcgtcgtggttcatagcgctatttatagccacggcggtccggctaacgatcagcgaccacggaaggctttgcttacgcatggtaaccacgtatagaagaggtacagtaagggaggagcaaggcatgggtgacaccgcggcggaaagcactgagtgacggcgaccgccgatgaatatctccggccacgcacgactgagctcgcgggatgatgccacgtccaaagttaccctcccccg

SEQ ID NO: 5518 - DNA, 524 bp, Zea Mays
aagatttcctcagcttctcacacctctcaaacaaggccatacaggtggaaagggctagggaagaagaaaagggtcacctcaagaggaagtttcaagttctccgacctcagcagcaagacatgcactagagagttcgatcttttgggtttcctcccaaaggaccgagcttcaacaagacagcagggtctgctccatcacgtttcagccagccgggttaaagttccctccatgccgcatctgttgcaagcaactaacctccagctaatgcttgttggcactacggagaccccagtcactacaagaataattgtccttagttgaagaaattcgtgcctacctactccaactcggtgaatggccccaagaatgctctagcactcgcctccaaggcaccctcctccaacagccagctaagcaagacccagtttcatggcagggcacgagtgaatcacgttgacgctcaagaagctcaacaagccccgggagtagtgctcggtgagtacctagtcaaatttacccccgct

SEQ ID NO: 5519 - DNA, 644 bp, Zea Mays
tacatagtacttcaaaagatttttaaatacttaccttgaaacattctttcattcttatcttgccactttctggtaataacttatcttttgaagtcgggtaacagagtgctaaataatagtatgcgtaggaagtaggggatcaacgaaaaggttgattccataattattaggttatgcatgcatcatatggttatgcatgcatcatgtttaaactacactaaataaattttcacctcttatggagatatggtgcgcaccaagaccacccaacgaaaagcaaccggacctcatggtgtaccccagcatcagttggttcatagacatgagggaagcagcagcggaagaaatgatccaataggggatctgcaggacagggtggaacaactcatgtcagaactaagccatgggagtagggagcgtgcacgagatagccgccgcattgctgagctgtcaacagaggttaatcgcttgcagtaggaaattgcggaacgagatacggccattgactgggccgtaaattcgcgctctttcacctgggattgtgaggccaaggctctagcccgggtagcagaactaagcacatccctagaaaatttgcaagcgtattataacaccctgcatgaagaggtgcacgtgttatatga

SEQ ID NO: 5520 - DNA, 310 bp, Zea Mays
tacgggtatggtctgcaattgttgtgctggtaaatgttgctgctttgataaggattggcaagcttcacatctctggactaactcggtcgcatcactttttgcggtcggccagtagaaaccagatcggaagaccttcccaaccagagtcctggatgctgcgtgtatcccgcactgtccggcatggatctcatctaacagttgcttcctagtagtcgaaagaatgcacttcatgaggactcctgttgcgccccttttgtatagtgcctccccaatgagggtgtagtgagctgactgcctagcgatgcgttct

SEQ ID NO: 5521 - DNA, 571 bp, Zea Mays
ttttaataccctctggattgggccacgttttctgaaaagtacaggggcgcctaggtaaaaatcccgagtcacagagaacagtatagggtagactgcgggttgaatagttattaatctagggtctctttagaaattatgccgcgcgaaggggtatcttgtgttttcagccgtccgatctagagtctagggtttagattttatgaagcctaacgcattatgaaccgttcgattaaacctacggcccggattgactcatccaggaggtatccccgattagatctgcaccgcatatcaacgatctcacgaacatctttcgcccaacccatcttctaatctcgaccggtcatctcagcatctacggcgacgacatcgtcttccacccaacagcccagacgccgtcttcctccctcgtgctcgcactctacggcggcggcccagccgatcccctacggctgaacaccataaccgagccagcacgcagttccgtgttcgccgtccaagccctaacttctacccggacgacctcgttcgataccccggtgttctgcgcgatactcgagcgacccactac

SEQ ID NO: 5522 - DNA, 486 bp, Zea Mays
gtgcacggtactcgtttgtccaactcttttcatgttctggtgtttcctatgttcaaaacctaaatatgcagcttatgtccactggttagcttactgatcgtgttattcttgatcttgattttttttgctatattcagggtcgttgcacgggtcacatgattggtacaagcccttgtcgtgtttctcgacgtctttgggagattgactggcttcaccttctttctgccgcgcttgtcaatcttatcggttttgcttttgctgcttagtccatcacatcatttgctcagtggcaatcatcgactatgtcatctttgtggtccctgtctgtccactttgatttgtcgtggtcttttaggttcggttttaggtcatgagtctttagaatactgtcaaggttgtcgtttgggaaggcatattcagcttccttatcattctagtgagtcagtgtccatgcatcctttgatcttgtgcactcagatgtatgtg

SEQ ID NO: 5523 - DNA, 680 bp, Zea Mays
gaatttcatgcaatcatcgaacatggtaggccaataatagcctaaatgtttaagttgataatgtagtttaggtccggattgatgcgctccgcacactccagcatggacttcttttaaggcctctatcacttcatctcgagcaaggcaacgaagtagcatgccatcacttgaacaccgataaagcgtatcatttatgcaggtgtagttcattgatcttttcctaatcctagacctctcatttgaattgaggggcaagtaccatggagtaaatattcgaggaatggcgttcgccaatcccccatctcaatctctcaagtttctatatttgttgcaaagatggatgatatgtcttcttcctcttccaatataggaaggactctacgttcctccacatgtacatccattgtgtcatgtggatttagtgacatgctaacagctagactggctagtgcatctgccttttcatttttattccgtacaacatgctgaacttttaaatcagcaaacatggatataagtgtttttgcttttctaaaatatggtataagaccttgttttttaatagtatatactcccaataattgattaactattaattgagaatctccatagacatggagtgtgcttatacccatactaagggctatttcgaggccaatgatgagagcctcatattcggc

SEQ ID NO: 5524 - DNA, 611 bp, Zea Mays
cggtcaccggtaggctgggcggtctcatccggcgggattcgggggtggagctctgcctcgccgtcgtgcgcagactgcctgtggtgagggaggaaagccgggaccgttgactcctcaatctacggtggagattggtctggggtaccgcttctggttgcggtgatctttaccgtcgatcgaccgatggagggattagggccgatcgtggtatggcttatcgtgggccatgggatcttgggtgtgtggccaagattgggagtgggcaatgtagatcgtggttgttggatcgcttatgtgctgtgcagatgagatcctagtgtaaccctgcatctcttctaatcggcgccatcggatccgtatcgtgcggtcctgattagaagccacatagtgtgtcctcctctgttgatctcggccataaatctagcatcgggtggctgatatggaataccggttcatttaaaggccaaacagatctgtgccatccggatctaatctaacgaccagaacggatcgataccccttcgctacgtcacatttgctaaagagtccctgtgcttaattgaaataaacatgcggtccacatagctgagtcctgagtcttagaattgttt

SEQ ID NO: 5525 - DNA, 826 bp, Zea Mays
actaaaaatcctttttctaataagttttctctggttttgtaattctctggtcggggctcaaattccaggaagtgcaggggctcacgcgcaagttgccagagacacagagtgcccctggcatggacggcgggttgattgcttagaaccccaggggctcttatgcaatttggccatggcgaaagggtatcggtgagtatcgatcgcatgatcagaaccctacggcgcagattagaaaccaatcccctgcgaatcggtacgcaacggtggtcgaaggatcgagatctgacggccaccctacttccataacacggattaaatctagaccctccgatcgacgcttgacgacccagatcgaactcgaccgaaggggaatcccaatctaatcagagccgcgcaaaacacatccaacggtccgtggcgcttcccccaatttctctgccagcgacggcggcgccgcccgacatcacggcgccctctcgccggagagaggcaatcggacgccataacgcacaatcctcaccacgggcaggtgctacaccgagatggcaacaattaggaacgatctggaggccgtaccagtaagtcggtcgacgctaaggagcttcccaccacgaatggcggcccagcggcgcatacaaaaatccggcgagcaatctacgactacccaccgatccgactgctgacctattggggttacacggccccacggatgtaacgagcagactagtgcacttaccagaggtcagggtggagatggcgagcttggccacgacgcaggcggtactgcggcgattacacggtgacggacagcgcttggcgaggaatt

SEQ ID NO: 5526 - DNA, 530 bp, Zea Mays
aataataatcaaagtttagttgtgcccatcccaaaacgatactacatagctaaagggtttaccatgcgtttgggatcttacgtggatcacaaattcatgttgcaaattaatagttcaagaacctactacctacatgacacatatgctgctatggcattcattttgagataaatggacacatcattttgtatgttcaaactcaacactaaaaggtatctattatcaaagtttataggtttggttgcacccattccaaaatgacattctgtagcgactagtgggtgtaaacacagtagccatcttcatagatcaatccattaacgtctccaaaatcaaatcttagagaaataaaagtaccttctagaacgacctcaatggaattactgaaacgactagatcaaatagtttctcccaacaaataaatgtgagaataatgtttcacttttccttttcttaccactatgagtgtctactaatttgattactaatctctgatgctataatgcaggagtttctacgtgcatcacccc

SEQ ID NO: 5527 - DNA, 1188 bp, Zea Mays
tgccccccgcgaatcccacaggaggccactcctttaactgtgtcctacacggcttcaagctccagatcgggctcgtccacggcgtcggggagacttccacctcactcgaacatggcttcgacctcgatattgccaacgaaagaacgtccaacgtcaccagaagccgcagagctgacatattaccaagagcttttcgtcatactcaccagtgctccaaccgctacgacttggacaacttccccatcagacaggctcaggtacgtgaccgaaccctcagccctggcctcggctctctatagagtcaaagatgcaaatataggaaccagacatccccctcctgacacaagtcaacaacgagtacaagggccataccggctataggggctcgaccacgcctcctcaccgtacatggcaaactccggcacacctgaaggccctcctagatgctataaatagagacgtctagggcttcaggtagagggggcgaacacttcacggttttcacctccaccgcgatattgacacttgcctcaatcaactttagggacttgggatccttctctctcccaaccagcttgttctccctactgcaagcacttaggtgcaagtaatataagtctcatccccctctgctgaaagtaggcccatctcttgcatgaactagaacaaaagacttgtggcaccttgcatcacccatctaggccagggcacgcaacatcatttcactaatcagtagaatcctcgggtcaaaacaccgacaacatcgattagcactacactggactagtgccacagtctaaaccagtataaccctctaggcctcagctccttagctcggattctcatgattcaccattcaaagtgagttcgcgccccccaccgaacacaaatcttttgccccccggtttacgaaaccatgacatgatgaattttatacctatgataggtatgagtatgggaatggagataagtacaacttcataaggatggatatggggtgtccaaaatcgatggggaattctccattgacacctctaatcacatggttctcaatttgtcgatatgatgaccatacgctctttctcaagtggagaagtgaaggatcaagtccaaagtccaaagcatcccccgctcgctccctgtgtctatgtgccttttagagctggacaaaatactcgtggcttgtca

SEQ ID NO: 5528 - DNA, 422 bp, Zea Mays
atctcatcttaaaagactctaccctacacttatagatccatcttatcttaaaagatactctattaccttagtagatccacctaacttaaattagtctaatctagttatatccaacctaatccatattctatttaatctaatatgatccaatctaaagtgggttattaacaggttagttaatttagtggtataggttagacactgtctctacaaacatatcttaacctaaattaatgtcttccaccaactcgtccgtgaacaatgacctaacctacatcataggttgcctaatccatttgttcaaaaaagcaaagtaaaactctgtccaaacctacccacctcgtgtaccccggctatcctaactatatgtccttaactcggatggcaactccaaaaagaaaggccaaagaagaccaaccaca

SEQ ID NO: 5529 - DNA, 489 bp, Zea Mays
atcacatcagcatccatccgagtgccaggcctcagcttcagaatttccttagcatccatagcaacgaaagacttcctcaccaaatcaacattccagcatctagtacctggcagaaaaagttcgtccacagattgcacttggactccttcaagatggacagtgggcttcaactgcctaagacttggaatctagttgtcctcccaaatacttattgaggatccaggacccactcttttaatcaagccctgccataaggcttcacgtccaaacaacaccgccttccagatttctgaactttgcttctttttatttgctttcaaaaaatcattattggggtaatatttccctttaatgatcctcgcacaaagagaattaggccttgtcattagtctccatccctgttttgcaagcatcgccttgttaaacagaggtaagtctctaaagcccatgcccccacttattttaggcattgtcagcttggaccagctt

SEQ ID NO: 5530 - DNA, 514 bp, Zea Mays
ccgagcactaattacagagaacctcgggggcaaatccagaagttttccctagactcagacaacacagaggtggactgcgggttggtttattagaaacccgggggctctttagaataaatgccgaggcgaatggggtaccgtgatatccccaccgtccgatcagacataggcggcccggattaggcgcacaatcataatataccggggcgcgatccaaaccgccagatatgatatcaacgatcggatatcaatcaaacccgaacgcacccagaaccgaccatcgcccgatcaacgacccatgatcaccataaacaaaccgttatcgcccatctaatcgttaccatcgatcacacatccgacggcccccccgagcgccctctccccatctctaatcctagccgtcaactcccatctaacggccagcccagttcttctacctcacacctgcacccaagctccccacggcggcgtagttcaccggcgtgcagagatccagcgacccggcgtgccctac

SEQ ID NO: 5531 - DNA, 544 bp, Zea Mays
cagcctcctgacccttaagaccgtgctctaaggtcgatgaggcacaggacactgctcgagataactccaacccggcatcaggcacatcatcgcaaacttccatcattccaccatctgtcggctctgacaacagatcttctgggaccatgtcttcaagagtctgatcaaagtttgccagagacaattcttgcagaccaatgagggcagacaatgctggataaggaacaccactactttccccgctagctatgtagcgccggctgttcttccgaattagagggacttcattctcctctttctcatcttcatcaataatgcggacggtacacccattaggatcagctgtggccagattacacccattgggttcagcatcatcaaggtcacacccattgggatcagcatcagtcgggtcacacccattgggatcagcttcagcaaaaaactggcaccggcacttcctcagcagcaggagcagaaggaccggcatcctgatccaagcatgacactcggtgaagacatctctttttctttttcttcccct

SEQ ID NO: 5532 - DNA, 631 bp, Zea Mays
gtgtcagagctgggcgaaaaggattgcgttgccgccgccccattgcgcctctggacatttctctgtcctgattctgcgtcttggaagtacggccggggacccgtgttcgtgcgcgttgagaattagggtggttgggcgcttcgggactcggcaattgctcgccgtctttagcgttccacctggatccgcgccacgccatggtcagtggtgttcgccctgctattgtcggtatgaaaccccctccgaagttcgccgtcgggctaattacatttttcgggtagtagaactagtggcggtgcaccgtaggggcggattcgaccaacgccgtagtcgcgggtgtagcttgccgccacgtccgaggtcgggttggggaagacaggtctcggtcgttcctcctggattccacagtctagattagtcgatgcgcatcggtctgtgtggtcgtatctgggccgtcgattgtatggcgggcgatgcagattatagctggggattttaaatcttagccgttaggagccgatcggacggtcaaagatccctcataccccttcggtcggtcgatttatcaaaagaacccctctattatttagtattcaacccgccatccgcatggactgtgcgctgggtcttg

SEQ ID NO: 5533 - DNA, 608 bp, Zea Mays
gggcaattaaaatgtataaagttcaatggagtaatcatattgaagaagccacctaagaaatcgaggattatttgattaagaactacccgagtttctacctacgagtgttggtatgtaaaccttacctctacttactccattccaatcttgaggacaagattcttttaaggggtcgggggtaggctgtaccacctcaagtgtaactctagggttttactcaacacactcacaaaacctagtgtcacatgtaagtagctttggaatagagacacctcactcatggatgaaggccataattaggtgttaatcatcctagaaggctcaacttaaccatcccatggtgatccaaggaggggaagtggccaaatcctaagtcacctttgaaaagcctatatgaagccctaagcaaaagtgatcaagaaaacctatcaaatgcctaaatcatgacttggaccattaatagaagttgtgggtcactaattaacctacaaaagttaaagtggataccccaaaaatattttgcaagattcccaaacaagccacacaagtgggtaaaacaaaagaaaataagaaattccttaactaaacatttagccccctaactaaaa

SEQ ID NO: 5534 - DNA, 574 bp, Zea Mays
ttaacctcgtcgacagagggtcgcactctaaggcccagaccgccatcagtgacaggtggattcgacacaaaaagagtgaaggtcttgggagaaggcaggttccatgctgaatatgccactggggcaccaatatttgatactttgcagagggaattttgctgttggtaacccgagtcgggtcagctaggcctctgtacagataagccgggtatgctctgtccttcaacggctgaacattcttgaaaacaaaatcagcaaccacagcttcagcagtcagacccctttctttcagcagcccaacttcagctagcaaagccctcgcttcagctacctcctgatccgtgggagactcagtccaactcggagtgcgaacatccggctgtcttcccgaccgtggagggagggaatttccatggttctcaacaataaaccattccaagcaccatcccttgatactgtctttgagaggaatctcaagatactcagtcttcctcccacggtgcatctccagactagcgccaccgaccagctgatgctgaccccggccattccagggcggcagtgatacaagtac

SEQ ID NO: 5535 - DNA, 607 bp, Zea Mays
taagaatctaatttctatccgtcgttttaccaccgacaataattgctccattgagtttgatccctttggcctttctgtgaaggatttgcaaaccaggaacgtgatcgccaggtgcaatagctccggtgacctctactcgttctatgcaccctccaccagcacccctgccttcctcgctgcacccacctccctgtggcatcgacgtctcggtcatcttgggcatcaagctttgtccaaacttattacctccagtgttatttcctgtaataaagatgatgtcaaccacatctgtcatgcgtgtcaacttggtcgtcatgttcgtttgccattcagttcatctagctctcgagcttctcacaattttgacttaatccactgtgatttatggaccttcccaattgttagtgtgtcgggctataaatattatctggtaattcttgatgactgctcccactacatttggacgtttccactccgtctaaaatccgagactttttccgcccttgccaactttttcacctatattcgcacccaattcgacaccgtcatcaagagcatccagtgcgacaatggtcgtgaatttgataattcccaggcccgcacattt

SEQ ID NO: 5536 - DNA, 673 bp, Zea Mays
agacaaccccgacaaaggtccagcccagaaagagtgatcaagtcccgcagcccaacatgaagtacctcagaaacacctggatgtgatagggcccataattgttgtgcagcccaagaaggcttgcagtagagttgtataaatattgtctaaactgcgcgtgagacacaggcaggaagaacgagcttggctgacagagatcaaacagttcatttgttcccaataccacttcatttctagttcgcatacctgaaggctataacagaagctgttgaacttgagagcactatcgcccggctgcgttccaggatactgtacctcggagaaggtgatgcaaatacttctttttttccaccagcaggctaggtaccggaaaaagaagaatttcattgctaaacttcaggttgctgatcagattttggtcacccaaaaggacaaacaagaggctgttatgagtttctatgagaacctgcttggatctgctgaggagagggagtataccatcaacttggcagcacttggctttcaacaacctgacctgtcttcccttgatgttccctttacagaggaggaagtctgggctattgtcaaagatctgcccatggataaagcccctaggccggatggtttcactggtggtttctacaaaacctgctggaattttattaaacgggat

SEQ ID NO: 5537 - DNA, 490 bp, Zea Mays
agcccagatgtacacgctgagcctaacaatggcgttaggggtcagctgatgaaggtaaatcccaaaattttccaaggcgtctgcaatcattccgtgcagaggaaatctcaaccctgctttgaagaagctcttaaaaactacaacttcatcattttctggtttcggggtagtctcttccccgccaaagcgaatcaaccccttctcggcttctctgaaatagcctagcttcgtcatcatagtcatatcagcttcatacacagtcgatttcccaaaatccaaatggctgggcttcgatggcataatgatgttataatcaatctctccttcaccaacatcaccctcttcaatatctgcttgctcggtttcagcagcgagtgcttcttcgtcagaagcgccttcagtcacaaccaatcccgaccgcctcataacttcgaagatcggagcagttttagcagctttggcttcctctccgtcgcgagtaaccctagct

SEQ ID NO: 5538 - DNA, 309 bp, Zea Mays
cttcacatgttcgcatcctgccttctctaagatagcagcaattcccctagcacctgagaaggagcagacatctccacggccgctcaaaacttcctcaaaggcttcggcttcgccgttgatccattggaatggaccttcgggatcgcctagtatgaagttgtcctcatttgaatatgtgccgataatggcgaaactggtttttatcttttgtacacatgccacagatttttcatagcatctttcttttgaagaacgaagctccacagctgttttttcccagtgatttttccagtagtcactggcgtctcg

SEQ ID NO: 5539 - DNA, 740 bp, Zea Mays
cgatagctgcaagcgcagcagggcggtcgccccgcacggtgaggaccccagcaggggacggcatcttgaggaccaagtacccgtaatggtcaatgggtacagggtcggcctgccaatgatggcatttaaagggaggttaacctccgcaacgtcgaactggacgttcttagtgcagaagttctcctcagtcccgaatgtaaccgggagtgcgatgctcccaagggaatacaccggttgagggcccactccggagaatgggcgagagtgtcccagtcgggatcctggaatctgcagctgcttgaacatagcgtgactgatgacattgagcctagctccaccatcaatcaggacatgatgtagcctcatgttgggcgatgacagaggcagtgatgagtggtagtatgctggctgctgccatgtttttggggcagacggatgcccagaaggagatagtggtgctccgccacttctggtgtggggctgccttcgggacccctggggtcgcctaaaggacctcgcggcgcagggacttcacgttcctacgggaggtgagctcctagcttccgccatacatcatgtacagcttcttgcggcggtcgttgtcatcactagagtcggagtctctagtgaagatgtccttgaggacttgctcgggggactgatacccgaggtcccgttctcccacggccaggtcaccttcatcgaccttctccttgccaggccggcaacgaggcggcgag

SEQ ID NO: 5540 - DNA, 360 bp, Zea Mays
gaggagagcagcaagttgttagaatctaagaaggaagatgtagttaaacttgttacagacaaggaaacgaatgacaacataattttgcaactcaggcaagaacttgaggcaacaaaaaagttgcatgaggcagagactcagcaattagagaccaaagctgccaaagtaaataaggagtttgaacagaggataaaagaaatagaactcatgttagaagattctacaaagaggagaagagaacttgaggaatctactgaatctagaatccaattttggaagcagaaggaaatagtggtaaacaaatttgtgggtttgcaagtaaagaatgctcaggtattggtcaacccactctgtcccctg

SEQ ID NO: 5541 - DNA, 1020 bp, Zea Mays
gtggactgacatcaacttcaagctcaattctgagcatgatccagtgctcaactaagtttaatccctatagtcgaattgcagatggtatatagctctacaactttgctataggtcactggatgtgttgccatttgaaaatcagagaaaatgtgacctaaacttgctctgtcagttcttctgaatggaacttgccatggtacagtagtctgatatagatcagatcgccagcgtgacgacctcaccgccggtgacctccctgcacgaagattcgtgccatcgtcgccgtgattcgcgacctgatcgcctggagaacatctaaaggtcaccgccgtggataactccgaccattaaataactccggccaccgtaccatggttaccgcggcggaatcggataagaacgtcggtgatcaccgtcgcacggccttgtgccgcgtgtccgagtccttccaccatgtcgccataactccctatagttgtcccatcgtcgccggggagcttgccacgacggtggacacgaattcacctcgcccaggttcttcttcatctccggccgccagcacggctcggccaaattgatcaccaccgctcgctccttctataaattgagcccgcggccagctccaccacattatcacgaaccacaccgtctagtatcgctcccaatcttgcaaccgtgagctccaatttcaagtttcccctaaatcagttctccgccacccggaaacgaacctcaccgcggccagccctttcccggtcagttcatcccccgctctccctcgtttgagcactcttttagctctgtgatgctcgccgaaccaaaaatttgtacagaatagctttaaatcaccgggaacacgtaccaattgtcctcatcgtccgcggttcacgtggacagagcttgatagcttaccgattgtgaaattaatttaggggaatcattcggggagggttcaatccgatgtatgtcgctcgagagcaccggtcgtagcgtaaatccgccagtacaacttcgccggag

SEQ ID NO: 5542 - DNA, 500 bp, Zea Mays
cgtaaacagaaaaataattgacacgatctacaacaaccccgcctgaatcgatctccttcatgattttctctcgttccttgtcaatagatcaatctgcgcagccggggtagctacaacgtcttcctcctccctctgtaattcctagccagccaccacgtcttcctcctcccctctataatacctaggtcaaagggagaaggggtggccatcccccatcccttcccttccaggtcgcgaccatcttctcaccttgggaaccacattcacctcctcccctttgtaattcttaggtcaaacagagcaagggtggccatcccccatcacgtcccttccaggtgaactcgttttcctgccccttcttgattcttttgttcagatatctccgatggtctttcctatgcatccataatcatgtagtaaatcatgtagtagggcgttggttgaactgctcctcctaccaatgataacaatcccagaggcaccgactagatgcattcgtg

SEQ ID NO: 5543 - DNA, 508 bp, Zea Mays
ggtccaggccgcccacattagggtcccaaggtcctaggatagagcatgctcgggctttaatcagggcctaggtgggggtccggtgccgacatgtgtccggacctgtccacatacactcctgttccccgctcaggcggaggcccgatgctgccatgtggcatactacgcgcagtattagccaacgggcggaacctggcatgacgcctccgggctacgcacgccttcgcattcattatagataaggcgtgcgcctgtccattccactgacaggcggcgtgcccagtccacgatacgtgggccgcgcaattactcgcacgttactatatcgagggcaatcactcatcattactcgtgcgggttactgtctatcaatgctgcacagactgcgtcatcatgactcccgctgattgctcatacgttactaaggctgaagatccttgtgtaatgtctgcatttactatttcacataatgtattcctactattatgctcctaggcctacatgtcgg

SEQ ID NO: 5544 - DNA, 339 bp, Zea Mays
gaaagctgcttgctttggccactttataaatttcgaccagctgtttctctcaaaacttacctacgtacagagacgacacacacgggaaaccaaaaccttcttgtcgatccggccggctgctgctgcgacgcaacgcaagccaccaccatcaaaattcaaaagcccctgccgaacccgaaccggccggcgcaccagcaaaagccctcgacgtcgctcatccggtccggcccccctttccacctttccttaattgttaagtcccctctgccagtgctagtggggcttcagttccgccttcaaatactcccccgacctcctcgtcccattcgttccattccg

SEQ ID NO: 5545 - DNA, 532 bp, Zea Mays
ataggtatccagctacttattatgtaggttataagctggacaggttgaggtaagaaagattatggtaggaaaagacttcatccgaaatgtttaagtcttgattcatctcgagatttgctttgactgttatatcttcccttgtcgatgttgatcttttcttctttggtcttgatctcattgattcgaggttattgtattttgtcaaagttggggaatatggttaggatagatatggatgagatagactacatgatgtaggtcaaaagtttgtttgatgttggttagagatagacagattatacaatccatcatggctctatggttagctcttctgctcatggttgagttggtttaatgcactattttaggtttaagtgcatgaggggagaacaaggtttataggagtaggatctagtttatttcactagtgttaacttgttaagtgactcacattagattgaataagatctcgattagtataagttgagggggtcatgtcaaattctagttgggtagctttgtgttaggtcgg

SEQ ID NO: 5546 - DNA, 517 bp, Zea Mays
ggctggcagcgacagcagcggtgaattcaaaagcggctcgcttcggtggggcttgtccttttcctgcctgccccacagcccctacgcccctgcgccagcttttccgctcgcctcgcttctgcggctacgcctgcgcgcacaaagactcaacacaagcaccccctcgccgcagtcccgccgttacatggcccgctctgttcccctttccggcgcccgcgacggactgcgacgagcggatagatagatctgtgccccgtccctgtctcgccatcctcctttctcctcctccactccatatcgagcagagcgaatccttagcggggaagtctttccgagctcggggagtggggtttaaaacgcggctcgacaaaaggaaggccacactcgctgctgctgctagtcgcttgctttcggtggcgagcgtctcggtaaagcggcgtcagcgtcggaggcagcggcagagactggacttgctagctgcgcagtgtagtgttgtgctaccttggagacaggatcc

SEQ ID NO: 5547 - DNA, 682 bp, Zea Mays
gggatatcgtcatccgtcgtcgtggacctgtgcctacaccgacgattgaaggcctgtttggtgtcggggtcgttcattggcgcacgtgggtcgcgggtgtgaagtattgaacttggcggcacgtccaatcgtctgggatttctcgctgtcgacggtgatccgtcgcgcgccgcgaacacctctgctcggtactcaattcacggtaataagtctacctccattcatattatatcctttgcactaagtacctaggccaaatttagaaaatgggcacggccgtgcgggaattgacttcaccgaacatggtcgtcgccgtgcgggagtagcaccactggtcggcactgtggtgaaaggggggatgacctggcgccgtccgatgatagttggacggtggcgattagaacagacgatacccgttcgctggagtcatccgggtcgttcatctggtctcaacgggcttattttaaatctgggccatgagttatgaatccgacggtgacatgtgagggcggggggtttaacatggctcgatctaatcgcggccgtccatgcttgatcggttggctgagatcagtcgatacctcttctgtatgaggttttgcttatgggcccctggggatttcagttataaactcgtagtacaactcgaggttagtccgagtttagggaacacttgcgcgct

SEQ ID NO: 5548 - DNA, 615 bp, Zea Mays
aaggggggggtttcatatagcttagatgggaggtagacgtatatgggtagacgatgatggggtagacgttcttacctcaggacaatgacatgacattgagaacgacgcaatggcgaggctatccattcacaaaagggggtgtagatgacattgtatagggtgtagaggtgggggtacacaaacacgtgcgagggtagacaaacattgtcttcgacgacgggctacacgcaagagaacgcgagtgcgcgctacaagaatgtggttttggggttgtcgtccatgtgcggttctatgaatcgtgtcgtgtgggggccatgcacaggggtagacgcgtgatgtccgtcttgacaagcgaggacatggcgccaacctcgcgcagtggctggtcggggtttgtgcaggggctatccgagggtgggacgaggttgctgctgtgcgggatgccgaccgtgagggccactggctgctccgatcgtggtgagtgtcggcagcaagcgcgacgacatggctgagatgactggaactcacagagggcggggcaagggcacgcgggcctagggaccggctcggccaagctggcctgaccgtgaccgcatacagagaggacgttcggtg

SEQ ID NO: 5549 - DNA, 346 bp, Zea Mays
gaattttgttatcacataagaccttgccagtttgatgactgaaacatgtttttgaaattaattaaacatcacaatgtagctatttgcaccgaataaatctccacacaccgttcctgtttttatacacacttatccaatgagttgtttgaactttttaaccttttgaacatagagaaatgtaacttgtaaggaaaatacatactgtttgttgccaccctactggcccatgctgttcttagatgcatagatgccatacatgaatttgttcatgacttcatgttcataagacctaaatccttgaaaaaaatcatcgagcacttgggcggtatgattaagagctctgata

SEQ ID NO: 5550 - DNA, 569 bp, Zea Mays
ttgatttattttcaaactgacacttctcttttcactttacagtggttcagcatttagcgttccatttgacgctaacaagtgacatatcacattcttatctgtacccttttatgtcccagttgcccaagcagcatatccagtctaaagtatctaaaatggtgaaactgttcttcgtcagttgtgtttgcataattttttataattacatcaccgatgtgtataacctagttgtacttctcaaatcatcacatgcagtgactataagttacaccaaaatcattttctgaggtatagactatagatcacttgttagtatggttcatttaaccttactgttgtgcacaagcaaattgcttgacaaatgacgatacttgatgcctctcgcaacctattaggatcatgcctggttttaaatattatggtccatgcaggcgaatgtttttcatattttaagttatcatttcctcacttgcatagtaaatgagaatgtcaactttagcactatttgcttagcatgaccctctgttttgtatcctagatatctgcctctgggtctattctaatgtttt

SEQ ID NO: 5551 - DNA, 774 bp, Zea Mays
ctcctgcctctgtcgaagcacctagtgcggaaggcgagattgtaaagaaatatgccgaagctggcataacgcaggctatgattgaggctgggccctcagtccccgccgaagcaagaccttcggaggctgctgaggagggtgctgaagcaagaccttcggaggctgcctgccgaaggaccattaaagttaggaaaagagggtgctaccgaagaatctgagttacctgctcctggagcacctgccgaggaattggaattcatagtgtgtcatgcttcagggaaacaattatcaaatgagcaaattgccaaagcgcagcattacgccaggggtctgcagtaccctcgatggtccttggtgtatggtggggatgatgaagatgacttcctttattgtctgcctaacaataaagagattcatgtctgtcgggagatggcagacaatgtaggatatccgaagcttgaactaggcttatctgcaatgacgaaggaccagctcgcagatagccttgcctgtaacagtctgaaggtgagaatactttaacttgtcgaaaagcagattatttttgtagattttttctttatcagtatgtgcttgtttttgtagggcttaattctgagcaaggctttaaaggcccagaagaaagcagaagatgaaagttgccagttagctcttgggaaccttcgatcggaggttattaaactaaggaatgaagctcttgaaaaagacaaaatactgctctccttagaggatagactgaaaaccagcgaagccaag

SEQ ID NO: 5552 - DNA, 420 bp, Zea Mays
gaagagtggaaacaaatatcgtaccagtgacaatgatctatttcaaaaccgtgacaatatttcaaactaatttgcctactctgatgctagtcaattccaacagcaaagggactgaataaagtcggaggatgaaaggcacacatgtatttaagtcgacaatactatttaagtacgcaaagggactgaataaagtcggaggatgaaaggcacacatgtatttaagtcgacaatactatttaagttcataaatttatagacccattaatggaaatgaaaagaagggtcttcaacgtatctacaaccgcttgtacgcggtccagttgaatggaacaaatgatgctattcttcttgaagctgctaaggagagcttccgtaacaagcccgacgaaatctacttcaatctagagcaatgcattcttc

SEQ ID NO: 5553 - DNA, 834 bp, Zea Mays
cccaaaacaattgtttggaggtggctggcgctttctagagtatagctcggacgaaggccgagtcattggatccccggtagaaatcctcaattacggatgcctcagcgacttcggggatgcggttcctcattgtttgaaacctttttaggaacgatcgaatggtctcgtcgttccggcgcctgatggatttgaggtcccatggctgcactggcttgtcggagagggactagatatctgtgatgaaacgatgactgaagatgtcgatgcagtgtcggggaagatgtcggagacactccagcgtgtcttgccccaggacaatgggcaagtacgccgtcatgacatcctccgtcgccccagtggctcaggcggcagtcgtgtagacagccaaccagccgcctgggtcctgcttaggctcgtacttgtcgacattggagaccttgaagatgggaggccactggatggctcgtagacatggagtaagcgtggaaactttgcacgtgtcctcggtcccggggaggggagtcggttgtaggttgtctcgaccatccccggaatggcccactagtcgaggttaccgccgactcaactcgggtggcacgactccgtgctggtatgtcgtgatcccggtcgtattcctcccgatgccttatctcattttcgtgccgtcagttgcgtgaagcgttgatggagctccgcgcatctcgccagctattgatagcgtgacacaggtcgttcgcaggatgagcgaggggtagaaggtgattagctgcctgagtaagcatccgccggtagccttccgcatctagggttcacgggagaccgtcagctatctgt

SEQ ID NO: 5554 - DNA, 842 bp, Zea Mays
ggaaaaagaaccgaggctacttccacttctaagtctcaagcaacacatcatcagtgagctgctaatctgctatgaattgtttaatgtttaaataattttatactcttttttattaatgctaatcagtgagctgttaatctcgtgtacagaatggcaggataaacaacacatcaatagcagaatggctgctaatctgctaatcagcctaatctgctgcctggtgaagtactgaagtggagtgctggtggctgctggtttctgcagttctgctaatcagcctaatcagtgagctgggcggtttctggctttctgctggtggccggtttctgctggagtgctgctgtgctggtggctggtggcctggtgcaggcgtgcagccgtgcaagtgcaatggtgctgggcgactgggcgtgttgcgtgtatctgtttgtgcatcttatattcttatctggtgtagtgtgttatgtgtatgtgtgatgccgtgatctactgaactactgagctgggcgtcagggcgtgtgcatctgtttcactgtttgtggctttgtgtcgtccgtgtctgtctgtactctggagtagtggagtgtatgcatgtgtgctgtactgtcatgtgctactgagcatgtatgttctgtttgctgtttttaaaattcggggaacacttgaatcttgagaacttgattgttttgtttgtgcgtctgctctggtggctgtgtttaaaatttaatttggttgtttcgggagtacccgatacccgaacccgaagtgtcgggtacccgaactttcgggtactatattacccagcgcaaattcgggtaacactttctaaaacccgaactttt

SEQ ID NO: 5555 - DNA, 468 bp, Zea Mays
ggcggcattctctgtcgttaaccaccgggttcgcagggaccttcatgtgctctcatggatctacggctctgtctcctctgagctcttcgatatcgtcagttcgtcaccacctccaccctgtccgcccacaccgcatggctcgctctcgaggagcagtaagtcgttaatcgacaatcgcgaaactcaggtcctcctcgttgacatcgaattatgcaccctatcgcagggcatcctttcccgctcacggactcccatgtcgaacttggtgagcggactccctcgtcgaatttgatgagcccatctccgaccgcctcctcgttaccaatgtcctccgtgacctcaacgaccgtttcgctcacactgcccctacctcaagcgccagctgcagctaccctccttcgccgaggttcactccgagatccaactcgagaagctctccctggggcctccctccagcgccacaccgtc

SEQ ID NO: 5556 - DNA, 640 bp, Zea Mays
ggcagctcgccttcgtgcccgaacaaccaaccagaacaaccaagcagctctagcgcaagtaggaggtcgtgcatgcttctattgtggggaacaaaaccactgggcgaagcactgtccaaagaaggcaacttagcagtcgccagcagtcaataccccagcaagacaaggagcaccacaacaagcacaaggaggtcgtggtcaggcttacaaccgtagaaaggtgaaccacttggaggccgaatcaatccaggatgctcaggacgtggcagtaggtatgtttccagtcgaatcccatccagcaaaagtattatttgacactggtgccacacattcttttgttttctacatcatgtgtagaagcacataacatccccatagaatcaatgtttctacctttaagagttaattcagtcgggtgaaaagttcagtccgataggatttgtccgaatctaaggattaaaataagggggatagacttccccgctaacctagtagtaatgggtactcaagggttagatgtcatcctagggatgaattggctatacaagaacaaagccaccgtcagttgtgacaagagaacagtcaagttggtatccccatccggaaaggaagtagtaactaagttgtacttgcctgaact

SEQ ID NO: 5557 - DNA, 505 bp, Zea Mays
aacacgctgaggagggcatgagctacccgacgagctactcgccggcgagggagcagagggctctagcgacggtggacggcgctgttaacgccttggcgaaggagaggaagaagacatacaggaaggggaagaacacggacaggtagaggagtagaatgattctattctggtttttcctgcttcccttcggattacacactttactttatattgctgtatagctatggcctaaggcacattactctatccattctgctcctttgacacggagattaggcctgcgaatgcaacgacccaccatttgaacgccatcctttggctcctttcctcgcgcccctttcagcttgtgctggcgctggtaggtctctgatattctcctccccttgagaagtcgcttgtccccaagctggcgcagctggaaatcaagctcgaagagcttcttcatcttcctaggacgatagtgcttcatccgtagatgactagtgaatgaggacctattgtatgg

SEQ ID NO: 5558 - DNA, 439 bp, Zea Mays
aaccgcacgattcacgctctacgctccagattcaaaaccctaaaatgaactctcatctgtccgatctatattggacggctctcatctccccaacctgaatcgatgcgcccggagtaatctgatccgccgaacggtcatccaacggctaggagtatacgcccccaaaccaacacgagttgcggcggcgccgcccagagatgcggccgcgctcctcaccggtggtagctctccgatgatctgaggcccaattctagtgtatagctagcgcaacgcaaataggggaacttagcggaccgattgacgcattccataccgtgggtcgaagctccgctgttgatggtcacggtgaagcaacaacacggcggaaatcccaagtccgacgaggaattccgcaaccccgatggtactttctcctccgcaggcgccgcgtatacttccg

SEQ ID NO: 5559 - DNA, 841 bp, Zea Mays
gaacttgtaaatgaagaaaagaaattatagcataaaaacagaaaagaatagaaggctttatgggccaactccacccaattcggcccagttttccccatgctcagcccctctgctcacctcagatcaacgtcgcgtatcaccagatcgcaacaaactgcactggagatcccgaaatcggctgcatcgatctcgctcgcccaaccgaacgctcacccgccgccgtgaaccgcggactcggccccacgcgatcgtggagctctgggctatataagtgccgggcgccacaaacaccagcttgtgcagggaggcaaacgaagtgggagagaatgttgtggtgaccgccgccggtgagtgccatccgtgcagccggtctgtggtcgacgtagagtcaggggtcatcgccggatcgaggtgatgctagatgcggagttgcgggatccggagatcaatcgcgtcgtccctaacccccgccggtgtcggggatccaccgcggtgccgcatgaactcgtgggcaggaccactgctaccaccctgtacggtatgggctcatcgtagctttgttgatctcccctcaacgttttggtccgttcttcgatgactttggtcaccggatgtcggggcggtgtcgcctcggtgcgctccaaggagcggattccggccgcgccgccactcaacttggtctggcagcgggtgggaagaagacagtgttctgaccgttgatgcgtgatggacggcccagattagtttaagcgtaccgctttaggcgattggatctatgccgtcgatcggatgatgggtggccacaaagtgattctaaagttttaaatccgggccacatcgc

SEQ ID NO: 5560 - DNA, 388 bp, Zea Mays
agtccgtctgataagctcatataaatacttggctgctgtagtaaaatctgccggtgaacgtcgcgacccatctgagaagggtgggcggaacagagccgcgacgtgagcagtacccggagccacaccgccgtgagggcgacgaggagggtcagaagtgccgtagcagaggctgtgaaggcgagtcgtcgactcggggaatccaaagagttggcagatctgactggcagtaatggtgacatcctctcgctcaaaacggaacctcatccagtgatgatccgggtcaatccatacagaggcatagaagactcgtacccactcctcaacatacctgccgctggtagtcaaaagggtctgaaggccaggcagataggtgaggtgcgcctcagag

SEQ ID NO: 5561 - DNA, 666 bp, Zea Mays
atcctcagaagattacttgaagctcagagtcggcagaagagttatgcagacaacaggcggagagaactcagatttgaggaaggagacttcgtctacctcaaggtctccccgatgcgtggtgtcagaaggttccaagtgaaaggaaagctagcaccgtgattcgtcggcccctatcccatcattggcagagtgggacccgcagcgtaccgtctggaattaccagaatccatgtccaatattcacaatgcgtttcatgtgtcccagctccgcaaatgcctacaagtaccagaaagtctcatcgaggaagaggcaatctagattcagaaagatcttcagtaccgagagaagccaataaagattcttgactcagcagtccgaaagacccgcaactcaaaagtgaggctctataaagttcagtggagcagagaaggagacgaggaagctacctgagaaagtgaggactctttgaggagggaatacccttatcttttctcaaatccagtctaaatatcgagggagagattcctttaagttgggtaggtttgtaacatcccaaaatttcaacccaaggtttggaaccctaatctcgtaaccccccttatttttatctctcactaaactccaccccttaggtcatcacatcatatgcatacactttgattgtta

SEQ ID NO: 5562 - DNA, 1046 bp, Zea Mays
ataatggctcgggcagaatgtccctacatccaattcttcggcggctcgcgctaccaacaccgttgttgctcaatgctcgtagtaggggttacaagcggacgagttagggaagaagagctcccaagtctcttatgtgtgggtggatctaaagactatagcactagagtcctaaactaaggcttggatgtcgtggtggcccacgcctcggctctagcctccgggtcttctggtctcgttaagcgtgtgctgcctgtgttagtcatcttccatccctagtcttccctttgtctcgtgaccatcctcctccttttatgggccaaggtgggggtccatcaccggtagcatcatcgagaaggagctactatgttgtggtaaaaccgagtgttttaccttggtgaagccgcgttgtccgtatgcgtcttggtcacccgatcgtctcgactcgtgttcattacggcggatggtgtgggtgccatggggccctggcgccatcattactgcttctataccatgctaacccttggccttcatagcctaagtatcggcatgactcattgtgttgcaggtcctatagacggtcgcacaccaaggcctagtctcaataggtcatgagtgcatcgcaggctaaggggcgtgtaggtcatgagtgcagcgcaggccgaggggctcgcatgtcatgagtgtgaggccgaggggctctcctactgcggcttagtgcaaggtgtagttaatgcagtcgaccacttatggcggggcagtcttatgccaggcaaggaatccactcaagtggcttcccttcggttcgcccgacccccctttctagctctgactcgcccgaccacgggctcgatgcctcagggtttattcggggtgggtgctttcaagggtagatggttcccttaccctcttgttgactggtgggccccagtagtctggagacctttccctaatgctctctctctgaccagtggccctcagaggctcggtgatcttttccccgacaatagctctcgagcccccgatgggagagtgtctccccttacggg

SEQ ID NO: 5563 - DNA, 798 bp, Zea Mays
ctgaaagatatcttcaccggaggctcctactctagtgaagacaactagacagaccctagagggaccctgtgttccccggtctacggagctgaagcacgcctttcctccggaggcccttccggaccccccacgggtccgagctgcagagaggtatatgcagaagtgatcacagccagagatgagggctcccgtgtcaaatgcagatgggaaccgtgggtcggggcttagccccacggcaggtaccataccaagaggggctctgcaactctcccctagttgggaaggacccttcaaggtaacgggagtacaccgacccagggggaaccatctagctacgactggaggagtaccttaccctgatgccaaatatctctgtaagttctatccatagagcaagactaaggggtcgagcctgtttccttcttttatgtaactagataacgcatacgtgtacggcaacccggtgggtctgcccccatgaacccggactattggtctgcacacatgcacgacaagttatgaagaagaaactaccccctcagccgtactcttgtgatagttccatcttgctgctccatggtcctaccttgcaatctttcagataatacctttcagctaacccacccgtacgatttccatctgtctgacatggcgacatctgaattgaacaggcaggcttgcagattagggcccctaacgtgaaagtagggatgtccgacagcctgggggccagctctagagaacgggaccccgttccatagggtggtccggagcctgtgtagccgctcagccaggtcc

SEQ ID NO: 5564 - DNA, 301 bp, Zea Mays
gtgaaatgaagtttttttgtttgaagccactgagtagtcatcctcggtgtcagctgtgactgattggacctttttgttatatggaaatgaagccaaacagtaacgttggtaatttggcatatccttagtactttcctgttttaactgagcctttatgagattgtaaatggcctctctacacccaaaaagcttgctaacgagatccttccaactttcaagttgggtgcatttcccttcacagtcaacgctggactgttctatgttctaacaaccttcctcagtggccctatgcaacaattta

SEQ ID NO: 5565 - DNA, 509 bp, Zea Mays
ttccgggacacaagtgtctgagcactgttcaattacaagcaacagaggaggtctgggacatgctcaatgaggaggaatccaccgaaccagtggaaacaatgcatggacaattgctaatggcaatatcatgtgctgcttggtctgggaacgacaccagcactacctttcatctccaagggtccatacatcaccatgaacttataatcttattggattctggatcctcgcatacatttatcagtgacaagttttgtactatgctctctggtattaccacattggagcgtagtatgactgtcagagtggccaatggtcaagtcatttattgtacaaagcaacttcggcaggcaaagtggtttttatctggatatcagttcatctctgatttgttgtttctgcccctaccgtcggtggatcttgttctgggtatggactggttacaagctcgtagtcctatgagagtcgactggctcaacaagtggatgatcataccttaccaggatacttcc

SEQ ID NO: 5566 - DNA, 530 bp, Zea Mays
tgtgaacaatttagcggtgttctacacctcctcccatacaaggcctcgaacggtgccatctttaggctagattgatagctgttgttataagagaattctgccaaggaaaggcacttgtcccaattcttcccatagtgcagcacacatgccctcaacatgtcttccaaaatttgatttaccctttctgtctgaccatctgtctgaggatggtatgctgagctccttatcacctgagttcccaatgactcttgcagctgctcccagaaacgtactacgaacagtgctcctctgtctgacaagatagtctttggtattccatgcagacgcactatctggtcaatatagatttctgcatacttttctgccctgtgggtggtatgtactggtaagaaatgagctgtcttagttagcctgtccatgatgacccaaatagaatcgtggtgtcgggatgtgttgggtaaacccacaataaaatccatgctgagatcctcccatttccaagatggtatgggaaggggctgtaaggtacc

SEQ ID NO: 5567 - DNA, 661 bp, Zea Mays
aattgtgtcgtgattggttgggaagtggcgttgtacattgacgggacgcagcacagacgaaaactttatcttatagcatggcaggaagcaaccagcgagccaaacaacgatcaagcgggggcacaggagaggatagagaaagcgccacatttggcggatgaacgatagactctatattttacaggaggttgtatgggacgttgttggggagaaaaagtaaagcaaggtccactaaattaaaggtaccgaacggtttaccgtcccttgttggaggtagtcttaagggcttcctgtccttgcttgctgtttcaggatactgttgcttctccgtaagcagcagcggtaccaaactatataccaacgctgaaggcctcgctcacatcgtaaaaaaaagtggtcggcaggatcgcttgtcagttttcagtctaccgctcgacaagatcatgtccagacgtgacgcgtgggcaccaagttttcatcagatctccactcggtttttgtgctggtttgtctgttgtctccgccgtgcaacgacagggccaaggtgtacgtaactgcggacatgtagcgcgcggtgcccccatgcgatgcgccattttccctcgaatgatgcagcagcttgtattgcccctgtttggttgagattctgggcggattttgg

SEQ ID NO: 5568 - DNA, 686 bp, Zea Mays
gtccggcagcctgggggccggttctagagaacgggtactcgttccctggggtggtccggggctgtgtagccgcttagcttggttccgtaccctaagcctacacgctcaccactctgcgacaggtatcctagtatttggaactatagcccggtgggtccggaaacctagggtccggtcctagagaatggacgctcgtctcctggggtggtccggggccgtgtagctgcttagcctggttccgtaccctaagcctccacgccccaccactctgcgatgagtgtcttagtatctggagctgtgatccagggggtccgggcacacggcttggctccctaggctaaatcctgcaggttctgttgtgtgaatcaaaggatggctgataccagacgatgggccctatgggtgtgctactaacacttcctagctgaagctgtgaacaggtccaggtcccagtcgaggctacctcctgggtccgaggcaccaactctttcttaggtatgctggtatccagcctcgacacgtcgagcctatatcgcaggggggccaagcaccaggagaggagttggtaaatccacacacagcaagaacaaatactgcacagataagagctatttaattgatagttcccaaaagcatcttacaaaaaacaaaaagttattacatctgccttcaagcggggccctagc

SEQ ID NO: 5569 - DNA, 455 bp, Zea Mays
gcggcgaagagaatgaaggagatggcggtggaggactgatcggtgtgtggaggagaatgaggactggccgatttccggtctctctgcggtggagaagatgaaagcgacaatgggtatgtctagggttccgccgccgcgtgcgttgcaggtgaggtgagctagataactgcgagctcgtgggtgggatcgtgggcccgatacatgtaatatgcgggacgaaatctacgcgatggcccatagactgacacgtgcattactgtttcgtaaactgaaacatataacatcataataccaatatttgtgtggggactagtacggctacccagattgcgggagcacaatcttctcgtgggccaggatacccggattgtgcgcagactatacttgcataaactgatatacatatcagcataactctcattataatttggcgtaagaagttaggtacagtaagc

SEQ ID NO: 5570 - DNA, 439 bp, Zea Mays
acggatgcggtggcagagctcggtgaatttctcgccaggattccgccgccgtcgagattccgcctgtcgtcgtggatcgtcgtcccctctgcgcgcattgtggtaagagacccaggatccgtttcactttgtttctatctgcgcatagcacgttctggggaaggaagttatcaaccgtagggccggttctgggttcaccggcgatggagcatagtggcgggccgcggcacgccatgaacggggtcctctgctacgaaatcgtcaataataccttgcccactaagttcaccctcgtctttacctcgcgtagcatcaatggtagggtgtcgggtgttcggattcatcgggatggcgtgtcgccggtgagggcgccaccgcgacctaggcagcgccgccacggtccggtatttaggaacaggagaagggagacctcgcgtcg

SEQ ID NO: 5571 - DNA, 409 bp, Zea Mays
gtgggcggcgtctacttccgtttctggtgaggcgcatgcagcttttttagcacgaacgtgcgagcgggaggagcgaggtgatgaatgcgagggggaaggtggcactacgaagcaccaggacaaatgaccccctagagaggagcactaggcctatgaccataccatggcaatgtaagatgtgtgggcattgttgagacatgcgttgtcagattaggtgagaacaatcatggtcacagtagaggtatcgattacgcaacatggcgattggacgagtatggcctagcctagaaaacattctatagtgcaggggtagtgggtcggcttcctcccatcccattgccacacccgcgggcaaccattgttgtaagcgattcgatgagaaatcgcttcacatggggccaagacaagg

SEQ ID NO: 5572 - DNA, 713 bp, Zea Mays
aatacctagtatacaatagcattacctattatacaccagtacaacctacaatacactactctacttctacctctattacacctttagtcctgcttcccattactcttggcggcctcatcgtcaggtgtgggagtccagacgtcaaccaacctcatggaaggagggggcttaaaaaggtctaactccccacccagcgcgcgtcccgcaacgtgggagggttcggcttccgcctcagcagggtgtgcaggtgcactagggtgtaattgcgagtacagtacatggacttcttcatgcaacgtattgcaaaagacctgcaggtcgtcgacagttgagctaagttccttgattcgggcctgagccctagcttccttagcacatgccagcaaacgggactgtactgcccagtcaagtgctaagtcccgatcagcaagctgatcctgcaggtgacggatgtcccttcttagttcatttattctatctccatccgcgacccaagcatcggtcctgtgttgcagcgccgcttgaagtcgactcactcgggcttcaagatctcctattgggtcattgctcccgctgctactgttttcatgtcgaggggccagttgatgccggggcacaccgattggtccagttgacttgcgtgccgttagccttgtgcggggcgacatctttctaagggggaaaactttattagtataattcttagcatgatg

SEQ ID NO: 5573 - DNA, 290 bp, Zea Mays
ttgttattattaccttcaccttagacacctctatatcttacttgatgtttgtctcctacctgccctttaaaatcacctctctcccgtcttattctgagagctatactttacctatctttaccttggtcgtatcctcttctttggcttgcgagtttgtaacttcgtccttagttgtgcttttgtttgttattgcctccacctatcccatctctcaatcttaccttggtgattacgctatgttcgttacctaaaacctccaatctcccacttcagttcaagcgtggtctctt

SEQ ID NO: 5574 - DNA, 707 bp, Zea Mays
gcgacggctcccatgcgaacacgtcggcatttgcctggaggaaggcgacgagcgcgagttcctatttttcacccagatctcccgcaatgcgagtagtctgggtggaatccgcagtaagccggatggctttaacgggggcgtcgtctgccccggatggttgcacctttggcaccttggggagtgccttggtactgggggttgaggggttcccccctccgttgtccgggcgagtagtctctgccgctagggcgtgtagcttctctatggccgctagcgcgacggcgcgatcgtcccgcatggtgaggaccccggttggagacagcatcttgaggaccaaatacccgtaatgggcaatggccatgaactggtatagggctggcctgccgaggatggcgttgaaggggaggttaacctccgcgacgtcgaacacgacgttctccatgcagaagttctcctcggtcctgaatgtaaccgggagagtgatgctctcaaggggatacaccagctgcgggcccactccggagaatgggtgagagggtcccagacgggacccctggatctgcaactgtttgaatgcagcatgactgatgacgttgaggtctgccccgccgtcaatcaacacatgatgcagccgcatattggtgatgtcaggggcagtgatgagtggtagcacactggcccctaccatgttgtcggggcagtcagat

SEQ ID NO: 5575 - DNA, 569 bp, Zea Mays
tacaaaatgaatttatgaataaatacacccattccatgagggcatgtttaaaatttaatatctaattggagtataaattctgtaaaaaaattgaattcaaatttcagatttaaaataaaaagggaaaacaaaacagaaaagaaaagaataaagaaggaaaatggaaaacagacactgggctgacttccctcgctcgcagcccatctccactcctcctttcaccgcgctagcccacttaaccgcatcttcaccatcgcgcgctcgatccatgacgtgtgggccctctccgtcagattcccctacccgctcgccagctccttccgcgggattgcgctgcctctgttaggtggacccgggggagcagagtcatcttccttccccgtggacatgggtgcggcgccgttctctcctgccgcgattctggggattttccccgaccaaatcgctaatgtcgtcgtaactacttaggccgattggtgcgcgccgacttccttgaactcgggagccttcatctcaacggaatcgcgcatatcacgcgcaggcttgcgctgggggggctctgagtcatc

SEQ ID NO: 5576 - DNA, 284 bp, Zea Mays
ggatgggcatcaatccaaacctactgcaactagttgataaccccctatattggttcgaagggaaggccaatctccccctcggaaagataaccctactattaaccttcaacatggccccaaatgcacagatagagcaagttactttcgatgtcatggatatggtgtatccttataatgcaatcctaggcagagaagcaatcaatgtctttgaggcaaccattcatgtattttacttgcgcatgaaaatacccgggccacacgaagtcgtcatcattttcagggac

SEQ ID NO: 5577 - DNA, 748 bp, Zea Mays
cagcggccagctagggctactatgcgtgcaaaaacttggacgaagactacctagaacgatcggtctacgaaagccatgtccgcggcgccgttcccggacaatatcttcacgttcacaatgctacgatgcgatcgagctcattcggttgagccgatgagcactaccgatgcaagagaatgtagaaacacgggtgagaaagacacaagcggacctgttggttgctggtcacgacgcggcgtcttacggcggcacggatgaccaatttgggggaagtccgaagactggaggctatggtgcacgagaacgctgatcagggggcggaatgaaggcttaacagagatgcagagcgagggcagtactcaatttaaagggatcggctatgcgtcacgccaattttggccaaaaccaaacgtggcggcggtgggatatttcactggcgagcccatcgtggagccagccggtgaaaaggctccaagatggtaattccaggtgtgcgacggttaccactacatggtgaaagagtcacgacgtggcgcaattgagttcgtcggcgtaccatgacgacaccggccgctcgaccatgtgacacggccatcaagtgcagccgataagttccaacccgcaaccaaatccacccccctgccagatattttactcccccacagttatccactgcgcggcaagcacgaatctccccgatgaactcggatcttggcacgagctcaccggcgacagtgcactaaacctg

SEQ ID NO: 5578 - DNA, 434 bp, Zea Mays
caacgtggagaaaccggccggaaggtgcgtgcgggcggccgggcaagagagcgtgcaactgcaagctgatctcgtcctcgctcgcggtgtcctcccggcgaccacacgcactgcaccaccaccaccaccaccacgtcaatgcctcacgtgcgtattgggtttccgcgcggcctcctttctatgatataatcgctggggatgtccgctgcccggccgcagaatgtggcggtgtgcagtcgtcgtggccccgcgtcggctgggaaacggacgcgctagctagggcctcccgacagcgagcgaaacagttgcctctctcttatcgcctctgcaagctctgaattctgatagcatgtgtgctctctgccttgtgctgcagttattttagtcacaccgcaccgctgattggacggctaccgtcaaaaaaagtcaacaac

SEQ ID NO: 5579 - DNA, 997 bp, Zea Mays
agcagcctcgtcatgccggaggcgcgtcgttggttacgccacatgttggccgtgacccggcgattggtcgtgacccggcgagacgtggacgcagccgtgtgcgccgttccacccgtgttgctgtccggcgtggccgttcagcgacccccccaaggcatcctgctcgccccagatttccaccaggcgcctgcagtcccggcatccgcagctcacgcggtggtggcaacgacggttctccgcgccctgatgtgaaggctgcagctctccttaaaggtcgttaccgcgttggttgcgtgtaccgaaggcgaccgcgcttggtgcctaagggccaagtcgatccggtcccaggggctgctgctggcgacaacaaccttgctgtctgggatggcagcaggatgaacttcgcagacaacgtaagtctcatcccagtgcagcgagcattcacaactatcctcgattcccttccaacatgccctgctatgcagctactgcctttggtgcagtctgaggaggaccatgtgctgttaggctctccctgcagcacggttgctgcgggctacaacgccgaagctgtgacggactccaatgtcgacgcttcctctcggatgatagctgctgtgcatgaaccttcaacagatgttgcagcggtgtcaaccaccgcgcaaagccatctactcaacaccatattcaccaagccctcgcctgccatacttgagcgaccagtgctacatccttcggagggggtaacaacaccagcgaccactctatctactattcctacagcacctgctagaagaatcaagcagcgacacggcttcaacctttcgacggtacatcgtagcgccagacttgccaacggccctcgaacgaatgtcatgcaacgggcccagcgcgtcctctgccgcaagcttggtctcttggcaaaagatgacgctgctgattttaatactgctttgcaggaatttcaggattggttcaagaagccactgactgtgga

SEQ ID NO: 5580 - DNA, 771 bp, Zea Mays
cttgggagcacatctacataagggaagagccgacctagcattatcaagccatgatggcacgatgagacatatcatcaccaagccatgtccgaattacaggaccagtactgaagggtctctgtcaagcacgacgtcgaatacgttgtagagagtatccctgctgaacggtgggaccagtcaacccttgctgcggggacctcagcatcaaggtctctacagtgacccatacgttagaaggaatagggcaatacgctatactagacgtacgtctatgcatgatggaaggtgacgcagaggggatggcggatgatgaagctatactgaagacgtctctaaacctcaccacgagctgacttaacgagacccacatacaccactacgtttgcatcagaatagctacaggaacccgtatggtgaacggacaagacgcgacgctatatcaggggtacgacaccgcgcgatataggagacgacaccgtaggggctacgtcgcccggaagcaagaggccgaactccaccccgacagaatataagttctcattgtaaagtctacccttgagttataaaagggcaagacaacccacatcttcaaaacacaacgacacacaagcactcaactgtaacatactccaaacaatattatgatcagcactacactagactatggcgcaagcctgaaccagtattacctctgtctcggaaccaccttcgagccctccgtggctcaccattcggaaagagtccatgctagctccctgtcgaacataaatc

SEQ ID NO: 5581 - DNA, 583 bp, Zea Mays
tggttcactcactgcatgtacatacagagtgacaatccatgcatgcatgcatgcagactgcgtttgctgttagtgccctgcaaattggcccaagtcaggagtcgtgtgcgcacgtggtcgtcgctgattccttatttactactagtactacctatagtactagttagtggtggtcaggtcagtataaataaaacccacgtagtaacggtcagtaagcatgtactcctagtatactagtattattcttgttctgcatgcaccaaccgccaggacccaggacccaccgacccaggagactacgactacgacttgtcagaggctgatgatccgatcgacatcccatccggtcgtccatgcatgtaacgcaggcgcttgactaatccagtacgtagtacgataattagttagcacacgaaacgtgcgtcgtcgtgcctataatattgtctaaccccttgaatgcgtgcaacacaccactgtaacgcacgttgcctgctaaccttgaattcgcacaagtcctcgctacacgttagctaaggtatctctctctccaggtggaccgaataattccgtttctccccccacc

SEQ ID NO: 5582 - DNA, 835 bp, Zea Mays
ccctatagcagtcccatcgtcgccggtgagctcgccacgactgtggacacgcactcacgcggccagtgccttcttcttcatttccggccgccgcgcgtcctccccaaattcgctggccaccactttaccctcctataaattgatggccggggctgttgcgctatgtgatcatgaagccaacgcaccagctattgcttcaaatcactcaccagagaccacaaattccttacttcccccaaaccggttcatcccaccgcaagaacaccctcaccgtggctagcgcaattcaggctagttcttacgctctgctccctcgtttaagcagtctcatgcgtctgtggtggtcaccgacccacccaattgaattagaccacccccaatcgccgggaacgcattgttctttggatcatccgcgcggtcaccatggtcagggatattagggtcgccgttcatgcaattgacttaggggaaacgctaattggggcgtgaattcggtttcgactgaagtagggcaccagtccttaggtaaatcggccggtacaggtgctcgccggagcctccctgcgcccaccgccgtcgtggacctctccctgtgaagtcttagaagttggaggacttttatgcaaactgtcagcgactgtgttaaacagtggaagaccggatcccagttagtaaaaaccccgaggacttttgcgcaaaacagccagcgcgcgggcgcgggcgcgttttccctctggtgttgggccacctgggctggaatcggcccagcactatttctgtttttcctttttctttttcagcagaactttgaaaaactctagaaaatggtagaaaa

SEQ ID NO: 5583 - DNA, 443 bp, Zea Mays
tgaaaacaaaacaattgacatgtgtcaatgcaaaaaaggcatgtagtatcttctagaaggtcccatcttataaagtatttggctattttttatatatattcccttatatgtttgctcatttatttttttagagtccgcttcccttcattcctggcctcctcagtcatctagtttcaccagtgttttggttggagggaataaagatgccatgttgtcagttgatgctcgatgcaattatgtctatgaatcatactgccaccagcacaccatcatggttgcgtcgtttgcatgcgaaaaaaggaatatctgtgccatccaacctacaaattgatgacttcatcaatggagatggatcccaaccttcactatgcttgcctgtaccaacttcttcctaccaccaccataaaaatcttcttgacatttccaaaaaccaacatcaaaag

SEQ ID NO: 5584 - DNA, 342 bp, Zea Mays
ttctatttaacatagttactaaatgtttgaagataagtatgttttattatttgcaatagggatggtgtcccaaaacatgtcacggtggttgttttcagatcaatagtgagcaccgactgagccgcgcactgcggcacccagcaaggttggagtcgggcagaagtatgtaaaaatacttgctccttcgaccgcagttggttgtggcctaaaattcataggttgtctcctggccatcgagaaccattcgtgcgaatgaaatatgaaataatgacgtgaggatcccacaatatatatgcaggcaaccagtgtaagtcctgtttgagccactcaaaattttgtttt

SEQ ID NO: 5585 - DNA, 680 bp, Zea Mays
ttttgattttggattggctttctggtgtggatgagggcgagaggctcacgtgatatatacccggagcccagatgataaggatcccaggctgccggatttctccgcatcctaacaatccggctcctgttacgctttatcgggtacaacagagaggaacgcactggtgccgcgtccccacccgcagccacggaggatcaccaggacccacatgcaagagatgacgtcaaagtgaagcatccatgcggcatgcccaggaacgacgctagttgttgagagaataccggagagcgtttgttgcgatctgttgtggtccgtaggacggagggaaggagatgacttccacatcctggccccacgcaccagctgttctaaatcggaagtggatgcaagatgggtgaggggatgaccactgggtcccgccagcaagtgagccgagtacgtagaaaatggcagggaaatacgagtgactccaggctgatggaaataataaaacaaaaaaatcaaaggggtggcatcggtggagtgtggtgtggggctgcatgaaggaaaaatacgcatcctcttcctcgttttttttctatttcattttcattctctattttcatttctactaattttctagttttaaatctaatttcaatcttaagtttagttcaattttagatgcacaaacaaagtcc

SEQ ID NO: 5586 - DNA, 621 bp, Zea Mays
gggcaaccaccgtggccaacccttttcccgccctcctccgctcgatccaagccctcggatagctcccctgggaggccgtgaagcttgcacgagcttgaaccgaggacccgcaccaccggaatagcgcaatcgtgctcgccggagttcggaaccccgtcggagcacgtggaccgggtaagcctctacaccatttccaaattcgttgcgcgcatggcctctacatcaccccgtggagctcctcgtgcactttaattgaactatactgtcgtggtttggccggaacaggagccgccgacgacccccgccgcctgtgctcgtggccagggtagctccgaccacctccgacgccgacccgcacaccgacgtgaccgtcgtgacctccccgacgtcactgaccaccccgccggagctctaatgccgcctgtaatcctcgccgccgtaatctatgccgcgggtactgtttaagccagccagggagcacgggttagatttcggctaggtccagggggttttgtgcaatgtcagtgacccatgccaatagtagaccgaggactgttttgtgagagaagagggagagaaaacccaggggcctcagcgcaaacctgtattcttttccatttt

SEQ ID NO: 5587 - DNA, 772 bp, Zea Mays
ttggcgacgcgacaactctctgtacacggccgaaaacctctcggctcccacacaaaaacgacaaagcataccccggggaacatatcttacaatatgatcttgctcaaattcgcgaagatttggagcctatgggcgttggaactggagcagaagcaatgtgccacgtgctcgaccgtggctgacgcgctggtgcatgcctgccagcgcgcccgcgctgagccacacccacctgtgcgcccgcaccggtccacgctcgaccatgcaacacgcccgcgcctataagagtagcatggcctcggtcgtactccctcggcaccgtgcccaactccccagagccagcccgtagctctggtgacctccctgtgacccaccaccatcgccagagcttggccaccgtggctagaccttttcctggcaacctccaatcgatccagtgcctcggctagcttccctagagccccgtagagctccccgaagcaagaaaccgaatgctacctcaccggagacgccgtaagccatagttcgattactcgcgcccatgtcttccctgacacccagtgaagctcgctgcacggtttaattgaatcctaccgctgtggttaggctagaacactcgttgccgatgagctcccccgcctacgcatgaggtccgacctactctgaccaccgccagcgatgagccgaccatcgatgtgaccgccgtgaccgccccgacctccgtggacacttcaccggagctagatagccaccggtaagccctgccgccctttcc

SEQ ID NO: 5588 - DNA, 745 bp, Zea Mays
ggggagactatctcattcagtttttttgccagtcggttggcaagcaccttggtgactaatttggcaaaactatgtaccaaactaatgggtctgaaatccttgacctgatcagccccctccactttagggatcatagtaatatatgctgaattgagtctgctcatatttgtgaaatttctgtgccaaacagctcccactgcctttagcacatcttttttgataatattccagcatactttatagaaccttccagtgaaaccatcaggcccaggggccttgttagaaggcaaatttctaatagtgtcccaagtttcctgttctgaaaatgggagatccaattcagagagattatgcacaggtaacccaagagcctcaaggtttatagttctttccctccctgcagccagccctataaggttgtatagaagtgatctacaagagcttctttctcagtatggctagttaaagtattctccccatctctgagtttggtcaccaagttctttctctttctatgtctggcatgcatgtgaaaaaacttggtgtttgcatccccatccttcaaccaactgattcttgatcttaatcttgccatagtccttttgaatgaggtcaacaacaaggattgctttttaagcttatttttaagccacaattcagcaggagtaaggaagatcctgggcaatctcaaacctgtgcaaaagctcctttgccaaagccaactaggaagtcacatggccaacct

SEQ ID NO: 5589 - DNA, 554 bp, Zea Mays
ttggtcacatgaagaaggattgtcctagccaacggacgtacattgctacagacgatgggtacattagtgcgtcggatgtggaggatgatggtgttacaagtgatgatgtcggagatgatgctgccattgatggtgatgctgccatagcaaatttctggaacatcattgtgcagcgtgtcctcggtgctcagccagagacctccgggcagcagcaacgccataatttgttccagactttcttcgtcatcaaggatcgacgtgctcgtgttattattgatggaggaagctgtaacaatttggtgagttcagatttggtcaagaagcttagcttgcccacacgcccatgtccgcatccataccacattcaatggtttaatgataccggcaaggttaaggtaacacaaacggtacgcgtgcatttttccttggtatatattctgattatgcggattgtgatgttgtacctatggaaacatgctctcttttgttgggtagaccttgggaatatgataatgatgcacgtcaccatggtcggagtaatacatacactttca

SEQ ID NO: 5590 - DNA, 301 bp, Zea Mays
gtttgctgagtgtgttttccttaggtacaatgctgagcataaggggtatcgttgttggcgtccggtcactcgtcggaccaggaattctcaggatgtggtttttgattaggctcgtcctttctatcctcgaccctcattgatgcttcttatgtgtctttagttgaccccatcccctttttgttcttcccaatactcctacttatactataccggcttcacacctaccacaatctggcgttgtgtcgtctttggagtcttcttctttgccacctaattattctatgaagcctctagagacaca

SEQ ID NO: 5591 - DNA, 661 bp, Zea Mays
gaatacctcggcacctgcctccaaggcactcccctccaacagtcaatagagcaggacccagtatcagggcagagcacgagttaaccacgtcgatgctcaagaggcccagcaagctccgggagtagtgctcggtgagttccttgtcgaatttactcccgctactatactttttgatttaggagcatcccattcatttatagccactagttttgtggaaaagcatggcattccctctacacccctagaaatccctttggtcacccaaaccccagggttagatcttctatgccagctcaaatgctctcaagtcagaattcttttaagtggggtagtgttcttggtagacttaaccgtcttgccatcccaagggattgatgtgatcctaggaatggattggctaactaagcacaagggcatcataagttgcgcaagcaagaccgtccttctcactgaccgccaaggaaaagcagtttcttgtcaggcccaatcgcccgccaacgatccaatgatgtttaatctagcagcagaaaatatatctgtaatagaagaattcatggatgtatttctggaagagttgcatggaatgccgcctgaaagaggaatggagttctatatagatctcattcctggcactgcgcccatcgcaaagagaccataccgc

SEQ ID NO: 5592 - DNA, 556 bp, Zea Mays
cccagagaccatctctcccgcggacttcgtgtgccggcaaaacagaatggccgacgatgtcgcgtccaccgcgactaaatcgcgctcactccagggtcctcgccatacctgggttgtttaagagtgtggtcgccttcctttgcacgcgaccgggtcgcctcgtcctagaagttccattgccatagacagagtagagtgtgagagggggatcagagggaagaaggtgctgccaccgcagtttccgcacgccatcgtgggcttggcctttgaccgcgccaatcaaggtgagacctctgccatgttttcgtcctcctttgtacgttgtatagcgcctagaccagggacgaatcgtgggcttattgcacggggatttctcaccggagtacaccgcacgacggagtccgctacgagatgggggcagtccgctactcgcggggaaacctggtatgggagcacagagcgtcttccatgttgtctattctacgtaaagccgggcacgggacagagttaggtcgcgggggaacggattgggccattcccggtcatggcgccgccg

SEQ ID NO: 5593 - DNA, 414 bp, Zea Mays
ctctttagcaaatgttacacagcaaaggggtatcgggtacctagagccgcccgatccagaaccgagggcccagattatagtccagttactacgaaccggtatgaaatctcgaccttcagatctaagatccacgaccaataagtcatgaatcaattttaaatcctagccacagatccttaatcgaacggaccaaaccatgtagccgagttggtgtggaagatcaaatcctaggcgcacggatggtatcgggcggacacaatcaattccctcgaaacggtatcccggtttaatctgtaccatccaaggagatctgacggcacaagcttctcctacgtcaccccaacccagaacaccgcgaacggcggcgccgccgtcgccacccggtgagctctcaccgacaacacacgattctcc

SEQ ID NO: 5594 - DNA, 628 bp, Zea Mays
ttctgaaattcagatttctgaattttcagcccttgaaccaaaaccgagcgtgttcaccttgatccttagctctaatcctaatgctcccattaacaaaatcatgtctaactaacccctctttcacatgccataagatggcattgggacgcgagccctagacacgacaaaaccaaggatttgccttgggctcgggctcggagacagaccagacttcagagctccaaatctttgaaaccagtaggccaaatcctatgacccccacacaagatcggtagcttatagggaggagaagaggttttgtgcactgaccaaggcgagagcaggctcggatgaatgaccacacgcgccagaactcgggcagaatgaacgcgcacacgtgttcgaccctagtcagcacgctggcattcgcccaacccgcacgcgcgctccccccagcgttcggtcaattccgccgcgcgccctcaccctcggttgtggcccatgcctttaaagcctccctgggcgcgcctcacctcaccccgtgctcaccctcgctggcccagacgcccctccttagctccggcgagcctttcctccgcccgcctccactgcccaagcctcggccaccgtggccagctccctccagtcg

SEQ ID NO: 5595 - DNA, 301 bp, Zea Mays
gtgacaggtatggtcttagttgattcgtttgatgcccatgctcttttgactctggcgctagttttttgtttgtttcggagaattttgtgtcgcgtgctagtctatcggtgtagaggatgggtcacccaattgtggttagttctgctaatggctccattagtagctgttaagtcttcctgtgttgttccatcgttcttgctgatgaggtcttttcagctaatctcgtggtgatttccctggggccatttgatgttatcttgggtatggattggttatctcagtatcgcgtagttatatcctg

SEQ ID NO: 5596 - DNA, 459 bp, Zea Mays
gctatggagaagagtaatgctgcaaagattgtagacgagatactagctagattgtcggatgattccgaggatagtgaagactttgactttggtagtgatgataatgatgtcgaagatcgaccgtggagaccgagccatgttaacttcgagaagtcgactatgaaaaaggggcatattgaggctatgaaaggtaaatatttctcatgatgtatctatagtgaggccttggggagagaaaattgttcctcttcctaaaatagatgaagtggttatctaccgaagcattttgaaagctgggctgcgttgtccccatcataagatgctagtcgaggttctaaagagattcgaaatataccttcatcatcttacttccaaagctctagttaaggttgggattttcatttgggcagtgaggagtcaaggcttagaacaagatgatgacttcttttgcaatattca

SEQ ID NO: 5597 - DNA, 526 bp, Zea Mays
cggtaatcgatacacaacctcaaactcacattctttttctttacgaacaaggctggacatccctaaggtgaagtacttgggtgtatgaagcctttatccaacaactcttgtaactatttcttcaattcacctagcttggttggcggcatccgatagggtatcttggagataggggcagtactcggtcacaattcaatggtgaacttactaagcaactcatcctagaagacatcggcaggttggttaaggactaaaaaagtactagtcatgatgagtgctacttctggaaggtcagccaaggtggtgaagtctagcctaccttgccttacttgtactttctgtttcttgcccttgtttagacgagaattttgtccctgcctctgctagttccaagcattcctgcatagtggccagtgttatcacaagtaaagcattggttcctattgtgctgacgatttggctgttgcgagtgctgaggattctgattgtagttccatggatttggggcttgagggtgattgggtgc

SEQ ID NO: 5598 - DNA, 280 bp, Zea Mays
tgaatacttcttgacttatgtcatattgagcatttgagctattgagaaacatactaatacagacattgttgatcttgcacttgcatgcctctatgtaataggctaaactaagcagcattgtacatgatactggtacttttgcacttgcactgtctcttcttgctaggtagagtcctaccccatagtctggaactagaagaattctgattttccttttaggaatcaatgtatatttgagctttgtttggtcagaaatgcattgtagaaaaatttagatggt

SEQ ID NO: 5599 - DNA, 313 bp, Zea Mays
aacgacttcgccgctcctggcgggagcgcgccgggaatcccggcgtccgttgacggattctacccggctccccctcccacataagctgcgccccctcctctccactcgttgaccctttttgtgccgtagtcgtaggccgaagcctccgtcgccgatcggaaaggagatagtgagagtcgcatccgtagagaccactcctctgtcaccattgagcttcagagcgcggattcggtggagaagtgtcatgcgcagaacatgttcaactgcgcaacttcgtgcgtgggtggttagcgacgcgtgaattcgtcgccgg

SEQ ID NO: 5600 - DNA, 422 bp, Zea Mays
tttgagaagcgtcttatagtattttgaatcatttactatcttattagcatgtgttattatatttgttagtagcgaaacctatgtcattcatttcagacaggttcgtcttacatgctcgacacatgtgagacgtacccgtctggatttgtctctattatggacatcctcggagtgattgacatgacgcagatttatgataagccattaggatccaaagaaatttcgacgacgagggtaggactgccgaaaataagagtttattttcggctaaatttgtttgtcggccagagacggccgaaaataagtcatatgctgctgaaaataggctatttttggtggcatatgcatattttgggtggtctctagccgccgaaaatgattggacgtactgtagtgacatctctgtcggtccaacaagctac

SEQ ID NO: 5601 - DNA, 565 bp, Zea Mays
gagagagagacggagggtgactttgggagagaggaagatggtctgtgcgtttgcgttgggccccccctgatcctcaccaaactttccacctctccgtgccttttcgctctgtgcaaagtggcctggcctgggtctggtctgggtgtgggcgtttcctactctctctctctctctcctgcccacggctggctaccgctacggctacgggggctggctggctggcagggaggcgcagagaattgaagatccttgaatgcggtttggtggcatccccgcactggcccctagaatagatagctgcccttgcctccatctccctcctctcgtctccacggtggacgtacggaggcaggcatggattgggccgagcaccaccaccacctacataaacccccaccattttttgcaggcttgcagcagcatcgcgagaaccgcagccagctacccaccctgctgcagctccgagcttttaccccgctttgactccactctaccgctcctccagcctctgttgttttgtttcccaccgcaagaatccggccgcctacctcctcctctctccgct

SEQ ID NO: 5602 - DNA, 581 bp, Zea Mays
ttcgatggcctgagacataaacttgtcctcctcctcttgtgcatgtaatcctgtcttagctagtgcgatgagctcagtcaaccttgatgtgtcgtcctcctcttccccatgtaatcctgcctcagcgagcgcgataagctcactcaaccttgatgtgtcctcctcctccatcagctccaccatagccattttttcctgaacgtatcttgcacgagcctcatctgcgagatagttcatggcacatgcaatctctgcaaatataatgggacaaataagtttgcaaagacaacatgccctttttctcactcacttcgactcacacgaccagcaagattccctaacatctgtttctcagctctagccgcctcccattctcttgcatcatgtgctctcttctcatttgccaccttcaatctcctccgctcagcacacatcgggttgtcaaaccacattgatttcgcgaacctacgcatctgctgtctgcgatctttaatgtatgaattgatgagctgagatccacaacgcatcttctgtcccattagtttcttggactttattgtatgcaccacctcttctttctt

SEQ ID NO: 5603 - DNA, 818 bp, Zea Mays
gttactgtgtcaaggttgaagaggtgagcaggtttggtgaattatggtcaacctgttagcattggaagttaggtgtttgagaggagtcattagggagggttcagtcgagttatttgtttcagggattgatcagactctgaaaaagatcttcacccatgccgtgctccacttgtgctgctctagctcgaattgaggataagaacgggggcacgaggggtactaggggtgaggagtttgacgtggctgacgcctgagtcgtgagcagcatgtgagttatccacgccggtgactcacctggttgtttatttctggtttgctcgtcactgatcctgcctacatggcttcggcctaatatcgagcgtgcgtggtacatatgcatggacgccatgtaaacatgtcctagcagctgctaacaacgtaccaccccaatcctcccagatctagcctcaccttgagctgtgtctggcactgtctttagctcagtgtcgctgctgccttcgggtttagcaaaattcaccgtgcccgcgagttcatcacccaaattgataacacactatgcttcgccaccctcttgcgcttgtgtaaccacaacccagccgcatgtcttcacccgagccccctgagaggcgtcttgccctactgttcatcgccgcgctatccaatttccgcctcatcgtggctaggtttgtttgacattgttcgatgcctctaatcccgtgttccagtctcccgtgggtgtaatgtagctcatgcatctgcctgtttaaactctactactctaggtcatccagaacgtggccacgacgtcgtcactcatc

SEQ ID NO: 5604 - DNA, 633 bp, Zea Mays
tcggctcttcagcgctctgcgcaatcgaagcagtttgtcttgcttcggcagctgaagagggcccttcaccaaatttaggcaccacggctggttcgatgtaccgtggcgggtgggtcaagaccttcatcttcttgccttttggtacaccacagcggtggccgaagctgcgggggccgaagcaatagtttttcttttcttcccttgactctgcaacgggtagtgataatcagggtatataaagcctatggcatcaaataccctgtttaatcttttcttccctcggcccccaaaggctgcggacaaagcattatctttagccttgctatatgccccaagtagtttgtcgctgatagcctcaatactttttagccaatcatcatttggctcatcaaaccggtctctgaacctgaaagtatattttagtcgaatcaacccaccttcagttgattcagtagtagtatccttcagcatatcctagttttccacaagtggccatactctgtacgctatgtgctcttgaacaatatcccttgtgctaatgaaggcacagacgttgctaaaatctttctggcaagcttcatcattctgatcaattaccaccttcggcctccaaaggccgaagcaagaccagat

SEQ ID NO: 5605 - DNA, 866 bp, Zea Mays
tgtaggccctccattttctggtcaatagagggaactcttcttcttccattgacagtcctccatggtagctcaccacccgcatgaggcgatctcgctggagaacaatgacgtggagcgctgatgccccaaaacctaaatagactagtgctaactacattggagatgctagcaaattcctagtggtgctcgctaccatagattaggcagcaggagaccatgcccacaatgggacacagttctatggtgtcggactttgccaatgagcacacatctcataacctagtgcacgacttcctactcaatcagacgctaatcgaatcggagaataaggcgcattgaatggaggccttacggagagtaatcgccgaggcaaggatatcaatcgcaatgctatgtggctcgatgacatcccaagaagtatgtcgaccaattatgagccacctcgtattcagcgccagtgcgccactcggtgaggccacggttgtcccccgtagcccgaagagtatccttggccggtcgccgaggccacaacgatggtgcaccgaagatttcaccccgcggcaaaacctccccttctcttcccctccaccttgctctcttgtttgttagacgacgatggaacgttagcgctggatggcgaagaggtcgcggccccctgacacttataccctgattaccaaagcctaacaatcatggtcagtttgtaacgactctggccggcatcccacaacggccgggttttgttgcgctagctccaagatcgaaggggaagaagcttctactaagcaaggcccgcttggcggcgaccaagtgatagctagcatgtgaggctgccatggggcccacttgtcagcgtcggacgtcac

SEQ ID NO: 5606 - DNA, 650 bp, Zea Mays
cgtcgcgtttcccgaatccctattccacgatcctaatggttccggggccatagtttgtgggtgctgtgatctgagcgccgccgtgggtattggggaggaaaacaaaggaatcaaccgcgacgaggtaaccaaatctgtggtcggtcggtcgggtggcttcgctgtgtcgcgctggtgctccgggagaactctagtggccttcgcggcgcagggattgcgccggtgctgctcttccgtcgttgaagcgggcctcttcgtggagtgggcgattgaccacaccgtcataggtaataacttcgccattcaattcgccgcaccttactggtcgattagcatctctcaggcattgtgacgacagtctaggaagcggattggcccttccgctggcgggtttgccgtcgggtgaacagggggtccgggcaagtgctatcgtgaggttgaggatgactttcctagcgtcggatcggaaacaggtggttgtgatccgtttgcggaagaacacgtggggggatctaatcgtgaccgaatatatgttatctgagggctgggagtttggcgctggcgtggttagatctcgggcatcaacctctagtccaacagctgtgggcgcataccggttcacgggatgaggagaactaatccagggcgtt

SEQ ID NO: 5607 - DNA, 510 bp, Zea Mays
gcctagacatgtttaatttggaaaatccacagtaaaggcagtggatctagttgtgatgaagaaactagggtattttggagagaatgatgacgacttagtttgctttgctagagaagaaataatctcgaagccgaaggaagaggaagttgtggtattcaagagcttcttcaagacgggattttggttccccctttacgagatgataggtgaagttttaaagaagtttgagatctatctccatcagctaaccccgaatgctattgtcatgctcagcgtttacatctaggctctatgaagccaaggaaagagcactaacgccgaagggttctgccgagttcatgagcttcattaccaaacaaaggcaagggctaatggtctacataaaaatttcgggtgctacaactttgcataccgaaaggatacgaaggccctggtgataggccaccgaaccaagtggcccactggttggacgagtgaatggttttatgataaggcagacaagaagaaaag

SEQ ID NO: 5608 - DNA, 414 bp, Zea Mays
ggtggaagctcaccatatctgcgtcttcttcctcagatccgtgggtgagacggcggcggctggatctagaagaggaggcgagacagggagtagcgtcttctttctcagcggtcaaccctcgaatccacgtcttcttcctcagaggcggtgggcgaggcaggtggcgacggcggtggctgagggctgtggcggctgaatcgaaagaaggagacgagacgggaagtggagctggagcctcggcgagtgttgcgtgtccggccttcggaggcgtgttttctccacccgtgaaaaccggtcccagcacaggtgatactttcccctcccgtgggcttccaaacgccacatagctcacacaggtattttcccacacgggtactggacgacatgggtttaccggttatgaggctcccaaac

SEQ ID NO: 5609 - DNA, 656 bp, Zea Mays
atccccctagccatgccccgcagcaaggggcgagtgggggcccgcgctcaagctctgcagtctgcaccgcgcagccgactcacgccagtacaagcccgcgctcaagctctgcaccaccaatgccgacgaaatcttgtaagaacatggcaatgtccagccggtctcgcctcgaatcctgggcgcatgtccagctgatctcacctccaatcctgggcacacgtccagccgatctcgcctccaatctcggccaccatcagcgcccgccgacaactcaccccaaaatcaagaatccgggatctccaatcccatcccgaacgccacccatcagcgtctaaccagccatgccccacctcgaatctccgaatcaccgtccagatgcgcagtcgcggtgatccctcgcgtccaatagcccgaccagccatgaaccctattctcttccccctctgcatcggccacgaccccagatttggcaatgcaccatgcctcccaatattcgcgcttcatctatcaaattcgtgcatgatctccgtcgccgatttggaaagcgtattgccaaacgattccaactcaaatccccaaatcgtgcacccaccaccattaccaaagtcccgattgtcatcctgctccatccatcctacagtgacaccaatactgcg

SEQ ID NO: 5610 - DNA, 277 bp, Zea Mays
cccaacctgcaggtacctctctatacggattactcactcggtccatctgtagctgtatgctgcaagcctgccttgtcttcttccatcacctccagcggcccagcgtgcacgcaaactcccacccactgatggctggccctaccgtcgctgccgccctacctcgtctcctcctacggcgacgagcacccccatacgcgctgccctgtctccccttcctgctgtgcgaaatcttgcgcccaaaacctaacttcctattcgtattcggatctgaattcaa

SEQ ID NO: 5611 - DNA, 279 bp, Zea Mays
ctcgagttaccaattagcagatatccgaggagaatgtcctgagtcgagttgatttgatgttgaggggtaaaatttcggatgttggtgctcctccttcttactctgcctggaatcttcccccaatggtaagtgctagcatgcacgagcttctgtattgtcaccctcaatgcttttaatgtgtcattccattgttgtagaggccctttttagagttcgtgtccaacccgcctgttcaagacgggagcccaggccatagagtgtgaccttcttcggatgaaa

SEQ ID NO: 5612 - DNA, 458 bp, Zea Mays
gcgaatgggtacctcagatctaatcggggccgttcctagtggatctgacggtgcacggtcctccccccaacggaacacccacgcacggcggcgccgccccgcacgctcggcagagcacgccggcgaggctgcaatcggccgttcccgagcgccatatacaaattgaaccgagctacacgtagaggaggacaacgcagagagtagggaggtgaatttaccgaggattgggtacacagtcgggctgaccacgacacgaggtggcttgacggcgttccgcccactccggtgatgaattgaggttgacgtggacccgaaccttgcacgccgagtgagtttacagctccgccaccccgagatgattatcccacgccacccaattggctcctaatgacggcgagacagcaaatcgactacggcggcgagcttcacccgtgcggaacccggcggcgttctctttc

SEQ ID NO: 5613 - DNA, 484 bp, Zea Mays
ctaaattttgtagtatattttgatctcaaccacaaccacaatggtctgaattcccatttgatacaagtaacttttgtatacacttctcacatatcagccactatgcctcacaattaacatataaacttgtggaatctaactaattaacatatattctctgaagattatagcaggaacacccttttgcttggatgaactgccttgtggttccaaaatataaattaggggcacatgggatgaggttctagcagcatcactaattaaactaaatattgtagtatattttgatctcaaccacaactacaatggtcgtaattcccatttgatacaagtaatttttgtatacacttctcatagatcagccactatgcctcacaattaacatataaacttgtggaatctaactaattaacatatattctctgaagattacagcaggaacacccttttgcttgaacgaactgtcttgtgtggttccaaaata

SEQ ID NO: 5614 - DNA, 1175 bp, Zea Mays
gtttaaaccctcaaaacccagtaacgtggttttagagagaatcagatgtggaggttgtgtcaaggagaagaaaattcatgaagggggtgtggttatcaattcatcagaatgagagttggtccatgttgcctctcattgattggataatttctatgtatctagaggtatgtcagaaatgtgaaaacaccttccataaataaggacgatgggatgcaccaaccagtcccctatgtagcttgtatttttgggggtaaacaattcattttcatatgttaggagatccgcagaagttttgatattaggaagtgtcgagggtgaataacataggtatatcatggattgtgattaagtaggtaatgacaagttaacaaacaatggagccccgtctaaaccttacaagatcaacacatttcaattgacccttgacccttgcaaacaatcctgcctcatgctcccgcctcgaccgacccctgaccccaaggggcgagggtggggtgggctatccccaagacccctacttgcctgacccttggccgcataaggggtcagagtatgaagccatgtcccgtaatgtccacatcgcctgatctaggggttgagggttgcgcctgatccatcgaatatggaattcacaaggttgcaccaatgaccattccaggtaagggtatgtgtgggtcagcctctaacacgagagtgtggacaagggggttggaatgttagtatgccggcccctaccaccacagaatggtccatagtaccaactcaaccaccttgtcccagaggagtcaaccaaggatagtagggcagtcattgtgagacaagacgacatgcaatgacgactgcaacatctctacaatattgtgatggaagggggaagagtcatctacaggattcctttggtcggcaagaatcctaaaggataagaagccatacaacaaggcctaaccaccacccattccgctcgacatgacttatgtaacaaaacctgccctctccttggtctgtaaaaggaaggacaggaccacgatcaagaacaacaggcaacccgctatcacaagtagccaagacacctataatcacacagatcacccccactcctctcactcgcttgttcattagagacttgggaactcgtccctctctcgactagtttgtaaccccctattatgactcat

SEQ ID NO: 5615 - DNA, 473 bp, Zea Mays
ttgtttatgaaggttgcgtataatatgacttcaggggtttgaacaacccaccacaatccacacgagtacaagctctagtgtctggtgtcaatgcgtgtgtggccatcagggctacgacaacacagccagccttcgtaattaatgcaacaagcacaattatggctcggtaatcggggtacacgataagtccacgtaatgtgcgcaacaggcgcaattgtgactcgatgatcacgggagacagacagtgcctgcagggcatgcgaaaaatacgcgactcggcaatgacggtccgactcaacgggagcgatccgactaagcaagagtgcgacatagcaatcacatgacgcaaccaagttcgaacgacataaatactgtgacgtgttgccagggcgcagccaatgcttagccaatgtcttaattcagccgattaataatgtaacatgatcgccacatctgtgtaccctctataccat

SEQ ID NO: 5616 - DNA, 471 bp, Zea Mays
ccaaatcctgccttctcacatcagcataactcttctgacggctctgagcggccaaaatattctgacgaatttcctgaaccttcttagaagtctgttgaacccaatcagaaccaaccagggatctctctcccaaagtctcctagcacagaggggagatacaccgcctgccatatagagcctcaaatggtgccatcttgatgctagcctggtagctgttgttataagcaaactctgacaatgcaagatgatcctcccagctacccttccatgacaaaacacaagcacgcaacatatcttccaaggtttggatcgtacgctccgactgaccatcagtatgagggtgaaaagcgacactaagtgaaagcttggtacccaatgcactatgaagactctcccagaatttggatacaaatttggagtctcgatcagaaacaatggacttaggtaccccgtgaagcctgactacttcct

SEQ ID NO: 5617 - DNA, 756 bp, Zea Mays
gcgtgcaggcacgcgacatcctatcgggaggcgagggggctccgatgaccaccagcgccaacctgatgaaccatccgcctcactgcctcgctccccgttgtaatgctctccgccgaccaccatctggccttggagcaccggtcccccgtgtgacatgatcctctgctcctaccgacctcaaccagtgggtgagcaacagattctcccttcccccgatctgatccaacaagatctcatggtggacactaccacgcacgtcaagtgagccatagattcttccttcctcatgctccatttactggaccattatccgatccagcatcatctcatggcagattctttggttattggtttgtttcgtgcagagctggaaggacgtcgaggggtcgctgtttgttgtcaggaggtgagggtttgtgttgggtttttttttggcttgcactcctatgcggtctggttctgtcaacaatgtgcttgattggtccaggaactctgagtcccgctttcagttcattgtcatgaacacgcacaacactggtacatcggcgatcactgcttggatcgatcacccgcggcgcctagacacgcatattgtcaaactgctattattctagagtataatcttgtcttgtttgccacctatttatcacttgagcatatacaatgaatgtttcttaagatgtcaatatttgcttataatatagtgacttcccagtttatgtttcagttttgtttcttgcttagtgaccaaaacaa

SEQ ID NO: 5618 - DNA, 641 bp, Zea Mays
ggtccctggggttttggctaactgaaaacgagttcctattactgtttcttgtgtcactgacagattgcagataagccctccaccttctatctcttcgcagaccaaagtccacgacggcgctcacacgcggagatactccagcgagcctctgtaccggtcgattggggcaacggcaaggttctccgagcaacagacatgaaattggggctaccttaatcatttccccccaacccaattgcatccaagaccaactaagaagctctggccacggtgaccgaggacaaggcggcaagatcgtcgtgttcccggcgatgggtggcggtctagttcaattgggcgggtctaagagctttaggagggcctagggatgctagaacaagcaacagagggacttggactgacctgagttgagctggccgcggcgagctgagttttgcggtggcggagagtcgacttgggggaaatgaacaattcgcggttgctggtggataattggaggcaagcgtgggtgcgttggcttcgtggtaacttggcgcaacagccccgaccatcaatttataggagggtaaagcggtggccagtgaatttggggaggacgcgcggcggccggaaatgaagaagaaggcgggcgcggtgaattc

SEQ ID NO: 5619 - DNA, 779 bp, Zea Mays
gcggggtgaaaagatctcgccgtagatgaagttggagcactgtggtcgctctgtcgcccatccacttgtgccacgacgtggccgcacggccatcgccggtgtgaccaccgtttactagaatcctccatgctactgaccctagtacctcgtcgcaaggtgtcgtgtgaattggtcagtcatcgtcttaagcctctatcccagtaaatgccacgttatgcgactccggtgactcacccctctctccggccaccagccttctccttcaaaatccggagccaccgccctcggacaatataaattgagggcgccgctagctccgctaggttgtaacgaagccagagcacctgcccttgcctccgattagccaccacagcgctctaattcctttcttcccccaattcggttctccgcatcaccgtgagccatcgcgtcgttgacctccgtttctaggtccgttcataccctccttgcccttgtttcagtacccttgtgtgctgtggatgcttatcggcctagccaattgaactagaccacgttagatcgccgggaacacctcgggttatcctcggtttgcgccatcaccgtgggtagagagattttaagctagaacttcgcaattggtaaagggattagggtcgcccaaggtagaattcgatgttgaccaagtaagaagcttagcctttgcgtattctggccggtacaagctcgccggagcaactgatccaccgtccgtggtcggggacctgaccttgcgaagaaacaaaaagggagcggcctcg

SEQ ID NO: 5620 - DNA, 669 bp, Zea Mays
cggatgtccagaaaatcagcgtgttcaactggctgcccatcaactttctgggatggccttagcctggtgggataccttcaacgtcaccatcagagatgctacctgggcagagtttgaagtgactttccgggagcaccatgtgccccaggggctcgtttagcttaaggaagacgagttccgagaactgactcaagacggaagatctgtcagcgaatatgtgcacaagttcacggagttagctcgctacgcgccagatgacgtcagtaccgagggcaagaagatggcccgtttcctgaagggactcaggctagaactcaagacaattctggctagccaagacttcctcagtttctctcacctttccaacaaggccatacaagttgaaagggcaaaggaggaagaaaaagggcatctcaaaagaaagttccaagtcctccgggctcagcagcaagaccggcaccagaagactcgatcatttggatttccacccaagggaccaaacttcagtagactagctggacccgccccgtctcggttcagtcagcagagtcagagctctttccatgccccctcagttgcaagcaaccaacccccggcgaatgcatgttggcactgcggtgatcctagtcacttcaagaacaactgtccgcagctgaagccaccaggacc

SEQ ID NO: 5621 - DNA, 576 bp, Zea Mays
ttgtgttcattcatttataacactgagtcattgagtcgtgctatgtcagccgactttacatgaataggcacaaaactatctcgctctacactgatgaaatcatatcctgacaaatctcttcctgtcaaacaccgcatattaccgtgctgccattccattggcgtttccatgagtgtgatacacatagcggtgtttgcttcaatcacctccacctgatcacctacccattgaaccaaaaactgatgcaaagtagatggcacacaaccattagcatgtatccagtctcgccctagcaaaacattatacctccctttcacatccaccacgaaaaggccgttgggacagttttgctgcccactgtgagttcaacagacataattccttttgcttgtgatggcctcccctgaaaacccacttagattcatatttgtcttaattagctcactctctttgtatcctaacttagaaaacacggatagcgacattacatttacacctgctcccccatcgaccaacatgccccccattggcttcccatcaatgtgaccacgaacatataatggtttcagatgagat

SEQ ID NO: 5622 - DNA, 511 bp, Zea Mays
tttgtaatgactgtcgctagagtgtgggtaccccctgcattttggtttagctgctaatgttaataaaattagttatttagttgggaaatatttttacctctacttttctctttatctgagaagctatttttgtctgtgttgggagtcggtgaagatgcttatttgttcagtgttgtggaagaactctatagccttttcttatgatgcaagatttgcaagatcagttctgatgtgtgattgcattccatagatgtcagacaataggcacagaggagggaggcgtgattagcaggagtagcaagcaccacaaaatgaggcacctcagcagcagttgacacccccgccctcgatgacaatagagcagatgtttctgatgcagactcaggtagtcaaggcgattggttagactctggccgccatgcagcaagtgcagcagcagcagcccccacctcaaccttagatgcaagtgcagataccttagatgcccagagataagcgtgcagaattcatg

SEQ ID NO: 5623 - DNA, 277 bp, Zea Mays
gatgatgatattcgtgattaaactggaagtcatgtgtttgcgtagtaaagctttgttttaagttgcaagcgatgcgggaaaggttttagtaaagatatatgtgaaatgtgaatgatttgttctgagtatgcggtatgtggtgtagtggtggtatgaaaaataggttagcacgcaattagctagttggcgagttcgattggaattgtttagttaatttggattgtaaggtgaagtgatggcatgacttcgtaaccatcacgccatcggttaaataact

SEQ ID NO: 5624 - DNA, 430 bp, Zea Mays
ggaaagtggaaaagctagcctccattttgcacgcgcgggatggggaggctgctagagtgttgaacagtgcaaaatggggattgaaagctgctggagttggtctagtaaggagcatcatatggatatccgtacgagtacaaaggagggtacaaataagtgaaaggttgagaagtatgagtgttggtggaagaagtgtcgtgattttggaaaccagggggcagtgagatttgtgttcgctgaagggattagtgtggacttacttcgaatggtgaatcacaaggactcgagcgtggatctaagacggtgggtttatactggtttaggcttgcgctatagtccggtgtagtgttgaccgtagtattgatatggagcgcgttacagtaggtgtgcttgtgtgtttagaaaaaaggggtccttccctttgatagtt

SEQ ID NO: 5625 - DNA, 569 bp, Zea Mays
ctacgacaccacaacaagccttcgtaataagcgcaacaggcacaattatgacttggtaattggggtacacgataagtccacgcaacgtgcgcaacaggcgcaattgtggctcaatgatcacggcagacagatagtgcctacagggcatgcgaaaaatacgcgactcagcgatggcggtctgactcaataggagtggtccgattaagtgagagtgcaacatagcaatcacatgacgcagccaagttcgtacgacacaaatactgtgtcgtgttgccagggcgcagtcaatattcagctaatgccataactcagccaataataacatagcctgatcagtgtgtccgagtacccactatacaaattaatcgttcgtcgtgagtctgatagctcaacgcaacacaaatatttaaagcggtaaaaaatacactgcataacctttaaatgcattttagtaattttctgctaattatctactacaggaaataaagtagagaaatggtactataattaatgcataagcataaatagaccaggcgcataaaaatatttttacatatttaaacatgcat

SEQ ID NO: 5626 - DNA, 692 bp, Zea Mays
gttgttgatcgattagaagtcttgtatgagcgttatcgcagcccaataattatgggaggcgagtagcgtccgtaagtcagtccttgttagaatcgaagaacaatccgataacatatgcacataagtgctttaggtccttcagtagccagtataagtcttatggagtttatgccatgttttaatgtctctatgttagaccccaacgatgtgttattttaggtaacttgtgtgtaactagtttaagttaagaaaaggttaagaaacattaagtaacctgctcccacccatgttttgagttgcaatgtctaaaatggttcgctaagtcttctactgtgattagccagctcatgttaaataggagtcgatttcgttaagtgtttgttatatatgtgttgtctcggattacgataataagaggcaagccgacgtgtaggatgtatagcggcctatgttgttgcgctagttagccgaattaatagatgtgtttgggtaaggtcgtagtcacggtgattacttgttgtagtctaaatgcgcatggttacgatcgcgggtaaaaatctgtagtgctcatgtggtgtctaaactaaaatgcgaactagtgggtgaaaagcgctttaatatacatgtatgccgaaattgatgattgtggtgaatgcgttgattaaatgtgtatgttagttctagcgcgcgat

SEQ ID NO: 5627 - DNA, 370 bp, Zea Mays
ccaacgacgctcccataacctgtatcagtgaacaacttcttcacagccaacttgctaggtgagcgcgacgatttagaagtgttgacgtatttattcacaaatggactgttatatagtaggcataagaaggagcacaatttttgctgataaaacttgcctcttcctataagcatattttcgttctttggtcgccataaccaactggcagaacttcagtactcctagaagcatgatgtagaggagcatcaatggtaggatgcctgctacaaacatgcctccatcagattagaaatagtactcccttgaacaacatcacatattcttttgagtaaaatggaagcacaagggaaatgagagaagaagggcttta

SEQ ID NO: 5628 - DNA, 342 bp, Zea Mays
tttgtaggttactaggcgaggaggcggactcgagctaacacaaggaagagtggcgccgaccgctgctcccctcgccaggcaaagcccgatgctgccgcatatcttgcgacacatagcgtggaccaccggggaaacccgatatcgacctctagagtgcaatgcgcctcatcattaactgcagacaagacgtatacctgcccactccagcgaagagcgctacgaccgaagcacacggactgcacagtggcttgcgcgttaccgaggcgggacctttgactctctgcaccgtgtgggctgctgccatcatgcccccactatagcgcgcgaggtaccaaggagaag

SEQ ID NO: 5629 - DNA, 1036 bp, Zea Mays
ggcgcagctgtggtattggggactgccagcaaacagttctgtcggtgatctgatggtgaaatttggggaccaagtcgttttacagtacagactggaactggacaagtaaactggggcctggaactgaaggggtcatgtccaccatgtctttgtagcatggacccccaaaatagaaagttatcctttttggccactacctgtccttccaaactaatgtctcccgttagtccttatttctagcagttcttgaagcaatacctcatatagcattttacctggatgatggtttatggctagcaatgacaaattagcatgggctaaggacttgaaaaacatgatgatgcaaggggatcttgcagatacttaacagagcagctaaaacagctaaaacagagtgtcctgtcaagttgctgcacatttcaataggtgatgtgtagcagagaaatggtgtggaccggtgcagacttgtcagagcaagagttttactgatctgatgtttgattgatgagcatgtatggcagcgagttcccaaacacagaaatctagtgaattaatgataacagaaattgaaactgctgcaacaatgatcctatttggcggcacatgataggtgtaatcgatcacattgggtcctgggtaccgtttcttggagagggtgatggcatagtactgcactactactgaccggtcatagcaaggcaatcgttttctgggtctgatgagtcattgatgaagtatgatcgcagcaggttctcaagcttgggaatccgacaatgtgtgtacataagccacaattctaaattggctgttggagggagaggttgatgtaacaaaatgtcagttagacagtaggagattattttccagacttctaatatatttaaattctgttaatatattctgcttgttgaacttaacaaaatcccttgaagttttattaatatcttggaaaatgcacctgtttaagtaatctttttcatgaatgctagcacctttgttcttctatatccccaattttggaaagcctcaacacaac

SEQ ID NO: 5630 - DNA, 790 bp, Zea Mays
tacgcaattctctatgataagatggggaacaaatctatcgcgcatagctaccttaagatcttcccaagtcgtaggtgctctaccatccacaactagaccagtccaccagacaatagcaaaatttttaaattcactagtggcttgtctaacttgatgtcgttcagctacaaggttggcagcaaatttctgttctatcgtcatctcccaatcaagatatccctcagcatcataatgacctgaaaaagatggtatagaaaatttaatcttagcataagggtagtcaggagcacgattgttattaccttgctggcggtgtggcataccttctgtgttttgatgaagacgatgacggaggcataaatctctagtggccgcttcatcataattaccttctttcatcaaacaccgcatcatcgggaagacgtggacgaggaggtggtggtggcggtgcttgtttgttgcgtctccaacacagtaagtctttcgacgatctaggacaatcgtcgatccagcctctcataagtcttgccaaggttcatgtcaatgaaggcatcatgcactgacttgtggaccgtctcctccatttgctccttcaggagcttgttgtttgcctcaagatcttggcggctaacacattcatcgaagtctgtagggatccttgcttcttcgtcgttgcctgccatcgaaacacaaaaacaggaaacaaacggtgacggttatccctaataatttcactacacgctcctctcaggtggaacacaggaacacgctctaatgtatcttaccaagc

SEQ ID NO: 5631 - DNA, 447 bp, Zea Mays
tggtgctcttgtgcgcggattctgtacctcgccggcgggagccgccgcgcgggctacgggcgccgccgtgctcagccagcagggtaggagaaggcctgctggccgttggatcggttaggggtgtctaggattagatcgggatggcggtaggatattgaccgcagatccgagaagtaacggtttagattagattatgtataccccttcgtccacatagaatctcggtcgtggatcactcgatcgacggttctggatgagcactgtttcattgaatcgacgaagttgatcgtggcccttgatttctaatcctgcggcgggggatccaccgtaacccttcgtcgtggcactttcgcaaatgagaccccgtagttttatagattgaacccgccgtccacccgtgacattggattgggtctcagatttcttgcgcaaaagtccctgtggttt

SEQ ID NO: 5632 - DNA, 479 bp, Zea Mays
gttcaatcgcccggtaccccgcttcgcctataagcatcgaccccacgaactcatccgctcgggcccctcttgtttttctgccaccgccactccacgccagctcttgcgccgccactacccacacggacaactcgccgccgccggtgaatcttatcacccttggttgtctgccctcggggttgggttgtggaggagcgtctacacccgtagtggtcgttcgtggcatctgtgagtggaatcgatcaccaggcaaccgagaattgctcgccgcacttcatcctccatcgcggaaccgtaccaccgcgtgggcagagaagtctccgccccaatccgagtaaaattacccccatcctccttggttccctctccgctacgtgtagcaccgtggggttcagagtttgtggcgctagtgtgcgggtttggagctccccaggcatggcgccgcagtgcgtgatggcgcaccgccgttctgccgctcc

SEQ ID NO: 5633 - DNA, 2160 bp, Zea Mays
tgtatgtacggacagacttttttttggaccaagagcaccaataatctctaatgttttatcacaggggaacttcaaggcagcctcagtgcctcacaatgttcatcctcatctttatcgtcaaaacctcctatctagcaaccacatgtctggtgccgttaactgaaacaccctatttcatctggtgcttcatgtcattgcaacatgtacaatgcggcgagtggcgaccctgaaacaaccatgcgcttccatgccaactttgctactggaaagccttaagcctccaatgacatcaaaagattggggtcggccaactttatcttgaccagtagccaactttatctagcaaccacatatgtctggtgtcgttaactgaaacacccgcttcatgtcattgcaacatgtacaatgcggcgagtggtgaccctgaaacaactttgctactggaaagccttaagcctacgatgacatcaaaagattggggtcggtcaactttatcttgaccagtggctactaattgacatgatccaggctttgtctatgtttgaacttaggcaaaattgaaaatggaatattagcaaaacggttcttagagaatagtgctattgaggcaaatctgcctgtaacttatagcaacacggtaagactagatgtgatgccaacaagtcactgatagtagtagtagtatcactaagaactttgatgggtgtagcactgtagcattcattatgaatgtgatagtacctattcgataccaaaaaaatcacagatgttgaagtttgcatttttttttgttctatatgtaggtatacattcgccaccatgatcgtcgaaatatttacaggaccagttaggtatccagaataatattgtttactttttatcaaaacttactagttgaaagaccagtgatcaccatgccacatttaagtggttgatgaaaatgaaattaagaatttgactaatgctacagcctacagcaacacagttgggtacaatattttcgttttgtatggattttattattaatacagaaataatcagtgtcatagagtaaaagagtaatgccacatgcaatttatacaccctggcaacatgtccaaacacttatgcaggagaagatactaggttgtggcaagcaataactaatttcatcatttcattattgtcctgctcgcaagagtagcgagcagaacgttacatgtgccatgacttccggggcctattagctaacttctagctaacgtattcagtaagagttgatagatagtgttcagtttccaggtaccataatcaattcacacgaccagcagctgcacccaatttgccgttttttagtttggtcggctaactgatatcctaagaatgtcccacccaattcacacgaccagcagctgcacccaatttgccatttttaagctcggtcagctaactcatatcctaagaatgtcccacccaattcacacgaccagcagctgcacccaatttgacatttttaagctcggtcagctaactgatatcctaagaatgtctcaccccattcctacacgacgcgccaaatccagcgaagtctagtataacatcagttcaagcactaggtacagcatctgcaaactgcatcacgtccattacccggtccttgggtcgccagttggagacgaggccgctggtagagagcgcggcggtggtagcttcgtcgatcccctcgtggcgatagtcgcacagcacgaccacctggggcaggtacgcctcggacgccggcttctccacctcggggacctccaacccgttcttgggctccggcccgctggcgacggggaggtcatccgcgacgtggttctggtggtggttgtggtggtgatggggtagcggcggcaccggggccaatgacggcgacggcgaggacgaggagtggccgaacctggacgccatgagatctcccaatgccatcgacgtttgctgggttggtgggggaggggtttagggttagggtttagatgcggctgggaggatggagagagggggggtgtaggtaggtgggaggagaagcggcgtctcggactctcggtgcgggaggaagcaggcgacgccgagcaaggagagcgattgacgacgagaaagtaaaataaaactgctataaaactaaaactagtagcttactcg

SEQ ID NO: 5634 - DNA, 1015 bp, Zea Mays
tgcgcagagaccctcggggatttgaataaccagtaaagaaccctttagcactatttcactgtctctctgacatttacacaacacccctcgcacttctgtttcttctccaaaccgaaccctggcaacggcacgctcgccgtcggccatctcttcgcgtgaactcgccccaaattgcgatgactgactaaatcaagtgttgcactagcatccctgatcccaggcaaacctagttcatcccctaattgaggtagtccgacccagaatcccctctgctcacgatgacgacaagtaccgagggaagatcgagctgttcccggcgacaaggtacggtagcgttcaatttctaagtacggggagcatcactacaccctaaggaagctagaacaaacggtaattgggctggaactacctcaggcgacgctggccacggaagagctatccacggcggcgcggagaacaaatttgggggaaaacccgaattaaagcactatggtggacgatcggcggcgagggcgggtgctttggcttcgtgacaacctaacagagctaacgacacactcaatttatagtgtccgagagcagtggctccgaactttgaaagggaaggctggcggtcgaagagaggggtgagtcaccggcgcaggttatcgtggctttcaccgtggcaaagcctcctgcgatggacggacttactgctatggttcactgcaacgtgttaaagatactatgcacgtggtgcatggacggtaagcagccaacgcaagcgaggatcatctcggtcggccgcagaccaagtgggtacggcgactgggcggcttgatccatccccctttcagatgttttacccctccgtgactatcccctcatcagagagcacgaatcgtagcaccggcgcagatcacggcttgtgggtcaccagtggcgaggtgggatgaatctgaagatcttttcgtgcactgtaccatggccatcttcttcagtcgttcagacaacccgagttgaggaacaattttct

SEQ ID NO: 5635 - DNA, 1168 bp, Zea Mays
gctcgctttgctttctacaagatcacaaaaaacataactggactccagaagttgacatcagccatgagttatcaaactaaccatggaaataaaatgtaggaataatgtacctttttcactcggtccaaatcaccacctgtggcaaaagtctccttgccaaggtcatccactgtaactgctgaaagctttgaaagtaccagacctgctgcaaaagggtggccaggattgctacaggaaacaagtcatggtgctcttatactccttaacaatatgcatcctaaaggataaatgcactgagcagaactgaattacctctctacgtcttcgtatctgatatgaatattgccaatggataacttgatatttccaattacagtgccaatgaaagaccctagccatgatgaactcttcaaaaaagggggggaaatcataatgagaaatgaaaaggtatctaagatgattggatccaaaccgcacggcagcaagtaaaaaatatagggaaggttgatattacagtattggcacatactagttcagatttcagttgctgttggcgctccaacaatttgatctccatttcctgtggaaacaaaaaaaaaatcactttgtgcatggatccaacattaattgcaaaaatcacttagctatcatcagaagtttattaccctaactcgacttctttttgcttcctggacagcatcctcgctgcaaccttcaacttgtgttgctggttcagctagtataaaaattcgatcaagataaaccaaaactggctcttgtcccaacctgctccatggaacctaacaatcattgacacaaacatccttgaactcattcctccccgttacaaaaaatcacaaatacacaaaaacaaattccgtatatgtactaaaccaaagaaattactactccaaaccttgagcttcacagaaccaagaaagccagctttgactctaacaggtaatttcaatgaattgagagcttctggcttcagttgcatgtttgtgagctctacatcacctgaaacaatgtttcagaagatagaacatcattaagtaacagaagatacaaacagtgtcaatcaggggcagatctagtattctctcatgccccgggccaagactactaaattttcttctcttccttttgtcttaatttttttcaactg

SEQ ID NO: 5636 - DNA, 987 bp, Zea Mays
cttattcaattcagacttcagataatctgacaaaccattagagtgatcaaactcatttatagagatgtaaaaggttcggatacggatggatacctacggatatgaatagttgaatacagataggttttttatcagattcggatacagatagtgtcagctgtgtaggataagataagaatggatattaacatcatatatatctggctttgagtatccgaatacggaacggtacctttagcccttcaatcggacagtcagtcaggaatatccatataccatttacaacccctacccatttgtacaacaaatatgccgaagtgctattttagcgtcttgtaagcagcctctccacatttgtgtgtgtgtgtgtgtgtgtgttggggggagggggcttgcttcgtttatccttttccagaccccactcatgtgggagcctctagcactagatctatccttttatcacatgtagaactgtagaagataataatcgacttttaaaaataataatttgtttggactattattaagaacaactccagacttcccagaggtttcaatcaagttaacatggtcatcacctactagtagttggcatatacccttatacatactaaaaatgtacaattcaaaactgttcgaagaactaatgatgggataaactatcacctgggatgtttgacaccaattcaagaactagcaacggttaactgctactgatttttcactccttcgcccatcctattgcagtaggaattattagcacaaaatccatgcatttccttttctgtgagcaccgacaatcaccattccaatgtaacagttagataagacggcaaaggctgtttattttgtaattagcgtccgttgtcgcatcccggtttccaaatggaatttcggttcacttgtctgtgtggttgtaaatgtagctctcaagcatcaactagcaaagtagtcatcacccgatggtgggtgagttttcagcatatc

SEQ ID NO: 5637 - DNA, 856 bp, Zea Mays
gggttcctctgtctgacactatcttcctttggatgacatggagttggactatctctttaagataaatccgtgcaagggtggctcctccaaaggtagttttcacagggatgaagtgggctaccttggtaagacggtctattattacccagatagagtcgttccctttttgcgtctggggtagtccggttacaaaatccatgcctatctcctcccacttccattcgggcactggaaggggttgcaataggcctgcaggcttctagtgctcggctttcgttcgttggcaagtgtcacaccgggccacatactgtgctatctctttctttatccctctccaccagtatctggttttgaggtctaggtacatcttggtggttcctgggtggatggagtaggctgagttgtgagcttcatcgagcaggacttcttgtgcctccccttttggtacacacagacggttcttgaaccaaaggactccttgttcatctgtcctgaggtccggaagttgctctttgtgagctttttccataagtcttgttgtctctgagtccaggcattgaactttgcatatgaggtcttctagcattggtttgacttctaggctgccgttgtttcccaaacatgcatttatctgagctaattccttcttccaatcttctaaaaagttggttccctttatcccgaaaggttttcggctgagggcgtctgctaccacgttggcctttccggggtgataatgaatctcaaggtcataatctttgatcagttccagccatcttctctgacggaggttgagatctggttgagtgaagatatacttcagactcttgtgatcggtgaagatgtgacatttgtt

SEQ ID NO: 5638 - DNA, 380 bp, Zea Mays
gagggtccggctgcacccttgggcgacttttgcacgggtagtcttttggagaagacttcgattttgcgcacttattgtgctattccggctgcacccgtaggcgacttttgcatgggtaatcttttggagaagacttcgattttgcgcacttattgtgctattccggcttcacccgtaggtgacttttgcacggagtgtcgcacgcgagggtagttagcgctgcccctcgcgatgactttggtgtggtcgaatgccgaagaccatcgatgcggtctttttcgacattggcttagttttttgcgggggatttttgcttgtatattacatggcgccgcctcattaaaaacctcacccccctgggaggaaaagagtgcgggccg

SEQ ID NO: 5639 - DNA, 318 bp, Zea Mays
tgaagtcatatttgatatatagaaaccgtagtgatgtatgggcaagttcttgcgtacactatatgtagcattttactgtagctacagaaggacaccgagaaccatagtttgcagcactatcgttccctctgttgccttaccctgagggttaccacactacagtgcagatagcctgagcatgtttgcccaacagggctagttgtcaggaagcaatcattgagtattgttgctgaccagcgagcattttttgtgtgtttctgagctccagttagcatcgtccctgtgttccccgcacgtcagcgaaatatttaaaaagtg

SEQ ID NO: 5640 - DNA, 502 bp, Zea Mays
atggtcaataccaggaagggtggtggaattgatctacctcccaatcaacacactcggaggatatttagacaaccacaacaacaacctgagatggatcctccatagcctccaccagccggagctgacccagatgttgcagcacagatgaggataatgcaacagatggctgacaccatggcggatatgcacgcgcagatatggcaagaacgccaagatatgcgccaagagtgagaggatatatgccaggagatgcgcccagagcgagaggagatacgctaggagagaagggcataacagcagcaacaacaacaacaagcaccactgtgtccacctccaccaccagtcccaccccgggacatgcaccgggagttcatgagccataagccaccgacattctccagttctcctgatccactggacgctgatgattggctaaagtctatggagaagatgttgattattgcccaatgctctgaccgggagaaggttctctatgcttctg

SEQ ID NO: 5641 - DNA, 374 bp, Zea Mays
gatgaagcctgcaccctaaccagaagtctgctcctatttacacgtagccctaaacccttacgaacaggttaaccatctactaacttaaacctcattgtgtcaagggcgttaagccctcgagcagctggaccgcagctacgtagctcgtatccgccgtccatctttttcggcgaggtattcctccgccgtaggcttagagagtacatggagatgggagattaaggtgatatatttcttattcccttcattgcctcacggttccatataaataggccactggcctgaccaactaggtaacttctaatttaggaaatgacttatttggaaaccaactcccctacaattaaggcctatcaatttggccactaatctag

SEQ ID NO: 5642 - DNA, 555 bp, Zea Mays
gtattactggtgtggtggccggaatcgagtgtcggacctcgtgctccgccgcacaccgtgggcgctgattatcgtcgcttctttctcgggtatgtagctccaatcgtgttcgccacattccgtactacgcatactcgtcgccaattggattttggccgccggattgcgcttgggtgaagatccggcaatggcgccgccctggtgggcattgcaccgccgtgttccaggcgggtttggggcggagcgatggtggtcgttggtcctctaagcgacggccgagatagggccaaggcccccccttcgtgtaatgagaccgggaccgtcgatcgtagatcgggtggttgcaaacgcgtgcgcgttagtatataaagatgagatctaatctgagccgtccatactagatcgtgtggcccaaatgtgtggataccccttcggcctgcactttttctaaagagcccctggagtcctaagcaatcaacccggggtccagtatcactattgtctgagtctcgggctactttccaggaagcccctgtgttttacagaaattggcgc

SEQ ID NO: 5643 - DNA, 664 bp, Zea Mays
aaaatcgcgaataacttaataatttgttaagtcattccacccgggtgggtgatcatcacctaaagtgacaaacaacatctctctctatctatcatgcacatgtcctaaaataggacaactaaaaccaactaaagtcagcaacatatgtatgatttgaaactcttctctgatcttatatgaattagcggtgctcctgcttttttttcaaaaaaaaggactttgacatgctatcgatgtatggccgagcatgcccttgtagtagttatttggtagcatgccttatatgaccaagtagtaggtgtacatgtagttgtacaaaacttcttgtaatagtgtaaaccatatatgcaagcatatggagcagctgcatccttagatcaagcagcatcactagtgttcatgtgtgtgctctctgatctcccctttacttttacccccagctgtgttagtgggtaaattaacaaagctggtactaaagccacagttgggcggtcatcggcattgttaggccaacaccctctcccccgtcaaccaccgcaacgataaccgtttgtggtgcataggacggtaatggaggttggaggaggaagtgcccagtaccccacgcttacccgcatcaactatggtgaccagtcggtgttcatgaaggtgatactccaagatg

SEQ ID NO: 5644 - DNA, 500 bp, Zea Mays
aggacagccaacgcatagctgaattgtcagctgacgtcagccgcttgcaatatgagatatcagaacgggattcggccattgattgggccgtcaactcgcattcgatcgcttgggaccgcgaagcaaaagctcgagctcgtgtggcagagcttagtgcggccctcgacagcttgcgagtgtactgtaatactttacatgaagaagtacatgtactgtatgctcgactgcacctggacgtgccttccgccgctgctgcaatggcagccggaccttcaggaacagcaaatgaaggacctgatgaggagttggacctttttcggccccctccttccatgaaccttcctgatgaacggtctcctgcagcaggaaatgaagcaactaaggatgacgaagactagaatagcatagtttagatgttataattatgtaaaataagtactgaagtcaagttgtacgctggagtctgtataattattacattttggtaatgtaatatgatg

SEQ ID NO: 5645 - DNA, 300 bp, Zea Mays
aacttttctgcagatacactaactatgaaatgaatagttcatgtagtcgcgtactaatgagtgaatgagtatgccaccgcttatgacgcgcatgcatcatggaattaaaaatcattctgatcatttattgcattatctccccttggaagtatggatagaggttttgtttacttcattagataactaaaattctttcccaaattctcacgagagtataaccttgtaacagatggcccgtcacaggatcaccacccgtaagtccacaggaggacgtgttcctcatcactagcttgttgcgag

SEQ ID NO: 5646 - DNA, 843 bp, Zea Mays
atttgggtagaaaagatcatcaccccgtgcgctggacaccactccggtgactcaccgtcgaacccctttgctttacggctttgggagataggttcaccggcgatggccaactgctggtcttgtgccgcgtgctcgggtacccccgtcgcgtcaccgtgactctctatagatgtcttatcgtcgccggtgaagttgccacgacggtcgacacaaattcgcgacgtcggtattcttccttatctctggccgcctgcgttgttcgaccaaattgtgcgccaccgtcgaagctccctataaattgaaggccgggactgctgcgctaggtcatcgtgaagccgacgcacccgttcttcccctcaattacccaccgtagccggaaaattccccttttcccccaaactggtctccgccaccgcgaagaacagctccactgtggccagcccattctggtaaggcaccgtccaattcgcgcattgttctcatgtctctgtatgctggtgatgctttccaacccgtccaattgaattaggtcgccacccattgccgggaacacgagcaaaagtccttagccttcactgttctcgtgggcagggcggagtaggtcaccaaccatgcaattaacttagggaaaatgctcggagtaggtctgatttggtgtccaccgctcgggaacgccagtcattgccccgttaggccggcctgctagctcgccggagctccaccgcgctcaccgtcgtcgtggacctccccctgcgaagaactagaatatggagggtttatgtgcaaactgttagtgacacaatgaaatagtaaaagaacccgttcccagttagccaaaacccc

SEQ ID NO: 5647 - DNA, 892 bp, Zea Mays
aggagctagcactaaattcatcgcacactggaatgtagccgaagcgttagtgagtccgaaaggcatgactcaaaactggtagtggccctggtgagttttaaacgcagtcttaaactcttcggaggagcccatgcgcacctgatgataccccgaagtcaagtccagactagaaaagaattgagtgccagcaagctcatccaaaatctcctcgaccaccggcatcggaaatcgattcttgatggtcatatcatttaacttacggtaatccacacagaaccgccatgtaccatccttcttttgcactaaaaggaccagagaagcaaatgggctcacactgggggtgatcagtcctgacttcaataacgcagcaacttgcttctcaatctccgtcttatgatgaggagaatatttgtagggtcgagcgttgaccgggatagatctagggagcaaaggaatatgatggtcaaatggtcaagatggaggcaatcagttggtgtaacaaaaatgtcactgaattcccccaacagcacctgcaattctggatggacctctttgctgttctcctcacgcacctcctccaacaatgcaaacacccatatatcattccctcgcagccatttctccacctgtagagtagaaacttcctccacaacctgctattgtacagtattgcccaccaactgaacttccacacctttgtccacaaagctaataaccttatcatcccaatcacaatgcataggactgtgtcgacgcaaccaatcatagcccaaaatagcatcatatgcgcctagccccaacaccctcatatcactctgatatgtatgcccattagcccaccattccaatgatcataccatcgtgtcactatacataatctccccatttgcca

SEQ ID NO: 5648 - DNA, 472 bp, Zea Mays
gggcaaccaacaagccccagcagctgccaatccccgatagctcttgcttgtagaactcacgcttgtcaattgaggcgtgatagatctcgacctggacagaagctcagttatctgagagcgcacgactcaatgagggcctgagaagaagcagggaggaggagcagaggagttgctggcagcatcacgctcaaggagaataaggaaggagttcaggagacctataggctatagggctataggcaagtcgggggatggtaatttaggttggctagtggactggggcagccccttaagtctcctgccctctttctcctttttcttttttttttccttccttcatgctgctgccttcctgtttctcagattggtatacatcaccttgcgagtgtgtaggtgtcaccttaggtgattagaaggtggtccatcaccatgtctttccttattgccttaagaaccatgttgagaactgttt

SEQ ID NO: 5649 - DNA, 557 bp, Zea Mays
cgacggcaagggaaggaagggcactggctctgaccgcgtttcggcgcggagattccgctgtgattgcgactttgtgccggtcaacggagtccgccacaacaccgtgtgagcgcatcagtgtcggccgcaagggaaggaaggaaacctcgttggggcagtccctcgcagccgtggacgctcgccgtcatccacctagcaatcgactccacccccgttccggactctcggtaagcgtcactctttgtacgtagtcgttcctttactgagcgggcttcatggccggtgtgaggttagacgagagaacagagtgagagataggagagagaaagggatgcaggagcgtcgtcgcgcctggcagctgagggaggaagaaaggctccctgtcgttcgatcgtgaacggacgatggagattagaagggatgtagtgattcggcttggtgattcgcgtcccttggatcccagatgtgtgggccgtccttcataaaatctggagcgttgctccctgatctgaaggttaccacttcgtaccgattcgcttaagggatcaatctaatct

SEQ ID NO: 5650 - DNA, 548 bp, Zea Mays
caacagatcaatggtatccctagtaaaccataaacaaaaattggttcagcccatgttgacagtaaagtgcgcaagaaattgagtatcacattaccttggttgcactggatcttggaaccaaagacgaagaccccgagttgatacagaaatctgaaggcgacattggacaaacaattagttagtacgtcgatccatactcgttatgatgtactgaattaactggagatcagtcggccatggatgaagcctaaacaaatagtaaacggggcaggacgaaccctagcaacacgagaggagggggcggcgagggtcgggatcgaggcgagctacactgtacctgcaaagatgacaacgcgactagggggagcagaggaagcttcacgacggagcagcggcgccggtgtgggtgcggcaactctagtgacaataaagggtcaaggaacgaccacggcggcggtggtcaatgagagggtctggatggaggagagagcccgtacctgcgaagacgaagaaggggggagaggttccttcgcgacggggctgcggcg

SEQ ID NO: 5651 - DNA, 590 bp, Zea Mays
ttattcataagacatgttttcttacaaataaataccaaatacaaacatatgaactcgtgcatcatgttggacttcctttgtttgtgcataaaaactcaaacaattaagtaaaataagaataacttcaaaagccagtttaaggttttaaaatatgggagcaaaggaattgaagaatgaagaaaaataataataatattaataacactagtaagattgggggcaaaaccttggtagtattattcatattagagtgctattaagatttgagaatttgggatttaaactagcaattcaaatatctttttgaattattgaatttgggaaaataggagaaattgaggaagggaatagaaaaggaaaaggtgagaggcgagaccagcttttgagccaaaactcacctaacttggcctagtaaacaacaccgctaggccacttggtgctctgcgctcgtgtctgacggccactagcgggcggaccccacgctgtcagccataatagcgtgcgcattagcaacctcaccacgccgccaggtgggctcggttgtcagccgtcgtccccaaacagaataccgcaactaacgccatgcccgc

SEQ ID NO: 5652 - DNA, 737 bp, Zea Mays
gttggaactcatcaaggacaatgatttggaagtgcattaccaacctggcaaagccaatgttgtggcagatgccttaagtcggaaggtccagtgcaactgtgtgagtatggatgcaaaaatcaccaccctgtgtgatgagttatgcaagctgaacatagaagttgtttcctctggtgccttaagttatatttcagtggagcccaccttacatgagcaaatagtcatggcacagattggtgacaagggtgttcaagtcattaaggaaatgattgaacaaaaggtggacaaatacaaatgcttccgtcaggacagcaaaggaattctatggtttggagaccgattggttgttcccaagaacctcgagcttagaaagaaaatattggatgaagctcacctttccaaattctccatgcaccccggcagtaacaagatgtatcatgatctcagatctttatactggtggaccagaatgaagagggaaattgctaagtatatatctgaatgtgacacttgccagagagtcaaggccagtcatttgaaggtagcaggcaccttacagccccttcccataccatcttggaaatgggaggagatttgcatggattttatcgtgggattgcccaatacctcccggcaccacgattctatttgggtcattgtggatagattgaccaagacggctcatttcttgccagttcataccacccacaagacagagaaatatgcagaaatctatg

SEQ ID NO: 5653 - DNA, 387 bp, Zea Mays
aaataattgagccaccttaagagcagtgaatgggtgcgacaagggaataaaatgagcatatttgaagaacaaatcaaccaccaccagcacagtattagcaccaccagatcgaggaagaccctctataaaatccatactgacaatctgccaggcatgttcaggtaccggcaaaggctgcaaaagccctgggtagcgattcctgtctggcttagcttgttggcagactgcacaattcatgacataagacttgatttgagttttcattctagcccaagcaaacaactgtttgatacgacgatatgtcactggaaaacccgaatgtgcacccattggactgtcatgtaaggctctaatcacctggagttgcaaggtctcattagcccccag

SEQ ID NO: 5654 - DNA, 433 bp, Zea Mays
ttgcgacacgggggctgggtcccacacgtcatgagagccgacccgaaacgagaaggaggcaaaccgccgcacgtgaagcatgtaaccgccctgcggttataagcgttccctcatcctcgccgaaaccagcggacgaaagggtgagccgccacgcagggagcatgcaaccgcaccgcggttatgcaccctttcggctttgtcacatccgatggaccagcacgggggcccagtcccacatatcatgtaaccggtgtgactgtcactacgtgcaaggaaaccgcaccgccacctgtgtcaatgttgcgtctcctcgactgcggaaccaatgcctcgactcgaggcagccccgctcgtgacccaatagtgctaattaagtgcaatgatcacaggttagtcagccgcgggggtaggcgcagcagttgatatggccaaa

SEQ ID NO: 5655 - DNA, 367 bp, Zea Mays
cgcgattgtgccacgcccccggcctttaaccacgtcgctactagccgcaccagatcgccgataaccgccgtagcccctcagccagtgagtgccacggtttcacccacgccagtaaccttcttcctctccggccgccgcgcgtctcctttaaattcactggccaccgctcaagcgtgctataaattgagtgcacccgtggctccgttaggtaattacgcatccattgcaccagtccttgccccggattatccaccagagcctcccaatttctctcttcccccaatttggttctccacgccgtagtgtctaggctcaccgtggtcagcgtactccaggtctgttcgtgctctctgccctcttatttcag

SEQ ID NO: 5656 - DNA, 591 bp, Zea Mays
gtatagagacccttgtactgaaccttcagatatgtttcagcaatttgtgctgtgtacatgcctaacttgtcgcctgacaaaaaaagggtactcgcgcgaaatacggccgtagacctcctaacagcaaatcagtcatttgggcgaaggcgcactgaccgtacgtagccatcgtctactagcccacatggcactgagggccagcaagattctcagttttctcatgctctcctcctgcacgcattgctcattgctgtggggagggagcagcaaagctacagtgctgaccacatccctctgttcatgatcatgtgaggactccatcatgcattagcagggtagaggacgaggccggcagtgtgactgtcctggtggtttccataccagggtacgcttggctggcagggcaagcccccccctacctggcctggccattgccggccctgcctgcccatgaacaaaatggggatgtgttggtgttggttggacttgggactcgcttttcctccgacaaataaaatcatggcgacgcattagcaggatgcgtctctttggttggttggctgttcctccagttcttccatgtactgcagc

SEQ ID NO: 5657 - DNA, 1007 bp, Zea Mays
ccctgaagttctatttcttcacccgatacgcccacgacgccgttcacgcacggccgcgctccggcgaggtcctagaccggccgattggagctacggctgggttctccgagcggcggacatgaaattggggctagcctaaccatttcccctaactcaatttgaagaatggcactctactttgccctgtccacggtgaccgagaaatattacagagggatgaaggtgttcccggcgagcggcggtgatctagttcaattggacggttcgaggagttcacggggtgtctacgggtgctagaacaagcaacagaaggacacgaactaaccggaatcgagctggccgcggcgagctgttcttcacggcggcggagaccggatttggggagaatgggaaattcgcgcgtgctggtggaggattgagggtgggagcgggtgcaatagctgcttggatacatggcggagctaggggtacggtcaatttatagcgcctgcaggcggtggtgctcaatttggccgagccacgcggcggtcggaggggaagaagaaacacttgccgcgtgagttcgtggccaacggcgtggcagtaactccggtgagccacggagacttcagagaaggtcacggcgacacggtaaaagagttgagccacgcggcgcacggccgggaggcggcggtcaccggcgaggtaatccactcggccgcaaagagggagagagagccacggaggtcaccggagtgatcgccagcgcacgggcggtgaagatcttttaccccgcgaagttatccattagttacgagcgcgaatccgacggcggcagcacgaatcacggtggaggaagccgtcggcggtgaggacagctgcgctggcggtctgatcctttcaggttactgtaccatggagcatcggcttcagtcgcctgacagacaaggtttaggaccaaatctctctaaagtttctctagtaactcactccactctctgtagcaaagtttcaaagctacaaaccag

SEQ ID NO: 5658 - DNA, 413 bp, Zea Mays
ggcgggagtgggagcagtggaagctagagtagtggaggtggtggacacaatgggtgtgtggatgactcgtgagcaacatgagttggtgaagtgtgaggtggagtggaaactaggccggaaggagtggggcgagcagtgaggagcgaggctgggacacgaggcgatgaacatggtaggaaatctgatcaaaagaaatccgtagctgacctccctgttcagcctgatctattgctgctgctgctgcaagtgctgcatgggcggctctgtccagatgcctcttctttctgccctcttgctgctcaagatagacagtcttgcccttgacctatctgaaggggcaaggagggtcctcgtcatctcctccccctaacaatgtgacattcttcatccgcaccatcctgaactgactactg

SEQ ID NO: 5659 - DNA, 361 bp, Zea Mays
tggtacaccaccgcatacgatttctaccttgtgggatcggacaaccataatcgttgagtacctaagcatcagagtcgccacagtaactcgcataccaggaaagacgggagaatgcaccatattgggtgtatgcctacgcacaccagggggtgatgcggggtccattacgaaaggcgagaccgggccacatacaactataccatgagactaccccatgggacccaccaagctccactacaaggacaataacatcagactcactatagggacccgtatgacggacgaacaaagcggtatgccacgttaggggtacgactacacatgaccctacagatgctgtcagaggcacaacgtcaaccgg

SEQ ID NO: 5660 - DNA, 947 bp, Zea Mays
tggggttttgcttccgaaagagctctgctcttggcggattgctgcggtgtcaccgttccgacagaggatactcatgaattcgtcgtttacattccttttctcattcgctggcttgctcttcccatctcccctttctttcgtggtctccttgatttctatgagttgaacttgacgcatctaaaccgtaattccattctgcaagtttccattttcgtacatctgtgcgaggcctttctcgggattctcccccacttcgatctctggtaatatctttatcactgtcggtccgggatggctgggggacaacactggcttgttggtgatgcaagtctagagcttcgctggcggaggaaagcagagtaccttgacattcctcttaaggacaatatcaaggggtggcgcctggagtggttcatcatggaaaacccctgcaaatctctcccccctcggtcgggcaggcaaccaaatgtccgcacacctagctggatagaatctccgacctcttcggagataacagaggccaaagtactgcttgctgagatctgctcgctgaaggatgggggtctaactgctgaagctgtagttgctgatttcgttttcaagaacatccaacccttgaaggacagagtttaccccgcttacttatatagcggcgtcaatgattccacccgggttatgaataggaggattcccactgaagatttgctgagccgattcgacatgattttgaggggcagagtctcaaatgctggtgctcctgtggcatactctacgtggaacctgccaccacataggccattctctgaattcgtctccaatcctcctgctcgtgacggtagcctgggccatagagtgcgaccctctcctaaggacatcgaggctttgattgctcctctttggagccttcctgaggatgagaggcagactcactttgagatgccagccaa

SEQ ID NO: 5661 - DNA, 369 bp, Zea Mays
taggagcagcatactgctagtagaaggtattggaactataatggtagaactgctaccacatcataatggatatagactatacatttttgtcttatgattacaaggcactagaacgatctattagtgtgcatatgtggattagaaccaattaatggaagcaaacacttgtagtttcttcaagctgggcatcaagcactgatgtaaacaaatgaaatggaataggttcatattgcagcaaacacctgcagctccaccttcgtttaaaaacatgtttacctttgatgcatttggtcgaacaccaggtgagcatgtcgtgcggtgctcgcgtggcttcacgttggggttcggcggcgtgcaacgcgtccttcg

SEQ ID NO: 5662 - DNA, 735 bp, Zea Mays
caaaatttcattacacatagcttcaatcatttccaaccattcctggcaaggctctttgaaatgtttcttgaatttgaagtgatagggcagtcgaacaagttcattctttttcttttctcctttaagcttcggcatattccattcctttaacgtcggaaatactctattggctaagtattcctacaccaaatctctagtaccaatatgctcagacacaactcgaaattcacccacagctgttcggcatggtgacccttgcagcatgtcgcacagggacctagttaacccgaaggttagatccagtgggctctgaactatcttctccttccccccatcaaccttaacacaaaaccactcattcttccagccggttggccatttggtgcgatagctgatcactggagtcttcatgtctttgcggtaagcaaagttgtagcagccgaaattatcgtgcaacccatcttctctagccttcgtctgatagtgaagctcgtgcacccggcagaaagcttcggcaagcaggttcactccttggcttcggagggcccagataaagacgctgagcctaacgatggcgttaggagtcagctgatgaagataaatttcgaaatctttcaaaacatccccaatcatttcatgcaaaggaaacctcaatcctgctttaaagaagcttctgtaaactaccacctcatcatttctggcttcggagtaatttcttccccgccaaaacgattc

SEQ ID NO: 5663 - DNA, 556 bp, Zea Mays
catgctgcagaagagagagtgataatagcttgtcagatggaggaagtagggaaggagatggctaggatgaggttggaagcaatggcaagagatatggagggtttatcaggaggatcgatagaggaggatggggaaaacagaaggagggtgccacaacctgaagaacgaagaggaatgcagggaggtgtgaatggaggaataagggaaaatcaaggttgggagatgggggagagggagacaaatcgacaagatgttctcaaactaaatttcccttgatttgatggaagagaaccagccatttgggtgatgagatgtgaggattacattgggttgtatcatgttctagatgctatgaaagttgttgcaacatctatgaacatggagggaactgcatcgaggtggttacaagtgcataggctgaaagggggtttgggaagttggaggagtttggcaaaggcagtggtggagaagtttggagcagaagcttatccaaaggctatgagaagatcgatgaatattaggcagacagtgggattagaggagtatatacaggaat

SEQ ID NO: 5664 - DNA, 777 bp, Zea Mays
ctgacccaaggtgacccaggaacaatcgtcaattttggcttgaacactttgagaacggcctgcccatgtgcacggcggaaaccgtgacatcaagctcacgttcccgctcaatcatgcccgaattggttaaacgggtgtcacaacaagcttcctgagtatgcagagctactaaaacaacaatcaagaagtgcagatccttacccgagtgctctggctacggagcgcggagacctgtgctcgctggtgacaaataaaggggaaaatggcgccgcgacggctctgggtggaattgggaggtgaaatcggggctacacggccgtaaggaactgtagtttcaccgtgcacactcaatttgggaagaggtggcagaggcagtgcgaattttggggctttgattaaactctcaggtggagatgtgagtacctcgccgtggatcacggtgctatttatagccacggcggtccggctagctatccacgaccacggataacctcgttagtgcatgcttaccacgtagtgaagagatacagtgaggaaggagcaaggcatgggcgacaccgcgacggatttgactgagtcacggtggccgctggtgattatctccggccacgcacgactgagctcgcggaattgcgccacgttcaacgttatccttcccgcgatcaaattcccaccatttcatctgagctcatctaattccgcagtgcggtagatcttttcccctgtgttcttcaaatatttcagtgcacgggatctttagaggtctcctgaaccgac

SEQ ID NO: 5665 - DNA, 437 bp, Zea Mays
gttgagcgaaggctattgcgacgcttggagttattcgaacttcgctggcatggtgaaggccactaagccttttgcccagaagctatgtgttgtctcgcccaaacgacgtagtggctcggtgccaggcatggttagtgcggctagttacttacaatgggtcagtttgggtccgggcacatgatcgactcgagtggtttccctccgacacaccgacccctcctatgaggtttgaccacacgcaaccctcggctcggtactgcagggttcaacagggggcgggttctttcacggttgacatatccatttcttctagttgatcaacgggccccaacgactagggtctcttccctcggcgtgctctcggactggcgagccctagagacaagggatcatatcctcgacccatacatacaaccttataattaaaaagaaaaaac

SEQ ID NO: 5666 - DNA, 826 bp, Zea Mays
cgtcggttatcggatcaggggcccatgtgtcatcaccttcctccacatgcctgagcgcggcgacgctcgaggccgcggttgtgcccccccccccgccgccggagctagccatttggcgaccagagacccgatcccgacgctcgactagcacaatgcaaacaggaggacatagcgaaccaattgaggtacatcataccggtgttgaagtaggcgatgaccactggccgcggtgcaggcaaatctgcggcaaaggtcgtactccggcgagaaatttgcccgagcaaacagtcagaagtccacccgaagatggtgctcgcgccttccccgatcgacggcgacactccacagccacacgcggacaccgtagatactgccggagtttacgcccacagcttccccttaccgccgacccgttcacccccagatattctctcactcggtcgtgattgtacgccagggattgcggagatggaagagaaggcaagccggaaccccgttgcatcatatagggatggcacggtcgagatggatcaacggactctcgcgttttgttcacgcggtgacatcggcacgagctccacagatctcggccaggttcggaatgccgcgaggaagtggggagttcgtttatacgttgacgcactgaccccactgggcagtgagacggtcatggagagcaagagtccgggcacgcgtgaggtctcggcggaagtgatagtcctgcggcgtagtgagcgcgagttctgttacggcgaaggggaagaagctgacaacctgggcccgcccgcaagtcgccaccatgcgcacaactggaatgtggccccca

SEQ ID NO: 5667 - DNA, 405 bp, Zea Mays
gtgaacccgccaccggtgatctccacaccgcgatccatgccggcgctgcgattcatgctcagtagcacgcgaataacttctagcggtgaaagatcttggtgttgagatgatctcgggccctgttgccgctcagttcgccatacccacttgcacggcgacgtggccggacgatcatcgctgtggtggccgccgttctttgcgattgcgccacgccgtgaccatttcaccacgtagctataaccgtggcaggcctagagttactacccttgagccgttgtactggggggtgccacgacgaactcatctagtgaaatatcccaccgccgccgtgatcgtcttcgtctcaaattggcaaagcacgtagccggttcctttaaattgagcactaccctcactcgcagttag

SEQ ID NO: 5668 - DNA, 691 bp, Zea Mays
aagagccgagctcgggcgaggcggaggtccgtccgaggttgtgaccgagccttgtcttgagacttgatgatgcttgccacagttgacgcagtggccttccatgggattcgcgggggagtaggtagccaaggcctaaattgggcgagtcggagcttgcgctcgaggttgagtttagtgtcgggcgagacggaactcgcgcccgaagtcttgttccgcgtcctatcgtattacacgtcccgttaggagctgtcaggcgacatgcgcacgcgtaatgatgtaggtgaatctttgacagcattgcggtcctgttgaaagattcacctgcaacttgatgtgaggtaggtgtgcgcattgaatgaggttgtctcctaatagaccttgggcaagctttgtctttatcgccagaggcgggctcagacgaggtggacatagccgccctagggtgagggagcttcggtcgggacagagattctcctgagcttccgtcctacccgagacaggcctcgggcaaggaggagttttgggaagacacctgagggggtcctcgggcgaggcggagttttggttccttgccctcggaggacgtatcttcacggagttcttaggattttaagcacgttttagagtgtaatctaggtacccctaattatcgtacccgacagtttggatggaataggaaaaacaaataaag

SEQ ID NO: 5669 - DNA, 555 bp, Zea Mays
ggagttcaagactgatcaggtgttatttgtacggtcttgtgaccaaccggggccatcttgtgaccttccacgaatggaccaatgcctcagagagaggttccccaagtatcgttccccgcgagtgagatctagggatcattagtgtttgactcaaaaaggcaccaacacactttttcatgccccctatcttctgatggagcttagcgaaccaaaagcacatggtactaccaaccactttagggaaacaatatattatatgtcggtttttcgaaccttgctccgacaagtaagtttatttgtgcgcgttctgggttgtagatggtgtgcccagtgggcgtgaggtttatactagtttgggcagaatgtcccttcatccagtctttggtggcttgcactaccgacacagttgttgctcaatgctcatagtagtggctacaagcgagggagagagggaagaagggctccaaagtctcttatgcatggctagacctaagggctacaagactagagctctctgcgctaagccttggatgtcgtggtggttcactcctcaac

SEQ ID NO: 5670 - DNA, 521 bp, Zea Mays
cgcgcggttgccggagaggaggaggggtacaggtgcacgtgattagtggctttcactgtggcagactcaccggtgacgagccagggctatagagcggtttatggtgactcactgcgacgtggtaaggctttgaggcacgcagtcgggccggataaccgcgaacgccggcgatgccagcgcgattgaacacggcgggacacgacggccggtgagaacagtggtcggaggttatctacaacgcgatatttcttaccgaggagcactttctgtgttcgaccgtgcgtgaatcgcgacgccagcgtggatctgggcacaagatcactggcggtgagggggggtgaacctgcgatctctttcagtcactgtacaatcaaaacgccattcagtctatctgatagggctatttgcagggcattaatctccgttttttgtgtaacaactagttaatctctctacaacaaagttctagccctataatctagctacaattcgaatgtggccactatcctcaatcgagcaac

SEQ ID NO: 5671 - DNA, 620 bp, Zea Mays
cttgttcggcatgatggtgcaaatcgttgagcaccaccgacacttcggaagatttcgtagtggaggaagaagctgcatcctccacaccacgagtacccgaccgccttgtgtctagggctgctgctgtacacgcagtacggcagcatacgcctgcacaggcgtcccggactccatcaagggcagcgcctacggcgttgtctacgaccagagagttgttgcgccaccctcctagctccacggcctcgccgggggcaatgaagcagtggcgtgacgacgtcgaccggctactcggcatggcgcattctacctcgactaggtccaggcctcggtcatcccagcaccaacgtgaggcgacgacgtctgtgcgctctccctcagtaaggggcgcacagaccgatgatcttcgggcagagcttaaccgcaggcgtgcgggagaggatgcctgggtcactctggagagggcgcgtgagtgctagcaaaacattgagggtcgtaacctcgatcgagacttcgctgcggtagcaccacagaccacggtgggcgcccgaattcaggcaggagtccccttggctggcgtaggctgcgccgcactggcagatcatctccgcgtggcatcctgg

SEQ ID NO: 5672 - DNA, 594 bp, Zea Mays
ttggaaccggaaatggctaagtgtgtgtgcctgtctaggtgtcctagacttgtgttcatcccaacgtggttggctttcattggcctccccctatgaagggtcccctctaccttttatagttcaagggagtgggggttacaagttatgttgggtcggtctggtagcttgaccccacctaatgtactttcgaaagtgtaaatgtccatctttgccccgtagaattgtcacccacacatcacagtggatgtcgttaccggatgtggcaggtgccgtccatgcgtgtgcgcacaatgccacactagcgccacacctaggatgctcaggcctaacagccagcatggagtaggctatgagcacggtcatgcatgtcccgtcgtataggcacaacaactctcttccaccaactccttgactaaccgtggcgtgggcagctagaaacatggagttcccagagccctttaggggcattgaggacctaagggcatatggtgcatcctattgtggttggtggagtggctctggcgagagaccccaaacacatggcacatcggaaccccattagggacaagggctaccagtgatgcatgtcacaac

SEQ ID NO: 5673 - DNA, 474 bp, Zea Mays
cgtgatacttgtatggttccctccttgcagtcatggcttcaggaacgtaaagtgatgattcaattggtgcaacagcagctccatcgggcacaacaacgccagaaacgtcaagcagacaaacataggactgaacgttctttcgaagtgggtgatctagtgtacctgaaacttcaaccttatgtgcagtcctctctgatcagaagagctaatcacaaacttgccttcaagttctttggtccgtatctagtgattgccaaagtggggtctgtcgcctataagctggacctgccggcttcttctcacatccatcctgtttttcatgtttccttgctgaagaaagcgctgggcccccaagaacaggtcagctctgagcttccttcattttcagatgctttacagtatccagaatctgtgttgcagcatagaatgcttcaccgtaagggcactcaagttcctcaactcctcatcaagtgg

SEQ ID NO: 5674 - DNA, 693 bp, Zea Mays
aattaggtccagtacccagcatgtgaaaggccaggtgactgaaatagtttgcaactgttgcgctagtaggtgttgctgtttggccaaaaattggtatgcttcacatctttggactatgtcagctacgtctttcttggctgttggccaatggaaaccggctctgaaagccttcctcacaagtgccctagatgttgcatgcactccacattgtcctgcatgaattttctccagcggacatctcccaacgcctgaatcaatgcatttcatgaagatccaacgaccccctcttgtacagtgctttccctatgactgcatagtgggctgactgcctcgcaaagcactcagcaacagccttgtcaactggttcttcctcattcttgatatatctgatgatcggtgccctccagtcacttgggtcaggttccgcctgctctattgcctcgcattcccccctgatcctgatgtgatactcggctgttgtttctcttgtatgaagatgcatggtggagcttgtgatcggcttcaacccaacttagatagaatacatgttgtcgcgttgcgatctctttctatgtggtagaactctaaacctttaaatttatctccaatcttcatgactgcaacacagtagtcacccattgaatcggtggagcaatatcattccttgttgacctggatgatgacaactaagga

SEQ ID NO: 5675 - DNA, 477 bp, Zea Mays
agttgagtgacctctgatacgatgaatggcccttcccatagcggtgacagcttgtgtcgtccttcccccgttagaattcggcgaaggaccaaatatcccactgtaaaggaccggtgttgcacaactttatcatgatagcgcctcaaggtttgctggtacctagccgactgaattactgtgtttaattgttcttcctccaacacatcgatatcttctagcctggtagcttcttcttcggctatgctttcgaaagtcacccttggcgccccgaatattaggtcagcgggcagcactgcctctgacccataaaccatgaagaacggggtatttccatgtagagctcgactgggttgagttctcaggctccaaaccacgtatagcagctctctgatccattttcctgcgagcttttcactcttgtcaaataccttctttctgagtgcttccagtatcattccattagctctttctacttgg

SEQ ID NO: 5676 - DNA, 288 bp, Zea Mays
ggtggttctaccacattcaagagctatggccttgtccagaagtctctagaaatatggaatgaaatgagacatcaactggtattagagtgcctcgataagtccatccaggaacaattcctgcttcttttcatcttccgcaacttcctcaggagcatatctgtacagctggatgaactcatctctgtactcactcactatcatgcttccctgccttagtgaaaggaactacttcttaatcttcatcaaccagcaggaatatgatagttgaaattagttgacaattctgtc

SEQ ID NO: 5677 - DNA, 299 bp, Zea Mays
gaccaattcgtgtactgatgcacatagcttacacttcgcatcatcgttttagcacagaatttttatcatggtaggcgagcttcctgaagaatgaagatgatgacagtttggcggctgaagtgacgagaattcaaattgagcaactggcaaaggttttggttttcagcaggcttggttgtaacttgaaaatcgtataatgtttgttgctgggcggattttgtgcgaagcattgagcctggaaggttcaagattcaggtctaatttgcagtatggaatattcgagtgcttgcttgtgaccg

SEQ ID NO: 5678 - DNA, 477 bp, Zea Mays
taaaatagagagaatgagtaaaaatcattattttgctatgatactaaaaacaaaaaacctgaggtcccaaagaaacataaggcaaattctcccaatcctacaacgcggaggcatgctggttccgctccatcccaaaggaacccattccaagatccaaaatctgagactaagtcgtgtctgcccaagcagctaagcaacaaaatgataaagagaagcaggtcaatcatgtttggaaggactaaattgcattgtctaaacaacaagctaaactccacatgcagtcatatggtcttggtataccatgtcccttttcccctattctacagcatgtgcttttagtcgccgcattcaaaaagtagaaccaaaattttattatttaaaagggaggagggatcaatttggtttgtttgtgctacatattttctagaaaccagtcagtaacacatttcttggaactaaagggaagaccacaatcga

SEQ ID NO: 5679 - DNA, 879 bp, Zea Mays
tttgacttgtttctctatctcatccttctgctgaggggtgtaccgataaggtcgaagcctaaatggttgtgctccaggtaacaattcaatggcgtggtcaacctgtattttcggtggtaggctgtctggccggagaaacaagtgctgatattgttcaagtaattgctgcacagcttctggggtatttttaacagtcaattcagttacagtctacaattccaaccaatgctgcactgcttcttgctttatcatgaaacccaactgttccccgttcaggccgtaacaggtctgaacctttggtaacacaccctgcaggtgaactctcttcttatcataatcaaactccatccattttgcagcccagtgaactgacataggacagtggcgttctagctagtccatgccaagaatcatgtcgtaaccccctagagcaatgaatttgaaatctgttgtaaaagtggtgcctccacacaaccatttgcagtttggcaaccagtgttggctccaaagaattcccccatctgctactttaacttgcattggcttggtcaacagttcaatccctggtaagacattcatcaagtgactttccagaaaactagcagagctgcctgaatctactagcaccagcaattgttgacaataaactgaagcccaaagtcggatagtcctgctgccctcaccaccctcagtagcagcagcagacaatgctagcacactgtcttcattagtttccttactgtccccgatacagtcctccagcttctcctcttcattgacagccaattcccacatttcttccaccaagtacagaggaacattagttgagcagcggtgttcatagccccatttgttcccacacttgaaacacagtccttt

SEQ ID NO: 5680 - DNA, 555 bp, Zea Mays
tggccgcgcgcctcaccggtggcgacctcccggcgattcctaccccaatacaacccccgtctagtgccgagcatatagaagatcacgacgaaccgggtggggcaattcttaccgacaatcgtgatgcggttgaggccgaccacggcacgggtattctcgcggcggagcagagtcaccgatgagcatttctagtggctacggggtccttcctcgcccaccgatgccaccaccagtttccacgctcgtctccgaaccccacggtgcaacttccgagcccccagcaacggcgtgatcccgattagccaatggcggcgcaacgaccacacggaggattcaagcgcgctaggggagggcgaggtcaagaagattaatataggcgcgagaaccgggcagtaggttagctgagccctcggtcagacgataaagcccgcccgccgtgcggaactcgcccccagaaaatcgtcggagtcggtttggtcagcgcgtggttcgcggaggagctgcggagtgtgcggacctggaagatctacagggagatctcctgacgtgtggggc

SEQ ID NO: 5681 - DNA, 492 bp, Zea Mays
cagaggttgggtcacccaattttggttagttctgctaatggctccattagtagctgttcagtttgtcaggggtgttccgtcattcttgctgatgaggtcttttcggccaatctggtggtgatttccttgggggcattcgatgttatcttgggtatggattggttatcccagtatcgcgcagttatatcctgtttttggaagatagtgttattgcaggcgccgtcgggtagggaggtggtattcttgggatgttcccctaagttcacgttatccttgttggcgcaattgctttcggatcgccggtcaaggaagtcgggaatctttttctccatggtggtggagggtgaggctgccttttgggtgcaggacatctgggtggtgtgtgactttgctgacgtgttttcggcagagcttccaggcattcctccggagcgcgatgcagcttttgagattaagctgattccgggtacgcagcccattcataaggcccca

SEQ ID NO: 5682 - DNA, 303 bp, Zea Mays
ttttgtctaatactccccctcaatcacaacttccctaagttgagatggtacttgaaattttccggcttgcgtacacttagtgccttagtaaatccatctgccacttgatcctctgaaggaacgaagtcaatctgcaggagcttgttgtttaccctttctctgacaaaatgaaaatcaacttcaatatgctttgttctggcatggaacacaggattggatgcaagatacttggcgcccatgttatcacaccacagtcgtgcaacaggtggacttgctaccttcaattcctttagtaacgtctgg

SEQ ID NO: 5683 - DNA, 971 bp, Zea Mays
cacgcacaaggctaacggcacgcaagtctacgggaccaattggagtgcctcggcatcaactggctccccgacatgaaagcagcagcagtggaagtaatgaccccatcggagatcttgaagcccgagtgagtcgacttcaagcagcgctgcaacaccggaccgatgcttggatcgccgacggagatagaatcaatgaactaagaagggacatccgtcacctgcaggatcagcttgctgatcgggacttagcacttgactgggccgtacagtctcgtttgctagtgtgtgctaaggaagcaagggctcaggcccgaattaaagaacttagctcaactgtcgacaacctgcaggtctactgcaatacgttgcatgaggaagtccatatactatactcacaattacaccctagtgtgcctgcacaccctgctgaggcggaagccggaccatctcacgtcgcgggacgcacgctgggtggggagttagacctttttgagccccctccttctttgaggttggttgacgtctggactcccacacctgacgatgaggctgccaaagtaacggaaagcaggactaatggtgtaataaaagtagagtagtgtattgtagggtgtactgttgtataataggttgaacttttgtataatgggtaatgtatcctgttatgtaatatcgagtctgtatcattactttttatagtaatgtaaaatggaaggtttctctggcacattatgtttacttcaaatgttctttgccatagatgccgaccaggactcgaggacaggacgcagccagaacttctgggggaagggatgttaccccaaacccacctccggttcctcccaccttagccgaggcgattgtcgccttggtgaatgacaccgcagacaatacccgcttccttagggaaatggtgggtcaacagcaattccagcagcaggcaggaaggggatatcagcaaggcccccgtg

SEQ ID NO: 5684 - DNA, 687 bp, Zea Mays
gggtcaccagggtcctgcgctgtgtaggggaggtggtctgttgggcctcgccgcaggtgtacgagtaccagtgaagcgcggaagacgcgctgaactcgggaaatcgctcaccggtgtgttgctccgccgcggatccaccacggtgcgtggacagattcgtctgcatgctaatcctcggtgagactcttcttgttagtttcgctcttgtctcagatttgtatagcgctatgcgatttagtcagtgggtgaccggtgcagggtgggtggttgccggtgatggcgccgccgccgtgccctattcctggccatgagttcgaccggagattgaagaatatggccctggccgtccgatgtgctattgacggtttagatttgattagcgcataccctttcgccgtattgaatcctcaccgtcgatccaaattgtacggtcgagattagagcatagaataaactgttcggttacattagttcctggccatcggatctcgatctaatagttaatattgtgtaccggttcacagttatgaagatctaatctgacccgttgatagttgatccaacggccagtagtgaccaatacctcttcggcccgaccgatttacaaaagagcccctcgtcttttcttaaaccaacccgcagtccggtctgtgggaagcctgagtctgggaaatatttcgagctagc

SEQ ID NO: 5685 - DNA, 496 bp, Zea Mays
gctgataccgtgctgactgaatcaccgtgttcaatcgttcttcttctagtatatcaacatcctccagtctggtagcctcagcttccgctatgttttcaaagatcagcctcagtgccccaaacttgagatcagcgggtagcactacctccgaaccgtagaccatgaaaaaaggagtatttccatgcagagctcggctaggttgagttctcaggctccaaacaacatatggcaactctctaatccactttcctacgaacttctcattcttgtcaaaaactttctttctgagcgcttccagtatcatcccgttggctctttctacctgcccgttggctcttgggtgcgccactgaggcatatttgatctgaatgcttttttgttcgcagaaataaaaaaactctgagcttgtgaaattggatcccaggtcggttatgatgctattcggaattccgaacctgaatattatgtcttgtatgaattccaccgccttagctga

SEQ ID NO: 5686 - DNA, 1208 bp, Zea Mays
acacattatcaagaaataccattttgaatgaaaatttaaaggttcttccacaatccaacatttactacttaatattatttatttaaattaaagagatatgtttataaaggaagaaaatcatctatagaagtcattttatctcaaatcctttggagaaatttttatacctcacaaaaatgattttgagtgttacagttgccatgaatatcatgccaagtgaaatttagatataaatggagacattttcaaatgaagtattgatatgtggaatgtggcttatcaagatgaatatagttgaactttaacaaccagaatgactttatgtaaaagcttaccactaatgcacagacactaccctcaagggctccagcgtgccagaaaacatcaccagtcaatcttgcaagctctatagcagtggtataatgtgcattggcgtccacaggtgatccaggcaagaggcaataatctcctattatcttttgcgcacgacccagccttctttttttagccttaattacctaataaaaatacagaagtatgttgtcgtgtataagtaatacaatcctgggcaatttgcatcatcaacataacactgctaaaaaaatacttggaacacctaaagtatgaacctcctctgagccaagactggattgtgaatccaatggggtcttcaaaatagttcctgtggattctgcacgcaagacccacttctcaaactccatcaacaaagaagcagcaagatcttggatcattgtaagcatatgaagttccagtgattgctgatcagaaggagggaacataataatagtgtccctcttcttccctgacaactataaaaaaatacccagacaaaaagagattgcattagagcatcaggtgaacaaacatgacaaactagatgtgctacaacatgggtacgatatttgttactgtttgagataggtcaatcgcattgcacgcaaaggggatgactaaaaaagtattgaacacaagatatgacttaaaatactgacagaatacaacgcaagtgaagtgagcacaaagcatagcataaggctatctccaacaaggaaatgcatttttggagagtcatatagctatttgcatagtgaacagtttatgtgtatggcatgcaaaattttgtttcttcaccagatcacgcatatgcaaatgcatctcccacctacaataccatctcaataaacaac

SEQ ID NO: 5687 - DNA, 808 bp, Zea Mays
gttttagtgatatccgtccgtattcgatctgattacatccctactgtggcccctcgtccgacttccacaccgatggcggtcatcactcccgcaagggcagcagcgggggtggtggctccacctgaggcggtccccctggctgaggtggtggctagacatggccggaccaggccccgagtgcctcccgtccttcgtcgttggcccttctgacagcgcctccctacgacgtgcctctgatgcctccctacggtgtgccaccgacgacttcggcttcaccctagctcccactcccgaggacccccaccttgacaccttggtccttgctaggtggaggatggtactttgcctctcttgtcgtcgccttcagcaccatggcgatgaccccaccccactccgactgggtggtcgactccggtgattcctaccacacgacccctactgcaggcacactctcttggtcccatcccatttattcctcccatccctcctcgatcgtcattgcaaacggttccactctgctggtcacctcggtaggtgcctcgttttccctggaccgttctatctcaacaacattctcatagctccttatatcactcataatcttctttctgttcgtcggttcaccatcggcaactcttgttccattgagtttgacccctctggtttttttgtgaaggatctggccaccagcacccctctcacccgttgtgacacctcaaggcccctctacacgctccgaccctcctccaccggcgtgtctccaccacctcctccaccatttgatatcgtcgtctcggccatccaggac

SEQ ID NO: 5688 - DNA, 530 bp, Zea Mays
gcagttaaggtggcgttctcagagactatgccatcaggcccagaaggcgccggacccctatgcgcacaacccggacccccgaagtaaagcagcccggagccattgggtagggttcagaccccatcatgtgggcttcggaccacccataacaaggtcccgggagaggaagtgtcgtaacctaggcatgggtccggtattgacacatgtccaggctctatccggagcgcctccgctccccgctcggctgagggtctaatacggccgattatccgtgacgtaggccgatgggcggagcatgacataagagctctgagtcgtgcggtctctgcatttattgcggaaaggacacgccgcctgtccacccttctgacaggtgatgtgcccccacgacatttattgcgtcccgtccattccgttggcaggcggcgccagggccaccctgcagacggcgcacttgtccagtccattgtcgaaacagtatgcccgtgctgcgcagtgcactgtactcatcccttatgcgagaagcttcc

SEQ ID NO: 5689 - DNA, 419 bp, Zea Mays
cttttcgatggcttgcatcacgtccatcattcgtcgcttcttcggacccccgacattcccctagtagccgaagcactgtcctttccttccaagctttgttcaacacccttctcctttgactgcaataggctagtcagatccaatcccaagggacttagcattgcaaatgggaagggtttagtcattaccttcagtatctctgaaacatctacagagcaggatggagaagggcccgcaatctttcctggttcatcttgtaccttcatctccgcagtagccatcctaacaggtttttgttttttgggagccaaatccttccgttccgctacagttttctgcttcttaacaaccctctgatcttatttaacggatcggatggcttgcctgttcaaaatactcacaactctctttgttttcgc

SEQ ID NO: 5690 - DNA, 542 bp, Zea Mays
gcggtgactttggggtggtcgaatgccgaagaccgttgatgcggtctttttcgacatgttgcatcttagtttttgcgggggatttttgcagatatattacatggctccgcctcgttaaaaacctcacccctcgggaggaaaagagtgcgggcctaaagaatgctgtttggtgaagtacaagggcgcgtaggccctaaggacttagacaaaaaatttgcttagattgtcaatattccaggaatggtctaggtcttcgccggatggcgttgttagcctgtatgcgctgggggacgccttcgtcttgatgatgaatggaccttcccactttggctccatctagccccgtgactctgtccgggtggttcggacgagtacgaggtctccttcgttaaattctcttgggacgactgcgtggtcgtgccaggccttcgtttgagcttggtatttgttgagggcctgcagggcaaagaagcggtctccgtcgatgaggtctttggacgtgggttcgtcgacgtcggggacggcagatgcgcttgttcgag

SEQ ID NO: 5691 - DNA, 746 bp, Zea Mays
gtaagctagctcccacacatataacaggaataggatttgaaaggcagcagaaacacaacaaaaactaattttctaatgaaagggttctatactggtgcatctcgcacatcaataaaatatacaattatggaaagccaaaggcaattacaactcaaactcgaaagatttagttgttaggtgactactggcaacaacaatatgcagtttaaataatgcacagccagctttacgaggctttttattaatatctggacaccaattgtcgtaaagacccatatgtcaccaaatggcctcagaccgtcctagatatgcagtttaaataaaacacagccactgttgggtgactactggcaacaacaatatgcagtttaaataaaacacagccactgtcatcaggctccaatccacatgtgaagaaaatgaataaactgcctaggcatattcaaagcaccacagggaaataatcataacgcatatcctatggaaattcatagtaatctaatgatatgaaactgaaacatggtaaaacagatagaatatagatgtgtggaacaaaagcctcataaagccagacaactgtcttcacaagtaaaactgacggtaattccaaatgtatagctaatcatcacaggctcaactgtgagcacactactttataattttgaactgcaatgatttaagagttcatggaccaaaaaaagcaagcatcaacaaaaaaaagtgccaacaaggctgatggtacaaaa

SEQ ID NO: 5692 - DNA, 322 bp, Zea Mays
ctggccgccgcgcgtctcgctcgattcaccggccaccgcttgcgagcgctataaattgagcccgcggctagcttcgcaacatcatcacgcaccaccacacccagtattgctcccaatcgttcaccaaagagcactaatttcaaacttcccccaaaactgttttctgccaccgcgaagagtgcctcaccgcggccagcgcaattcgagtcagctcacgccttctgctccctcaattgagtattctcaggtacccgtgatgctcctcgacctatccaattgcattataccgccatgaatcgcttggaacatgttgttcctttaa

SEQ ID NO: 5693 - DNA, 1392 bp, Zea Mays
aaagtctttcagaagatgaagaacaaattgttggctaactcatctgcacttgagaatctcctgagagggctctgcagagcagggagaatggatgaagctttgcaggtcacggaatacatgaagaggacatcaggtctaaacagtacaatgttttcgttcctcatcaatggctaccttaggaaaggggagcatatcaatgcacttgacttgctacgggagatgagagaatatggatgtgtcccactggcgtcatcttatacccaggtcatgcaacacctatttgcaaccgatcagtgtgaagaagcgtgcggactgtttgaagagatgctaaaaaaccgcgttgaaccagatattgttacgttcacagcactgattggcgggtatgttcgcagcggacatatatccaaagcatgggatgtcttcaggaatatcaataagaatgttcagaaacccacattgaaagcatatacagtcttcatgcgagagctgtgcaaggtgtccaggccccttgaggccgtagtacttttgaaggaaatgctggaatacgatttcaggccttctgagagaacattctgctggttaatttctgctttacgtgacaaatcctatttggaagaggcaagtaatgttgagagaatgcgagcatcttttaatttgcgaaaccctagagatggtttgcaattcgaacagttagatggcattggcaatattgataagtttcgaaaaatgcgcaagtctaatcctcaagaaaaagaactggcattggagttcaccagctccccgtcagatcaaaatggtaagacctccagtttcacactttctgatgacacacatcagaaagaacaagagcaggactacagtgatggagatgtcgaagaaatatgtcagattctgtcttcttctgatgattggggctcaacgcaacaggcactggagacgagatcagtccattttagtcctagtcttgttgatgccattttgaaacgttgcaaaaggaatagttgtgctgctttgcaatttttctcttgggtttgtagacgtccttactacatgcctagtacgaaaacatacaatactgctatgaaacttgcgggttctgcaaaagattttaagcacatgtggtatctgtacagagaaatgttaaggaccggatgctccccaactgtggatacatggaatgtcatggtctgtcagtatggcaatgctggtctgtctgaaaaggccttgaatacattctgggacatgaagaagtgtgggtttctgcctgataaaactacttacaatcacctgataatgtacctcacacacattaaagggcggaaaatagatgtggcagtcacaatcttccaagaaatgtgtcatgcaggacatatacctgataagaggattctt

SEQ ID NO: 5694 - DNA, 320 bp, Zea Mays
ggagccactactgcagcaaggtcatagaccatctggctctgagctgtccgcgatcaagcagagagaggttcacctctagtgtttggccctaaatcggaagcaacacacgtttcataattaaaaatcataattaatccgatggcattgaaaatgacctcctcttcccatcttccatcaagcctggaggaatgccatactccgtcctggtgtgtctaccccacccactgctctctcttattgtcgcctttggcctgctgctcctcgtctagctgttcatcgtccaccgccgcctcaggagacccgccgacggtcactcctag

SEQ ID NO: 5695 - DNA, 303 bp, Zea Mays
tctgggctggtaacatcggaggacgtccctgccgctgaagcagagcaagctgatgttgaggagaccgagtctaaagatggttatagcagcgtggtgccgagcaaacccagccatctggatttcggaaaatccaccatctccgaaggtgacctacctaagatgttgaaattgggctattttaatgaagaaaagaaagagctggttcgctttggtgtggaggaaactactccgaagccaggaaaagatgaagtattagtttttaaaagtttcttcaaagctagtttgagattccctttgaataag

SEQ ID NO: 5696 - DNA, 739 bp, Zea Mays
gcagcttcggcctatgagtaaaaactttagctctttttagcttcgacgcggtggaagaagttgtagttgcgattttcctctttgctccttgtttccgagcaggaaagctgtaatcaggataaataaatccaatcacatcaaaaaccctatttagtctccttttgcctcgggcaccaaaggcagtgctcatggcttcgtcctttgccttcatataagtccccagcagctcatcattggtcgcctcaatgacttcaagccaatcatcattcggctcgtccaactgacttctgtagcgataggtgtgtctcagataaaccaggccacctttgctggagccagcagcggtctccttcggcatttccagtcattaacaagtggccatatcttataagcgatgtgctcttgaaccaaatctctggtggcaatgtaagtacacactgtgttgaaggccatcaagcatgcttgtacttcatttccacttgcgatcgaaggcctcctgataccgaagcgtgatcgtatagggcgctggattatgcccctcacatcctccctcttactcagatcattcttgacataaaaccattgcttcatccaagagcccggccatttttccaaaatgttggcacaagacacctcacatcagaccgatacacaaagatgtagcatccaaagttgttatgatattgctctttcccaactgccttcatctagtaggacaattcatgaatgttgcagaagc

SEQ ID NO: 5697 - DNA, 375 bp, Zea Mays
aaactacaattatatctacagttagatcatgatctaatggaccaagagccttacttgtacgtttgcaaataaggcttgattgcatattagttgttgccgctggcctatccatgtgggattgtgagctgctgattacacataattaaggttcttatgtcttcgaatgatgcgggtgcacattttccagttaacagttgttaggattggtctttcagaagatattgctattacttgcagatctctgcagccaaatcgttcggactcgctacacacgagttgtatactatgtaattttcatgttgtatgcgcgcggatcatgataattagccagcattgtgcctgtcggtttggtatctattaattgcattgcatgca

SEQ ID NO: 5698 - DNA, 285 bp, Zea Mays
ggccagtggtcagtcaagaatgaagaatttagttgccggtcatagtaccaggcaatatggcttttctctctcctgccttacattttgcctgacctgtttagctgctccgttgaaagaaggattatactgttacagtaggtctaggacagctattttagctttacctggccggatggatgctccgttggagtgagcctccaactaggcaacgactcctatcgaagggaaagactagaaaagggtgagaagctccttaaaaaacaacggaagctcgaagctagaaat

SEQ ID NO: 5699 - DNA, 536 bp, Zea Mays
ccgacacaataatgtaccagaccgggtgcgcaacaccttacgaacacacccagatgcgcgaaggcagtcaaccttatcatacaaactacagttacacgcgtacagcgagggcatcacaccttacataggctcaaccttcggaatgatccccatctccctatagttaaatagcattatcctcagctcctcaccctcaaaaagccttcacaactccccctcacccatactcgccccaaccggcgaggacaacaattcttgcctaccagccctgcccacacgaagtcgaccaccatccaattcactcactctacgtttcgccaccgcccttcgccgcctacgcccaacattcgaaccatgcaaaatttcagcatccgtaacacgcggagaagcctccgcctcaaccacatccaaggccgcaaaataatctaagccttcatccgaagactcttccgtctacaaaaccaaactcccagagtcgtcaaacgcagaaaacttagacgtagacccatccgattcatttccggcgaccacggtcg

SEQ ID NO: 5700 - DNA, 667 bp, Zea Mays
gggtcgctgacggtgatagaatcaacgaactacgaagggacatccgacatctgcaggatcaactcgctgatcgagacttagctcttgactgggccgtccagtctcgtttgctaatgtgtgctaaggaagcaagggctcaggcccgaattaaagaacttagctcgactgttgatgacctgcaggtttactgcaacacgttgcacgaggaagtccatatattatactcacaactacacccaagtgagcctgcaccacctgctgaggcagaagctggaccatctcacgttgcgggacgtgcgctgggtggggagttagacctttttgagcctcctccttctttgaggttggtggacgtctggactcccacacctgacgatgaagccgccaagactgatggcaagcacgaataagggtgtaatagaagtagagtagagtattgtagggtattgtagggtgtattgctgtataatgggtattgtatcctgttaataggttgagcttttgtataatgggtaatgtatcctgctgtgtaatattgagtctgtatcattactttttatagtaatgtaaaatgggaggttttctctggcacattatgtttacttcaaatgtttttgccacagatgccgaccaggactcgtgcacaggatgcagccggaacatccgg

SEQ ID NO: 5701 - DNA, 325 bp, Zea Mays
tgcagatttccctctatgtccgctatgcacgagatggttccgaagcagaacatggctcctaggctgagagtgatcttgttcttgaagatgatggccatggtgttagctttgatcaacgacacacccccacctggcgcaccagctattggtgtttagtgtctgaccgcacacccggggtaccctcgtggtgcttttgggtaggacgatgtcgtagattgtaactcgatggttcgtgccaggggcacgaggaagagagagtcatgccattttctgtaggtttgagccgcttgaggagcgtaataccctacttcctagggtggttttg

SEQ ID NO: 5702 - DNA, 1323 bp, Zea Mays
gaggtttgtttccggtgagaaagtgaatagtataaaccatcttgaagtacagaaggtgcagttagagacagaaaatacctttcaaatagaaggtgatgtcatatcagttggagagtcacaaaagaaagaatcagtacagtcaacttcacactcaacattcttcccgcaaatggttgacccatcgagtgaagccctccaacctcagaatattaacctgctctcaatgctgcttcctgcagaaaaaggacaagcaccgactgctacttctggattgtcacttcggtcaaataatgctgactctggaaatctgcatgctggtatgtgtggtatagatgttactcaagagatactaaatgtgcaccaaaatctgcataattctcagcaaataggtattgatgctcaacagcattacgttttaacacagaatcaaccaactttagcttgtttgaactctcaaatcacacagccagaaaagtttctcggtggaatatatcatgatcctcagttaaacatcaaccaacaacagtatctgctatcagagctacacttgcaacccctgattcctggagtccctgaacctcaatcctctctattgaacaacatgctacagctcaggcagcaggagcaacagcaacaatacatttctcagtccatacctcatgatcgttccatgcagcagctttatgattcttcccatgggacaatacatacttcattgtcatctggtgaccgtatgaagctttgtcttcaaagaacagaagagattcttgatcttgctctgaagttacctggtcatggtaagcataatctacaactacatgcaagtgtgaaattgagagacacaggaaatattggtttgtcggaaagttgcgctactgccctaccactgccccatgaaatgatgggtcatgcagcttggaaagaatgttctgctagtctcacacagggctctgcagttgttgatgctctttcacaaaaagaaagtattgtagactcaccatctaagaaaactccaagttatggttctaacgattatagcaagatgactgtttttgaagttacaggttttcctcaaccatttcaaggtcttcagaaaccgaaaagtgtagcatctcatatctcaaatgaagttcatgaaatggatatttcctctgtccatcctcattcatggaaacctactccaggtgttagggctaaatcagtgttggaaattcaagcagaggaacgattggaaactcagagggaaatagccctggaaaatacaaaggtaactacaacaacagcttccgggctatctattcattgggttgatttggttgaaac

SEQ ID NO: 5703 - DNA, 568 bp, Zea Mays
cctgtgttgattcagtaaatgtgtctcgactctggtacaatgctattgattgtccgatcttcagactctttgcgtgtgtcgcggtgttgttgaacttggcggtgcccttctggctgttgattatgagacgaagttggagccatgagtggtggtggtggtggtggcagggcccatgcagctggggagtggcttgccgaagctattgatactatgggttgttgattgcccacatagtcaggaatgtatggggaatagcacgaagagatatgcaggacctcctttggctgattctgtcgttcttcggcttcagctatttccttttgcttctgtatcatgacttggcatgtcctcgttgtatgccccatatcttctccatagaataggcaaaacaaccttcttggttgggaattgaatcttcctctgaagcttctacctcctctaccacttgggcctggtggcctaaaggaactttgttgtgttcctgatgattaagggttgtgttgatgccctcgagtatgacttaccctatcttcacttgagctgggattatggatcgtcctaacatgcc

SEQ ID NO: 5704 - DNA, 520 bp, Zea Mays
taaagatgaacggtgtaaatggttaagcatgacgatatgatatgtaccatttaaaataaattatgtttgtaaaatgaaatatgattgttaccgctttgcatttatccaattcttctgtctcgggcaatgtattgtcgagaagtgtgtgcagtacagatgcatcaaaaggttgtgggtttcgggtgtgtcgatcctgttcctcaaagttgagtagtgactgcaataaacaatatgaatggagtcagtatacttgggataccattgtgtatatgaatatggtataggtatgttacgataatttaccccaacattaacgtcaagaattaatctgttcgaactcatggaaggctgctgatttttggtatcatcatcaacacattggatgaagcactgcatgaacacattgtcgaggcacttcccatcggcgaaagattcatatatatcagaacatgtcgaacaatattcaccataatctattatgttcctgtggaaattttgataacaattagtgaggtcgcgt

SEQ ID NO: 5705 - DNA, 589 bp, Zea Mays
gtcagctgatgaaggtaaaccccaaacttcttcaacatatcagcaatcatcccattcaaaggaaaccttaaccctgctttaaagaagcttttgaacacaaccacctcattcttttccagcttcggagtaatatcgtccccgccaaaacgaaccagctccttttttgtttcactaatgtagcccagcttcaccatttttagaagatcagcttcagagatggtggactttccaaagtccaaatgactaggtttgcttggcatcccgcagctgtactcatcttcggaaccaatttcttcaacatcagcttgcgttgcttcggcagcaggtgtgtcctctgatggaacaagcccagagcgcctcatcgcttcagaaatcggaacagtttcaacgtcttcggtctcgtctccatcacgctcaaccctagcagtggagcatattctggccatttgattttaaattttcttgaaaaaattctttggaaatcaataaccttttttccgaagctatcctcgtgacgaagcacaatccaaactggagcttcgtttgaatgcaaaaatcaagcttcggctatggttaaatttttggcagc

SEQ ID NO: 5706 - DNA, 610 bp, Zea Mays
agaaggtcgacgaaggtgacgtagccgcgggagaacgagacctcgggtatcaggcccccgagcaagtcctcaaggacatcttcactggagactccaactccagtgatgacaatgatcgccgcaagaagctgtacgtgatgtatggcggaagctgggagctcacctcccgtaggaacgtgaagtccctatgccgcgaggctctttcggcaaccccaggggtcccaaaggcagccccccatcagcaatggtggagcaccactatctccttcgaggcatccgactgccccaacaacatggcaggggctggtatactacccctcatcaccgcctctatcacatgaagctgcatcatgtcctgattgatggtggggctgggctcaacgtcatcagccatgctgcgttcaagcagctgcagatcccaggatcccaactaggaccctctcgcccattctccagagtggaccctcaacaggtgtatccccttgggagcatcgcactcccggttacatttgggactgaggaaaacttccgcactgagaacgtccagttcgatgttgcggaggttaacctccctttgaatgccatcattagcaggccggccctgtaccgg

SEQ ID NO: 5707 - DNA, 417 bp, Zea Mays
gctaaaccctacaccaaactgtccgcgcaaagaccgactacaggcgcgccgggatgacataataaacacactagaccaggtgcgcaatgcctttatgagcatagtcgaatgcgcgaaggcgcacaacctcatcatacaagctatagttacatatatacagcgagggcatcacaccttacatcggttcaaccttcggaatgattcccatctccctatagttaaatagcattatcctcagctcctcaccctcaaaaagacttcgcagctccccctcacctacactcgcaatggccagcgaggacaacaattcctgcttgccagccctgcccacacgaagccgaccgccgtccgcctcactcactctacgcttcgcaaccgcccttcgccgcctacgcccagcactcggaccaggcacaa

SEQ ID NO: 5708 - DNA, 506 bp, Zea Mays
cgcgggagctactcttgtccaccgttgagccacgtaatcctaaaaaatacctgtcgtccgatgaccaaccagcgcttagtatcaaacgtctggtgtccggcttcgagtgcatgccagaaacactccggacaatgtcaaccaaaaaaaagaagcacgggagcaaagctgggctatcgctgttttctttctcagtcgcccgatcatgtgccaccggccagtaaacgcactccacattccagccaaaggaacagcctccacaattcgtgtccttggccagacaccatgtgactcctctaaccaagcgagcagtgtgatggaagaagatttatgcattaaggtcgactcacccccgacgaggcgatgctgttaaggtcgacgacagtgtcgtcgtccttccgtctctaatcctcccctgcactcctttatataggcctcatcgcttgccataggtacaaccatcctctcccacctcactttcctctcacactttagggcggcagcttaca

SEQ ID NO: 5709 - DNA, 320 bp, Zea Mays
ggcggttccacagacgcccgatcatgcacgaacggcccggattagtttgaccctggaccattatactactttcactcatgaccctaggatccaggatccatggccgagatctgcccacgcccaagcccgatcctggtcgtcggattcaagatgggtgccctagattccaccatacccagatcgactcacgcacgccggatccgaatccaacgtcccaggttaactcagccgaagcggtgccgcgggctaatcctagccgtcccactgaatccgacggccgcgcgacattcttcctccccaagaccgagaacgacgcccgc

SEQ ID NO: 5710 - DNA, 562 bp, Zea Mays
gttcatcggtgcatcgggctgggactcgtcggtgcgttgccgcccagcatcgtttgctgctgctctacttcaagtgcaggtatggccccatgcgatgctccacggcctattaaaccatatagattgaagcttggtcgccgggtcgatgggtggggtagtcctagctatagcgccgccgtggggaggaagtgcgatcgccggggtagttagtgagtgggataagaaagagatagaaatgggtgctgctcgggtgccgtcagtcttgagataaacggtcaggattaggcgagcacatcccacgtgggcgaccgtcgatctgtgaagtaatggtcaggatcagatcgatcttacctcttcgctatgttaaatcgtgatcgtatatttcacatccgatggtcgtcttggcgtaccagttcataaagaggattgtgtaatctacgccgttgatcctgcatccagcggtgctcgttggccgataccccttcggccgagacactttctagtaaagcccctctgtttttaagaagtgaacccgccatccattatagtatttagatcatta

SEQ ID NO: 5711 - DNA, 532 bp, Zea Mays
cattcttgtgacgaagtgtcaccatgaagatgcttgtaatgtagacttctgaactttagttttgcttgatacctagaaacatgatagaatacaacagtactactttgctaaaatctacagaattcttcagcatattgattatcttaagtctgctatcatgtcacttctcggaggtaatttgctgtgacatgttgaaaaatgaatcccaagaatgtcaaggtaggaggtgcaaagcatttctatatagccaaactggtcatagttattgacctggaaggggttctgattgacattccagaaagggctgctgcaacatcatgtgtttaaccactgacattacttatggaatagtatttcttcaatcctttcatcctttgtgaacccaagtgtttttagctcagcgtagcatcgatactgacagcatgtgatctaacgcctgctgttaggcttttccatattagcggatctatagagacctttatatatgttctccagacttcactcatgttctgtatatatgatacttactccg

SEQ ID NO: 5712 - DNA, 456 bp, Zea Mays
ctgcccccctccccaacctgctccgccccctccgcgtggacgtcgtctcccgtcgtccttgcctcaccgattccctactccgttccaccgggcgtccccggggtccgcacccaagacgcctccccgttgtcctcgcttcctccctccaacgcctgttgcctgtctcactccacgacatggatttggaatggtgaatccctcactgaggccccgaatcccgcaaccaatgccgccttcttctccccctcccctctgcacgacattgcctccccagccggcggctgaggtgcagcgccaagtggccaagtggcgccgccaatcccccatgtgatcacatccctactcggcaacaacctcctttctcgcaccgctgacaccgcgcatcatccacatccacgcctctgtgccagtagcagcaccgtcggctcccgctgccagatccaggtatccagccac

SEQ ID NO: 5713 - DNA, 679 bp, Zea Mays
ggagagagttggtgttctggcttcgtaacaagctaacggagcaggccgcacactcaatttatagcgtccgcaagtggtggctccgaattcggagaagataagctggcggccggagagaaggtaagtcaccggagcaaaactaccgtggcgctcaccggagcaaagtctcaggtgacagatgggctatctatcgtgatctactgcgacgtggtaatgcctccaaatatgtggcatccttgcatcaagcggcgaactccggcaatggtcatctcgaccgatcgcggggcaagtgggtacggcggccagctcacaatctcatacgcggtcaagatcttttcactggtccggtaatatccatgcctcgccatgcacgaatcacggtgcgggttcaccggcaccgagttcactgaacctggattcttgtttagtccactgtaccatcgtgatcccattcagtcgttctaacagagcaagttcaggagcccttttctcaatttttatgtaacaacccacaaatccatctgtagcgaagttgttcttctataaaccaactttaattttgttatagcaacctcgatcaaacatccactggatcctatgtcaaatcgatctcaaagttcatcccagttcactaacggtcgaattttagtaccaagggtgactgatagcccaacttcag

SEQ ID NO: 5714 - DNA, 638 bp, Zea Mays
ccctctcagccagccgtgagatgaagcggctaagggcggccagggaccccataagcttctggacgtccttgatccaggcctgaggcctcattgcctcaattgccttgatcttcttcgggtttgcttcattgccccgatgcaaaactaggaatcctagcaacttcccagcagagacaccaaagacgcacttgtcccggttcagcttcgtgcgtgttgcccgcagcttgtcaaagactagggtcaagtcttccactagagtcgaccctctcttagtcttgaccatgatgtcatcgacgtatatctctatcctgcccctaatcaggtccccaaaggtcttactcatcgctcgtacaaatgttggcaaggcgttcttcagacagtagggcattacaacataacaataaagtccatccaatgttccaaaagcggtatgcttcctatcttccctagacatctggatctgatggaaaccagagtaagcatctaagaaggacaagaggtcacacccggaggtagagtccacgatttgatctatgcatggaagtggatacgggtccttgggacaagccttattaaggctggtgtagtcgatgcacatccgaagcttctcgtttgcctttggaacgatgactgggttg

SEQ ID NO: 5715 - DNA, 453 bp, Zea Mays
cttctctcctctgatagagaccgggtgaccttcaagaatctgagggtcttcagctctcctgggttgaacagggttggatgcgggctcttggatccgcagggctctacgttggttatgggttaccaagtaggcctccatcaacttctggacatgctcatccttggcttgcttcagagcttcaacagcaatgacttcacgactttccaaggcagttgcatgggcttgagctgtggtgagatccacatggagctgatggttgcgcttctctgcatcttctgctcgagcaatcatctgacggtggtgccgagccaagaaatcatactgcgcatccagggtgagcaggtatgcagtgaggtacacgactgtggggtcgtcctcaagcagctgctgcccttccaatgcacgcatcctggtcatccaaacgggacggtttctctgaaagggcggaaagaa

SEQ ID NO: 5716 - DNA, 567 bp, Zea Mays
cgcgcgtgaaaccaaggtttgaccgtgattccccgtcggaatttgggagctgctgctcatcagggacctcgcgattggcgtcctgatccttggtaagaatatccccgtctgatttgccctgatctccacatcgtttagataccctacctgttctttttggaccactggtgggccgggcgccttgctccgaccatggcaccaccacctgccagtgcgcgccgccacggcttgggccgtctaggaagaaacgcgtacaccgttggatctacataggacagatgggattagatctgtgagagagtcatcatgaactgttggatccatgggcatcggtcatgatcagatttgcgtactggtagggattggatggttctgcgccatcggatgtgaagtggacgagtgggattgaagtagtgttctgatttgggcaaatgaatcggagccgtagatctcggggcgtgcggtatggatagcgtaccgattaataatcacgctcatctaatcttgcgcgtacaaactgaatcggacggtgcagatcgtcctgtaccccttcgatttacacatttt

SEQ ID NO: 5717 - DNA, 958 bp, Zea Mays
cggcgaaggggtataaacgatcgtgggccgttggattacgatcgaacggatcagattagattgaaaccctaccgaaccggtatgtagttccagccgtccgattttgatcaaatggccaggagcaccccacaccatgatctcatctgattcatccgtgggtcgatcgacggcacggattaatctcaggaaaggggtacgtgcacaccaaccgtgatcgcggatttcaagatcaacggccatagtacttcttctccacgctaataccaggtgtggcagcaccgtaaccagacagaccatggtggcaccattgcttgtgagccaaacctggtaatttgcgcgacatgcccagtccgaaacccccaacacatcaaggagagaatagcgatgatggagaaagggggattctcaccggttcatgaggggtcgaccaacccagtcacgacattgggcagacaacaacgctttatcctccataggcaggctgaagaaccccctgctatccgcgaacaccgccgagtaggccgcgatccaagtgccgtcgggacatggccggagcacatctgtgttgcgccgagccaggtcgcacagaacacagtgttgccatgcggtgcaagctcctccccaacgagaaattcctgaggccctaggacgtcgcgctcgaagtcgtcgcgcgtgtggcaggcttgcgtgtggtggtctgcttcaattcattgtggttggtgcgttggctggtagagttccgtgttgtcttcctggtggctagatcgagctagcatggctcgccctagggctatggctgatgtgctttgcgatctgcattggacttgcctcaatcccctggtaggacgttggcttttaaaggcagtagggttaggagataaagacttcaacaacctgatcttatctaacttgttcgtgagcttatccatctaatagatacatgcgggatcatattcca

SEQ ID NO: 5718 - DNA, 571 bp, Zea Mays
cgacagcaacaagatgtatcaggatctcagatccttatactggtggaccagaatgaagagggagattgccaagtacgtatccgagtgtggcacctgccagaggatcaaagccagtcatttgaaggcagcaggccctttgcaaccccttcccataccatcttggaaatgggaggacatttgcatggacttcatcgtgggattgcccaacacctccaggcaccatgattccatttgggtcattgtggacagattgaccaagtcatctcatttcttgccagtacacaccacccacaggacggagaagtatgcagaaatctacattgaccagatagttcgtttgcatggaataccaaggacaatagtatcagatagaggagcaccatttgtggcacgattttgggagcaattgcaagaatcacttgggacccatgtaatacgaagcttagcataccatccccaaacaaatggccagaccgaaagggtaaatcagattttggaagacatgttgagggcatgtgcgctacactatggaagggattgggacaagtgtctttctttggcagagttttcc

SEQ ID NO: 5719 - DNA, 439 bp, Zea Mays
aggcaaatggctcaacacaactagcaaaagttccaaatggttcaaaaactctccctatcaaagcactctcccaaagaagaaatctcccccgttgatgatgggaatagcagaagcctaaaatgcacaaagactgtcccccttgttaggaggtagaaaatctcaaagtctctcccccttgttgacaagtggacccatcaagcaaaaatgagggtataaatagacactcccctagacaagagaaccccccctgacaaaatgcagaaatgcaaaagtgaggagaaaatggagaatatgtaggagcttcaggagtataccagtcagagcgtaaaaatgacctaagtggtattgtacgatgtgtgtagtaataaatgcacgtgctagcaaatactcaaactaacatatgcacaagatatgtgaagtgtaagcattttgattcagt

SEQ ID NO: 5720 - DNA, 441 bp, Zea Mays
gccgacgaaaatagtctattttcgtcggtttaggcttattttcgtgggcttttggcccacgaaaatttaggtgtttcctgtagtgctgcttctcggtcttaaggataatttccatggaaagaaaggatttcactttcaagcattttggccaaacatggagggattccttgatactgtacagggtgcttggacttctgttggaccttctccttgtccttatctgaccttgcaaaggaagcttaaagaaacatctaggagaggagactatagagttggagtgataggtaggttggccatgtgacttcctagttggctttggcaaaggagcttttgcacaggtttgagattgcccaggatcttccttactcctgctgaattgtggcttaaaaataagcttaaaaagcaatccttgttgttgaactcattcaaaagcactatggc

SEQ ID NO: 5721 - DNA, 1213 bp, Zea Mays
aaccggcccaggtcggcccaactacgggtggaaacgtgcctgcgcacgcccgcgctgtcgaatatgcagaaaggcccctggtgttttgactaaccagaactgggttcgccgcactattgctatgagtcgctgacagtttacacaggggtccctcgacttctgtttcttcaccagataaacccctggccatggcgcgctcgccgtcgatcaccgacgtggcgtggactggcccaacccggcaacggctgccctaactagctacggggtgaacactaccgcttccagacgacctaggaacgagcttcgctttgatgcgtatacgcagaggatgttctacccatgcgcatggcggaacccgcgacgtcgagaccgtgttcccaatcacacatacccgaattggttaaatgggcgtcacgataggcttcctgggtatgcaaaactactgaaacaatactcgagatggatagaaccttaccagagtggtcaagccatggagcgcgacgaactttggcttgctggtgacagaggaaggggaaaactggtgtcgcggcggctctgggtgaaattgggggtggagattgaggctacacggccataaaggactagattttcactgtgcactaccaattttgggaaaggtggagagaattccacgaatttggacttcgactgagctcactggtgaagaggtaaacacctcgccgtggtccgtggtgccttttatagccacagcgagccggctaatgatctgcggccgcggatagcatggcaaacgcatgcctaccacgtagaggagatgcacaatgagggaaatcaaagcatgtgtgacagcgcggcgagagttaactgagtcacggtggtcgccggtgaagactccggctgggcttgggagatggcgccatgcatgagttatccctcctcggcgttatccattccataccgcgcacgaatcaggacggcagcggcacaaatctacgcgcggagaggtcaccgacggtgagattgccgcgctggcggtaccattgcacagcttcattagtcggtctgacagagcaggtttggtgttgatttactcccgattttgtgtagtgaccggaccagctctctgtaccaaagttatagcttaataaaccagctttaactttgttatatagtgcacccacaaaaggtcataggatcttacccaaaatcgaacactaagttcatccaatct

SEQ ID NO: 5722 - DNA, 361 bp, Zea Mays
gcctgctatacggatcggagtccatgaccccgcaggaaatcaaacatgggtccccacggacaagtgcttcagccgtccccgacgtagacgaaccaacttccaaggatctcatcgacggagaccgtgtcttcgccctgcaggcccccaacaaataccaagctcaaacaaaagcatggcgcgaccacacagtcatcccgagagaattcaacgaaggggacctcgtactcgtccggacaactcggacagagtcatggggcaagctggagccaaagtgggagggtcccttcatcgtcaagacaaaggcgtcccccagcgcgtacaggctaacaacgccatccggcgaagacttagagcattcctg

SEQ ID NO: 5723 - DNA, 572 bp, Zea Mays
gtcgatcaggggacggctagaatgctccttcctttggttgttcgggaggaacgatggtctgccggaggcgtggtggtcgtggtcccgtccgtccaggtatccagggccagcaggaggggaacgaggaggcgtgtgcggcatggccgcgtgggggcaaccgctggaacagcacagcacagggcatgtcggtttcttctttcgttccgggcggcagggggacctagctagacaatgccacctacactactatgagctacgagcccgtgtgcccgcctggttactgttccggcatgcagctcgcgtgtcctgtgccgaacaatccggagcatttgggcatcattacattgttcagctagtagtacctagtacgtatcaggcagcagaggctaatcacgaatagtaatagtagcttgagccccccgccccaccccgcttactgatcagcagtagtgcccacgtactcacacgctcctggcaggcagctagctggtccgcccgctgctactgacggtagcgcgcagctgcagcacgttggtctcctcgtctgcaaacaaaacatgcagggtggctgt

SEQ ID NO: 5724 - DNA, 631 bp, Zea Mays
tggttcgtcagggggccattccgcataggggccgcaccttcaacttcgaagcgtggactgagcaaaggtatggatcgctggctcgttgggagtttagggtgcgccttcgcattgagggtgtgcctattcatgcttggaaggagtcgtcgtgtcccaagttattggaaagctttgctcaatccattatgtagacgggcacacctgtcgtcaggagcgcactaggacttatgacgtgtgggcttggagtatcaacccaagtggtattgctaaggaagtgtggctaaccattactgacccagatgaattcccttcgtctgatttccaagtgcaccactcagcgcctacggggcttaagtttggtctttcatataagctgctaattcacgttgatgttgtggaggacctatctttcattgaagggcgtaacattcaggatcgcaaaaggcggcgcgagttcgagtggaattatggggttcctgattctttgggagagaaaagagagaaggttgtttaccaggatgcagggaggaagggaagataccaccggagggatgaggatagggaggatccgggccgtggaggtcgccatcttcggagcaggtcttggtgggatgggagaggctctcattgt

SEQ ID NO: 5725 - DNA, 972 bp, Zea Mays
ggagactttgcagaatggcccttggtgttttggctaactgggaacgggttcggttactatttttctgagtcattgacggtttacacaggggtccctcggtttctattccttcacagactgagatccccgacgacggcgaacgcggcagcgctccggcgaacacgtagaccagccggatggagcaaatactggagctcccaggaggcagacaccgaatcaaaccttccccgagcatttcccctaacttaatttgaagaatggcgacctaatttgctctggacacggcgaccgtagaccatgcggacagaggaacgtgttcccggcgatgggtggtggtctagttcaattggacggttcggtaagcatcaagagcatgaaagggtgttggaacaataacacaaagggcgagatcggacctgagttgagctggccgcgagtaggcggttcacggcggcgcagtcgaccgaattgggggaaaacggcgttgcggcggctctgggtgaaattgggggtggggattgaggctacacggccataagaaactatagcttcaccgtgcagactcaatttgggagaagggggcagagacagcgcgaattttggattgcgatcagctcactggtgaagaggtaaacacctcgttgtggctccctgctctatatataggcacggcggtccggcgatcatttcacgaccacagacatcatcgcgagtgcatgccgaccacgtcggtaggaggcacagtgagggagatcatggcctgagtgacagcacggcgagagttaactgagtcacggtggccgccggtgaagactcaggctgggcttgggagatggcgccatgtacgggttatccctccccggcgttatccactccataccgcgcacgaatcaggacggcggcgacacgaatcttcacgaggagaggtcgccggcggtgagagctctgcgctggcagtctgatccacttcag

SEQ ID NO: 5726 - DNA, 432 bp, Zea Mays
ccctttgttgagcaagtcctgcaattgagtctttagttctgctaattccttaggtggcattctgtatgaccttctagatataggtgcagtacctggctgcaattcgatcacaaattccacatccctttctggaggcaaatcaggcaaatcctcggggaatacatctagaaactccctaacaacgggtatatccttcacctctttaatagtgatagcacacacttgttcaactgctcttttcaaagttggcaactggattagcaacttagaattgccatcaggcgaatccaattgcactgttcgttgcaacgtatcaataagagctctatgttgacgtaaccaattcataccaaggatgacatcaatgtcctgattcttaaggacgattaagttagtagggaaaatatatccctccaaacttatgggtattct

SEQ ID NO: 5727 - DNA, 361 bp, Zea Mays
ggaacatacagtagataacggaataaaacatccgatgcattgaagaacatcactgaataagatataaaaaccataagacaaatgataaagtgcagaactatcatatataaatataaccatctaaaacatatctagtacaatatatataagagtttgctaagagctgcatatggacataagtattatctgaatcctaacataagccaacagaccaatatttacatgaacaccattcagtgacactaccctaaactaagctagaactgagataacttgaagccaccaaaagccatcagaccatgatgttcatactaatattaagatagtaaactatactaggctactactgagagaacttgaa

SEQ ID NO: 5728 - DNA, 450 bp, Zea Mays
tgaatcaggggtaccccttactacagtatgaaggcacggtgcatgtgcagctatctctggccgcgtgatgaacaacacccgactccaccgcatgagcggtcccaaggacgtcacgtgaccagaagaggtgatatactctaggatgccatcagtgcgtccggacctcccgagagagcaccagacccctgtacactcaacccagacctccgagtacagttcaggactcccaagtgagcaagccggaccccttggatgaggcccggacccctctgagtgaggtccaagccacccacagcaaggtcccggggcagggaataccctggcctaggtcaagggcaggcgaaggtccagtacagacacgtgcccaggctttatctagtgcgcttccactccccgctcaggcggaggcccgatgctgccacgtggactatcgcccgtgacgtaagccag

SEQ ID NO: 5729 - DNA, 389 bp, Zea Mays
aagctgaccccaatgggtgtgacccgactgatgctgaacccaatgggtgtgacctagatgacgctgaatccaatgggtgtgtcgtccgcattgttgatgaagatgaggaagaggaggatgaaatccctctagttcggaagaacagccgacgctacatagtcagcggggaaagtagtggtgttccttctccagccttgtctgctctcattggtctgcaggaattgtctttggcaaactttgatcagactcttgaagacatggtcccagaagatctgttgttggagccggcagatggtggaatgatggatattcatgccgatgtgcctgatgctgggctagagttatctcgagtggcgtcccgtgtctcatcgaccttagagtgtggtctt

SEQ ID NO: 5730 - DNA, 535 bp, Zea Mays
gcggctataaagcccacctcggtctcgaccgtacacccctgtgcgtccctgacccagcccgagcacgagttcgccggtgtttgcccagagaaccccgtgccagcggccgcacaagccacggccaccgtagactagccaagccatccatcctccaccccgtccgacccttcggatagcttctccggacctcagtgaagctccccgagccgaggattgaacaatacctcaccgaagacgccggatcgacgtcgccggacttcaactggccgccgccgcacgtagaccgagccccatggtaagccattcgtcaattccttgtacctataacatccttagcatcctgtaaagctccctgtgccatttgattgagccctatcgccgtgagcaggccggagtacacgccgtcgacgagcccgactgtctgcgcacgcggtcagccctattccggccatcacagtcgacgacccgcaccttgatgtgaccgccaggaccttccagacctcacccagccgttcatcggacctccctcgccgcc

SEQ ID NO: 5731 - DNA, 721 bp, Zea Mays
ggaaaatttggagaaaacctgccctaaacctcggctgtcaggctaactgaaaaagcttccaatggtacagtaccaaaatatcaacagaagcagatccccctcgccaccggtgacctcgcgcgtagattcgcgccgatgaggtgattcgtgcccacttaagcctggataacgccgcggggtaaaaagatcgtcactactgttgggctatgtgtactaattcggctagccgccgtgctcctttctgctttgtgacccgtccggataagtcaccggagttggctgcccgtcgaccgaacgccacgtgcctcaacaattaccacgtcgcaatcaccagtgttatgcacgtccgatgatcgctagggaggccgccaaggtgaaggccacgaatcaccatgcccgtgacttatttcttctctgaccgccaccacgctcaatccaagttcactagccaccgcttagcaatcctataaattgatggccgagtctgttgtgtgatgttatcacgaagccaaagcacccagtcccaccttcaattagtcactatagccgtagaatttctttcttcccccaattctgtcgactacaccgccgtgaaccgcctcctcgtggttagctgctcccaggtccgccctcgctcttgttgctcgtgttttagcgccctcacgtgctcgtgattgttatccacgcaacccagggagcttgaccttacgtatgcaaccgg

SEQ ID NO: 5732 - DNA, 350 bp, Zea Mays
caaaggtctaagatgagtcacaaatcctgaggtatcgaagatttatcactccctagtcctcatttgagaactgtagcccagcacaagggtgttgctcccccttgatcacgcaaggaccatgtgctctctatgggttggttctttgccactccggcatggtgtgctcccacaatcatgtacgcattgagttgggtcacccataagctttttggtgatcattgaactcctgatcaccaccaaaccatttaggtgatgccgatcatcaagagtaacaaacgcaagctctcacccgacattgaacaatgcttgcacactatcttttctcaatgctctattaaaggctgttaaac

SEQ ID NO: 5733 - DNA, 399 bp, Zea Mays
cgagccggaaagagaagaggttggccaagagggaggaggccttgaaccagagggaggaggtcgtcacagagctccgggccaagctgagtgccatgaacgaaatcctagaagagcagcggatccagcagaccgtggctatggagaggatccaaaaatgggagcgggagctggaggacaaggccagcaacattgccctggccgaggagaacctcaaggagaaggatacttccctggataggcgggaggcggatctcgcctggcgggagaaggatctcgccttcagggaggaaatgtttgaaaggtgggataagttgttggccgagcatgagctcgaggcggaggagaaggagaaaaagctggaagagcggatccggcagttctaggcggcgcaggcggcac

SEQ ID NO: 5734 - DNA, 404 bp, Zea Mays
aaattcttcatgaggttaagaggaaaaatcaaagcggtgtggtccttaaaattgattttgaaaaagcctatgacaaagtgaattggcatttcctctataccatgatggaaaaaaggttttgggagtacttggtgtgattgggtaatgagaattgtgcgaggtggcaaagtagccattaaaactaatgatacgttagggccttacttcaccactcataaaggggttagacaaggggatcctttttctccccttttgttcaatttggttgctgatggcttggcgtgcatgattcataaagctcaagttgagggtctgatttagggttttattcctcatatcatccaaaacggatgttgctgcctacaatatgctgatgataccattttccttatccaagattgttt

SEQ ID NO: 5735 - DNA, 508 bp, Zea Mays
aggtcaaagagacctgatacaaaggtctccttaaggaggcaaaaaacacagaaaactgaaaaaagatccatcaaacacgcccaagaaacaaccctaaacatgtgcatatctaaataacgaatttatatataatacaaggtgttggaggtttcaattaccacatcataaaactactcacatcggtgggggtgtaacccttttagccatgcgccatattggaaatttggaacacgggtatggtgttaaatggacaagggccaggtcaacacccccttagtgatgtgtcgtgtcatgatttgggcacagtgtcaactgagcaaggatcaggttgctactgcctaagtggtgcgctacatcgatgtccaggtgtagtgaaaaatgtgcaagggtcttcacatcatcgacacatacgaagggtaaggaagctagtcgaaccaattagaatttgtctagatagttggaacataggatcacttacagataagttaagggaattagttgagacagc

SEQ ID NO: 5736 - DNA, 512 bp, Zea Mays
atggcctatttggcggcaggttccacgcagagtaagctaaaggatcaccagcattcgagaccctacccctcagaatcatatccagtcggctcagcaaatcctcattgggaatctttctgtttgtgacccgggtggaatcactgatgccggtatataagtaagcagggtaaattctgtccttcaagggttgaatgtttttgaagacgaagtcagcaaccatagcttcagcagtcagacccccatcctttagcaagcagatctcagcaagtaatactttggcctgagttatctctgaaaaggtgggagactctacccagctgggggtgcgaacatctggttgcctccatgaccgagggggagagatttgcaatgattttccacgatgaaccactcaagacgccatcctttaatgctgtccttgaggggaatatcgagatactccactttccttccccagcgaagctctaaacttgcaccgccaacaagctgatgctaccccccagccatcccgg

SEQ ID NO: 5737 - DNA, 698 bp, Zea Mays
caagaattcatggctcatgggctttgacgctcacgggataaaacgggaaattctcggtagaatatgggataccgtaaatacgggcgggtaacacctcaaaccgttttcggtctctttctcggatatacctatcccggtttccgtaccgtttcacattttcctgataaaatgaaaatagacagttgtaaatgggaatacggaacgagacgggacggtataattttgttcgttttcatccgttgtaaatgggaatacggaacgggacgggacggtataattttcctgataaaatgcaattcgcttccgttggtagtacacgctccacaactaataaacaaaaaataggtgaaaatgatcttgacggcaatggtactgaagcatgcatcatcatccttggataagctctgcgctgttccccgttgcgaatcctcgcgtgaacgcaccaacggcaaaacaagaaggcaaatcatgtacgcttgtttgccaccatccgagcgaactagtgcgacaaaaatccgaaccgaggtccccacttatccccactacatcctgcaacattgatgtgatccacgcacaccactcgtttctgtatacatctctaataggtgcaggaatttgccgaggaaatgaacatatatagacatacgtacgtagcatttgccacactacctctcattagctataatgtggcagagaaa

SEQ ID NO: 5738 - DNA, 367 bp, Zea Mays
gacgtaggcatcagagatcctgctctctcaactccaatggcacgtcgacagcgggatggagaagacgaaggcagtgcaacacgctaatgtgaggaggagagagtatgtattgaggacgacgtctcgccctcaatttgtacacatgacgtggcaaaatagacaagtaatcaaccacataatcacaacactaacgtgacaatcaatcataattaatgcgaaaataattacttaccaaagcatgtcagcgcaattttctccatgcatgcaaaaataccaagtagcaaatggaagtcgtgcacccgcaaggtcggaagcgagaaatcaccaaccattcacgtgcatgtcatgcacccgcacccattgctcc

SEQ ID NO: 5739 - DNA, 657 bp, Zea Mays
gggaaataaagcaagtcagggcggtaagagctcacccacatctgggcagcaacgacgccatccatggtgctcggccgctttggtggttctccgtttttctcccggcaaggcgcgactcttcttccaacatggcgcacacccggattgcccagtactgctgggttccatccacggctacggtcgctcccggctactatggtggcgctgccaaccaacggttcacgctggcgtctatctcctcggtggtggcgtgcactagctcctatgcgtggttatggccgaagggaaacagtcggctgaattatatactcgttggagaggggtgtccgaggtgcttggtcaagcaaacctcatgctgatccggtattcacggagcggtcagcgacaaacgcgtcgaggaagacggctccgaaagtggctcaatcatacccgtatgcgaaaatatttgttgatgcaagcacatgcataccatgcaaaagaatacgtgatcaagtcttaatactgtcggcagggtgaggaaaacggaaacaaaaaaaaaactatgaaaaaaaatgttgcgtcggccaagggcaagttttcccttttattattattattcttgttttctattttttttcttttgttttcttatttcaaatttttgaacctatgttaaat

SEQ ID NO: 5740 - DNA, 559 bp, Zea Mays
tatggtacatcccaggatgtatcagttggaccggacctccgcgagggagcaccggacccctgtacgcacaacccggacccccaattacggccaagtaagcatgtcaggtccctcggatggggttccagatcccttcaagtaaggtccgggccacaacaaggtcccgggacaggggagaccctggcataagcaagggtccggtactgacacgtgtccaggccttatcctgtgcgcttgcgctccccgctcagtcggagacccgatgctgccacgtggcttgttgcccgtgacataagccaacgggcggagcctgacgtaaggcctataggacgcgcggtctctgcatttattgcggagaggacgcgccgcctgtccaccctgctgacaggtgatgtgccccttccgcatttaatgcgtcctgtccactccgctgacagacggtgtcagggccatcctgcagacggtgcacctgtccaatccattatcaatcagtgcgcccgtgccgcgtggcgtattgtgtccatcatcccttatacgagaagcttcccctgcacgtcga

SEQ ID NO: 5741 - DNA, 392 bp, Zea Mays
ggaaaacacatatctaggcatggtgaagcggaacatgaagtaatatagatacctttcgatgatctgaggcacgttctgggcagcgacgtctacaaccacccacccatgacgactgtggtcgaggatacctccgtgcgtgggctcttacctcaccgcaatacctctcggcggatcgagcctccctcctcttcgacggtctactgatctgatcgtagactcgctccatgaccgcgactgtcatcgtactctagcaccgccagcaaggtttctcttgatgtccgcatacaggacccgcaccgactccgatggacccgcccctttcctcgtcgtcgcgccgcaaccagactccaaaccacctccacctatctactcggcaacttcgcagcaaccgc

SEQ ID NO: 5742 - DNA, 578 bp, Zea Mays
ctaagaccgaccagtagccgaagctacagagtccttctgtaattccagggttgtcaaggacagtaaccgctctagcagcgactcctaggaaagggaggaggatggccagcgttctagacgatgttctgaaaccttcgaagatggatacttctgctcctactagggtttccgaggacataatcgaagaattggaagaagctgtcgctgcaagtgctattcttgattgcaccatggatagaccttcagaaactaggccaatagagcaagtaaaggaaagtctaccagggaatttaacaccgccaatacctgaagcgacactgaccgaagatcttgattttatcatccgccacgcttcgggaaagcaactgacatagaggcaagttgccgaggcccgacattacgccaaggaactgaaatatcctcaagggtctctggtgtacgaaggtaatgaagaaaatgatttctatattgtcttcctgacagcaaggaagttgttgtctgccgggagatgatggacaagatgggttattcgaagtttgaacttgggctatccttaatgtcgaaggaccatctagcaa

SEQ ID NO: 5743 - DNA, 537 bp, Zea Mays
ttcgtcgcggatcttaacaaacctgtaccggccttacgaatccgccggtggtgggggctggttgagatccttccgggcgcattgccaccgcccagtctcgttttctccccggccctataaagagcatggtccgcgacccctggatccccgcaatactaggaagccattgtcggagagagagaggtgaggaacagagaggttgccgccagccgccgtagctccatttgcggtcggtgatcctttaccgaagttcaccatgctattgtaattgcgtaacattaaatcgtcgtagtgattagctcgctagcccgcggcaattgctcaccggacataaggaagcgtcgcggagccaccttctccgtggaccaccttctattcgtcatccctacctccggtgagtcctcagaaatcattgccacgtccgctggatcgcatagcacctatcctattcgagtattgcgcgtcggggcaccatatcgccactcaccggcgaaatcgccatcgccgaagtgggcggcaccgccacctggaccctcg

SEQ ID NO: 5744 - DNA, 951 bp, Zea Mays
ttttggttcagttgctgtataattcatttggattctatttctcagaacgggactgtaacgccggaaatgtccagtagtgtagtgtaactttgttggatggtatgcctttttttgctttaccatcagcaaatattagatgacatccataacaaaggatgcaaaatcggtggtccgaagtacaaacatccacatcgtctctcgatctcaagatgttccatccagataaatgtaggcatcacttttactacatttgaatgtgtttaaagtttaaacttagagataattggaggcgactacatattagcacgaaacactgataccaaaaataaaagttacagataacttgcgagggctgcaatgactctttagtttagttaatgacagcatatcattattatcactcacatgacttggatacattcagaaaaatcgtggcaataatttgttacgtttactccttgatcacacggccttgacagaaaagaaaagctgatcagaaaggacagaaaagaaaagctgatcagaaccaaagtgtagtaatcaaccacagattcccgtagcaagatgtccgcagtggcacttgccaacaagatcggacgacgattagtgatgctgcgggttgggaccaccggggctgagcctcttcgacccgtcgtacggtatccccggcgcctcctccgaccaggcagaggctgaggcagaggtcgtgttcccttcagggcccttggcaatgacaacttcgtctcgcagccagcgtcgccccatcgcagggcggctatcagagagcgggaccggcgacgaggcgatgacgagaacgacacagatgcagaagcacaggacgagcttcatggctgatgagaagtgtgctgctaatagtggaatgcggagatgatgaactagagcggccggctcctccgtccatttataatccaagcgtttcagttttttatg

SEQ ID NO: 5745 - DNA, 967 bp, Zea Mays
ctgggctcctctatttatagcctccaggagggccaccaggaacgccagagtttgtcgtatatgggagaggaggcgtgtccgggcccctatagccggtatggcctttgtacttgttgttgacttaagtcgggaaggagatgtctggttcttgtatttgcatctttgactgtgcagagagccgaggctagtgcctggggctcagtcacgcacccgagcctattcaatggaggagttgtccgagtcgtagtggttggagcagtggtaagtatggcaaaaagctcttagcaatatgtagggtatccgacatcagatctgcagcttctggtgacgttgggtgtcctttcgtcggtattatcaaggccgaagccacgctcgggcgaggcagaagtcttcccgaggccatggccgagccagctctagggctcgcagtcgtgtagggaacagttgaaggagtggccttctgcgggatttgcgggagacaggtggtcgaggccaagctcagatgaggcggagtttcttcccgagggctagaccatgatttgtcgtacgcgcgtcctatccagagttggcagacatcgtgagggagcagtagccattattcccgggtatgtgtcatcgttgttggtgaaagtggacgggaccacggtcctgtcgctcctatttgactaaagcgttacgtggagtaggtatgcgcattgattgctcatgtcctcgtggttcccgtgacatttgattgagaccgggctcggggctgtcctctaagcccgaggcgggcttgagcaagacggaaacagttgttctatggagaggggacctccggcgacacgaggatttccccgagtgctacccttgctcgagggcaggctcgggcgaggtggagttttaagcgaccgctgagtgaggtctcgagcgaatcgtggctcactttcttgaccttggggaacatgttttatggtagtttaaggtt

SEQ ID NO: 5746 - DNA, 606 bp, Zea Mays
gttgggctgtatgtatgcaccagttgagaagcagtacgggatggccatacgatggatgtcggttacgtacgtggacggccaaagcttgaaacttcccttctttttgactgcagctaggcatcatccatccggaagaagaattgcgagaaaagcttggcatacacacacacagataaagcgcgcggccgggagctgtggccattgtataagatcgaacgccttcttgggagacggacggacggcacaaaggcaagggaatggaataacaggggggggataaggcataggattctcgcctgttggtgtggtgtctcctttggtaagtttggcaccaccagcttagcttagctgagctaagctgagctaagctcagctactgggggcagccaactgccaaagcccaaagggttcatggtaaggcaattaataggctgtatccgtgtgtgcactttgaagccggtgccgtaacttcacctgctgtgcgtacatgacatgcatgcatggggggcagcaaagcatatatacaaaacaaaagcgggcttaaaatgcatggagcagcccctggtttcttggattgcgccctcgctgtatcctcctcctcctttt

SEQ ID NO: 5747 - DNA, 557 bp, Zea Mays
ggagcatgtcatgctgtaccaactattgtttgtgtgcacttgtctattagagatagcaactctctaacatgtgggacaaatgccaactttaattttaaatttatttttgtggggatgggccatcacacgttttgtcactgggtcctcgcgtatcatagaacaattacattatatcatcaaatatgattggtgtgctggttcaatacgcgagcattgtactagttggtcacaaactattggtagagttcttcctgcacgacggagggtgggggagcgatacattgcgccttttggagatggtataatgtgttgtcgtcatccgtatgccgctggcttgcttgcagcgcctctgtagacattatcccactatgtgttgtgctcaggtcactgtcgtcgctcgccacatctgtgatccacgctctagtgccgtcactcactcgccatgcactgctctcacgtacaagtcggtgctcgctggatccgttgtcgtgcctcctgctgaccaccgctaagcgaaggaaaggagttgaaggagccattgagcaaggaggggtcgg

SEQ ID NO: 5748 - DNA, 480 bp, Zea Mays
gaagttttgtgagggtatcattcattgttatggggaggagttctgtcgtcaaccaaatgtcgctgatactcagcgtctacaagcaaaagcagaagactgtggctttccaggcatgctagggagtattgattgcatgcaatggcaatggaggaattgtccggtcgcctatgtcggtcaattcacaaggacagatatcaaacatcccactatcatcttagaagtcgttgcatcgtatgatcgatggatcttgcatgcatttttgggcggtcgggtccaacaatgacattaacgtactcaattagtcgccattattcaaggatgtccttcaaggtcaagcacccatagtgaacttcattgttaatggacacaaatacaatatgggatactatcttaccgatggcatatacccttcctggccagtgttcatcaagggtattcctcttccataaagtgagaaacatcagttattcacaaatgctc

SEQ ID NO: 5749 - DNA, 1007 bp, Zea Mays
gtgttgtggctggccggcctcgtcgacgtcgaccgcgcaaacgacgacgttcgactagaaggcatgcaagcccaacatcgggcaactccttgggtggcggattgctgcaagctctggacatcaatgatccacaggcctccaccagtatcgtctcaccatgcattatgggatggagtaacaagctttcggcatcagaggatgatctcaggactgcggtggtgttaactattattagtgaccttgtgataggtcaagcagagattgccgcccttctggctccacgactgaatatcatcgaaacatcattggtcatccgcaggatttcctcaagcagtttgctactgattctccctgacattaccatgatagagctcctcatcagtcgttggtctatcatcagaacagctatgttctctgttatttgtaaacgttggacaaggtttctgggcgcttcgggggttgcattcccatacttagttgatctggagattggaggaattcttgttcatgcttgggaaactagtacggtggaacatcttcttagcccttttgcttggattcatcaggtgcatcaggatactttggcgctgcaagatttgtcctgcttccgatgctctgcttggtgcactaatccgtctactattcctgcttcaagagatttctggattgtcgagtctgttcaggttgttgagggcaacgttggagaaaccatagctctaagttacccaatcactattcgtttttccgttgccttccgaccgaacgattccaattcgcattctggtcctcctactgataatttggacgatggtgctcaagatcatgcccaccatggactgcatcaagggcaaggtgcaacgggggatgggagatctaaccccttcatgcgggatggtcgtaacttatccctgggacgttcagccagtcaccgatcagggcccagacagttgttatctctccctgagtcgtgctctgttgacgcttctgaattacaacaccacgctgac

SEQ ID NO: 5750 - DNA, 666 bp, Zea Mays
atttgagtataatccagtgattgtttgattgagggtgctataacaaaatcaaagatggattgtaggacaacaatttctctgcaggcagatgatcatgttgtcacacaaaaattggagaataaggagcttcatttagctctgtcaggcgctctgaatgggattccaatggtacagtaactggagaagatcccaggtgaagtgcacctcgccgccggcaacccctcgttcggattcatgctggcgccgcgattcgtgccctctgcggtgtggattacgatcagcagtggaaagattttcaccgtggatgagtttggagcactgttttgccctgttgccgtacccacttgcaccgtcgacgtggctgcatggacgtcgccgtggttgccgccattcactcgatcgcgccacgctttaggatgtcttaccacgttgtcacgagtcatggtgagtacccagtaaccgtcgtagctccttagctagtgactgccacggtagaatgccgctgtaagtcagtccctctctctggcctccagcacatcttctcaaaattgagcgccaccgcagttgagctctatgaattgatgccccagtaagctccgctaggttgtcatgaagccagagcaccagcccttgcctccgattagccaccatagcaccccaattcct

SEQ ID NO: 5751 - DNA, 723 bp, Zea Mays
ttcaagagcacatagcctacagagtgtggccacttgtggagagctgggatatgccgaaggagactactgttgaatccagtgaaggtggtctggttcgattgaaatataccttcagattcagagagaagtttgacgaaccaaacgatgaatggttgaaatgcattgaagctaccagcgacgagctgcttcggacatattccaaggccgaagatgatgccttgtccgtagccttcgggggtcggggcaagaaaagattaaacagggtttttgacgcaattggcttcgtatatcctgactatagctaccccttgatgaaaggaaagaagaggaaaactaccgcttcgaccaccaccgttgtatcgaagggcaagaaaatgaaggttttgacacatcgacatcggtatattgaaacgactatagtgcttgaatttggtgaggaaacctcctctactgccgaagcagaacaagccactccctccacccggagcgctgaagggtctactgtagtgccgaaggtacctacagtcgggccaagcaaagccaaagatgattcggccaaagagccacaagtggaaaagacagtgaaaatgctagaaattctgagcccaccaacagaggcagaattgccgaaagtgcaaaaagctcctaccgcaactcccaagagaaggaggatggccagcgtgctagatgctgtcatggagaccacaaaggcattgagccctg

SEQ ID NO: 5752 - DNA, 459 bp, Zea Mays
ctaaagagttccaagagggggatctcattctcatcaggaccggcagaacggaatccagaggcaaactcgagccaaagtgggaaggacccttcatcgtcaaaaagaaaacatccccaaatgcgtacatacttgcaagccaaacagacgcagttcttgaacattcctagaacatagacaatttgagaaaattctatctgtaagacggcacatagtcggggtcttctcgcctttgtaaccatttttgatacatcactccattcaggcccgcactcttttcctcgcagggggcgaggtttttaatgaggcggcaccatgtaataaaataaacaggaaagtccccgcacaaaagaaagaagtgcgtcccgaacacgttgaaaaaggccgcaaggtcagccttcgctattcaacggcaggacagtcaccacaacaacaagtcttaagtcagccatcgtgtgcgac

SEQ ID NO: 5753 - DNA, 319 bp, Zea Mays
attgctaaatccggtaaggagctatcaatcgagttcgccttgttctgcgctaggtgtagtcctcagttattacaaaaacacgtcattagtgcatcatggtgtcgtcgtcgagacttccgttgcggggacgaaggcgctaatggggctctaccgaagaaggaagaagggcttggtgtcgttgatctgtaatgaacgacgcagattagggttctgatgtcggtttgacctattcaatctgggccggtgatcgaagatcggaggggtgtgaatagtgtaggtttcataatatcgggccgtcggatcctgatcttgtggccgc

SEQ ID NO: 5754 - DNA, 426 bp, Zea Mays
aaaccagcgaagcaggaggccccaaccgaggatttcccagaatatggtgcctcatgatcttcagcggggctgaggagtatggtgacaagcgccgcctcaaggtcgcccaccacgaggtgcacgcagctgagcctgttgtcccgcggtatctgtggtagtcgaagttccccatcttattcgaccactacgaccacccggatagaatcctgcacccaggggccttccccgtcattgttgatcccatcatgggctcaaagagcctctccaaagtgctcatggatagagggagcgacctcaatatcatgtatattgagaccttcgacggtcttggaatcgcatgatccgcgttgcgacctagctgatcgacatttcacgtcgtcatccccggccaccaagcctacccactcgggcggatcaccctaccca

SEQ ID NO: 5755 - DNA, 372 bp, Zea Mays
ggcgaaggcagtctccgacgacaacacacaaaagacaaaagtcacctccgctgaccaaattccactagctcatacaaaagacaacccccatttatcaccaatgaatcaacaagagagagatccccttcccccaccacaaacatccattaaccaacccaatccttaaagggagcgttgacacaagaagcttggaaacccctcaccacgctccatttaacccctagtgccacccctaccaagcaaagtctataatgacttgtctaaaggacaaccatccaactcacgctcagtcgaagacccattcaagtcttcattccttagactcttagttgcactcgtggccattcactttgaagttcacatttggcgctt

SEQ ID NO: 5756 - DNA, 568 bp, Zea Mays
taccaaacaacaaaagaaatgatctgagcagagaaaataacctggagattaaattcttggttcacacgcaactaatatatgaaccaacataagaaagcacactgtgttaatcaaaatgggggaaataaggactacacttgccaggtgcatgtgatggtggcgaaccggtgatgtagcatagcgccgacgtgatggcctgatgggtgacgaggaaggttgctgggtcggcgaagctcctgcagggacacatcttgacgttgtagaagggcaggaagatgatgtgttgaggtggatgtggtgctgtcacccaccagccaccaccatatggctttctgctagtctaccgctcgaccgtcgcacgagctagggttgtggcttgtgcttgtccgcccagtcgcccacacgctggactaaagacagaagtaggcagaggcaggagtccgtgcggtgctaggccttgtaaacttggacttggccacatgggtctcgtatgtgaccatgagtgagagttgagttgagttgagacatgggcctactgatgagaatggatcagtggagttgagaaatg

SEQ ID NO: 5757 - DNA, 296 bp, Zea Mays
gaaaagtctgaacccaaccctaagtcgtttgacacaacttggcatagcttttgtctcggtttggacagctaggacaaagacaacttctcacccctatatctccctaccccgaccgtatccttgcttgggactcacatcaaaaaggtaggatttggtgcagggaagagaccgtacatgggggttttgccaagaactgcacgctaaggtgctcaaatcggccattgaaccatggcagaagcaaacccacacgtgttcgacgatggctgacactcgggggcgcgctcagagcacgcccg

SEQ ID NO: 5758 - DNA, 367 bp, Zea Mays
aattaacaaagatgtggcagactaacagtggtattacaggaaaccaatcctctgcattacttcccatcaatgacacgtgagtccagttccaaatcaggcccacacgtcagtgactcatctacagttacctcgcggaagtaactgcagaggatctcgttgcggacgcaacttgcggtattacatgaagtctacactaaacccagtgacgcttccaactcataaatctaatctcctaagagctggatgctttttaaaccaaaccttattctcattgttacaagactagctggttagctttgggtacatgattcatttattttgactcaataggtaactggaaaagtagaaccataactagagaaaaaac

SEQ ID NO: 5759 - DNA, 534 bp, Zea Mays
tgcaaaaccctagcattatcagcagtggcattcactagggcagtaatggcatctgcaagtgtaggtggaactggtggtgatgaagggttgatatcagcttctgcgccaccacgcgatgtgccaaccccatccgacccacaagtacgcataggcatctggagtaaaacaaactcatgaataaacacccataaccatgaaatatattacatgagacagatacatggagttttattcattacaataccaaaattgacatagcttattatcctatgcctacaatagaggtcacagcaccatacacatgtcacattaaccctctgtatcactagctatctcagaaacatcactgcctcctggagactcaccacctagtacaagcataggagctgcttcttcctctaagtctgcctcaggctcacccccatcagctagcacaacaccaccttctgccttcgcagatcctggcgtgtcattggggtgcagctggtagtaaagctggtgaacttccttatgcagttcattagagtaatcctc

SEQ ID NO: 5760 - DNA, 560 bp, Zea Mays
ggctttttgagaaaagggcgcgacgaaggggtatgcttgatcctggaccgcacgatagaaaatggatggcccagattagatcacccatcaagtgaaccggtatgcgacacagaccgttggatccccaagcagcggcccagatttaattacccgagattccatcgcgaccctcggatcctgatcaaacggcctcccgcccgagccgtggaggggatcctcatctaatctcaaccgttcccattagatccaaccgtcaactattagcgtaccagcgccagagccatagccgatggttccaagatcaacgaaccaggatcgatccatcgaaggatatgcctatatctaatcctagccgatcacagtgggacggacggctagatgcctcccattatcctcccccacgccaacaacagagcagaggcggcgccgcccagcccatgcgacggcgccatcgccggtgcacacgacacatcaccctggcgtgcgattcttcaatacaatgtgatcattacgaagtggaagcgatggcgaacacaacgaaagtgatcataccggcgaac

SEQ ID NO: 5761 - DNA, 401 bp, Zea Mays
cgggtggtgaggatcccatgatgaggcgagtggtgattaaatcaaagctactgcaccttgcaaggcggtgaagacgatggcactattaataacaacacgattgatgcagttacgtggtgtgtggcccactgcacctaatgtatcgtccggatacgaatgtggtcaggtttaaccggatgatacctttgaccacttccttccttttgttcgaaggctacggttatatatatatggtaaggatattagaagttctggtcttacaatgattgcagtaagcctcagtagcttttggaccctactggcctggccgtcttcagccccactactatcaaaaacaggctctttgctgagtgtctaaagcactaggcaaatcccaaaaaacactcgtcgaaggctttgtc

SEQ ID NO: 5762 - DNA, 616 bp, Zea Mays
agagggtagtagagtgtagagactggagtctcaccgagtcaattagctagaccttttaggttacctctggaaaccatctttcctttatcgcctccacagctgctgccactaactaaaacgctctccaaagctctagttctagttccccctagacttcgtaacatgtgggcccaagttcgtttcagagaaaacgtaacagtctctactctctagagtatgtaacatttggttggttggtgatggtgatgcccaaaaagatcctcggatatccagtgcaggggtgtatcaaggtgttcgcaaaagatcgtgtaaaatagagagtttgtcctgtaaattacaccgtttacatagcgcatcggttttctcccctcatacgcaactcaattttccaatacgaagagaagtaatagtaccactaagggcaagtacaaatccaatgaatatgccatgtcttaagtttattttaggggcttgagtgaaagatacaccaaggaacaccactttcttcttttgtactgtttttttttcttaagtgcaaggaacatcatcttgagatgcattgattatggataggttttacatacggttcatcatgtcacactatgttttattcttg

SEQ ID NO: 5763 - DNA, 1236 bp, Zea Mays
cgtcggcttcgttatggccgacggtagttaattaactcccgtcggcaaccctaaaaaccgacgggaattattatggccgacgggagtattcagttttgctgttgtgggtggctatgggctcgagggacccctcagaagcatcttcatgtcgactcggttggcaagcgagcgagcgtgagggctcacttgttcttcaatattatccaaacctcgtcgctctagccggtggcaaacccctccacgatcacgcctacgttgatcttgtcgaaatggataccatctgacccaaggccaggctacccctgtggaacgccccatcaaagaccatgcgctccacgtgaccgagtagcgcccacaactggtcaataagatgcacttgggctagtggtggaggagcaaggtggccgcacacctcactcatagctaggtgaagctcttacagttcgacgccatgctcctttagggaagtttgcaattgaaatagcatgggaatggcagtgtcacaagcgatcgagagcttgcgcgcttcgtcctccgccaccttcttcacctccttggccacttccatagcatcctgggcctcagagaacttctagaggtctgcaaaggagagatcatggagcaaccatgagcaccaagggccaacaaaagctcgaccaaaagcccactcctgccgaaggtccaaatttgccttctgcagacgagcgttcacagcccatagggtcgactcggcttcctcggcccacgagtacgcttcgtgcaggtcttgctggagttgggtcctctccccgttgaggcgtttagaatcaccgcgtgccttattgtgccccgagtggtggcgtgttacctcactctcgagatgctcgaccttggcctagagggtggagagctcgtgatctatctccctcgagcgggccacttctgcctgcagcctcaccacctcccgctgcatggcctacagtgcctccctctagggcgacaatcaagagtagtgatgctgcatagaacggtccgccagtaaaacctaaccacaacaagaaaaacccaaacaacggggagaacagaaaggatggtgcatttacctggtcatgagggatgatgtccaacgtcatcgacgaataggcgatcaaaaccgcctctctaaagttgcagaggaaacattgcactgcctccaggctcttattggccaagtcggaagccgcctcaatcaagtgccactcctccgcttccatttcc

SEQ ID NO: 5764 - DNA, 477 bp, Zea Mays
tttttaatcatagggtttttgccctaggtcaccacatcaaaaatgtagcccaatcatagaagaacaactttgtttaagggtgtgagcatagttgttaagaaaaatccagagatagctaagcctaaagttgggctgtcagggtacctatgtctgaatttcaggctgacagtggactgacatcaacttcaagcccaattttatgcatgatctgttggctttttgtggcaacaccatatagcaaaattgtagatggcatgttgctcaacaactttgctgcagggattggtttgagttgttattggaaatcaagagagaatttagctgcaaaattggctgtcaggcaccctgatgagcatatcccatggtacagtagatcctgaaatgaagaagatcccgacttaacccccccccccgctcgtcgccaatgagctgtcgccggtggtcgatcttttgttgcgattcgtgcatcgtatgccg

SEQ ID NO: 5765 - DNA, 458 bp, Zea Mays
taaggtcgaggtgcagaagtttctcggcaagataaattatttgcgaagtttatttctaacctaggcgggaagattgatgcctacacccctatccttcggcttaaaaatgatgtcgaattcacctgggggcagaacaacaggaagtgtttgatctcattagaaagtatttgtcttcggctcctgtgttaaaggcgccacaggtaggagtgtcgttcagattatacattgcagctgaagataaagttattggagctgttttgacacaagagaccgaaggaaaggagcatgtggtaacctacctaagtcggaggctggtggatgctgaaacaaggtacactttcatcgagaagttatgcttatgcctgttttaagcatgcaccaagtgtagatgttatttgttgtctagtcattgcaccgtttccggtcaaaccgatgtgatcaaatacatgttgtaaaac

SEQ ID NO: 5766 - DNA, 597 bp, Zea Mays
ggcagaagtcctggctatcaaactgtttgtcgttgtcgactgtgagctcggacgggactccgaatcggcaaacaatgttttgccagaagaacttctgggcagtcttcgacgttattgtggatactgccctggcctcgatccacttggtgaagtattcgacggcgacgaaggtgaacttgaggttcccttgagccgtaggtagtggcccgacaatatctagcccccagcgttgaagtggccatgtgtgggcgatcagcttggtgaactgcgaagggttgctcgagcggggagaaaacttctggcaagcttcgcacgacctcgtcactcgattcacggcgcagattatcgcgggctagtaaaatccttgacggatcaccttggcagcgagggccctgggccctgagtgggagccgcaagttccgctgtggacttcacgaaggatttgaatgccttcggtttcggtgacacattttagcatgggttgactgatccccttcttgtatagttggtccccgactagtacgaagtcccgactttggtgcttgaggcatttggcctcattgacgtcacttgggtggtaatatccttgcagaaaat

SEQ ID NO: 5767 - DNA, 478 bp, Zea Mays
tgttgctcggataacttcgcggggtgaaagatctttggcaagagatgaagatgggacactgttgtcgctctgtcaccgtgcccacttgccggcgatgtggccgagcggccatcgccaaggtgtacactggtcatcgtaattgcgccacgccgtgaccctttcaccacgtcgttaccagctgtaatagctcaccagtgaccgtcgtagctccttagcctgtgactgccacggtagttcacgtcagggaccttctcctttctccggctgccagcgagccttctccaaattggacgccaccactgttggcttctataaattgagtgatcgatcaggtcttctaggttgttacgcgcccagtgcactagccctcgcctccgattagccactgtagcgccccaattcctttcttccgccaaatcgggtttccgcgccaccgtgaacgcttcgccgtggctagccctctgcaggtcagttcaag

SEQ ID NO: 5768 - DNA, 414 bp, Zea Mays
cacaaaaccaccttctggattggccacgagcctatctatttgttgactaattttggcaccagtcatcattgcaggtgggcagtctatcactacgacacctttcgtaaagttcttgatgtctaggcggaatggatggtcaggagggagaaattgtcgatgtttatcgaacgacgaatatgtgccaccctttttcaaccaaatgaacctaagagcttccttgcaaactgggcatgggaacttaccatgaacacaccaggcgcagaatagcccatacgccagtaagtcatgcatggcgtactggtaccaaacatgcattttgaagtttgtcttcgtagctcagtcatacgtccataccccttcctcccaagcacgtaccaattcatcaatcaaaagctccatgtacacgcccatttt

SEQ ID NO: 5769 - DNA, 283 bp, Zea Mays
tttggggttgcccccaatgcaagcataaagcaaataacattcgatatagtgtacatggtctacccgtacaatgtcatcctagggtggggcacaatcaacaattttgaagtggccacacatgacctttatctatgcatgaagatctttggcccgattggggcaatcacagtatacgaagaccagcaagttgctcgcaaaatagagagggacctcacatctggccaaatgcaatatccactgcctcgccaaggagggcgagaaatttgttcccaactctccgaag

SEQ ID NO: 5770 - DNA, 959 bp, Zea Mays
agcatgtcgaaaaagaccgcatcgacggtcttcggcattcgaccactccgaagtcaccgcgagaggcagcgcagactaccctcgtgtgcgacactccgcaaaagttgcctaagggtgcagccggaatagcacaataagtgcacaaaatcgaagtcttctcctaaaagactctccgtgcaaaagtcacctaagggtgcagccggaatagcacaataagtgcgcaaaatcaaagtcttttcctaaaagactctccatgcaaaagccgcctaagggcgcagccggaatagcacaataagtgcgcaaagtcgaagccttttcctaaaagactctccgtgcaaaagtcgcctaagggtgcagccggaacaacataataagtgcgcaaaaatcgaagtcttttccaaaagactctccgtgcagaagtcgcctacgagagcagccggatcaacgaaggcacgcaacctcataatacaaattactgttacatacacacagcgagggcatcatatattacattggctcaaccttcgggatgatacccatctcactgtaattgaacaacattatcctcaattcctcaccctcaaaaagatttcacagctccccttcacctatgctcgccacaatcgacgaggacaacagttctcgcttaccagtctggtccacgcgaagacggccacgctccatcccaatacgatgacgcctaccactttgcgacaattcactcactctctgtttcgccaccgcccttcgccgcctatacctagtattcacacccgggagaccaccagaaccttccacgcgcggcgaaggctctgctacatccacatctaatgctgcaaaataatccaagccttcatccgaagctcctctgtccacgaaatcgaacccccagaatcatcagactcaaaacactcaaacatagagccacacgaatcatcatcagcaggcactacagttga

SEQ ID NO: 5771 - DNA, 451 bp, Zea Mays
atccgggcaaagccaatgttgtggcagatgccttgagcagaaaggcccagtgcaattgtatgagcatggatgtaagagttaccaccctgtgtgatgagttatgcaagctgaacctggaagttgtttcttcaggtgatttaaactatatctcggtggagcccacactacaagagcaaatagtcagggcacagattgaagacaagggtgttcaggttatcaaagaaatgatcaagcagaaggcagagaaatacaagtgcttccgtcaggacaacaagggaattctatggtttggagatcgattggttgttcccaaggaccctgaactcagaaagaagatactggatgaagctcacctttcaaaattctccatgcaccccggtagcaataagatgtatcatgatctcagatccctatactggtggaccagaatgaagagggagattgccaagta

SEQ ID NO: 5772 - DNA, 539 bp, Zea Mays
ctcgcccctatgcccgcgctcatcgcccagtcaactacaccatccgcccttccgtggagggcacacgcacgttcgcattcatctcatattttacaaaaagatccttgtattctttataatcaaactcgtagtccaataactaaaccctaatgtcgcgatgttgggcattcgctggtccaggtccgtgcaccccacccatcggcatcgatcctaaaacagagataaacattgttgccctatctccggaatccccactccgccagtaagcggtcccgacgctggtgacatggccgacggcatcacccctaggcgcaaattggacccggactagctgaacatcctgatctggtccacgcctcccccgtcctcatgccataactcccctccctgcacgacaccatccctccctcagttgtcgccatatctcctgccccctcggcttcggcgacgtgccgacgagcaacgactttatgcggcaggctggttgcgttggacgggactcctccgtccccatgccatagctgtcctccatagggtcg

SEQ ID NO: 5773 - DNA, 1934 bp, Zea Mays
atgcaatttcttacattgctcccttctcccttatcgttttctcgaccgcttgctgcctgctttaagcctttcagagaatttcattctattataacagtcgtctgaatcctcaatcattggaggattctcctcatctacacctttagtacaagcatctcgtagaataatcctgatctctctgaaaactgctattgatgttcttacgttaacaccttcaagatcttctatccatggagtagctaacccagcaagtatgtttttatatttttcatgctctttttttcaataatacccatattctcggacccagaatgagttttttctatttagaactgacccggatgagttttcgactatgacatccaatgtaggctggtcagaagtcaaaaatgatctgcaaactgcattgtagacacattggatacgtgctgtctcagaaatatgaactacgaagattccaatagcacgtttgatatccctggacttttttcttggcaattgtatagactctcaaacgaatctcttagagcatcagggcccatcctagtttgcccaacgtccgtatctggattgagaaacctatagttctctgcaatatatatatatatatatatatatatataacaatgacatcttatagcatttaactttctatttcaaatgttccatacattccacccctccaacccttaaaatacaggtttcttcccgccagtaacaaagtaatatatcgctgcttatactcaatggtaagaaaaaatgttccacccgctggagtggtatagatcatgcgatcaggatcacaaatttttgatatgtcaaaatgtaagccatattttagccatcatgcacggatgacctcaatcccacacccaacattttttagagaatgattttcagttccatcatcagatttatctaagtatatggtggcttttttactcacttctatatccttgatgatctgaatcgatcgcacctcaaacaaaagaccatctaacagatcagttattttccaggttttctaaaagatgaatatagtcaatatgtcttttgcttagaaaacctgaaaaatatttgatctgttagatggtcttttgtttcaggtgcgaccgattaagataaagaatatggaagcgagtaataaaaccatcatatgcttagataaatctgatgatgaaactaaaaatcagtctctaaaaaatgttgagtgtgagattggaccatctgtgcatggcgcctgaaatatggcttacgttttgatatatcatgaatttgtggttctgatcgcatgatatataccactctatccggtggtacattttatcttaccattgagtataagcaacaatatattactttgttactggcgggaagaaacctgtattttaagggttaaaggagtggaatgtatggaacatttgaaatagcagtgtcaaatgaaaggtacatgctacgagatgtcactgttatatattgcagaggactatatgtttctcagtccagatacgaacgttgggcaaactaggatgagacctgatgctctaagagattcgttcgagagtctatacaagtgctaaggaaaaaagtacagggatatcaaacgtgctattggaatcttcacagttcatatttctgaggcagtacgtatccaatgtgtctacaaggccgtgtgcagatcatttttgacttctgaccagcctacattagttgccacaatcgaaaactcattcgggaatatgagtattgtggtaaaaagaatatgaaagatataaaaaacagacttgtaaggttagcttcttcatgtgtagaagatcttgaaggtgctaacgtaagaacatcaatattagtttttagagagatcaagatcattctacgagatgtttgtactaaagatgttgatgaggagaagcctccaatggttgagaatctag

SEQ ID NO: 5774 - DNA, 430 bp, Zea Mays
cgtttccaaattggagcacccacttcttttgcaaaaggaacatctagccaaaacgatttgtcaccgataggctggaccacccttgagtacgatgtggtgaacatagctacatagtagtacttgtcgacaaaatcctccatcctgacatccctaaattcctgagctgttatcaagcacatggcatggatacatggtttgcccgtgtgctgccactctttgcacgaacattcccgcaactgagcatttacaatgtgcttcgaatgtacatcattgttatcccttacctctgcaatgtagttgttagctttccgtactgctaaatgacataaacctcttgtcctggcgtgtaggatatgcagaaccgacggtaaaatccgtccttgcaacttttgtgcaatcctcctcctcttgtgaaacaactccataattt

SEQ ID NO: 5775 - DNA, 533 bp, Zea Mays
aattaccacgacccaaggtatcatctaatcaccatccgaccacccaccgatgggacagattagacccgactccaatcgaaccagtatgcgtttgtagtcaccggattgaagatctatggctacgaatttaaatacaacgccatcgcgcacgagccaccggatcccgatccgaccacccgcgccctatacaacgaaaggctatactcgatctaatctgaaccgtccctcgccgaatcgacgacttaggtttcaaatgcacgagatctaatctcggtcgtcaatactgagatcaatggccaccgagcccatcatcaacccagactagccgacggcggcgcaaagcacaccgcgacggagatcccaccggcatcggccaatccgacaccccagagtgttatttcttacacggacaagcgcaacatgatctacggggcaatttgatttgattaagctagggcataccagtggtgaagcaacgcggtaagctggccacagcaggaggtgggtacacgacttcggtgagtaattcggcc

SEQ ID NO: 5776 - DNA, 633 bp, Zea Mays
ttcccatctccgcgggcggacggtgtttggggaagggccgtgaggactcgccatcgtgcaaggatcgggcaggcacggttcactgggcacagacgtcgactggtgggggcgaaatcgctcgccggacttcggcttccgcggccgagccgccgcgcagcgaggacgaactccctcggagcctaatctcccggtatggcgccactactagtttcgcaattcactgctcttggcattgcgctagaaatcgggtagtagataacactggggaggcgagatttggtgtacgccggtgatcctccgtcgtgctccttgagcggcgccgccgtcgctagctgaggattgggggaaaacaccctggtcgtccgatcctcgttgaacggttctgattagaacgtgacttaccccttcgccgcgttgatctgtgtcgtcgatcccgtatcgtgtgcgtaggattagatcagggtgatttaaaatcgtgaccgtagatccaggcagctgcggctcagatcggatatcggtttaaaatgatatggatctaatctaggacatagatttccgatcggacggctctggcctgccgataccccttcggcttgcacgttttgcaaaagagcccttccagtattgataaat

SEQ ID NO: 5777 - DNA, 606 bp, Zea Mays
ccacccgggagtttaggtgggtgcagtgggagagaagattgtcaaagtggttgtcaagggtgtagagacatccgaccatgtagattatggtagggtcatcttcattatgatctcttcctgacaaagccgggagtcttttcctccaggtaggggtatttttgttgctaggtggaaagtagcgaaggggtgtctcagagacttccctgctgtagttttggcatagttggcggagggctttttgggcagcattctagcaggtgtctgggaagcggtggccaatagcggtaatctgaaagagagggtgatttgggtagcttcgactttctcctaggtagaccgccatagagcacttctcaatcctgttctcgtggtattccttccagacatattccggcttcttgtggatccccatgcgaagcacacaactccgaagaaggtgagggaatccttccacctccgagcaataggatgtcttaaggaagaagggttgttaataccggggaaaggagagaaggttctttaagaggttaagaggtcttttattttgaggaaagctttttaggtcagggctgcggtctacagccagccctatggctctgataccac

SEQ ID NO: 5778 - DNA, 574 bp, Zea Mays
gaggacctgagacgagctagccacggcgaggcctctttcacggtggcggaaagcagatttgagggaaatcagaaattgacgagctctagtgagcaattggaggcacgacttggtggcttggtgcttgactaccctacggacccattggtgtgctcaatttatagtgtgcttgagcagtggcctccaattttggattggcgcgctggcggtcggagaggaagaggggtactggcgcacacgattggtggccacacccgtggcaacctcaccggcgatcactagataagctattacgagtcacggcggcgtggttaaagtgctgaggcacgtggcacaagaccgcaaggtgtctaactccggcgagggtagatttcaagcaatcggggcagagcggacacgacggcgggacgaacagtgccttaagctcatccggagggggaagatcttttcaccgtgacacgttatctgggcaccgatgagcatgaatcacctcgctggtgtgaatccagacgcaggagtcgccggcggcaaggtgcactgcaccatcgatcttgtgcagtccactgtaccatcg

SEQ ID NO: 5779 - DNA, 378 bp, Zea Mays
gtcgtggctagaggagaagtgctgggagcagtggtggcgttgttgctcaggacgcctgtccggtggcaccgtctttgagcccgcagatggcagctcttgaccaatcagtgagcgcgctccgaccttgctgtgtcatcaaacattccaggaggattatccaagctgaagagaatctgcggagtgctctgttcgtcaacgtagttgggccagaggattcaggtcgcaccgctgaggtcttgaacgcactcacacagaggtttggttttgaggatgatgtgatcgacctacgtcgcgtcgcgccgaattcctttcccagtgatgatctagctaatcgagtcttcaatggaggtcagacgctctatatccccctttcaggat

SEQ ID NO: 5780 - DNA, 538 bp, Zea Mays
cacacccatcggggtcagcgtcagtaaattcaggcacaggcacttcttcagcagcaggaaccgaagtaccaacgtcccaatccaaactagatactcgccggaggcgtctctttttctttttctgctcatctgcggaaggatcaagttgattggcccggcaagggcgtctcgggcgagtactggcaggcttctggatatccaaggttgtaccagtttctgggagaggcgccaccaccaatgtcccagtaggagcagcatcagaagagtcctcagccagcaaatcaagcatagcacttatttctgcgtcactaggatccaaaagcacctcaaaatggacctgccgttcatcatcaggaatttccccgagcgagacaaccaagacgctaacttcttcagcagagggtcgcactctaaggcccaaactgccatcagtgacaggtggattcgacacaaaaagagtgaaggccttgggaggaggcaagttccaggctgagtatgccactggggcaccaacatttgataccttgcctctaagaat

SEQ ID NO: 5781 - DNA, 489 bp, Zea Mays
aactatgaaggagctccttgatatcgtgaataaccacacgccaggggaaggcgcgatggaggcaatgtttgaccactgcaagcaaaaaaaccaaacacgacaaaggtcctgactaaggatttggaggcaacctaacaagaggaagaaaaatcgcagtcggccaaaatggagggaagcctctagccgaggaggccactaacaacttcgaaaaattgctcgaggtcccatgcccaaaccattgctacccggtttgacatgcaaggattacaggtttcttaggaattcctaagcaaagttacaccacccagaaaaggcccgaaccccgtaaggacggtgagcaggagagaaggggtcccactttccctaacaaaaccggatgcctactgatctttagtgggtccgactactacgcaaggcactgaaagcttgagcgacgtgagacatttagcgttcggccaccgatcccagcgttcctcgaatggtctgacc

SEQ ID NO: 5782 - DNA, 499 bp, Zea Mays
cgggtcaaacattttatcgcgcacaaagaatgcgatggcagcaagggcagtgggttttcaccgatatttgatgctgtcacgactgaggctgcgtagatcgggttggcgctactgcgtgaggtcgatgccgaatggcatggcacgacgatggctattgtacgtcgacggcatcgagctgggcgccatggcagcgagggatcgcacgagcgcgaggccaggtggaggcgcaacgaggggatcctagcatctcagtgtaattccaagcaaagcaatcagaatattctttcaatagaccgatcatttcatctctaggatcagcctctaaggttttgttcacaaaagtcagccttggagtttaccatctcctataccgatctcctccaaaggattgaccgatgtaaacccctgtcctaatttgttgagatctctgaattcctctataatgtctcccacagaggaattagatgatctctgtgtgacggcggaccatccgatctca

SEQ ID NO: 5783 - DNA, 724 bp, Zea Mays
tattaactaactatcatgaggaatgaggtagtgatggatcaacttatttcattctacaaaccaaaaaaatgaggagtggaaaatgatggactaactcatttattaaaccaaacaccccataaatatctcaatccataaatctaacaatacatcagggacacaagaggctcggaagagttgccaatcgtcggttactccataacaaacggattgttcgcttcagattaaaaccagctattcagactactgcaactataatccatagaggtacggattaatcgaacagggcgaaaatttatctatgtatctcatgattctggaggtgacgaatgagttcgaatttttaaattagtgtccattatgttacttttaaaaaccaacatatgaccatcatctgaggagtgttgtcagtcagctacagccagcgagtcccggtcaccagagggcaaaaccggaacgatcaatcagtggcaagctttacgagctagtttaagaaatgagtaatgacagagcgccatggcccacgaggagaggctaaacgcacacatgcgagccgagccgacactgcagggaataaaagaaacgcgggacgacagagcccttcctccctctttctgtcggtgggggcgaaaagagagagacacacagagagagggaagaaaattcgcacgctgagctgagacgaggcgagcgcgtgagcccggtccatcaaccaacgctgtag

SEQ ID NO: 5784 - DNA, 404 bp, Zea Mays
gcggactccaacaaaatcaaccgatctacgcgcgcacgattctagagatcaagtcaaattcggattgcactggcaccataaaacccagaccctcacgcctcccttcacccacatcaacttgagacgccacagaaatctcgaggagcaaaagcttgctcagaaggggggaaagccacgccgtggcgtgggtatggcccaccgccgaccgattcgccgtaggaggcatgccctgaggtgtccgccgtgccttggggttcgtgttcatgggtgcgattgatcacgtagggcttcaatggcgccctaattgctcatcagagcatcaccgtcgccactcaccgtggcctggccctactgcgtcgcgttttcgggtgagttccttccccaccggttcgcgttgccctctg

SEQ ID NO: 5785 - DNA, 623 bp, Zea Mays
gtgcgatcaactgcaatggtgtctcgtgagggggacgaaaccgaggccactgaagcggcaccaatttcagaagtaatgaaacgatcaggtctggttgtggctgacgaaagtacttctaatgtcgaagctgagcagactgtgattgagggtgaagatgttgagagtgaagaagactacaacattctgatcccaatgaagcctagtcatctagattttgaaaaatctactgtgtctgaagatgacatgcctatgatgatgaaactgggctattttggagaggctgaaagcaaacttattcgatttgctggagaagacactaccccaaagccgaagaaggatgaagttgtggttttcaagagcttcttcagagcggggctgcgatttcccctgaatgagatgataggggtagttctaaagaactttgaaatatatcttcatcagctgactcctaacgctattgttaggctcagcatctttatatgggccctccgaagccaagggatgagcccagatgctgaagctttctgccgagtgcatgagctgcactatcagacgaaggctagggcagatggtcttcacgaaaattttggttgttataattttgcgtatcgaaaggatacaaa

SEQ ID NO: 5786 - DNA, 332 bp, Zea Mays
cttgggctgagttccgtgaggtatttcggacgcattatattccaaaagccctgatagagatcaaattcaatgagttcttagatttgaagcaaggcgaagaagagagtgtaatggaatattttgagaggttcactcgcctatctcagtacgtcttggattttgtaaataccaatgagaagaaaaagttctacttcctacgtggcctcaacaagaagcttcagggcttgatggcaaccagtttggctgaaagatataatgaggtggtcagtcaggctgttttgggggataacaagattctacttcatcaggagtctaaaagaaagaaaattgcg

SEQ ID NO: 5787 - DNA, 625 bp, Zea Mays
ggggattcttctgactcggtcgctgctgaaacaatggctattgcaactatcctagagcctgagaaatccgtggatactcgaaggcctgagggtacccgcccgaaacatcttcgccaagtcagtcatccggctgctcctgccgagggaaagaaaaagaaaaagagacagcttcagcgagtgtcgtgcttggatcgtgatgccggcccttctgtcccttgctgctgaagaagtaccagtggaactctttactggggctgatcccaatgggtgtgtccctgctgctgctgatcccaatgggtgtagccctgctgatgctgaactcaatgggtgtggccctgctgatgttgatcccaatgggtgtgaccctgccaaagctgaacccaatgggtgtgaccctgccagagctaatcccgatgggtgtgaccctgtgccgtgtattatccgtattgttgatgaggacgaggaagaagaagaggaagtccccttagttcgaaagaacagtcggcgttatagagtcggtggggggagtagcgaaattccttctccagctttgtctgctcttgttggtctgcaagaattatccatagcaaattttgatcaggctctcgaagatgtcattcctgaa

SEQ ID NO: 5788 - DNA, 438 bp, Zea Mays
gcgattcgcggggcagccgttgcacgtgctcgagtcgttcgaggaacgggcgtttcaccttcgaatttgaatttcacggcgagtttgggcgatgttttgaatagatctcgctcgggcctttatatacccagaagaggggccggcggtggttctttaccctgccatttacgctcgccttctgctttggtttttgcaacttaagagaatagccggggaaaagaaaaccgtgcacctcatcccctccgcctccaccaccttcgttcggcgatggatgacaaggtgactgtcgtcccgccgcgcgacccgtggccttcctccaccgtcgtcgtgggggatctggaggcccttgtcgccgatggtttgctccgtcccctctccggtgggccacagccggagtggatggtcccgagcgaggccgatccaactccaccgccgggg

SEQ ID NO: 5789 - DNA, 535 bp, Zea Mays
accgatgctaatctttggtttaaacctatttccagctctgaggagtgtttcccctcaactaatttctggattggagccctacagtgctctgcccacggtgacagcggcaacaatggaccactaagcgtgttcccgatgatctaaggcagctcagttcaattgggcgggtcggtgagcatccagagcatgcaagggtattgaaacaataacacagagggcgagatcgaacctgaatttggctggccacggcgagatcaaaattgtgcggtgttcttgagtaaattggggaaatcctaaattgaagctctctggtgatccattgagcacaatacttggtggctgggggcgtgatgatcctacagagctcatggtggcctcaatttataggaggcaagagcgatggccgggaattcgagcgatgacacgcggcggtcggaggagtggaaggttactagcgcagcggattggtgtcctatcaccatggcagtcattccggcgatcaacggagagttacaacgggtcacggcgatgcggt

SEQ ID NO: 5790 - DNA, 340 bp, Zea Mays
gccaggcaaggggcagcacctcgtcggctgtcgggccagagcaagttgacgacgccagcaccccagcgggggacatgtcgggcgttagcctcgcacctgagacaacgacgggcgacgcttcccgacaaaatgccaaccccaggcggactgatgacgccagcaccctcgtgagggacttatcgggcatcagtctcgcgcctgagatagcgacacgtttcgtctccgctacaacttcaccaccgtccaccaaccaggaggtaccatcggttttccatcctgttctttttaggttcagcttcgacccgccaggcgaccccgcttcggcgtacgattccgcaag

SEQ ID NO: 5791 - DNA, 506 bp, Zea Mays
ctcagggtaaaactcctaagactcagagaacaagcccgaggaccgcgggttcaatccgagaaagtccaaggtttcatttacaaaactgcctggtcgaagggttacgggtctgttctggccgtccgattagagatcgagcgccaagatcaaaacagcgccgcgcgaatcggtattctacactgaccgtcagatccagatctatggtcagtatccactgctacgtgatcccatgcaagccgttagatatcgatcggtcgttccacccccaatcggtatgcgcgagccactcccattcattcgataggcatccgacgatcgagcttcattttccccccagaccaaccccggcggcagcgcaagtatcacacagcggcgcgccatggccggagaaatcgcggtgaggcccggctacaccaactctgaaggaagtccgctccacacgaagttaagactatggcgaacccatggggaatgactgctccaatcaccttacggcctaaccctac

SEQ ID NO: 5792 - DNA, 678 bp, Zea Mays
gatggatgctcttaactttgaatatctagattacgacagacttgacgaaggggccggggagcgaaaagaaagagggttgtgagtattctgaacaggcaggctatccggtccgtcaaagaagatcagagggctgttaagaagcagaaagttctagcggagccgaaggattcggctcccaagaaacgaaaatctgtcaggatggttcctgctgagacaaaggtacaagatgtaccagaaaagactgcgggcccttctctgtcttcctctctcaatgttttagaaattctgaaggtaatgactgaacccttcgcatttgcaatgctaagtcctttagggttagatctgactagcctattgcagtcaaaggagaagggatttgaacaaagctcgggaggaaaataaactgctttggctaccgagggaaatgccgggggttagtagaaacggcaaatgatggatgtaatgcaagccatccagaagaccacgccctcggcttcggttaaaaaattgatgtacctgctaatgctgaagatattgccaaagctaaagctaataaagccagagctaaagctgagaatctcgggaccacaatgtcagagattgacagatttatatctgatgtggctcccgagaaagacatagccgaagtatccactaataaggcttcggaggccacag

SEQ ID NO: 5793 - DNA, 1472 bp, Zea Mays
cccgagttaagtatgtgtgagcatgtcgcaccgccttaagtcattgccgacttaagccgattgctccgttggtagggcatagtggtcaccccgagttaagtaagcgtgccaattgacagtgaacaatctgagtgcctttgaaacctttttattgatggtatttttctcaatttacagaatacatcgtcgctccgagagcctccgtgatgtagctatgggtagaacttcctgagatgttctatgttccatgagttcccaatttctgttccgtccatctgagtgaggcgatatgatcccggccgagtgacttctgctactatgaatggtccttcccatagaggtgacaatttatgttgtccttcccctgttagaattcggcggaggacgagatctcccactgcgaaggatcgacgccgtatggccttatcatgatagcgcctcagagtttgctggtatcgcgctgattgaagcactgtattcagtcgctcttcttcgagtacgtcaacgtcttccagcctagtagcttcagcttctgctatgttatcaaagattaaccttggtgccccgaacttgagatcggcgggtagcactgcctccgaaccataaaccataaagaagagggtatttccatgcagagctcggctgggttgagttctcaggctccaaactacatatggcaactttctgatccattttcctgcgaacttttcattcttgtcgaagactttctttctgagtgcttctaatatcatcccgttggctctttctacttgcccgttggctcttgggtgtgccatcgaggcatatttgatctgaatgctcttttgctcgcagaaatcaaagaattctgaactggtgaagttggatcctaggacagttatgatgctattcggtatcccgaacctgaatattatatcttgtatgaattccactgccttagctgaagttagagaagcaatgggtttgaactctatccatttagtgaatttgtcgatagccaccagtacatgagtgtatcctccttgagctttcttgaaaggtccaatcatatccaatccccagcacgcgaacggccaggttatgggtatagtctacatctgctgtgctggtagatgctgctgttttgacaagtactggcaggcttcgcacctctggactaactcagccgcatcactcttcgctgttggccagtaaaaacctgacctgaagactttcccaaccagggtcctagatgttgcgtgtattccacattgcccagcatggatctcatttagaagttgctttccagtagctgggagaacgcatttcatgaggactccggatgcgccccttctgtatagtgtttctccaatgagtgtatagtgagctgattgtcttgcgatgcgctcggttgtattcttgtcatctggctcctcctcattttttatatatttgatgatcaactctggttggctcaaagtattacattcttc

SEQ ID NO: 5794 - DNA, 653 bp, Zea Mays
gaaagctatgacattttgtatctgttgttagaattcaaccgtcgtcatgaacgattgcagaagtaagcgtggcgtgctggttttggagtcttttcctaatttatgccaattgatcagctggtaaggcatagaggttgccctatgacgagtagttgcgagcatgttacaccgtcttaagtcattgctgacttaggccgattgctctgttagtagggtatagtggtcaccctaagtcgagtaagcgcgagcatgttgcaccgtcttaagtcattgctgacttaagccgattgctccgttagtagggtatagtggtcaccctaagtcgagtaagcgcgagcatgttgcaccgtcttaagtcattactgacttaagccgattgctgcgttagtagggtatagtggtcaccctaagtcgagtaagcgcgagcatgttgcaccatcttaagtcattgccgacttaagccggttgctctgttagtagggtatagtggtcaccctaaattgagtaagcgcgagcatgttgcaccgtcttaagtcattaccgacttaagccagttgctccgttagtagggtatagtggtcaacctaagtcgagtaagcgcgagcatgttgcaccgtcttaagtcattgccgacttaagccaattgctccgtt

SEQ ID NO: 5795 - DNA, 388 bp, Zea Mays
atttctaaagattacaggggcttttatgctattctgacccacgaaggggtatggatcgattagggccgtccgatcaggagcggtcagctaagattagatttaggtttcacatgaatggggacgcgctatcgagggttggatcccgatcgaaccgtcacgatcaaggacatctgaggttgaatcccagccgcgacattacgatcccagggatcagaatgatcccaccgatatgagcacgcaagccctgatccagagcgctcatttacaaaccaacggccacgagctcattactgcactacccaatcttacacgtacgtatacgattggacgactacggcactcatctaatctccaccgtccaacagtcgatctaccacgtatgggctcc

SEQ ID NO: 5796 - DNA, 638 bp, Zea Mays
cggaaatagggaactcatggaatatagagcatctcaggatgttttacccctagctggatttcaaaagctattgggacggcattgtattctgtaattgggagatacaccatcaataaaatgacttcattctcaaaggcactcgaattgttttctgcatgcttactcgactcagggtgaccactataccctacgaacgaagcaatcggcttaagtcggcaatgacttaaggcggtgtgacatgctcacgcttacttaacccagggcgaccactatgccctattaacagatcaatcggattaagtcggcaatgacttaaggtggtgtaacatgctcatgcttacttaacccagggtgaccactatgccctattaacggagcaatcggcttaagtcggcaatgacttaaggcggtgtgacatgctcacgcttacttaactcagggtgaccactataccctgctaacggagcaatcggcttaagtcggcaatgacttaaggcggtgtgacatgctcacgcttacttaacccagggtgaccactatgccctattaatgaagcaatcaacttaagtcggcaatgacttaaggcggtgtaacatgctcacgcttacttaacccagggtgaccactatgccctatta

SEQ ID NO: 5797 - DNA, 550 bp, Zea Mays
ctttcggagcatgtcgtctggttttggtgtgcagccggagctcaagcactatggctgcatggttgacttgcttggccgagcagggctggttgatgaggcggaggagctggttcggggcatgcccatggccccagatgacaaggttctggctacgctgctaggtgcctgtcgtgtgcgtaggagacctgatgtggccgaaagagtacggagaaggatccaaagcctcaatacaaagcaaccctcacgggagagctgcatgtcgttggattgagaagaagaaaaggaaggggttaagagcgggctctttacagcacacacacccagatttcatgatatctgacgttcgcgccactgctgacagatgggctgttgcgcttaaggcaaagggttttatgcacaagtacaatatcatgaaattagatggatctggcagctccgtgtatttagtttgagtttttgcagttgcagaggcttatcggatcacgttctttaccggcaatgtataaacccagctagctgttgggactagaaattgttgttaacgaagcaa

SEQ ID NO: 5798 - DNA, 469 bp, Zea Mays
cttcagatacgagggtaagtttattgagccagatgatgattggctgaaatgcatcgaagctacaagcgacgaacttcttggaccatattcaaaggcggaggataacacgctgtctgcgaccttcggaggccggaagaagaagaggttgaatagagttttcgatgctattgggtttatgtaccctgattatcgctacccgccgaaagggcaaaagagaaaaagcgtcacttctggaaaaggagatgcttcagttgctctaagtgaggccgcgccaaagaggaagggggtgaaggtccttactcaccgaccacgcttcatcgaactggcctcagtgcccaaatttggtggtgagacctctatggctattgaagccaaaggacttgcttttacacagaagaatgaagagccggctgcaacgccgaaggctgataaaattggagggccgagagctgaagggacaaaaacatca

SEQ ID NO: 5799 - DNA, 892 bp, Zea Mays
tctgtggatcttctggctctacattcagatcaagaagagaagcttggcaactagcaccaggcctcaacaagttctgtgtgtccacgttgatctggacagttcaaacagttgttaagcacaacttcaaatcagtgcattattagaacaataaactatgagagaacaaatatagctcttattctttataaaatgttagatgaacaggaaactctaccgcatctgaaaaacagctgtgttcactttgcttgccagaaaaacttggaaaaggcattcctgaagttgtacactcagcaagaatcggatctgacaattgattagaatgcctcttgcaattagtttctattgtcagtggcttaaccaagccctcaaagtatgacacagattttttaagaggaacggcagtatcagtgtcaaatgatgacatatcagtgattatccaattactccagtggattggcatgctggcctacaaaaaagtatttcacttcacttgaccttgagtactgataaaacttctgcgaaaatatacaaaacatgcatttgcttggcatacctctgattggtacacaacatgaataggataaaatggtggatccctttcagaatcacaaagcccatgcatgttttcaatattgatgacatcttgatcttggctagcacatttgttcaatttccgagaatgaaagaaagggtgaattttctttccagatgataaccttcgaatttcctagcaattagattaaaatatactttttacattgaaaaaagagcatgagcaacaatattgtaaacctgaagtcaactaaaaagtggggcaactgaaatcacaagtgcttttttccttaaactactagagcacatgtatggagatagacaagctgctattgaacat

SEQ ID NO: 5800 - DNA, 362 bp, Zea Mays
gcgcacagaagcagcgagccaatcgccaatcaaactttggccccacctgcaggctcgttccctcccctgaggcaggcccaggggccactgtcggtaccctgaatcaggggtaccccttactacagtatgaagacacggtgcatggtgaacagcacctgactcctcctcatgaccggtcccaaggacaccacgtgaccagaaaaggtgatatactccaagacgccgtcagtgggtccgtacctccacgagagagcactggacccctatacactcaacccggacctccgagtacgacacgggactcccaagtaagcaagtcggaccccttgggtgggatctgaacccctttgagtgaggtccgg

SEQ ID NO: 5801 - DNA, 453 bp, Zea Mays
gaaaacccgatttgggggaaattccagattgaggagctatggtgaacgattggaggcgagggctggttcactgggtgtgtaataacctagcagagctcactggggcagcaatttatagaatctatcggtggtggcgtccaatttgaagtaggcgcgctggcggccggagagaggggaagttcactggtgcgagctgttgtggctttcaccagggctgtgtctcaggcgatgaacaagctacctaaggcgatttactgcgacgtggtaacgcttctcattacgtggcatccgggcggcaagcggcagactccgacgaagtcatctggaccggcggctaggcaagtgggtacgacggccagcccacgacctcatcagtagtcatgatcttttcaccgccggctgatatctgcactcagagcgcatgaatcgcgaaacaggcgaggatcatggcgc

SEQ ID NO: 5802 - DNA, 716 bp, Zea Mays
gtccattaactccggtggaaggtttggcggcgcctatttctcctaggcgggtctcctcggcttcgttggctggaccagttgatgcccctgccctcccgcgtggtgcggttgaggagctggcggcgcctagtgttcaggtcttgttggatccttgttcagagatggttaacttggtgttgcatgctgtgggaccagatgatcaatttggaggtacccatgttgatatagctgttgttcaggaggttgcttcgactctggctggacagagtgctgctgtgagctgtaatgacagagtttcttctggtttgttgtttgggtcagccaacagaatgtagttgaggaacctgccaggacgaagagtttgacgtctggtgtttcgtttgggtcagttagatggaatgcaaagccaccatgtttcaaggtctactccataagggtgagatcacttactttggctgatcaggatgacaccctggtatagtcggcactagatgtttctatggtaatttcctcgcccttgaacgagttccagtgtttagtcactaaaccagttgatggcttgctgccaactccacggattatcaagagaaggaaaaagacactaccaagtaattttcaacccaggcggagtaggagggtggccaaatttcctccggagctcggatccgaatcagctgcccaggtctgcaggcatctgggtttctgcgatgttaacg

SEQ ID NO: 5803 - DNA, 289 bp, Zea Mays
gacgagttgggcaaggttcgggcggaggttgcggaattgcgtgctgagtgcgcagcacgccactatctggatggtggttctcccgcccctgtcgggatttagcactcttaccgttcactgccccgtggtcgcttcgactatgttacccagactgcaggacccagaaagatttggatccatagatcgacagagtcggagtctgtaataatgcttaattcagtgtcttagtctagtcagtcttagttagagttaatttgcctatcttatgttggatgcttgttatgatgga

SEQ ID NO: 5804 - DNA, 683 bp, Zea Mays
gcccctcaggacgtcttgggtcttggctggcggtgtcggcggagctcagctacaagaagatgacgtagttccctgggtcgcttgataagcagatgaacttggagctccgacgatgagttgcgaaagcccgctatcttcacaacatctctcccggcatgtatcggtatagatctattggcccaaataggcccatatgcccgctatcttcgaaggcaagaatttgatggagccaataaacatcgagttgcatgctgacctgctgctatactttccattagaagacaatttccaagtaaattgatctgggatatatggctataaaatggtgtcctctaccagttgccaaattattagaattctgttataacctgcactgagagagatccttggatatcctcaacctatcttctgtttaatagccctgactcactgtacgccgactggttattctcttgcgtactgcagaaaaatggtttgggggctatgctagccacactgctgccctgcaaccacttatcagttcaaaatttggttctgtccccgttcccaatggttactgtgacagccatttcaaataaagcttgagcttgtttggggatatgtataggaagactagcccaaggtttggatggatccatctttagggaccacaaccaacaaatacgtagagcccaattcattct

SEQ ID NO: 5805 - DNA, 414 bp, Zea Mays
cagaagtgagggttgaagtaagttgggcaacggtgccacgagagccgaccagatggtagactgacaatcggtgtctctatgtcctgcagaagtgcagaacgttcaccgcgggttaaatttgctgtcagctagcccaccttcatcgactatggtgattgtatgtaccttgctatgatgattttttataccactatataattcaatagtttatactttagaaaacagattcaactgaatcgcccccatagctataacctccactaaatccaccaaacaaattacacacatatttaatacatcatcaaaatcaatagttcagatcgctagataacccactctctcttactcaaatccaatggacaatattatttaaatcattcttcatccctctccctaccttacggccctgccgtc

SEQ ID NO: 5806 - DNA, 351 bp, Zea Mays
gtggtggagcatgcctggtcgaagccgacccaacatcatgaacctttccataggttgtattataaactccagagcacagcccgggcgctcaggggatggaaggcttgttcctgattctaggttgttcatgcatatggccatggaagttctccttaggctagacctagcacaagaaaataggcggttgtgggacttcgagtcaagtctccgaagcagactgaagatgtgtatccttggctatgctgttattgaaagggcacagaaaaggcataattctcgtatgttaagccttagattcggtgatgccaacaccaaattctttcaccgaaaagctagctccaggaggcgaaa

SEQ ID NO: 5807 - DNA, 423 bp, Zea Mays
ccacactcgctggcttctacgaagccatggaaaggaccaatgtagagaagatcaccaacgaaatattagctaggctatctggtgattcaagcgatagtgaaagcttcgatattgagagtgagaatgaaaatgccaaagatcggccgtggagaccaagccatgttgtttttgggaaatccacaatcaaacaaggtcaaattgaagcgatgaaaggcaaatactttcatgatgtatctatagcgagggctggaggagaagacactgttcccctgccagaaagtgatgaagtggtagtcttcaggagctttatgaaagctgggcttcgctttccgctccacaagatactggtcgaggttttgaagacgtttgtgatataccttcatcagattacccccaaagctcttattagagtgggagttttta

SEQ ID NO: 5808 - DNA, 433 bp, Zea Mays
caagaacatggcacaaaccaggttttcttctctatgactaggctctatgtcatcatggcagaagcttattcttctcatcagcttccaaggttttcaaacgaagcccataacagctcaggccttgttctagtgtgcccaagaatagccttcaagcttatgttcgaaggtttcttttggctttgggctcaagcaccatgtgtaccagatgatattgtcatcgaaacaatgatcaagggcttcttcttggcctagcagcacaatattttgcaaggaggcctcccattctcttgagaagctgctacaaaaaatgaatgaatatattagagcagataatgactttcgatagcgcaaacaagaggtacaaaagtatgcggagacgactaggggcttcataggaagattccaccccaagcatatctgaagcatccaaaat

SEQ ID NO: 5809 - DNA, 442 bp, Zea Mays
cgacagtgcatggctcatcgttggttttaacattttattatagcccagaagcagagaaatccaatatcgagtccgcaagacctaaacccgtcagaccgtcactataaaagtatcgtcctgtccttcattttcccccacccaaatcgtcgaggccaccaaccaaaccacaccaccactgtctctcctttggctaacaaattctcatgtttatttgatttggcatatgataaagacatttctgtcaacaagatcttgtcttcgaactttgaaagcctcttgtttagaagaaggatcataggtaatttgaacttgatgtatgaggaactaatggtgtgttgcaacaatcaggtgttgtctgaccaagaagacagaataatttggactcttggtaaaaagggtttctctgtgaactctttgtatagaaagaagatgtgtgatcaag

SEQ ID NO: 5810 - DNA, 415 bp, Zea Mays
agcgtcagaagaatcctcagctaacatatccagcatgacacttatctccgcgtcacttggattcaaaggcacctcaaaatgaacctgcctctcgtcgtcaggaatttctccgagtgaggcaaccaaagcactaacttcttcgggagaaggtcgcactctaaggcccaaactgctatcaccagcaggaggatttgacacgaaactggcaaaggcctgagaaggaggcaaattcgaggccaagtatgcaacaggagcgccgatgttcgacaccttgcctctgagtatcatctcgagccggctcaccaagtccacagcaggaattcttctgttggttacccgggttgagtcagccaagccttggtacagataagtcggatatgctctgtctttcagtggctgaatgttcttgaaaaca

SEQ ID NO: 5811 - DNA, 1089 bp, Zea Mays
ccataccccatagcttcgcctttattttctaactccgaagcatccttgccattgagttcaccaccaccaagatgcctcacgaagaaaccgagctcatctatttcttcctcggtagtttgagttggttcatctgcgtctatctcaagtgtaaggtatgcttctttcagctctccttctaccttctcatgccttgaagacccgccacctttggcagtcttcttctcattatcttcttcggaggatgatgaacctccgaaggcagcacctccaagacccaaaatgtgtgagctctctacttcttcttcagatgaaatttctttacctcccgaagattgatcgccctcgtcagtttccttcgtacttggcataaaccaagtttgtatcggtcccaagggacttagagtggagaatggtaatggttgtgtcattacctcaagaatccttgtgcagaccatagatgatgtggttgtggcactccctttcccttgctcctacgcagcagcatgattcttcgaagaaatcatggccttctttttggggcccgaagatggttcttcatcgccctcggactcatcttcattctcagtatcagcttcggcagttttcttcggtgctttgctggcaccattggcaactcttttccttttctccccagcttcagcattaacttcgggatcttcatagtctgggtactcgaatctgatggcattcataaacctgttaaaccaccctcagctttcgaagatagacaacatatcttcgtgctctctggttagataatttctacagatttcattgcacttttcctctattaatctaagccatccagccgaaggagttttgtacgaagattgttctttaaaatcaaaggccagtgtaataagttccccatccttcgacttcacctccttcggtagtttccacccagtctgagttggataaatgttgtaagcaagcgcttcttgaattaaatctcgagatccaatccttttcacgactacatcgaaggccttgaagcactcttcagcagcttcactcagttcacacatcagttgtttcaaaccgaagctaatcttcaaagggctcatc

SEQ ID NO: 5812 - DNA, 316 bp, Zea Mays
gggccacgactctattaaatgggtcgtgcctcgggctggcccactaggcacaactcatttggtcatccataccgacgcccccctccgctccatcgtcgggcgcaagcctcgcacatcgtgtgctcctcgcctccctccacttcgaccctcacctgtgtctgcccttgtgtgttgctcctgcctccccggacccctgccatgccgtgacatatcccccttggtcccctccctcacctttgccattcacctcctcctcgacccccatgcctccggcaacgatctcgaggggctcgtggctagcgttgaggtgctcaag

SEQ ID NO: 5813 - DNA, 415 bp, Zea Mays
atcacccgaatgaggaaaaagaacaaaaagaataacctccacttctcctctttgcaaaccgggtatcacactctaccccccttaaaaagaattcaacctcgaattctgacgcttctatcggaacgacaaaagggaaaaaattaatgaatcaacaacacttacccacaacaaaaagtttcggatatttctgccgcatcagctcctcaagttcccacgtagcctcgcgctcagactaattagtccataagaactcgacatattaatcgacctcttcctcaaaacacgcccgaggattccaagatacgcaccagacgacactccaaggtcagatcctgctgcaccgcaattggttctatctcaatctgatggttcggatcctgcaagaacttcctcagcatagagacatgaaaaactg

SEQ ID NO: 5814 - DNA, 665 bp, Zea Mays
atcgttatagtctgtcattctggcacaatggggatattttgccagtaacacctaaaccttataggtttatgccatcgtagctttagaggataccgtaattccacatctagtgaaaattaccatgagtaaaactcgtggaatgcacatgtgcttattcggtgaacttcaagtcctttggtacctcatcttattccttttcgggtctgtatgggtctttatccctttatcgggattaacaaattttggtgttcaactcagaccttatttcttctagaaaggttccatcagggaactgtactctcaactagtagatattctctctacacttgagaatggtcattcatcaggaacacattattcagtatgagatttatatgttgcatatttataattcaagaatatgagtcctccttggatctcatgacggatcttctgaatcctattaactgcatagtttaattcatgccatttgctagattatatcatatagcggaacagtgtttattcaacacatatgtgggatggatctctcacaagactacttgaaccatcgcattcaccacacattatttcaatagtgcccataatgtccgaacttcaagctcgtgactttcactttgcgattattggttcagcctcgattgcatttatcattgacccgataa

SEQ ID NO: 5815 - DNA, 731 bp, Zea Mays
aaaggttaggggctaagatataaattttcccagacacagctttaactcgcggtggacggcaggtttatttttcaaaaaccagagggctctttagcaattaggccacgacgaaggggtatcttcgatcgccagccatccgatcccgatccaaaggctcagaatagatcgtgaagcgatacacggcaggcaccacaggatccaagatccccggtccaaaatctctcccttgcattaaaccgttctagcctttggattttcaatctacggccgatacaacccctcttacctcaatccttcatcgcggatccaacggtcctccaccatcttcttcacacgaggcatcaggcaactgcgttgtagctgttcccagcccgcgacggtgtccgccggccaggagtccgtgcagcacctgcgccagagctcccagtcgatcgttgagtccacggcaaagtcttcccccgtcgatcaacgaaccgaggccaaccatgtcacgctcgttgaggatccgcactggcgcacattatctctctccatcacggcgcctggatctttggattagtattaccagcgccggatgcacctgggaatggtgggtgaacggtggccaaccaacccgtactccagtccatggcggcaacccacaaccgagctcaatggtggcggcggatcccgaggtggagtaggtactccggcgagcagttctgtgatctcccaccgtcgaagccacccac

SEQ ID NO: 5816 - DNA, 422 bp, Zea Mays
tagagatcgccctaagatgagtaaacgcaagcgtgttacactatgttgagtaagcgtgagcatgttgcaccatcttaagtcactactgacttaagtcgattgctctgttagtagggtatagtggtcaccctaagtcgagtaagtgtgagcatgtttcaccgtcttaagtcattactgacttaagccgattgctccgttagtagggtatagtggtcaccctaagtcgagtaagcgtgagcatgttgcaccgtcttaagtcactgccgacttaagccgattgctccgttagcagggtatagtggtcgccctaagtcgagtaagcgtgagcatgttgcaccgtattaagtcactgccgacttaagtcgattgctccgttagtagggtatagtggtcaccctaagtcgagtaagcgtgagcatgtc

SEQ ID NO: 5817 - DNA, 436 bp, Zea Mays
catctatgaagactattgtcaagcggtacgtgagttcttgttctacctgccaacaagccaagcctgatcgcagcaaatacccaggattgcttcagcccttgccaattcccaagcaagcgtgggaggtgattagtatggacttcgtggaaggtcttccaaggtctgccaatgccaacaccattctggtggtcgttgataccttttcaaaatacagtcatttcctcccattactgcatcctttctctgcactaaaggtggctcagctattcatggactgtgtttacaaactgcacgggcttcctgtttcaattgtgacataccgggatcgaatatttactagccgactgtggcaagagcttttccggctgtcaggtactacattgaagatgagcacgtcctatcacccccagacagatggacaaacggagcgtgttaa

SEQ ID NO: 5818 - DNA, 688 bp, Zea Mays
gtgtgacaagcagccataggacggacgatccagattaacagaaggcagaacaaggggaggcagactaccccttgtagtaataatatagtagtatagatttcttgcttacatgcgttaacaactaacgcaagagctttatcctcgctatatcatgtctcccccgcttccttctcgctacatcctacctcctcccactctcaccacaaaccagacaagtcttatctcttatttgcatgtgtaacaagcaccacgagcgctctcttctcctttctacatcctacctcccccgcttctcgctacaaacccagataagttaaaccttatctcttgcttgcatgcataataaccaccatgaccccatcctcctccgcttctcgctacaaacccagataagatagaccttatcttttgcttgcatgcataataaccaccatgatcccttcctcccctgcttctcgtgctacaaacctagataagatagaccttaccttttgcttgcatgcataataaccaccatgatcccttcctccccgacttcttgctacaaacctagataagatagaccttaccttttgcttgcatgcataataaccaccatgatcccttcctcccccgcttctcgctacaaacccagataagatagaccttacctttttcttgcatgcataataaccaccatgatcccttc

SEQ ID NO: 5819 - DNA, 576 bp, Zea Mays
cccgggctggggctggtgtgtttccgttatggtgatgcgcatcgccgtgcagagtgccagtggagtggcaggtgttctatctgcagtcaggaccacaaggatgtggtgtgtaggaggaatcctaatgggaagctcagatgggagccggtgacttcctcctcttctcacggcactatcaacttgatgtcaagtgctgagcagcagttttcagttccgcttccttcgcagtagttttatgtgcctgggacttctcagttcgtgccgatgcagggttttcctcagtatctggctgcgcctactcctgcaccgaccactcctatgccgtctcagtttggagctccgcgtctgcctcacccggcggctcagtggggttcttctgttaatttcactccgggagcttcctcttctgtgggtatttccggggcttatgtgctacccgctgcggatggcagagagcaaggagacatggtgacaggtacaatttcagttgattcatttgtggcccatgctctttttgactctggcgctagctattcgtttgtttcggaggattttgtgtcgcgggctggtctttcg

SEQ ID NO: 5820 - DNA, 533 bp, Zea Mays
cccgcatgcggcgcaaaagagggcaggagaaggggaggaacgccgactcaatcgacatcgagggaatcaaggtcgggaggagctagcaaaggggaaacatcctcatcaaatgcaacatgacgagagatgatgatgcgatgggtgagaagatctaggcaccggtaccccttgtgatcattgtacccgatcgtggtgaaagtttgaggagcgtggcagaggtgttgggatagcaggcacactcgaaggtgctcataggaggggatggtgtcgaagagggcgaagaacggagtgggatggggaccgccttggagggaagacgattgaggaggtaggtggctgtgttcagcgcctcaacccagtaccgggcaggaagaaaagcttagaaaaggaggcaacataacatattggtggtgttgcgcatcatgcgcttagctcgaccattctgagagcatctccaagagagtcctaaaattgggtcctaaaatcgaaataggacatgatttaagtgatttaggccctgtttggtatagctt

SEQ ID NO: 5821 - DNA, 596 bp, Zea Mays
ctcccatcgggcatcgcctcgtcagagtcagacacacactcgcctgttgtctcttgtcctcgttctctccatctgcttctaggctctggcaatttggggacgatcgactctgccgccgcctcacctccgggctccagcttctggtagggtcctccaccactccatgcctccacctcacgtcccactggcttcccctcacctggtggctgcctggctggtggttcggtcactgatttggttacggtaagctttcgatgttcgtcttactcttcctctagccgatgtctccgatgaggtcgagacttcttaatacggtgcttgttcttgtgatctgtgcttgtgatctgtgctcgaaccccgaaccctaatctactctactccttcttgctctgtgattgtacccgtgagggactgatctggtgctctttttggtaagtgcttaatctggtgtttgttcttgtgatctgttcttgtgatctatgcttgtgatctatgttcgaaccctaaaccctaatctactctactatcttcttattctctgattatagccacctgtgacggacaaatctgtttgctccggctttggtaagttctta

SEQ ID NO: 5822 - DNA, 970 bp, Zea Mays
catgaaatgcattctttcggctactgggaagcaactgctagatgaggtccacggtgggcaatgcgggatacacgcagcatccaggactctggttgggaaggtcttcaggtctggtttctactggccaatggcaaagagtgatgcagccgagttagtccaaaggtgcaaagcttgtcaatacttatcaaaacagcagcatttaccagcacaacaactgcaaaccatacctgtaacatggccgttcgcgtgctggggactggatatgattggacccttcaagaaggctcaaggaggatacactcatttactggttgctatcgacaaattcactaagtggatagagttcaaggccattgcttctctaacttcagctaaggcagtggaattcatacaggacataatattcaggttcggaataccgaacaacatcataaccgacctgggatccaatttcactagttcagagttctttgatttctgcgaacaaaaaagcatccagatcaaatatgcatcagtggcacacctaaaagccaacgggcaggtagaaagagccaacgaaatgatattggaagcactcagaaagaaagtcttcgacaagaatgaaaagttcacaggaaagtggatcagagagttgccgtatgtggtctcgaacctaagaactcaacccagccgagctttgcatggaaacactcccttcttcatggtttatggttcggaggcagtgctacctgctgatctcaagtttggggcaccaagattgatcttcgaaaacatagctgaagctgaagctactagactggaggatgttgatatactagaagaagaacggttgaatacaatgattcagtcagcaagataccaacagactctgaggcgctatcatgataaggccatacgacatcgatccttcgcaatgggagatcttgtcctccaccgaattctaatgggggagggacgacacaaattgtcg

SEQ ID NO: 5823 - DNA, 869 bp, Zea Mays
cggggagtcctcctgctagcgcgacttggcatgcgccgttgaagctctgcgggcataaaccacctccgcgcatgccgccaccgcctatatatatatggtcacagactcgtgctccctcaatcgtccctatcgacgaccgtacaccgacatagaaatcgcactgcacaagctgtgtgtcgccgccgttggccccctgttttcgacaccacgtggagacctagtgctgacagggaggttcgtcgcggtctcgggattctgcgtgggggatccttggatgaaataaaccactgagctcgccggaattcctcactgtcgccataaacccgtgctgcgccgtggccgggcgttcctgtgacccaatagctggtaaggagctttcctttgagtctgttatcatctccactttgcgtagctttcatttcatcggagttcaggctttgggattgcggggctgtgtcacgtcggccatggcgccaccgctcggctttggggcgtcgctgccctgtgtccggtgggggaagagatgagagagttgtgttgaaggggataagatggggaacctagatctggaaactgacggatgagagtcgactgtgggcggtattaaatccaaaccgtagtttcttcttccagcggctatggggagaatagggtgtcgcgaaccgtggaccgtggatacgtgatccagtggttgaaatgcaatgatgggccctcgggaactcgatctaattcgggcgctcgattggggatccaacggctctcaaccgtccgtaccccttcggccaagatatcttactaaagagacccttactttttcagtaactaacccccgatccactgtcgctgtgcgctgggtctcgggattctta

SEQ ID NO: 5824 - DNA, 641 bp, Zea Mays
atcgggatggccatctgaggcgccgtggaagactggatggagacgagcaggaagcgagaatgggaagaagcggggccgcgggggatttatatgtagcgtgaggcaaggtccgaagtccgactccgaccagagtcacgcgtagatgtctgttgagcacataagcctcggacagttcacttgtttgatatatctgcatgcgccctggagaatagctcctttccgtagatggccgagcgaacatgcgggtagttatctgccctgaataaaaggagaagaaacagaaaacgtcgcaacttgatcgccagggccgactgcgctgcatggctgccgctgttcttggcgtcctgatcgtgcgacgccgcgttgcatggacatggacgacgacagctcgggggtgctcatggtggtgactggtgagctcgggggtgcccagcaagatgggggatatcagagcgaggatcggatgcggcgcggcttgcaggggagacggtaatcacggctgagtaagacacgtgctaaaccgtggtgtgaggtgcgtggttggcgcctggtatgggctgcacgggggatcggaactatctcgtatagggaggggctgctggcgcccgaggtgaacgttatctcatgatggttgcttcaga

SEQ ID NO: 5825 - DNA, 482 bp, Zea Mays
ggaaagtggattcgtcaaaaatcacgtctctagaaatgtaaacacgtctggagtctatatctaaacatttgtattctttatgtagagcactatatccaatgaaaacacactctttagagcggaaagagagtttttgtttattatatggtcgaagattaggccaacacgcacaaccaaagacgtggagcatggagtaattgggtagaggatgaaaaagacgctctagaggagttttattatcaatgacacgtgtcagtaggcggttgattagataggtggcggtaaggaaggcatcatcccaaaacttaagcggaacatgggcatgtgcgagaagggctagaccagtttcaacaatgtgcctatgtttacgttctaccgagccattttgttgatgagtatgaggacaggaaacacgatgggtgatacctaaagatcggaacaagttgttgtgagctttttggtattcgcccccagtcagattg

SEQ ID NO: 5826 - DNA, 515 bp, Zea Mays
tggggagaaagagaaattagagagctatggtggctaataggaggtaggagcgggtgctctggcttcgtgattatctaacggagctagcggtgtgcttaatttatagtgttcaagagcggtggcctccaattttggaatggcgcggtggcggtcgaagtgcaagaagatcactggtggcgcaatcgtggcgttcaccggtgcagtggttcagagagggtaagcctaagtgtgccacggttactaccgcgtagtgaagagtcacggcgtggcataattgagatcgccggagtgtccacgacgacaccggcggtccggccacgtcgcaacggctacaggcacggtgataagcttcccctgcgaccacatctgcttccccgcaagatcttttacctccccatggatatctactgcgtgcccggcacgaatcacggcgaccggcgcaaatccggacgcgcggatcaccagcggcgagggggactgaaccctgggatatttcagtgcactgtaccatcgcg

SEQ ID NO: 5827 - DNA, 1255 bp, Zea Mays
gacgaatctatggtcttatggatgggataaagtgtcaaagtttactatgtagacttctgactgtgtactattaaaatggacaaaagatggcataatatatttaagatgttcattggcaatttttctatccatccttcctaagtttcatctttataactagacaaatggtggcttatcatttgagtttggtttatcatgctaacttgtatctacttgctgtatagctgtacttagaatctgtacatgatttactggctccagagaagactaatattccaatagtagaagatgcaaaaactggtgaagtttccttgccaggtgctgcgatagttgaagttaaagatcttgaacatgtttttcaacttttgcaaattggtgaggcaaatcgtcatgctgctaatactaagatgaacacggagtcatctcgtagtcatgcaattttaattgtatgttcctgcattgcaataattagttctgttatcacttctattttaggttccgtaagtaatgatatggatatgcactattgatgccttcttttcagatccatttgcaaagaaacacaagaacaaaagaagaaaatggtagctctttatatgatgttagacatgacacttttcctgatgatctgccacttgttctcaaaagtaaactcttgattgtcgaccttgctggatcagaacgaattgataaatcaggtaaaacttctctccattttttatttttctacttcctccagtctgctttctaaggtgtttgagagttttggaaaagtccagttagtaagacgcatggggtgtccgtgggattattcaacggagagaattaattcttcacgggatcctaagcattgcatgacatcatgcagactatccgctggtgttgcgggcggcaagtcgtgcagtaactcacgagcgcgactatcaaccgagtttcttcactttcttggtacctatgtttctaactttggccccttagaaagtggactggagggagtaattgcaaatcaagttggttactaaatattgtcacaatgtgttcattgctctgtattaccttttttctcaggaagtgagggtcacatgatcgaagaagccaagttcatcaatctctcgttaacttccttaggaaaatgcattaatgcgctagcagaaaatagttctcatgtacccacaagagattcaaagcttacaaggatacttcgtgattcatttggaggtgcttatgatttgcttatgttgtttgttaattacta

SEQ ID NO: 5828 - DNA, 658 bp, Zea Mays
tatgagttcctccacatcaagcaaggtttcaattgatagaacgagttgtttatacctgggccttacaatgcacaagtatttccccacaactcatggttcaggttcaggatcactcaacgcctcgagctagctgacaatgccatttaggcgcatggcgaaatcctcaacaacttctccatccttgagtgcaagtaactcgtactcacgtatcaacatctacttggtcgccttttattatgcaatcatcgcccaatttcatcatcttgatgctctcccacgccactctcatggacaacttggtggtgaacgaggagaccatctctagaggaacaacgctacagatgccttcaagcgccatgcggtcgacgtggaacttgatgttgctagggtcaatagtgttctagagacacatggcctacaaccttaccttgactagtaaaatgcccgctgggggaggtgctcgttgtgcttccgtcctcgcacatcccggcggagagctagcccccaccccccatcgacaccagctaggggaggtgctcgctatgccgtcatcctcgatgtcgaagaaactgtttcttgtgttgaggatttcagcatcatttctgcctgctcccacaacatcccatatggtcacatcttcttcattctcctgatcatt

SEQ ID NO: 5829 - DNA, 467 bp, Zea Mays
cacggagagggaaaccagcttggcttgcctcgggaggccaacgccccagcaccagcactagcaccacacgtcggaaatccaagggaacaaggtgcggttcagatccccgcggggagtcagatcgcgcagcttgaacaacttcgcgaactacacgccaagcttggagaagaacatgaaccgttatagcactacgacacgttctcgagcaggaagcagcaggccgagccttcgaccgaggggagagggcacacgccaattcacgcgacgttcaccgtcgtatcatggaaggcgtaggggccgacccccctccagcctttcacaaggccagccagaacctcgctgcggcggcaatcttgcttcgaacaatgccggaaccatcaaccactgaagggcgccgaatccacggcgagatcaggggtctcctagagtgcgctgcagtccagtaggccgagagctctgcctcggct

SEQ ID NO: 5830 - DNA, 444 bp, Zea Mays
acccagctcagtcaaacgagaagaaaagaaggttatcatcgagatcgatcggcaaaaggaaattaacacgccgcggacacatattaataacgccgacgacgacctgcctgcgtttcgttgctggcaacacatgcgtcggttgaggcaccggcgggcatgtggccgcacatgagagagctgcactgcatcgccgaagcctccattagttggcatcagaagattaaactggttaatctatagccgattggttgccaggtccatccctgtgtcccttaaatgaatcatataaatttgagatcactagcagtatatattgttctattcgcctaccttctggttggatgccgtatgctggttggtggcgtgcatgacgcctgctctgctctgctcctcgacgcgtagaaaatgcttcggcacagattcattcagaccacgtcgtccgac

SEQ ID NO: 5831 - DNA, 513 bp, Zea Mays
gaaaattgttgtcagtaggtggtaggctagttctgattaattctgtgcttactagccttgccatgtatatgctatctttctttgagataccgaaaggtgtgcttaaaaaactcaactactatcgctcacgtttttattggcaatgtgatgaacacaagaagtttttattggcaatgtgatgaacacaagaagtataggctcactaagtggagcatcttgtgtaggcctatagactgtgggggtttaggcatccagaatttggaaacccaaaacaaatgtctttggagtaagtggcttttcaagttaattaatgaggaagacatttgtcaaaatcttctaagaaggaaatatttgtcacataaaaaccttgcccaagctcaaagacagcccggggattcccatttctggtctggactcatgaaagtgaaagaccaattcttacattacggacgtttcaaagttcataatagaaaggaaactagattctgggaggacaactgggttggtgatagg

SEQ ID NO: 5832 - DNA, 482 bp, Zea Mays
gttgctatctctgatttgtgggcccgacgtagcagcgtgttcttcttcctaccgtaacaaactcccacgatcgccgctgctcagataggatggcataacaaacctctcctccctcctcgggtctatgttgatagataaaagcctatgcctcgtcgctatctcgctcatctgattgactctgccatgtgctgctatggaggattcgccgccgatagagaagaaagccaccgctgtgagggaaggaggaaagcggtgccgccattgtgccccgtgcgtccaccattagtcggaagcgatctctaggggccgctgggtgtgtgcatgactaccgaagcggggatggtggctagggctcaatggaattgctcgttagaggtgatccctcgttgcggatacgccggacgctgaggataggtggctgcgcggcatgaatcacggtaagaacgccacaggttggctcgttcttcatcactatatcgtgc

SEQ ID NO: 5833 - DNA, 396 bp, Zea Mays
ctcgtgctcgtcgccttcctccaggcaaatgccgacgtgttcacatgggagccgtcgcagatgcctgggatccccagggaggtgatcgagcaccatctgaagatcaaccctgacaccaggccagtgagtaagaagcctcgcagacagtccgtcgagcggtaggacttcatccgaaaggaggtccggaagctgctagacgccgacttcatcgaagaggttcatcacctagtgtggctggccaacccagtcatcgtccccaaggcgaatggaaagcttcgaatgtgcatcgactacaccagccttaataaggcttgtcccaaggacccgtatccactcccgcgaatagatcaaatcatggattctacctctgggtgcgaccttttgtctttcttagat

SEQ ID NO: 5834 - DNA, 478 bp, Zea Mays
agatcctaagtttaggacagtccatccgagacaaagagatgctcgtttcagtccatattttgataattgcatcggtgcaatagatggcacacatattccttttgttgtgcatgcggaaaaggtgcttcagtatgtgggacgacatggatatccttcgcaaaatgtattggctatctgtgacttcgatatgaggtttatatttgttgcggctggatgacctagttcggtacatgacatgagagtgtttagcgatactataagaaagtatggtgacaagttttctcacccaccaccaggtagtattaagttcatcagatttattagaaatgtacacatgtcatgtttagtgttatatgtgtaagtgttactttctattggcattatgtaggtaaattttatctcgctgattcaggctaccctaaccgacgagggtaccttgcaccgtacaaggggaccaagtaccatgtaccggcatttc

SEQ ID NO: 5835 - DNA, 371 bp, Zea Mays
cccgagcctgttggccaagatctttgtcatgaacttagcaaaactgtgaatcaggctaatggggcgaaaatcagcagcaccatgagcgccctccctttttggcaacaatgtgataaaggcagagttgaggaggcgaaggtttctgaagtgaaggatgaaagatcacatttggccacagtttctgaagacaactctgaaatccaacaagattccccgagcattttgtctactgtagacttactccatgcgtgagctgggatgccacaaagttccacatccaccaaaactggcaaggaaacaccagtggaatgagcaaaccgtgaccatttcttgaacttcaactcaaaatccgggcagtgaagcactcttcc

SEQ ID NO: 5836 - DNA, 719 bp, Zea Mays
cagactggaaaagaattgagtgccagcaagctcatccaaaatctcctcgaccaccggcatcggaaaccgattcttgatggtcatatcattgagcttacggtaatccacacagaaccgccacgtaccatccttcttttgcactaaaaggaccggagaagcaaatgggctcacactgggggtgatcagaccggatttcaacaacgcagcaacttgcttttcaatctctgtcttatgatgaggagaatatttgtagggtcgagcattgaccggaatggatccagggagcaacggaatatgatggtcaaatggtcgagatggaggcaattcagttggtataacaaaaatgtcactgaattcccccaacaacacctgcaattctggatggatctctttgctgttctcctcaatcacctcctccaacaatgcaaacacccagatatcattccctcgcagccatttctccacctgtagagtagaaacttcctccacaacctgatgttgtgcagtattgcctaccaactgaacctccactcctttgtcaacaaaactaataaccttatcatcccaattacaatgcatgggactgtgtctgcacaaccaatcatagcccaaaatagcatcatatgctcccagccccaacaccctcatatcacattgataggtatgcccattggcccaccattccaatgatcgtaccatcgtgtcactatacataatct

SEQ ID NO: 5837 - DNA, 434 bp, Zea Mays
gatgtctaagcctgggcggtgtgtggttgaagacgccagggcgtccatagattaggaaattgatggccgagattcgtacgtaggcaaacattcgcctggtaatgatctggaacattgatcctttggttaacagctctgattagaagtagggaatacccctttacgacattaaatcgtggtcgttggatccaatcggagcgctcctaggtgattttagggtaattgaatccacgtcgttagttcctaatcggatggcggatattgtgtaccggtttgatttaacggagatctaatctagcgcgttgatggctgatcgggcggccaagatctgagagtgccctttcggcccaggaatcttagtaaagagcccctgggtttcttaggaataaacccatagtccttccctgggttagctaagtctgggcgagtttgcg

SEQ ID NO: 5838 - DNA, 742 bp, Zea Mays
gaaaggaaaggtctggcctagaagcattcaccctcggacgaaccctgaggccatacgtggcggagtaggatagggggggggggggggcaggcgaaccaaagggaaaccactcgagtggatctctcgctcgacccgagaccgatccaacgtaagtgactagctgcattaaccgtgcctggcaccgagccacggcagagacgccgatccgtctctcactcataacttacgagcctctcgggctacagcgcactcatgacctacaaactctcggactgtggcacatttattgttcgcgtgccctgacctgcgacacactcatagcctaccagggctaggcatgagtgcacatgccgcttgcagggcacaacgacacaagccgcaccaagacccaggctacgaaggccaggggtctacgtagcttgaataatggtgactgggccccacgctacccacgccatccgctgtaaagaatacgagacgactagacaacccccagatgctcacagacgcacgtgacttcaccaaggtagaacactcggttttaccatcgtccggtgacttcttctcgaggaagacatcgatgcctgaccccctccttaacctataaaaggaggacggacaccggagatagaggacgaacggacggttcgctgaaaggaagaggaagaccgaagcccatcgccagccaagacttagttaggactccagctctgtagccctttacctcctccgcacaagaaac

SEQ ID NO: 5839 - DNA, 487 bp, Zea Mays
ggccctcgcggcagactaatccctgcgctgcgcattttccccgttgccgctggtgcgcgggacccgcgttgtcaacgccatcttctccatcagctgcagcgcatgcgtgactgattccgtcgccggggaagcaggaacgagctgttgaatccacgcgctaacctcgcacccacgattctccgtcgcccgggcttcaaaagcagacccgacctctcctcgtgctcctccctttgactccttcttccagccgccaccagagacaaattgcgggagtccgccgccgtcgagttctgccatactcaccgctcaacaccaaagatctggtcccatacgttcgggagggtgcacgggtggcgctcggggaagaagccgggggatcgaggcatcttctgcacgggaattcttcgccgtatttgagtctccgccgcgggatcgcgccgtcgcgtgggcagactcatcaccaaacccattgtgagtacaaaccgtc

SEQ ID NO: 5840 - DNA, 446 bp, Zea Mays
taaaacgctggcgtgccacgtcatcacccggccgttatttctaaagcgcgggcgtgccacatcatcacgcggtccattttaactcagtggttatttctaaaaacgctgacgttaccagacttcacccagccactgtttccaaagcggccggtgtggcccgttatcactcggctgttacctctaaaacaccgacgttgccatcgatcactcggctgttacctctaaaacgccgtcgtcgccatcagtcactcggttgttatttctaaagcggtgatgtggctccaagggattcggctgttacctctaaaacgccgacatcaccagtaaccgctcggtcgttatttctaaaacaccgacgtggccgctatcgctcagccattacttcaaaaagcgccaacatcgccaataataactcggccgctaccaccaaagcactgacgtcgcaa

SEQ ID NO: 5841 - DNA, 420 bp, Zea Mays
gggcaacagcgaggcgagcagcgcgaatgcgcgcacgcagggggggtagacgaacgaatctaggggggtagatggaggggtagacagacgccgtcagagtcccaacgacgtgccgcacatatgcgaaagcgagtgcgcgctagctgtgaggaggtgtttggggctgcagtgcgcgtggtttggcgaatcgcaccatgcgggggccgtgcgtaggggtagacgcgtgctcccaactcgacgagcgagggtacgtgtatgactagacgacgaacaacgaacgacgcgcacaagagttggatcgagggtgcgcaggttgcgcaacgaccactccgaaccagcgacgtcgaggcttagcgcagggacaacttcgctggccgagggacggggagggtaacgacgagcaggagagcgggggcttgg

SEQ ID NO: 5842 - DNA, 596 bp, Zea Mays
taaggataaaacttcctgagatgttctatgttccatgagttcccgacttctgtgccatccatctgtgtgagtcgatatgatctaggccgagtgacttcagctactatgaatggtccttcccatagaggtgacaatttgtgccgccctcccccgttagaattcggcggaggatgagatctcccactgcgaaggatcgatgccgtatggccttatcgtgatagcgcctcagagtttgctgatactgtgctgattgaatcaccgtgtttagtcgttcttctacgagtacatcaacatcctccagcctagtagcctcagcttctactatgtttttaaagatcaaccttggtgccccaaacttgagatcagcaggtagcactgcctccgaaccatagaccataaagaaaggagtgtttccatgcagggctcgactaggttgagttctcaggctccaaacgatgtatggcaattccctgatccactttcctgcgaacttttcatttttgtcgaaaactttctttttgagcgcctccaatatcatcccgttggctctttctacctgcccgttggctctcgggtgtgccacggaggcatatttg

SEQ ID NO: 5843 - DNA, 692 bp, Zea Mays
ccacggtgagcttggttctgcggtgttcttgaccgatttggtggtaatcccaaattgaagttctctggtggacaattcgaggcacgagttggtgtatgggttgcttgactaccttgcggagccaatgacacactcaatttataggccctgggggcggtggcatgtgaattggagatggcgcggtggcggccgaaggagggagagttcactggcgcgtgcgattggtggcaaccatcgtggcaaggccttaggtaatagaaagacggtgtgtggcgatcaactgcgacgtggtaagatggctgacagcgtggcataaccgcgaagaacggcggcacgccggtgatggacatgcggccacgtcgccggtaagtggaggagcgacagagtggttactgtgccccaagatcatccatggtgagatcttttctctagaggattatctatgtttagctgggcgggaatcacgacgccggcatgaatccgagcgcacgatcacagacggcgagaggctgagctggcgacctgatcccttcactgtaccctcgaactcttcttcagtgcgcatggcagccaaggtttagggtcaaatctctctccattttctatggcaaccagttgatcgaccagtaacaaagttgttgtttgatgatccaacaacaatcttgctatagcaatcataaccagataatgat

SEQ ID NO: 5844 - DNA, 431 bp, Zea Mays
attcacgagtacgtgtctgaaccgacgtacctgggctgcagtagcatgctgaaggtcgagtagacgtggatcggcagccagtggtcgcacctcagtctcgtcatgctccctaaagcgaggtggtggaatgggcggagcggaaatgggagcgggagggggagcagtggaagctggagtggtggaggtggtgggtacagcggaagtagtggatggctctagagcagcaggagctggtgaagtgggaggtggagtagagacagtggcggaaggtgtggagggagcagtggagcaaggccgagatgcgaggcgacgaactcgataggctatctgatctgaggagatctggagctgtcctccttgctcatcctgctctgctgctactgccgctgcaagtgctgcacgagcggctctgtccatacgacgcttctttc

SEQ ID NO: 5845 - DNA, 460 bp, Zea Mays
ctattaatgtagaccgaacaacaatgaggtcctattttatttcgaagctgctaccgtcaattgttgcaaggtggcctatgtttgatcgtgagaggacaatctggatacagcaggataatgcaaggactcatgttccaccaaatgatttagaatttcaagctgctgtagctcaaacgggtcttgacatccagatttttttaccaaccttcaaactctccagatatgaacattttggatttgggattcttttcttctctacagtctctaactcacaggaaatcatgtaggaatattgatgagctgataaagaatgtggacaaggagtacaatgattacaaccctaagattcaaaatagggtattcttgtcacttcaatcgtgcatggttgaggtgatgaagattgatggaggaaatcggtacaatgttccacatatgaacaaggaaagattagagtctttga

SEQ ID NO: 5846 - DNA, 960 bp, Zea Mays
tggacctgcacgatgccgtgtgggaccaccctgctggagtcactttcttcgctacgaccgaatcacgcgcaacaacccccacgctcgagcaacaaactcactgtgattcgctcaacgcatgccgaccttggtttctcccgcaactgaccctctcagctcagactcgccccctctgacgcatatataggtcaccgtgaacccctgtgccaatccagtagccatggcgtgcagagatggaagggagagagaggaattggcctgccactcaaatcgttcgctgccggtgtgtcttcggcctcgaggtacggacccactgtagttctccatctgttgtggttgctcatgtgatcgacggggtggggtttcgccggagctgtaccatacgcgcatcaggccgccatggggggaaagacattcctgcatggttgttctggtgtcagcactcagcaggggaccttggggcatcgctgatcctcggggcaggtgctcacgggagtagctagtcgtgggagtccttggcgccgtcacaattcctcactggggccggattgcactactccggcaacttctgccatggggaactgtggcgccaccgccgtggtgggcgcatgccttcgcgatggtgactggggaagggataaagtgtgatggctgttcatcacggaaccatcagctcagaataagtgacagataccctttcgcacgttaagtaacgaccgtggatttctggtcctatggcaatcatcatgtaccggttcataaagaggtttgtgtaatatgcaccgttgatcctgcatccaacggtgctcgttggccgataccccttcggttgatgaatttgcataagagcccctgccctttacactaatcaacccgcagtacacctctgcgttgttctgagtctggggaaaacttctggttctgcccccgttgttctctgtaattagtactcagccccga

SEQ ID NO: 5847 - DNA, 626 bp, Zea Mays
tcaaattgactcggccggtggtagaattcgagccaatagcatttgcttgaatgtaagtgtggaagtaagggggatagtgtttctcgctaacctcatagtaacgggtactcatggaatagatgtcatcctagggatgaattggctagataagtatcaggcagttatcagttgtgacaagaggacaatcaagttgatgtccccactaggagaggaagtggtgaccgagttagtcccgcctgagccaaagaaaggaagttgttatcagatggctgttgatagcaatgaagcagatccactagagatcatcaaggttgtgtccgagttcccagatgtgttcccaaaggacctaccaggtatgccacctgagcgaaaagttgagtttgctatagagcttcttcctagaaccgctcccatctttaagagagcttacagaatatctagacctgagttggttgaactcaagaagcagattgatgagctgtcagagaaaggatacatccggccaagcacctcgccttgggccgcccctgtcttattcgtggagaagaaggatggcaccaaaaggatatgtatcgattatcgagctctgaatgaggtcacaatcatgaacaagtaccccttgccca

SEQ ID NO: 5848 - DNA, 545 bp, Zea Mays
cgcggtgcttcgggtgcttgccggtggatcacccgttgacggattgggggcaaatcaatccagtggaggccggaattcgtcatcgcgattcgcgcccattgatccgtcgtgggaagtctagcgccaattcgacctccgcgttcggtgagctctcgattctttaccctcgccgtattcccttacctagctaatgtcgcgccatagttaattgtgggcgaattgggcacgaatttggcctttgtgcggggaatgtcgttcgggcgccgcccatatcgtggtcgggggtgttcggctgcgtggcggtcggcgaaatcattcccctgtgttctccttgagttccgtttatggcaagactagtttgatttgggtttggggccgcgaacctcgtcggccatatggcgcggccgtgggcattccctgccagagggtgctcggctcaccgggagagcgaaagaaaggagaaagcaccagagccgttgatctcaggatgaacggcccagggtcagataggatttggaccgtgggatggttgttgtgcggcttag

SEQ ID NO: 5849 - DNA, 475 bp, Zea Mays
ggttaatcggcggtgaggagcagtgtactgggttcgtaacgagataacgtagcaggccgaatagtcaatttatagcgatcgcttgagtatttcgcgaatttgggatgggatgagctggaggttggagaggaggtgagtcaccagagcataactaccgtggcgctcatcggggcaaaggctcaggcggcagatgggctatctactgcgatctactgtgacgtggtaacgcctcaaaatacgtggcatccttgcggcaagcggcaaactccagcgatggcatctcgaccggtcgcggggcaagtgggtatgacggccagctcacaatctcatccgcggtcaagatcttttcactggtccggtaatatccacgccgcgccgtgcacaaatcacagcggccgacacgaatccacatgcagagatcaccagcggcgagttcactgaatctggatttttattcatttactgtaccatcgcg

SEQ ID NO: 5850 - DNA, 577 bp, Zea Mays
gggctatgtacaccatagatgtagtataggggtacattctagcatgtaccaccatagttgtattgtagtaatgttaggtaggtgacactctaatctactgagctattgtgaccctaaagatcgtgacctaaaagttgagtgttccatacttagtcatttgtcttatctgcaaatatatcttaccctatgtctctaactcagatggtcaataccaggaaggaggtgtcgatctacctgcacgcattcgctgaaggagggcagtagctaatccacaactggagatgaatcccccaaatcctccgcctattgggtcggaagcctttttcgtcgcccaaatccagctgctgcaacatatgtccaacaccatggtgaatatgcaagctaaactccacaataatcagcaacatcgaccaccaccacccagggataagcatcgcgagttcatgagtcacaagccatccactttatctagctccctagatccactgcaaactgatgattggttgaggtcaatggagaagttgatcaatattgtccaatgcactgacagggagaaggtactctacgcatcggatcg

SEQ ID NO: 5851 - DNA, 815 bp, Zea Mays
cgcataatgggcctcgaaggcgtgaagcaggagccgactaatgtgacgacatgctagatactgcacaggcgtactggtcgcataaatttcgcgcgaaggaattgcctcaaacctgaagatgtgtcttgtgcacggtaaaacatcagattactcagaggataactcagaaaagacaaccaagcaccgaaggaatagggacgctggtaacagaagagaatagacttagatagattcaatgacctgtacatggatatctctccagtcggctatataagcctacaaaggtacccctacaaaaactctctcgctcaccattagattgataggtaacttcattttccacctcttgcaaaccacctataacctgcgaacttagagaaatccaatacttagcaccacactggacgtagggtattacacattcacgtggcccaaacctgtataaacttcccgtgttccgacatgcccccactcataccatcacgcagcgatcaacattatcgtcctcccaaaagtactttgggggctaccccatagtgagtagtcgggacaaaacaccgacaacgagcacagaaaggggttgaccacgacactaggtgggtccgcggtggagctatgtcttcgacaagaaatccacatccacccgatgatcaatccacaatgacgcctaatgctatacgaagcgaagaatagtggcaactcggtgcacgactcagagcagattaatggcttcgtgaagctctagtgaagaattgcacaccccctagttggtcttgcgcttggaaagccacacccacacattccttacccttggc

SEQ ID NO: 5852 - DNA, 1871 bp, Zea Mays
ctgccggcgctgccaccagcggcgaggccgaaccctcgcggcagccgccggtactcgagaacgctgccttcgaggagtactataaggtgtggttcccatttcgatttcgcatagcgttttccctatctatcgcattggctggcgcgatttggagtgaattcaggctgcagtctctggtgacagcttgtttgttgagattggaactttttcgttgctgcaataatgacaaatgtgttcatatatgaacaatctttctgtatcattggtctgcggtttaactggttaccactttgtactcttgtgctaggtgagtttagtcttcctatttggagttatagtgtcgcgtacaaaatggcatggtttcagggtcctgttcttctggatgtgtgtcagtgtgtgtgatcgcacttgcatatttgtttgggcaggttcagcaaattgtccgcgaggaggagtgggatgccttcatgagtgttctacggaaaccattaccagcgacttttagaatcaatgcctggtaatgctggttactctgaagtgaaatcatgaattttcactgaggtcttaatttacttgtcggattccttggcttgagtaactccacatggaccactgtcgtcaaagatattcatgttctcttaaacgtgatgcccatcccttcttctcgtcctgcgcccggagccttttgttatcgaaggctggctgctccatgacttgtatatctggttaatctgccattcaagtagtcatgtgcaaatgtggtattagatagtttatttgcagcctgcgctttatggtactccaataagggacctgtacttctgaactatcttaggaatgggtgattgtcacttattataagactcatgcagtttcagggtaacttcaagtgtgccattaccaaacctttcagtgtaattactgccaaaagtttattccattaggcaataccatgctattctcacaggtttacatctttactttccttttcagttgccagttttataaagatatctgttcaaagttagaaaatgaatttaggcgatctttggagagtgaggtagccttttctctgtcgtctatgattttctccttacttgatcattgacattttttaatttacaatttaataactcactgcaaaggtcagtgatatgcatggagaagatgctataactcccttgccttggtatccatgcagtcttgcatggcacctgaatttctcccggaaggaattgaggaaaaatcaggcactcgaaaggtaattaattgtagcatggtgtttaagtcttgccatgacatgaatcttgcttggtctatgtagcgtaaatacgagacacttttgcctttgcattagtgaatatatggtagggatttggggtggggtggagatgtctgagatggtcttgaagtgggcttcaaactgagttgtattgggtcagaagaatcaggatatccaataagcatcagatactggtactgcagattggtagagcatctgattaaacaggaaatatctgttccacatttatgttattaaaatttatctaatttcaggaaaattggcttatgtagtattggcttttatgagcagttagttttcccaaaagcttaaattgttatggggaagtcggctatatatttcttctactttcaaagtattattattattctgaacaattaatttctgtttctatattgatgtgctatcgattaatctattctattgatccaatcttcttttccagttttcatgagtttctgaagcatgagagtgaggttggtaacataactagacaagaggctgttagcatggtgggcatcctgtaccagtttgttgataaacattgccacctctgttatcttgtatt

SEQ ID NO: 5853 - DNA, 570 bp, Zea Mays
cggtctagttcaatcggatgggtcgacgagcatcacgggtatgtgagatcactcaaatgagagagcagaggggacgagctaacctgtatcgcgctggccacgacgaggtgttcttgcgtcgttcttcgaccgatttgggggtaatcccaaattggggagttgtgggcaacgatcggagatgatagttggtttactagacacacaattacctagcggaacgtgctgaggcttcaatttataggatgctcgagcggtggtgatcaatttgggcaagttgtgctggcagctggaggggaaaaggagctctgtgcttggaacaggtggctttcaccgtggcaatcactctggcggtcaccggacatgcaccccatggttcatcacgatgcggctaaagcttaagcatgtggcgcgcaacggtgacagatcgacggcggtgaaggttatccgatcgacggatgagctgggggggagtacggcaagcttagtcgtaaggagacccaactcaatccgggcgccaagatttttacctgcccgtgcttatcttctgaccatggtgcacgaatcgcgacg

SEQ ID NO: 5854 - DNA, 300 bp, Zea Mays
gactgactggtgacaaacataaccagatgctatctagtcggcattcacacgtggcaccataactcccttcccttgcaggcgtacatgacgacataactcccttctcattatgtttttgggatataaatataataatgaaacatattgcttggttcgtctctgcgtttgcgtttcaatctcgggtaattgccaaattgtctcttgtaatttcctaggagtatttcactgctagtcgtcagaacgagaggggtcaatgacatatgagccccacgtgtgatagggtttagggtttaaggttgc

SEQ ID NO: 5855 - DNA, 962 bp, Zea Mays
gttaaattctatctcattcggggtctcttatgtaaaagatttcggctgaaggggaatcctaaagcttgggccctccgatctaaaatgaacatccacgattacaacacactaactccgaaccggtatttaacccaggccacaggattcgggatctacggccgaaaactgcccgaggcaatgttccaccatggtcgttggatggacgatcgatgatccgagttcaatgggtgaaagggtaatcagccgacttaaccctagccgcccacagaagatctagcggcccacggctaaagcggacgaaggggtatcacccggtctaatctggaccgttcattcacggatcaacggcccacgctacttcttcttcccccggcggcagaacacgaccggcggtggcgcagaagcgcccacggtggcgctcgcaacccgaatcgccccgagcactaccacgacctaaaattatctggtacaaaacctagcggggaaaatggcgaacacgtggagagggatcataccggcaattaagtcacgcagccccctgacgacggtggatggcggaacggcaattcccctgcgctccgatgagcaatccgtgcgacccggcgacaatacagagctccgattcgcccgatacacaagcgatggtgtggtccgaagctctcgaaccaagccctaggcactaatgacgacgggagcgcgagatgactgtggcggcggacctcccttcctctcgactcgcgacggtggtcggtgggtgatgattgctcggccatggattcagagaggcgaggcttggttccccataatataccatgggcgtgagagactaggaggtcagttaccccgagacgtggaccgggccgtggccggaaccagctccgtggagctcgcggtgtttgttgactgagctatggagggaaaaacgctgaccaatcggccccgccaaaccgctagagggacgg

SEQ ID NO: 5856 - DNA, 718 bp, Zea Mays
cactatttagggttaagtcctttaaccagggttctatttgcaaaacaatacaacttgcttgaaatttttgcctagtgaatgcactctaggtgtgtcaaacatatgcaaatgctaatgctcatgatgtcatgctcaagttttagttatagtaacaccaggggtgttacaattcccgatctaacggtgtacgagcgccaccaccctcccccaagctaacgcagcggtgccgccctagagctacggcggaagctcgccgacgtgcccacgattctcctcccaagcgttgtgaacactgaaatcgattgatactacgtgactaggaggacgaggcgagtcgattggatgggtttcttaccaaggatgcgcagtacaggggtgtggccacggcgatgggcggaagtacgacgatggcggaatcacggtgaggaattgccttcaattcaccgctgcctgtggccgcttattgaccggacaatcttccccccgatggcgcacaccaccacggcctggttttggtcaccagacgatgccgtagccaagatcccgaccacggcggcaatggcgcagccgcttctctctctctcggtttgggctctggcgggtttgtgaaatagggggtacagatgcgatgcaagagtttataggcgtaggttggaccagctcacgcccggttttgcagcttggtggttgagattcatctgccatgcgcgcggaatcc

SEQ ID NO: 5857 - DNA, 368 bp, Zea Mays
tgatcatgttgccatatgaatctgggagaaaatggagctccaaagtgctctatcaggcgctctgaatcagttctcgatggtacagtaactgaaacggatgagatcgccagcgcgactgtcctcaccgccgacgactccctccgccgtgattcgtgctgtcgacgtcgtgattcgtgcccagggtggatggatagtgtcgcggggtgaaagatcttcgccgacggtgagctggacgccactccggctagccgcgatacttctcccctttctcaccgccccttgggttagaatctcatcgccgttgtgccgtcgccgttgtccgccgcgtgtctccggctatctaccgcatcaccgtgactcacccttgc

SEQ ID NO: 5858 - DNA, 275 bp, Zea Mays
cagctgcgcggtgcacacaaagcgaactattctttcgccttttactaaagaataccgtgtgtgcgccgcaaatagcagcatacgctaatttttggagggatcctctattttagggggccccacagttcaaatcaaagtttgttatataaaaaattgaattattttgcatttcttttttaaaagcctatacagtttaaatcgattttgtttacaggatttgtaaaatttaacttaatcaatacgctaatttttggagggatcctcttttagagggc

SEQ ID NO: 5859 - DNA, 602 bp, Zea Mays
ctggacccaagtttaagagccaattcaaccataatacaatgagaatttgaccatggctgctatgacaaagatgtaaccggtttgtagccctacaatcttgctgcagagcttgggatgagttgtcattggaaattgagagtaaatcatgctccaagatgttctgtcagtcgactgaatggcgatcgccatggtactgtacctggctgggatcagaccaaaagatctcaccgccgatgaaatcccgccgtgattcgggtcaccggtgtcaagattcacgctcgtggtggatggatagcatcacggggtaaggggatcttcgccgccggtgggctggacgccactccggccagctgtaatccctccccccttgctcaccgcccgtggataaggttctcaccgtcgtcaaaccctcgccgttgcccgccacgtggctctgcctttccaccgtgtcgccgtgactccctatagttgtcccatcgtcgccagggaggttgccacgacggtggacacgaattcactgcgccaaggttcttcttcatctccggccgccagcacagctcggccaaattgatcaccaccactcgctctccctataaattgag

SEQ ID NO: 5860 - DNA, 470 bp, Zea Mays
cggagaacgcagacatagcgtgcaaggattcccccgccaaatcagacgtgtgctacactaattggaaaggagggtgaaccctgtgtagtgcatcttaccatcaatctgtgcacgagcgacgcaggccatggcgaggtggcttgaggtagagatccggctccgatgagaaattttggagtaccgaccgcaccatctggctaggcttcaacctcccccgaattccatagatcccgaagaagggacacaatgaatcgttcgggggcgaataggctacgttcccatggaacatcaacagtggcatctcctctgctctctaccagtgacggtgagacgcactctccttcctagatccctcggcgcacgtgtacaccatggcatgtaatgggcgagggtgcgacaacgttctattttatagggcggggtacgaggccgagatggatcgaccgatgaacgcgcagttgttacatggt

SEQ ID NO: 5861 - DNA, 1076 bp, Zea Mays
ttttacgatttttttaccattttctagaatttatttggttctggaagaaaaagaaaaagaaaaacttgcaacagttctaggccgaattcaaactaggaggctcaacagcacatgaaaccggggcgcacccacgcccgcgttggcagctttgcagaatggtcctcggcttaacggctaaacagaaataggtccattcactattgcactaagtcactgacatattgcagaaaccaccccgcacttctaattcttctccacaaacgtccctggccatggtgcgctcagcgctgatcaccgacaccgcacgaactggccctggccggcgacggatgctcagacgagcgacaggggaagcataacctacccagggtgacccaggaacgtgcgttaatttagcttaaacacttgaagaatggtctgctcacgtgcatggcggacaccgtgtccacgagcttgcgttcccacacaaccatggtcgaattgagctaacggttgccagtacaagcttcaccagtacgcagagttactaaaacaacacttggattgaacgaaatcttaccagagcgggctggcctcggacgcgctgttcttggcggcgcggctgaccgatttggggaaaaacaacgtcgtggtgtgctcgggtgaaattgaggatggagcttcggcctatacgaccgcaagggactctagttttatcctgcacaatcaatttgggaagaaggggcagaggcaacgtgaatttggacttcttctgagcttcactggtggagatgaaaacacctcgtcgtggctccttgctcaatttataggcacggcggcccaacagatgacccccgaccacggatagcagcgcaagcgcatgcctaccacgtcggaaagagttacagtgagggagatggaggcatgggcgacaccgcggcaaaattcacaggtcacggtggccgccggtgaagactccggctgggctagggcggtggcgccacgtatggtttgtccctccccgacgttatccattccctactgcgcacgaacccggacggcggcggcgcgaattttggcgcaaagaggtcgccggc

SEQ ID NO: 5862 - DNA, 419 bp, Zea Mays
acccgacaagcgctgggagaagaggcctcatgaagaggtccacgccgccggaccacccgcctctcgcgcccgaggaggacctcgcggaggcgagcgcacgctggatgacatcctcgacgcccagtgcccgtaccacaaggacatgcgccacaccctccggaactatagggatttcaagcactccgtcgggcacgaccgacccttccaacctctacctcctcccctgccgcgaggaggaccgggagaaccgcaacaaccccagcagcaggaggaaggaagaggaggagccttctcgtgcgtcgacagagaagtcaacgtcatctttggcggacacggatcacaagaaggcaagagacaacaaaagctcaacaatcgtcagatactgggggcggccaccggtcctcccgacccgtatcgat

SEQ ID NO: 5863 - DNA, 329 bp, Zea Mays
cgccaacacatcgcggtcaaattgagagctaccgacctcggggtctataaattgagtgtgtcctcaactccgtcaagtattcacgcagctatagcacccactctcatctccactcgttcaccatagccccgcaattcgggttttcccctaaatcaactctccgccgccgtgaaccatacatcaccgcggccagccctttccaggtcagttcatccctcactctccttcgttcgagcactcttgtcgctctgggatgcttaccgtgtcaccaattcgcactgggagtccaccaatcgtcgggaacacgatcaagtgtccgtagtctccgc

SEQ ID NO: 5864 - DNA, 663 bp, Zea Mays
atgttttcaggccttctgtgtttgatagaatatctggccaccgtgaccaatggtgcaatgaagacaccagactgaattcagattcccatcgaaatcaatggagggaaatggaaaaagaacatagtgatatgaacaaagtggaacagcactgtgatgaccccaagcaatatcttggtagccagcggagtcgaaaagagcgctgggttagtaacgaaagaaactatgaccaacaccatgagaataattggaattctcgctggggtgcaagtagtaaagattctcaaaattggcgtgaaaagtcaacagattcagatataaaagatgattactcctgtgaaaaagttttttcttacagtacatgccatgggaaagaaaaggatggtaccaatcatgagaaggttaatgaaagggacagtaatatttctcgatcgtggaactccagctattttgcaaaccgtggtgcaggcggtacatctgatcatctttttacggatccacagaagttatctgcttcatttggatacagtagctataggcaggaaagtgatagcccaaactctacaagttctcgcagaaggtttacatctgttacaagcagagtcaatagtcggtcttcacgaccattccatcttggtgtactttctgagaggcctgttggtccat

SEQ ID NO: 5865 - DNA, 627 bp, Zea Mays
tgagtgaggaatctaacaccactgaggccattggatgttgggagagcgcggaatgctctaggaaatctacctcctttgcagcgaagacgatgtttaccgctccatcgaggggtcgagacaaaatcagccatcgacacatcgagagaatcgtcgcccgcagaaatgaccaagaatttagagctcatcctcgcgacatcgtccttctcctcatcatcatttgagttagtctcggcaccatgatccctatacatctgacgctaagccctgtgacgcctcttctcatctctgattcacttttctctcttttgctgctccacccgtgcatggcccgtctccttcttagccacactttttggcaaaggaatggggtcatcccccaacatcggataggacgactgagaagaataaaaagaaggattaggggatgcaaggtcggagtcagagagggatatgacgaactcacaaattccacaaagcctagctcgggatgcatcggagggcagccaggactcggaaaatgtatggaatgatgacagcaaagcctcgctcgtggaaatgcatagggtcggcgacgtttgccaacaacacctagatctcgcctcctgagagggaccccgtttggaggag

SEQ ID NO: 5866 - DNA, 315 bp, Zea Mays
accaaccacacacggattgtgcaccggatgaccgacggtaacacagttcttgcaaagagcaaacaccctaatgcagcaagcaccaacggagccgaccctaatgtagatgcagacgacatgagggggtctagcagagcaaacgtggacttacggagtcacagacaatgtctacggggcggcgggcagtaggagcagaccacacgctcccatgacgacggtgggtgctcaaaccaaagtggcgaacaacgacaaagacgggctggagaagctatcggttccaggacctaataaggcgaacatgaattgaggagagag

SEQ ID NO: 5867 - DNA, 537 bp, Zea Mays
catgatacgaagtctctcgcttaaaggagaccaacagtccacattgcaatacaagttgcagttacatacactcagcgaagggtcactagacccaccgcacaaataaacacaactatgccctccaacaaacgcgtcaatcgaagtcttttactaaaaagacactctgtgcaaaagtcgcccaagggtgcagccggactaccacaacaagtacacgatacgaagtctttcgcttaaaggagaccaacagtccacattgcaatacaagttgcagttacatacactcagcgaagggtcactagacccaccgcacaaataaacacaactatgccctccgttaccgccgcgcaacgcgagggcaccatacattacattggctcgactttcggaatgatgcccgcctccctataattgaacaacattattctcaattcctcaccctcaaaaagcttccgcagatccccctcgccaatgcttgtcccaatcggtgaagacagtagctctcgtttcccaaaccgatctactcgaagacggtcccac

SEQ ID NO: 5868 - DNA, 759 bp, Zea Mays
cttgtgttcttaaggtgggagagcagaaaatcgcagcactgtatcaaaacttaggatcacaaaaggacaattcgatctccaggaaaatctacaacaacaattttcaattgatcaccatcagatcaagctaagaaatgcctatgtgcagccgacatgagcattacacataaacgtagacatgcacatgttgtttaatgagatatttgagtcggcctcagtgtcgcaagcgtgtcagaaaaagagatacatcattttactaattagattagatactattttggtagcaatcaatgcagttgcacactctaatccagtaatcctcatagaagaccatagccatcaaatccattttgtttggttaaaaaagatacccaccatattcattacaaaaatggcttcaattaaccccctcctgaacctatatctagagattcacctttgtcattctgacatattatatccaaaataagtcctaaacttcatataaattatctatcattgcaataaaaagctaaagtatgtgcatgaattgccctcctctgttggtacttaaaacactaaataacccctagatccatatctatattatccacccacaacatttaaatattaaacagtccaaattaacctctaaatttacataggttagaaaagtatacaaaataattgatgaataaagtttatcgtaactaaacaaaggtaagaaagtatctgtagatttatacatcgggtataaacttagaatatggaaaaaacaaa

SEQ ID NO: 5869 - DNA, 476 bp, Zea Mays
cggacagttcgaggctcagggtgccattgaagattcttcttccgatgatgatgaggacctggggatcccgccaccgcctcatgttccacctcattcccatgatcacgaggccgacagttccaatgctgctcctgctgcccctccagctattgaccctgatgtagatgctattcttcaatctcttactcagcagcaggcctgacatgcagctatttagtagcagatgtccgaatggatgcaatcaatgttttagactatttaggaccgccaggacaccctccagtagtagctccttgcagacagggcagagcaccgggcattcatgacgcagattcttcagcacattggtgtttagcttccaccagtgcagtttgctcctcctccagttcttcaggctgttgttccgctcttcagttaggacccctgctccacttgtttggtccttctatctctccgctcaggccggtcaccctggc

SEQ ID NO: 5870 - DNA, 653 bp, Zea Mays
tgcggatgtccctgaggagatccttcatggggatgcatgtcctcatggactgggtgggttgtgccccatactccaagacgaggccgtttgtgggccatggctctcgatgccgagggagaactgtcgatcgatctcgacttgttgcactgcggctctctccacgaagttgtggaggttccggtacatcgtctttgcttccggcatgcctgactctaggatggatcggtgaatcatggccgttgcggccatgttttgtgcgggtttgaggaaatactatgtgatgttgctgcttttagcaagttggtcacacaccttcgtcggtcgaggcctttcagcctcgaggcgccttcgctcgacatcattgtagaagcggtcgagcttctacacgatggcgtcgagctcctcctgctgctgacggagtgaggcctctcacgccaggatgcgcgcttggcgctggtgttgatattcctcttcttgattgggggccaccttgtctcctctaccgttgtcgcttggcatgggcattgccataaagcaggcccttttccgttgcctcctcgacattggagttggcctaggtcgaacagtggcaagagtcatcctcgagcaggtcgagaacagacgtcgattggtgatcgaagactgccacctgg

SEQ ID NO: 5871 - DNA, 459 bp, Zea Mays
tcgatcagaaatggtggttttgggtattccgtgtagccgtacgacctgatcgatgtagatctctgcatacttttctacccgtagggtggaatctactggtataaagtgggtcgttttggttagtctgtccacaattacccaaattgagtcatggtgtcgggaggtattgggcaatcccatagtgaaatccatgctgatgtaatcccatttccatgacggtatctggaggggttgcaaggtaccagctgactttaggtgacttgcctttatcctttgacatgtatcacactcaaatacatacttggctatttccttcttcatccttgtccaccaatacagggcttttagatcacgatacatcttgttgctcccctggtgtatggagaatttggagaggtgagcctcgtccaaaattttccttctgaggtcttcattctcgggaactaccaatcggtcttc

SEQ ID NO: 5872 - DNA, 325 bp, Zea Mays
aaggctgatttttgaaaacatagccgaggcagaagctactagactagaggatattgatatactggaggaagaacgattgaatacagtaatccagtcagctagataccagcaaaccttgaggcgctatcatgataaggccatacgacatcgatgctttgcagtgggagacttggtccttcgccgaattctaacgggggaaggacggcacaaactatcgccactatgggaagggccattcatggtagcagaagtcactcggccaggatcatattggcttactcaaatggatggcacagaaatagagaattcatggaatatagagcct

SEQ ID NO: 5873 - DNA, 311 bp, Zea Mays
agtggttttatgttaagaatgatttaaagaaaaagaggatatcagggaagttatctagcgccccatatggtcccgcttcgacctccaaaggccgaaggtggaaattgatagcggcgttgaagagtgtcagaaggcctttagcactgtgtgttcatttactggcacaagagatttaattcaagagcacatagcgttcagggtatggccacttgtggagagctgggaaataccgaaggagaccaccaccgattctagtgagggtggtttagtccaattgaagtataccttcagatttggagataagtttgatg

SEQ ID NO: 5874 - DNA, 467 bp, Zea Mays
gcaatgtaggagggctgtatagtggtggctagggtgtgtcttgcaactctagaattagcggagaagctttgtcatacaggaagtcttggaggttgtatggctctggacgaaggctgtcatagttgtgatcttcctgccaaaggttcttgcagttgaactggtggccgtgttgctcaatgttgcgcatctcttcagtcgccttattgcttcttctaaagctcaaagaaacaaagcttcttctccctacgcttctccacttattgacggatggcattgaggttattgatctcacgatcaagtttctcatcccgtggtttcggactaatggccttcctcttctagaaccttgccttccgaacgagagccttgtctccttagttggtgtccacgcacctaagtacatcaccggttgtcgtcgtcttcttcggtggcataatgtaggttgatgtggtcgttgtgagtttacc

SEQ ID NO: 5875 - DNA, 658 bp, Zea Mays
cccgccgagcaagtcaacataagcatacatagcaaggcacgtcgccaggggccacacctacacaccccatccttacaataatcataccgcactatctgatgggacggagcagccctgatcataggcaacctcggcaccggggcctccacagtagctggtatatcagaagctacgagacgaggcgccataccaattgggcgaattcacgcgctgataggtgacgaagggctcatgacgactgaagaagccacgccacgtacgaccgcatcgtgagactgatccgtgggatccaccgcgcaccactacaaagacgtcagtaaaggacttgctacaagagccagagtaggagacgatgccataccaggagtacgaccacgcacgaccttatggaggatcggccacgacaacatggggaaccaatctctctctctccgtagaaaataggtcttctctgtaaggttctacccttaagatgtaaaaggacatgttcccctccttctcgacacaagcacactagaagtaacacataccgttacaatactacgatcaacactacactgggctagggctccggcctgaaccagtataaaccccatgtctcaagttctttgtccgagttactgtgatttaccatccggaaggagtccgcgccagtaac

SEQ ID NO: 5876 - DNA, 399 bp, Zea Mays
gcggaaatgggagcgagagggggaacagtggaagctggagtggtggaggtggtgggtatggagaaagtggtggatggctctggagcgacaggagctggtgaagtgggaggtggagtagaagctgtggtggagggtgtggagggagcagaggagcgaggccgagatgcgaggcgacgaactctgtaagcaatctggtcagaggaaatctgcaactgctcctcactctgcctgctctgatgctgttgccgctgcaagtgctgcacgggcggctctgtccatacgccgcttcttccaaccttcctactgctcaaggtatacagtcttccccttgacccgcctgaaggggcgaggagggtcctcatcgtctcctccccctagcgccgagacattcttcgtccg

SEQ ID NO: 5877 - DNA, 524 bp, Zea Mays
aagaaatattaccccgtggatgaactccggccgctattttactccggccgccgtatccgcttgtgtcacgaccactctggataggctcactggaattatccccccacaaccttacgtcgcgtgcctcagtgctttaaccacgccgccgtgagtcatcttggcccatccggtgatcgcaggtgagcttgccacggtaaatgccaccaatcgcttgcgccagtgcacctctttcttttcgactgccattgcacgagctcaaattcacgagcctccgctcaagggccctataaattgagcacaccctcggctccgttaggtattcaagcatccaatccacccgctcgtgcctccaattactcaccagagagccccaatttgggatttcccccaaatcggtccgaaacaccgcgcatagtgacctcaccgtggctagctcgttctaggtccgttcatgctctctgctctcccgtttcagtgtccttagattctcctgatgctcctcgacccattcaattaagctaaac

SEQ ID NO: 5878 - DNA, 532 bp, Zea Mays
caaaatttgtgtaattgtttattacggaagcttggttgttaaagtttacaactgtcgaacagctttagcacaagatgacaagagggaatgtggaaagataatgcctggatagataatagtttctggagcatctattggacttggcattgtttccatgggttttggaagtaatgaatgacatgcatccataagacgtattttgatattttattgcaatgccctaacagggtttggaaggtatgtcatgttgtgacgtggacacttggttaattttatgattacgagtgaccatgacatggtacacatactttctgtgttttaccaacactataagtctataaccaatggtatacattaatgtatctgatatcctttacctgcacaaagtttggaaacccttcagttagaagttaatggatgtttatggtaaatgatgcaccatatccggtcaatgtcttggagaacatcgtcaacttatactgtagatggcattgcctttcataaactcccatcatgtttataagatgatgtt

SEQ ID NO: 5879 - DNA, 320 bp, Zea Mays
gcagcacggacaatacactttgccttagcaccatattccaaagtagaaattgtcttgtgcagttcctttgggtcaggactagcacacagaatcatcaggatttttgatttgtcgtcctcgaatgaatcctgaaatgcaatgaaggaaatatttagatcatcattagggaggagaggttgtatcaataaatgtacttttttgtagtagtgtacctgtagtagcattgtgagtttgatgtccctgaatggaacatgggaatcaccattagcaatagactcaaccactcgcttcaaagcagtgttcccttgattgattttttc

SEQ ID NO: 5880 - DNA, 385 bp, Zea Mays
ggtttcgactggccggaggggaggaggtgcagagtgtgaaaaaggccgccgcagggagagcgaggaccgagtgctgttaagggcggccagcagaggaaaggaagggattagcgtgcgaggcgctgcttgatgctcgctttggtgtgcttcgctttgcttgcagccgtacttgactacttgtaacttgtgagcctgatcttttatggacgcttcactcgagtgattcattcccgtgtgggctcgatctatgtgctttttgggaatcagattccggggcacaagcagcgcaggctggcttccatgcagtgccctttccgcttccacacatcctttttctacgactgctctgctgttcttcggctcgttgattcggagttttggaccg

SEQ ID NO: 5881 - DNA, 322 bp, Zea Mays
gcgcgcacccgtgttgttaggtttgcacagaggacactggccatttgaaaaaacgattaacagtcctgcgcactatttctatgtgtcactgacatttgagtcgaggcccctccctttctattccttcgcaagttgaggtccccgaccatggacgacggagcagtggctccggcgagcctgtactggctggataacgcaatgatcggcgctcaggtgtggctgacacctaattccacccataacgaccataacccctcaattaattgcaaagttctagctcacaatctctctgtccacggtgatggcacgaactaaggacaaa

SEQ ID NO: 5882 - DNA, 509 bp, Zea Mays
ggcgagggcactctttgataggatgtggggtccgcacggccgagaggtggttagggagcggtccgaccgggcaatagagcaggtaaaagcgaagacgtcatgtggttatatgtgtgggtatgtggctttgctgaatgagtgtgctgttgctgcagatggctcattccgaagatgtcaaggaccttgctggtctggacggcgcactgcctgaggctgcggaggtcgatctagtgccgcccacggatgctggtgaaggcccctcggcgacccctgcactcgctgcggccggcgaagaccccgcgccagcccctgcgccgactagcgaagatgtcgcgaaggaggtggccgagccgacagccgaggacctcacagccgcagccgggccttcgcaggtgtctgagtaggtgttagggagtttgtaaattttgcctgtgtgatactgaacctcggttgctgcgcaggttctggggcgcacgcaaccgctactgacaatgatatttttgtggcgg

SEQ ID NO: 5883 - DNA, 456 bp, Zea Mays
ccgaaatccatgtgaaacccgacaggttcgggtgcaggtttggaattgcacccacgggtgtgatcgtgggtgggtttcagcaatcttcgcgggtgtgatcacgggcaggtttttgctccacccgacccatcaccatccctaacagtgggtgaacaactcaatctccacttcactcacctctccgctcaaccttaacctctagacaaaggcgacaacgtttctcgacgctagagcttcaagatccgggcgcgttacagcaagattcgccgagaaatgagcgagatccattgttttggcggctaagtcttcaggagtgcgaaacgcgggaacatgttagtgctcaacgacttccataggctaggtagcggttccctcccagatttcatcgaaatccactaagtagtcggtgggatttgtcgaattaaagccaaaatcgacatgcaaagaagatatttt

SEQ ID NO: 5884 - DNA, 528 bp, Zea Mays
ccaggttccacctaggattttcgtccaagaggtacaacaaccaagcatcaccgcagagcatgctgaagaatgcaaaaccatagaccaagcagaaatagatcccaacgactggagagagccaattatcaggtacataaaaatgaggaagaacctgaagacaaggtcgcggtagaacacatcgcaagacagtgagcccactataccatcatagggggtctgctatatagaagaggtgcaggaggagtcctcatgaaatgtgttcattcggctacaggaaggcagctactagatgaaatccacgtagggcagtgtggcatacatgcagcatcaaaatcattagtagggaaagccttcaggtccggtttctattggccaacagcaaagaatgatgcggcatatttggttcaaaaatgcgaagcatgccagttcctatcgaagcaacaacacttgcccgccgagcatctgcaaactattcatataacctggccctttgcatgctgggggatggatatgatcgaaccattcaaa

SEQ ID NO: 5885 - DNA, 438 bp, Zea Mays
cgctcgtccatgggcggtcgtggtgctaccggtggtgtggtggccaccatggtcggtttcgacgaaaggttattgattggtctggggccgtggatcggctcacggatggctcagattgggtgcgcacactctttcacacagccaagattcgaaccgttagatcacgatccaaggggggaatggaaacacgttttagatcatatctaatctgaaccctagagcgcccatccggcggctgtcctcgcataatgctgcaaggcgtgcgtggttttaatctggagcatagaatgttgatcggacgaccgatatccatgtataccccttcgactagcgcaaattgtaaaagagaccctgagcttaactattatcaacccgcagtccaccccggttgtagcctatgtcctgagaattttatagtttagcccccgagctttccag

SEQ ID NO: 5886 - DNA, 912 bp, Zea Mays
aagaggactatttccctgtgcaatgttaggttcgttatacataactgttactgttttttagccacgtagggatttgtttcctctgccttcatctacatatgcttcattatatgactcttcctacatacttaaactaaaaacaacaacaacaacagttcggtaaatgttgttctctggggtgggtaagctagcttattccctggagaacagatctacaacgatggtcagtcctctccacagatcctgatgtttgttggcacgcttgtcaagaaatacgcgggtatactaactttgaacttttgcatttagtgcttttttatagttgggacctaatgccctttgttttagatggactgtgcttgtctggaggctcaccctgtaagtggtacattaatcctgatgttcctgaagcaagtgccctcatggctaggtaatattctgctatgtctggtgcacgtatcagactaatgtttgtctttgctctgttctaacctgagcttgactcattgtatgtaaaaaccagtgcgagaaaagcgcatagtcccattaagtggaacgaggttctatcttcgaatcagcctatgcctcatgttcctgaggaacaaaaaatcgcttatatcagagatctgcacccatttgagaataaggtatgttccatgtttcattcacttagtcattgttgccttaccaactgccatggtcttctgttattgttttcctgcagtcatgccatagttggttggaactgggaatatagtatgagtgtatagttacatgttcgtgcaagatagggaattcttggtgacagtcactgtaaaaaagattggagataggtggtggtatagtgcatgcaaaaaatgcacctacacaactgtggctcatggggattcctacaagtgcagcgatcaagtt

SEQ ID NO: 5887 - DNA, 329 bp, Zea Mays
agaagccacctgggagcgtgaagatgatctgatggccaagtaccttgagctctttgctagccagccttgaatctcaagggcgagattcttttaagtgggataggtttgtaacgccccgaattttggagttgaattttttcttttcttcactcgccaaattcgggcgttaccctttcctttttccttttcccctcgctaagccttgttctttttcaaagttctagcgagatttagcccgagatctcatgtaagtaaaccctagagttaaaccttttggttgttgcatcatgccggtccatgcatatcttttgtttgtggattgaatttgt

SEQ ID NO: 5888 - DNA, 297 bp, Zea Mays
agtcaactaggtgataaatgatgcaggtgctaaggcgaaatcgatatgggtgctcttaccgaggattacatcgcgtcgtcctccgcccatcgagaagtgcgttccgcagtggcgctcccgtcaccggcgacgaattgccatggctctgtggtcccgcacactccactgcttccccgagcacgcaccatacacctgacagaacgccttcagtcacattggggattctggatggtggcggaggcgaatgatgtcgacgacggctatccttctccctttctccctctctgatcctcaccg

SEQ ID NO: 5889 - DNA, 435 bp, Zea Mays
aacgacatgaaggtatagcagaaggctccgaacggggtgatgaatgctgtttttcctcgtcttcttttgccaagctaatatgatgatacccagagtagcaatccaagaaagacaacatagaacacccggcggttgagtccaccacctggtctatcctaggaagtccgaagggatccttcggacagtgtttgttgagatccgtatagtcgacgcacatgcgtcaatccactttattcttttttagtacaagaatagggttagctaaccactcaggatgtaacacctctctaatgaatccgaccgcgaccaatcgagccagctcagcacggatggcttctctcttgtcggacgtgaagcgacgtaatttttgtcggatcgacctcgcctgggggtagaccttcaatttgtgctaggccagttctctcgggactcccg

SEQ ID NO: 5890 - DNA, 308 bp, Zea Mays
atcgatgtagacagtcagcgtgtgcggcgaggaagcacgagctacgaacagctcgaggtcgacggtgccatgcagatagcgaaggatgcgcttgccggcggtgagatgtggctcctgaggatcatgcatgtagaggcagacttgtattgcacaagtgatgttcgagtgggtgatggtgagatactgcaaggcaccgaccaagttgtggtacaacgtcgactctggaaccggtgagccatcggaggagagcttggcctgagtgttcaccggggtactgcaaggcttgcacacagtcatgccaacgcgct

SEQ ID NO: 5891 - DNA, 1142 bp, Zea Mays
caggttcaagattttgggtctgcgcatgcaaccgctactgatactgctaattttgtggcggcttcgactgtggttgcgaaaaatgattcgggtggttctgtgtctaagttttttgagtctgatgattctgggaattcggtggtgtggacggaagagtcttcggatgatgatttggattattttgcggcattggatgtggctgcggcggaggcttctccgcgtgtggtgggtgctgaagttcccagtccaagtgttgggtctaggcgtcgaagggcggtggcgaagcgtagagtgagtgaggtggagggtggtcgtcttcgtgtggacaggactggcaagcgggaattgttgtcctcgccagctggggcgagtgtacgtgagggggaattgcgaagtctttttgagggtgaggagatgaggataatgttgtttaactatagggagatgggtattatcccgaaggttgaaccaatgtaaggtgtgatgccctcgctgtacgtatgtaactataatttgtatgaagaggctgtgtgccttcgctgatccggtcgtgcctgtaggggacttgtgcactaggtctagcatgtttattatgtcggtccggcggcacctgtagtcggtcgttgcacgggtagtcctttgagagagacttcgtttttgcgcgcttgttgtgctagtccggctgcacccttaggcgacttttgcacggatagtcttttgagggagacttcgattttgcgcactttgttgtgctagtccggctgcacccttaggcgacttttgcccctcgcggtgacttcgtgtttgtcgaatgccgaagaccgtcgatgcggtcttttttcgacgttgtagttttttgcgggggattttttgcgtgtatattacatggctccgcctcattaaaaacctcaccccccgggaggaaaagagtgcgggccggaataaagttgttttgcgaattacaagggcgagctggccctgaggagtcaaacaaaaaatttgcggagattgtcaatgttccaagaatgctctaagtcttcgccggatggcgttgtgagcctgtacacgctgggggacgccttcgtcttgacgatgaaatggccctcccactttggttctagcttgccccgggcctctgtccg

SEQ ID NO: 5892 - DNA, 637 bp, Zea Mays
cgtgttcgttggatgataatccagtggtacagacctcgtcttccttctcccaccgcagcagggcggcggcgcgcaggcccccacagcggagcatccgccggtggcagccatcttggcatgccaacgccccaatcccaaaacttgatcgaccaacgcgtagagggaacaaaacgtactacttgggagggcttaccagagacagaaacgacgccagggaagctgcccacggcatgcgcgacagcatggcggagctcccttccacttgagaatgccgcagatcccgctaggcaatgacacgggtcagccacgacgatgtgcggcctcgagtaattaggatagaaagtcttggtttaatgagctctaggggagctgatatttatatagccgaagtcccaacagacgtggaatttatggagacatcaaacggacattcggatatcaactgatcggataagctctcatctcccatgcaaacagatgacgatattcatgcgcgtgtacaggtgtttggctgagatccgatccggtgctaaaagctaggcgattctgtggcatgtattggaaagccatatattttctcgttcaaataccttctgttagcttttctctccatgtattgtgcgatggaggttaattt

SEQ ID NO: 5893 - DNA, 628 bp, Zea Mays
cggccttcgggagccggaaaaagaaaaggctgaatagagtttttgacaccatcagatttatgtatcctgactaccgctacccatcgaaagggcaaaagagaaaaagtgcaacttctgggaaaggtgatgcttcagctgctccaagcgagcccgcgccaaagaggaaaaaggtgaaggtccttactcaccgaccgcgcttcattgaactggccacagtgcccgaatttggtggtgagacctcttcggctattaaagccaaaggacctgctcttacacagaagaatgaagagctggctatgatgccgaaggccgataatattgaagagatagaggccgagaaaacaaagatattagaagttataagcccttcggcaggaatgacagtgccgaaggcacaaaaagatctcacagcgactcccaagagaaaaaggatggtcaatgtactagatgtgctggagacaataaagtcttcaagcaccacttcgaggaaaactgtcgaaacgtcaaaaacgcaaattgagacaaaaccgtccgaagccgaagctgcaaagagccagaccgagaccgaagctgggctttcagagcccgtcaaggagaaatccttagaaaccagaaaagagaaaatgaa

SEQ ID NO: 5894 - DNA, 487 bp, Zea Mays
cgcatgagtaagcttctcttttaaaagagcaaaagaatcctcttgtgactgcccccaattaaatgaaacacccttcttggtcaactcatgtaatggggcagcgatggtgctgaaatccttcatgaaacgacgataaaatcctgcaagtccaagaaaactccgtacttgtgtcaccgtcgatggcgttggccaactctgaatggcatgcaccttggcatcatcaacctcaataccctgtgtagtgacaacatagccaagaaacgatacgcgttcggtgcaaaaggtgcatttgttaaggttagcaaataagtgcgcggcgcgcaaagcatcaaaaacagcacgtagatggtcaagatgttcagataaacaagtgctgtagatcaatatatcatcaaaataaaccaccacaaattttccaataaatgggcgcaaaacctcgttcatcaaacgcataaaagtactaggggcattagttaatccaaaaggc

SEQ ID NO: 5895 - DNA, 418 bp, Zea Mays
cacgtcgaccgagccaagaatgaggaggccgatgcattggccaaggcagccgccaggggcgaggccctgccctcggacgtgttctaccacgtcatcggcacgccagccgtccgcagcccagaggggctccaaataaccaatgacagtgagggtcttcgcatagtcaacctcatcatgaccgaggactggcgggcaccaataaccctattcctgcaggggtactatcatccaaccgacaacaacgaggccaagcgcctcaaacgccgaagccaggacttcgcactggtcgaaggccaactttacaagaagggggtcagtcagctgatgcttaagtgcgtcaccgagaccgaaggcgtccaaattctgcacgaagtccacagcgggacttgcggctcccacgcagggcctagggccctag

SEQ ID NO: 5896 - DNA, 595 bp, Zea Mays
aaaaaagcaagagaaataaagattacattgagtatgtatgattttttttttgattgagcccccgtattgctttagtaaatgtgtctcgactgttgtacaatgatgttgattgtccgagcttcgaactcttcatgtgcatcatgttgttgttgtacctagtggcgcccttctggctgttgattgtgagacgaagttggagccatgagtggtggtggtgatagctgggcccatgcagcttgtgagtggcttgccgaagcaactgatgttgtggattgttggttgcctacatactcggggatgtatggggaatagcacgaagcagtatgcaggacctgcgttggctgattctgtcgtgcttcggttttagctatttccttttgcttctgaatcgtgacttggcatgtccttgttgtatgcctcttatcttccccacataacaggcaaaacaaccttctgggttgggagctgaatcttcaccgaagcttctacctcctctgcctcttgcagctggtggcctaaaggagctttgctatatccctgatgattgggagctatgctgatgcccttgagtatgatttcccctgtcgttgcttga

SEQ ID NO: 5897 - DNA, 641 bp, Zea Mays
tgaaaacgacgtttgaacgataaatagtgccatatgaggtttggaattcgaattgaggcacgaaacgacatggaattgagccgatacttcacgaataggtttatataggtgaatatgagtgaagtgtgtgcttggtttgaatttaggcgaagaaaaagagatttgggcactcggctcggaaacgatcgctcgaaacggggaatttggtgaaatttaagcctggaatctcggattggcgtgaaatttggcaagagtgttactggaagtgttgtgaaggtgcctgaaaaatttgggttcaattggagcatttttggctggtttgggcatttcaccgagcacgtggcgtgcgaggaattagggtttcggtgaaacggctatttgaggtgggaaaaccctcccgaaggagctaagaacctgcatggatactcaatacacacagagacacacataccacaacagggattcacaagatttcacaggatttggagttttgcacaaaagggagaaatgagagcctctgctcaccagaatagagagagaggagaactgagggagagatggtctgctcaccgaggagggaaggagagggacacgaggtcgccggagcccagtcggagacggtggccgccggtggagggaga

SEQ ID NO: 5898 - DNA, 518 bp, Zea Mays
ggaagctagaaccaagggtaattgggctggaactacctcaggcgacgctggccacagaagagctgtccacggtggcgcggagaaccgatttgggggaaaacagaattactcgggctatggtggattaatggccgaggttagagttgcactgggctcgttatgaggagatgaagaagggaggtgctcaatttatagaggttggccacggttactccgaatttgggagggatttggaggacgacggtgacaagacattgcactggcgagcacggcgtggcacttgacggtctacaaacatggggagcgtaattctgagcatgacatggttacgactacgtggtaaaggaccacggcgtggcgcagtcgagttcaccggcgacctctaacaaccacggccgttcgaccacgtcgcccagctcccagcggtccgataagctactgtccgcgacccaatccatctccccgccagatcttttactcccccgcggttatccactttgcgccgagcacgaattgtg

SEQ ID NO: 5899 - DNA, 1534 bp, Zea Mays
accattccacaagagctgtcaagaatgccaaccgacaaacaacccagcttcagctcagcagtaatgttttcacgtgccttcggcttcgcatggtcagcaatacggtatgccagttgagctgagggcttcttgacatctggtctggccaggaaagtacagccctataacacagaatatttttatcattatattcagtcagtgcggtgaggtgaaataatatttactagaaattgtctaagcatcatggcctacctgattttcaactttccagatgctccagcagcaaggaccttttgagctagaagacatggagataggatcctctgacatattcgcttggctcactagactcagtttagggcagcaaatggaatccttgcttggcatttcatctgtttttgttacgatacatccaagagaagcgtaaccgggaggtggcactggataccagaagaatatttcctcaaggccttttctgtcaatttgtgtcactttagtaaactgtacaggcttctcagaaacaactgtgtcacacttgaaaagaatgccaagagtgggtggttcaaacctgaaatatgcaaagggccaagtaaaaacatatcacaaagaacagtatttagcatttgtatgtgtacataatgaaattgttacccttcagttatacagtcaccaaccgaagcaaaaccaaaacgaggtaacggtctccatatagaaaatggcttcttggtatcgtttcctttatcccaccatatcctttcaaaatggggagtagacatacaatagttacttggtcttgacaaagtgcgaagtacatcccatccagaaagactcttgcggtgatttaattgatcagaagattggtcattctggatagatgaatctgcacttagatctttaacaatatagcaatttggattccggaggagaacatggtgcaaattaagagcttctgttttagtgggttgctctatagaattatgtgcacagaatgaagcaatcacattgtccacacgccagatgctaaattcagagattattctgtgaacaaaattaaaacaagaacaaccattcacatggtgttggtatttcattgtaaacttcatgcataaaaaagaaccactgtacaaaatggtatatcagacaaataaaagtaaatgatatcatacccagcagcaggtgagagagtgtgtatacaatctgaaaatgtcgcagaagtcgcaagatcagaacgaaggcaatacactacatggtttgaaggtggtaaccttccaatatttaccacacatcctagagctaaatatccaggtggtggtacaggaatccagatagaacattcgttttcttcagttgattgacaggaatcaatgagatccagagaaccaggtaatacatgaattagcctaaatccaagaggttttcgtacacgaccataagtattacttatagcaaccacaacctgagaaggtggcacagacctgagaaggtgcaagacatcagctcctgctgaagcaatataaaaaggtccaaatattca

SEQ ID NO: 5900 - DNA, 879 bp, Zea Mays
ggaatgcatggtcatgaactgaactgaattgacttgcgcttatctttttttttatcgtttacgtattttatgtatatgtgttgtttcattttgcaggaacatcagacatgaagaacgtagaccgacctccttctaatccaaaacggattataatccagtctactcaagagtgcttcaacgttgacataccccatatgttccggcggagactgttagacccgaaacaaggcaggctgctgatgagaatgatgactttatgccattatccaagaagcgtaacttggacgacagtcctgggaaagttttgaagaaggtagtcacaaagcggaggaaagtagtgcccccccgacaggttagagatttatggtctatggcaatacatcattttatgcgtgaaatcatgttgtgttgatgtttgagttaaacattgagttacgattatgcagatgtaaatgtttacgatattcattgtatacttttttttcagcagaggcttaacgtcatatgcaacccccaagatgtattagtaagcatccagatattaaatgacagacagcgccaagcaattgcacggaggggattttccagtattcttgatatgagactggacgcactcggcagcagatcacatttagcttggctgatggaaaagctcgaccacaatgacatgacaattcgagccggcccagggaaggagctgaaaattacaaaggatacggtgcacctaattttggggttaccgaatgctggtggaggaactgcattgggcatcgatgaagctgttgctgccaacaatttaagagctgaacttggtctatcgaaagaagattttggggttacagctcttcaagatcgtctgaggaaatggtctgacgatga

SEQ ID NO: 5901 - DNA, 573 bp, Zea Mays
ttgcgctgaaacttgagcattgagaacaggttggtcaaacagattgacgatggctgcactctgtcggtgatgtcgcccgctacggcagccagcgactgacatggctcactgtgctgatcattcgcagggggaggctctggtctggtggctcgaaggagaggttggtagcaccatagcggcactgatacatgacggcagtagtggggaagcatgtagaaaggaattgttagagtggacacactaactagatgaacccaaaagcttaagcctttggcatgaaattcacttgtacacttcgattggaatcaccaggagggggaggactgcacagtgtggatataggactagggtgcatgctgttggagacggaggcggtggcagtccgcagcattggcactgtgggccgaggttgaggagcccctcaatgtccagcgctgccaggaggccattatggcctgcctgcagcacaagatggctaatgtcaaaatgaagctctgccaaatcctccgctttgtctacgagaagatggtgcttgacggtgcttggcaccaccgagatctagtagttccctct

SEQ ID NO: 5902 - DNA, 532 bp, Zea Mays
caggcccatagtacaggacctggctgagcggctacacgggctccggacgaccctatggaacggggtcccgttctccagagcgggcccccagggtgtcggacctccctactttcgtatcaggggccctaaactgcaagcctggctgttcaattcgaatgtcgtcgtgtcagacagatggaaacgtacgggtgggttagctaaaaagtattatctgaaaaactatgaggtaggaccatggagcagcaagatggaactatcacaagagcgcagctgaggggggtagtttctctttataacttgccgtgcatgtgtgcagaccaatagtccgggttcatgggggcagaccccaccagtttgtcgtacatgtatgcgttatctagtcacaagaaagggaaacagactcgacccctttgtcttgctctatggatagaacttacagagatacttggcatcggggtaaggtgctcctccagtcgtagccagatggttccccttgggtcggtgcactcccgttactttgaagggtccttcc

SEQ ID NO: 5903 - DNA, 468 bp, Zea Mays
tgcactctgcagttctgacatctgataacagtgctacatagatgtagacacatgcctggtataagatgtccagcaattgcagttatttttttgtttactcttgtatgagatgtatatacatgcatgtaacaagtaagcaccacctctttaggtaaacagtaaactatactaaggttaggacccctttcccatatgctccttagtaggcgctgtcgttatcctgctacagggctgtctgatgagcaatgatcacttatgtccctagatacgcacaatggatcacagatataatctgcatgcatattttttacctgataatagctcatcttattgtggtgttgatactttttagccatggtatgttgtgcattatttctgggttcttgttaaaattaacacaaatatgattatataacctaactgttagattatgtgtatgtgtttactgctgtaatgggccttggccca

SEQ ID NO: 5904 - DNA, 592 bp, Zea Mays
gcagtatccaccataacattaaaaaccgcacaaaagttcttctggcaaaacattgtttgtcgctttggagtcccgtccgaactcacagtcgacaatggcaaacaattcgacagccaagacttcagggatttctgtttttccatcggcaccaagcccgtcttcgcctcagtataccacccatagtccaacggcgtcgtcgagcatgctaatggcaagatttttaccgctatcaagaaaagacttctcgacgataaaaagggcaaatgggccgaccaactacccgaagtggtatgggccctgaactctacagaatgtcgggcgaccaggttcaccccctttaacctattgtatgaatccgaagccatgacgccgcaggaaataaagcatggatcgcccaggacaagcacatcagcagtccccgatgtcgatgaaccaacttccaaagatctcattgacggcgaccgcatcctcgccctgcagactctcgatagatatcaggcccaaacaaaggcctagcgcgacaacgctgtcgtcccaaaggaattcaacaaaggatacctcatacttgtctggaccacccggacagagtcac

SEQ ID NO: 5905 - DNA, 594 bp, Zea Mays
ggccggtggagttggctcgagagcaacccaatcggcgtcgtcgtgctcctcctccataaagatggtctgtcccatctgatctggacctgcaggctcaaagacaggggatggacaaggtgcagtctcatcgaatgtaacctcacaagtctccataatgcggttagtctctaggttaagaacacgataaacatgagaatgtaatgcataacccagaaaaaccccatcagaagaccgggactcaaacttgtctagattaccctgttttagcacaaagcatctgcaaccaaataccctgaaatgactgaccttgggtggccgtccaaatcgcagctcataagaagttttgttcagaaaagcccgaagaaagatgcaattggacacatggcaagcagtgttgatcgcttcggcccaaaaacgcataggagtcctatgctcatcaagcatcgtcctggccatctcaacaagggtccaatttttgcgttcaacaataccattctgctggggcacatacggagaggaaaactgatgctcgagtcccaaagaagcacaaaaggttgcaaattgagtatttttgaattctgtgccattgccact

SEQ ID NO: 5906 - DNA, 311 bp, Zea Mays
tgaactccgacaagtcgacgagcacagacaaggcgtagtagtgcacacaaagacctcaactgcgcaaagaaacatgcttgaaatttcaagtccaggtcctaattagtggatgccaacatcagtctgcttgattcatcaccgtcgacctccttcaccactagctttaactcaaacacgcaactgctttgctagactttgaatgcagtgcaggtgtcacgttaccgtgttgcatctcctgttacttatgcaccatgtggtttgaactttgaactctacagcagtggatacaccgaatcactctcactccaccg

SEQ ID NO: 5907 - DNA, 656 bp, Zea Mays
ctgggacattggtggtggcgcctctcccagaagctggtacaaccttggatattcagagacctgtcagtgttcgcccgagacgcccttgccgagccaatcaacttgattctcctgctgatgagcagaaaaagaaaaagagacgtcttcggcgagtatctagtttggatcgggacgttggtccttcggttcctctgctgctgaggaagtgcttgtgcctgagtttactgacgctgaccccaatgggtgtgctccatctgctgctgatcccaatgggggtgttgtttgtgttgctgatgaaaacgatggggaggaagaagatgaggtccctttgactcggaagaacagtcggcagtatgtcgccagtggggaaagtagtggagttccttctcctgctctgtctgccctcattggtctacaagaattgtccctggcgaactttgatcagactcttgaagatatggttctagaggatctgttatcagagccagcggatcatggtgcgacggatgtttgtgctgatgtgctcgaagctgggttggggtcatcccgggcagcgtcccgcgcctcatcgaccttagagcgcagtcttgagggtcaggaaactgacttggatcgtcttgttcccattgaagtaactgagggaccctcagccttag

SEQ ID NO: 5908 - DNA, 657 bp, Zea Mays
ctgatccattggtcgcattaactatgtcaagcaccgagccacagagggagagtcgatccacctcccactaatgacctacgggtccctaggcctgcggcccactcatgacctatcgagcctaggcctgagtgcattggttgcctacaagacccgcaacacgatgggctatgctaagacctaggctacgacggtcaagggccgatgccgcacaaagatggcaatgatggtgccagggctattcgttgcccacgccgctctccataaagagtgcaaccatggaagcccaaacgtccaaggcacatacggacaaacacaactttaccaaggtagaacaccccgttttaccacagcgcattatctccttccttgagaagctaccgatagttgacccccaccttagcctataaaaaggaggtggccggccagaacacagaggatggagaggacggacatacatacatgcacctggacgacaagaccagaagacttgaaggttgccaaggagcgagccaccatgatgtccaaggcttagtagagagcaccagtcccgtagtctttaggtctagccacacataagactcgggagctcctccctctctcgtccgcttgtaacccctactacgagcattgggcaacaaggtgttccacttaccgcat

SEQ ID NO: 5909 - DNA, 649 bp, Zea Mays
acacggcagaggcgctgattgggcgctgcagcattcggagtggctacaacggggcaacgggagctctgattcaggtatctatggcgcacaatgagcagtgcgagggagaggtcaccgacttaggtgggcaagggagggagaagagaacctgtgagaaacgagccgctcgggagtcgttaggttcgattgattttgcggagccatcagatgcagtatcttcaaggaatattcttaaattcgagtgactctattctacttagaatcgaaccaaacaagctcaatactggaatagaatggttgtcctggtatacttttgaaccaaacactacctaactaactctacctctctcaaccctttaagcacacattcactcaatctagctggtcatccaccccacaagtccatcgccatccacccaccccctacaatttagtcggctccttgccctcacggatcgccactcgactcatccaatggtccgcaacttcacttgatgcctcgaccgctcggccttcatcccttcacccataacgtcgaatggggatggagatcaattgaaaacctgatatccgaatggggatgagtatggttgaatcttataaccataataggtatagggatgggtatagcttcatatgaatatggata

SEQ ID NO: 5910 - DNA, 465 bp, Zea Mays
catcgacggatggggatggaacgatcccgtcttcggctagatcggggcggccaacgagatttgctatcttcgatgtctgggacgtgtattggggagggggatcttcggaatctttttgagggcgaggagttgaatatgatgttgtttaattttcgtgaggcaggccttattccgaaggctgagccgatgtaacatgtttgctgccctcgctctcgtgttgcggtagtaagtgaaaacgctggcctcccccagcttgcaatagagagggagggcaacaagatgcgatttttattatttgtgcaatgtggccgatgacccttcgttgtgtgtatgtaaactatgatgacattgcttgttgtgaagttgtcccgatttgtaattgtggtggtgtggcacgtgaaatgggatggggacctctctttccacggcgatgttggacgcttatgacgcgtacctggttgcgtc

SEQ ID NO: 5911 - DNA, 1470 bp, Zea Mays
gcgcactctatctcttgtcgaactgaacctcctcagaagattgaaagctaaatccttgggactagcactcgttaagaaatcacgaatcagacaaaggtcccgcttgactgtcgtccgccttgggacgccaactcaagatttttccatctccgggcatgctctagggcaaggaagaacttcatccaagccttgcaaactgagactggcttggtcatcacacaggaaggaaaggagaaggtcatcactgaccacttcaagcagcatttgggcacaacggcccctagagcaaggacgttcgactggaattcgctaggctaccaccacattgatctttcctccctggaagctcctttctcccagaaagaaatcaaagagactatcctctcaatgcctcgcgacaaggcgccaggcccggacgggttcacaggtaccttctacagggcgtgctgggacatcattaaggacgatttaacagcagcgtttaattagctccacaacttaaatgggcaaggcttcaaactactgaatgcaggcaatattgttctcatccccaaaaaaggatgctttgcgggtgagcgacttccgccccatcagcctcatacacagtgttgccaaaattttctcaaaattattggccaacaggcttgcaccccacctagacggtcttgtctcaaagtgtcaaagtgccttcattcaaaagagatgcatccaggataacttcttatacgtgcaaaatattgtcaggcaattccaaaagaccaaaacaccgacattattcctaaagttggacatccagaaagcgttcgacacgataaattggagctaccttttagaatatctacaagctcgcggatttggacaccgttggcgtgaatggattaccatcctttttagcacggcgagttctagggccctgataaatggtgttcaaggagaaagcttcgaccacatgcgtggggtgagacaaggagaccccctctctcccatgttgttcatccttgcctttgacccactgcaaaggattttagaccttgcttcagagcatggcgtcctgacacctctccctcttgctgcagctaagctcagaacctcactctatgctgacgacgcggctatcttcatcaatccaacccgtaatgacctgcaagcggtcaaacagatcctcaatgcgttcggagctgccacgggtctaacaacaaattttgagaaaagctccatccaccccatccgttgtgaaaatgtggatttgtccaacatcctccagccgttcccgggatgctgcaaaaccttcccttgccaatacctcggccttcaactccacacccgcccactccaaaaaattcatgtccaaccactagtggagaagatcggacaacgacttgccggatggaaaggtccactgcttaaccgcgcaggacgcctcaccctagtatcttcagtgctctcctccatgccgatctaccacctaac

SEQ ID NO: 5912 - DNA, 362 bp, Zea Mays
gcggggaaacgagtgccaggggcactcggctgattggtaggagcgggggcagtattggcacgaatgaaaatgagctgcttgaatggattggagggtgggcgaggcgaagaatgattctgattaaaaggtcggatcaccaacctggttcgcttctcaggtccctaattagacctgtcacctccaaatccctttgattttccatggcccgtattcttggcttctactgctagtgtcgtgctgacagctctgctgtaagtaaggtccagactggttgccattttcctctgaagcctgtcgttgagtcccctcataaaacaattctttttcttcagatctgtatttacttggtcgatggcatactg

SEQ ID NO: 5913 - DNA, 510 bp, Zea Mays
gttcaagtaaataattgttcatggtatatgttcaaatactatatggcatttgtttagaaaaattaaacgatgggaacaagagagtattgagtatgtgtatacgtgcaacaatactgatgtatacgagacacggagagagtatgaggctgtctatctgagtcatctccgagccgttcgacacgtctgtgggcatctaccagagattccctactagggatacggagccacccccattccatcctcatctgctcgctccgtctcccggttcatgccatcccatacggccactaactcctacattccacagtccacagatgcgtttccgtagcaattccttgcctggtgggaaactcagggcagatttgaagactgtcggcaaagatccagcgaggaggtggcgtatccatcccaaaatcgcaacatctggactaagggaaggagctgattaagcacgtatcaccctcgtcgtcctcgccgccaatgcctccgcggccgaggcgccactcgtcg

SEQ ID NO: 5914 - DNA, 278 bp, Zea Mays
tgttagccgaggattcttctgatgccgctcctgctgggacatcggtggtggcgcctctcccggaagctggtaaaaccttggatattcagaggcctgtcagtgttcgcccgaagcgcccttgccgagccaatcaacttgattctcctgctgatgagcagaaaaagaaaaagagacgtcttcggcgagtatttagcttggatcgggatgctggtccttcggttcctgttgttgaggaagtgcccgtgcctgagtttaccgacgttgaccccaatgggtgt

SEQ ID NO: 5915 - DNA, 475 bp, Zea Mays
cagtcgcgttcggcccgggtgccatgcgctagcgtgctttgagagagatgcagggtcaacggcgtcgactcttggccgtgcggtcgctcggtgttcgcggtgtgcctgggatgttcaccatcgtgtgcgcgcgggagctcggtgttgtcgaacttggggggcaaattggagggccgtcgatggctgaccgaatcatgctctcattccacaaccgcgccgcatcacaccctggctggagtcggcatcgcgaaattgttggtaatgccgccaccatggtccgtcatctccgcctccactcggtatccatggtggggtctgggagaatcgccggagcgcgtggattgtgatcgggcatgtgcttggccgcggtggccttcggagtccagtgaatcgctcgccggagtaccagcatcgccacggtgccgccgtataccgcgggcagggctaatctccatgccaaagacctgtaagtcat

SEQ ID NO: 5916 - DNA, 1499 bp, Zea Mays
tcggcattgttcccttggtacggacatggtttagtgatggtttgttttattgtgctgacgttgctcagtggtattgggttagcctcgcctttcccatatgggtctgcttgccagagagttggtcggcaactccgcctcgtcgtgttgctcggcaactccgtcttgtcgatttgctcgtcaggcaggttggtcggcaactttgtcttgttgtttcgctcggggggtgagctggtcggttagtgagccgtctttaggaggctttcatcgagcacccggttactaggtacccgacaccatcattttgatgaacacagtctagttgtagggtgtgtactagctagtagctagctagctgccgggccatggattgcattttgatgaatgcacaagaaggacagccggaccggcgtcgtcgtcgttgtcctgacactgccatatatggcagtcaacaggtacatatatactgcactgcactgcaggatatgatgcatgttcctctgttccgtattactaccttttttatttttttttgtgggcagcaaatgaatggccacaattgcatatgcatgcatgacaacgcattatagctcacgtgttgtagctcgcaacactttataacatagccgcagtatatatacgtacatgcatgcattgttgctaggctggaatggatggaggggagctgagctacacacgaatttgcatgtgcatgtgcatgcattcaaagccatgcatgcacgtatattaattaaatttgtaaggattgcatgcattttccactgcccgcgtacgtgggcgccgccggccatgcacgcaccaaagcatcgcagttgcagtagtgcaatgaaatgaaacgacgacgtgcatgggtaggggtggtcgttttaaggcagcaaccaccatccacgacgtacgcgggagcaggataacttcgcttctcctttcttcttctttctcccggcccgtcagccggcggccatgcacaggataacttctcactcacttgcaggcttgcagctagcattcctcctccttctttctcccgtcaggcagccagccagccagcatatggaagatcgatgcatgacgagcagtgcgtaggactagctagctactagccaaattataacaataccatggacgacagcagtcttctctactgtgacgaagaccctctcgtcgtctctactacgccgcctccgcagctggcgtcaaatagctatacgctactagcaccccagcagcaggcggcgtcagatgatgcggaggaggaagatcatcatctgaaggagcttctcgtggaccacatggccaagcagcggtcctatgcgccgacctgccgagaaggctacctggagcatctgctgccgaggaggacgacaacgcagccggaagagacgatcaccatccctggccctggcagtgtgtccgccgctcgctccggaggagtgcactacatcatctatgtaagcatcactacactacgtactatactatct

SEQ ID NO: 5917 - DNA, 354 bp, Zea Mays
ggcgaacctaagggaaaccactcgagtggatccctcacctagcccgagactggtccaccataattgaccgaccacatctactacgcctgtcacggagccacgacaaaggcgtcgtttcgccttccacttgtgacccgcgcactcatgacctatcgggactaggcctgaatgcgcagaccgctcgtacgacacaacaagacaagccatgccgagccctaagctacggaggccaggggtcgacgtagctcgtatgatgacgctcgggtcgcacgctgcccgcgccgttcgctgtaaataatacgagaaaaaccagtcgacctcgggacccacgagcatgcatggcttcaccctgcg

SEQ ID NO: 5918 - DNA, 795 bp, Zea Mays
caaaatccgacggctcacattcaccccccttcaggaaaccaacgcatggcggcaccgcccgcctacacggcggcgaccatggccggagatggcccgttctaaatcccgggacgctacctctaacctattacgcgccaaacgatgagtagacaaaagcgagtgcgggtaactagttctcaccggcggtaacgacgtgacgcgcatggaccacggcggaggagcgattccaccctggtttgacctccggcgaggaaatcctcgagtccaagcggtgcgcagttcgaattgggagcacggtcagctaccctggcccccggtgcactacctcgactgcgcatagaggctggtatgctcggcacggatgagttcttcggcggcgggttcatcttctccgcgcgggacgcagcgacacagtgaatggtgtggagaaacggcagcgaggaaataggagctcgagagggcgaggtcgtgggctccaatatttgtaggcgcggtggggtgcgggcggcagcaacaaacttcgaagctcacggcacgacgcgacatgcacggaggaggcgagtggcacgtggagaagacgaaggtgtacacggttaagtgactgccctgtgggtcccagctgacagcgaaacccaaagggagtcggcgatgtgcgcgaccggtagactggcgaatgggcccagtccgcagcgacttgtgtgcgtgatgcgtgtcctgctgacaagacggtcccgtgaatcggtggtggtattagggcaccactggctgacccgtggggccgaggggtcggcgcgc

SEQ ID NO: 5919 - DNA, 674 bp, Zea Mays
acccctgatcagtaacggactcggagcccaagtgtcctgaggcggtttcctgaaccctgttgagggcccaacctttgaacccctgaatagtatgctgcttttttcctttccttctcgaagaaggatgtccgaggtggcggtgccatcttctcgttctctgcaagggaatggaaaagaggagggagagaggggcacaccttttgatgcgtaatgcaaagcggcgctcgcagcctgacgtcaaccgataggaagggcaggaattaaatgcgacgagacacatcggcgcgcaggccgaccgttgcagcacgcgtgcgtgaggaattcgaagtgacccagcccacgcctagttttgactcgaggtggctcagcccaagatttggtgactccatccgtccctatgtattcgcccaagacgtgctcttcgattatttaccttatgtttttgccttcctatgctagccgccttcttcctttgccgcaaaaaagctcttgtgccctcctcttgtcttcttccctagctccggtggcagagaaagtaaatgtccttcctccccgcgacccatggttgatctcctctgccaccgacgatgacctgcaggcattggtggatgctgggctgctctgcccccgctcccacgggtcgtatttggagtggattgcgccaggcgacgagc

SEQ ID NO: 5920 - DNA, 879 bp, Zea Mays
gcgagggtgacggcgaggacgatgacggtgacggcgagggcgagggagacagcaaaggagacggtgacggcaagggtgacggcgacgatggtgacggcggcaatggcgacggcaacgatggtgatggcggcaagggcaacagcgacggtagcaagggcgacgacgacggtggcaagggcaacagcggcgatggcaaggccagtggcataatgctgctggtttagatattagtatagatgatggtagtattagtagtaagtagtactaaacagtagtagattagagtagtatgtagcatagtgtaagtagtagagtagtgtaatgtaatgtaaagaccaaggagtggaagaggctgactcataatgagtcggtttcaagtttgtgacgaactccccttatgaataaaaaatgcagttctttgcttatccatcattgtgtgcttttgcctgtgcattagcggctcactggcattttagaggtaatgctcgagtgatgattgtgatctccgctttttcaagttatgatctggcattttttgctcccgacttatcgagccaactcatatttatgctgacatatccccttgagttctggaccctaactcttgctttttcctccgtcgcttctctggtttctaagttcctgagcctgtcaacttcgcttgagagactgcaatggcccccaagaggaagagacacagtgctgctgctccaatcattccgcccatcgatcctaatagccagcttctatttgccggtaaccatatgtctgttgttttttgagtctgatctcttgcaccttgtcaaaactgttgttctgtcgccgaaggagctgtgttcctggcgaatctggcgcggggttaccgttctgacagaggac

SEQ ID NO: 5921 - DNA, 469 bp, Zea Mays
gaggctttggttcttacttccctggcagaccatgatttccatcttgtggtgatcgttatcccccataagactgaggatgtttgatatttttcctaacaacttttcggctgttcgtgaagctctagatggttctctagccttgaccccgtgattggtaaggaatacatcacactcgaggataagtcaagaggtaaggttgtctctcgtggctccgttcgagtgaacgagagttttgtcctcaaggatgttgatttggtttcaaatttgtatttcaatctactttctgtttcgcaacttcttaaggatgactatgaagtgcgctttaagaggggtctttattgtgttttggaggcaaagggagagcttatttgcttgatttctccatttggttgagttttccaagctgattttcccattcggttgttccctctcgatgacttttagcaggatcttcctctttgatttggaa

SEQ ID NO: 5922 - DNA, 629 bp, Zea Mays
agcgtgtatgcgtcgtgggttgttaccaaccacctcactccaatagcgcagggccagctggatggttccctctggtatatgaaccccttgtggcatagtcgccgagccgtatgcgtcgtgggtcgccaggaaacatgtgaacaccccctcgtcgtgtgagaggaagcaccagggaaggaatccgctacgtgcatcaccgcttcaccattaacttggtaggcttggggtggactgagtggagccgcctctacgaggtagcctggggcgtcgttgcttggcgtgtggtagctctgtgcgcggcgtctatgcttcaccgcatgaattgtgccatggcaccgtaacccactgcggctgcaaaccttctcgctctaatcccaagtatgccaatcctacctgcacccgccctcgtggtcacgttgttgcgtagagtggtgtcggccgggttttatcacctggtcaatcttggcgagcgtcgggtagccggtaatggcgtgagtggtgggtacgacggtcggctgggccggtgtcgaggggttgaagacaccatgattgccctggatcgtaggacggatggctagattaggtctggtgcatctgttcggctgggatccgatccgatccgtcaattt

SEQ ID NO: 5923 - DNA, 417 bp, Zea Mays
cggcgaactccggcgaggacacctcgatcaatcgcgcggcaagtggcacggtgaacagtccggtgataaggctccaactcttcctagcattgagatctttcaccgtcagccgttatccgcacacgagggcgcacgaattgcgacgaccggcgtacatcatggtgtaagttcaccggtggcaagatacactgaacctaaagatcttttcgctactgtaccatcaggatcttctttagtcgttctgacagagcatcttcaggggtgtttttcttcgatttctatgtgataagctaacaaccagattacaacaaagttattcacctatataccagctccaattcgaccataggaaccttggtcatttgctcacttgatcaagctcaaatcggctccaaagttcatcagagttcactgcca

SEQ ID NO: 5924 - DNA, 649 bp, Zea Mays
cgcgcaggcgaaggcgtgggcggcggagatgcgcgagctggcctacgacatggaggacagcatcgatctcttcacccaccacgtcgaccacgaaccggccgacaccgccaccaccggcgtcaagaggttcttcctccggatcatccggaagcttaagaaactccactaccgccacaggtttgctcaggagatcaaacaactccacgaccttgccaacgaatcgtaccggcgtaggaagaggtacaggattgaggagggcggttcaagcctcccgcacgcggagatcgatcctcggttagaggcgctctacgtggaggtggagaaactcgtgggcatccagggcccaagccaggagatcattggacagctcgtcggcgagaacgcagcggagcggcggagggttgtcgccgttgttggatctggaggttcaggcaagaccacacttgccaaacaggtgtacgagaaaatcaggtgccaattctcttgtgcagcctttgtgtccgtgtcgcaaaagcccaacatgaatagcctcctgtgggagttgttatctcaaatcgggaaccatggtggagatttaggaatgatggcagtaggatattgcagtgacaaacaactgatcgacagactaagatcacatcttgaaaagcag

SEQ ID NO: 5925 - DNA, 495 bp, Zea Mays
aaaattaccttggacatgccctgacgaagtttggaaacaaacctaagccgtttgacatgatcttggcatggattcgcctcgggacgcggcagctagacacacacgacttggtgacgtgacaactctctgcacaagcacgaaaacccctcggcttccacacaaaaacgacaaagcaacgtcgggggaacatatcttacatagtgatcttgtccaaatacgcaaagatatggagcctacgagcgctggaacaggggaagatgcaaaacaccacgtgctcgaccatggctgacgcaccggtgcatgcccgctcgcgcgcccatgtcagtccacgctcgatcatgcaccgcgcccgcacctataaagagcagcatggtatcggtcgtatgccctcgcacgcccacaccccgcccgagtcagagttcaccggagtccgccacgcaagaccgcccacaaccaccgcccgaccacggccaccgcggccagcttgccgtagtc

SEQ ID NO: 5926 - DNA, 300 bp, Zea Mays
ccagggggagcgggggttaaacaaagaagcggagttggaacggttcaccgccttgcattgggggtgctcctgtcccgatccatgacatcaaacaaaggcagggataaagattgaggaacaaggagggcggggacgacaaggagagaggcagcagcaaataaaaagaaaaaggcccccaccaccggcttccatggcaagggttagatgacaaacgccatcgcaaaatcctatatggccatattcccgcgcgcgatctcgcgccaagcgctagcctccacgctggttttgtactacctcccc

SEQ ID NO: 5927 - DNA, 469 bp, Zea Mays
gcttatagggaggataagaggttttgtgcactgaccaaggcaagaacaggcttggatgagtgactactcgcgccagaactcgggcagaagaaacgtacacacgtgtttgaccctggtcggcatgccggcgttcgcccaacccgcgcgtgcgctcgccccagtgcatggtcaagtccaccgcacgccctcctcacgtccacgcctataaaggccagtggccctacacgacctcgcctcagcttcgcacactcgccgcgcttagtcatcgaagcttttggtcgtgaactgagagctcttctccgcccgctaagccgccagagctccggtcaccatggccagctcaccccaaccgctcccagtctatgccagtagttcggttagcttcgccagagacccgtgaagctccttgagccctcagacccagtgtaacctcaccggaggccccgaatcacccttgccggacttcctc

SEQ ID NO: 5928 - DNA, 399 bp, Zea Mays
ccagtgggaggctacatacttggtgcatcgttcggacgatgatctccggggtgtagaggtcttcttagagcattattctatcattaagagggaccctgtcgaggcagccatgcaggatgctgcacggcgtgcgctttcgtagtactgttcattgttcagcggggtagatgatggccttgacctgaaatactaccctcatcattcgaccgatagtgccaaagctgtgattgtctcgcccgttggtgagggcaaaccctgattgagaagcatggtcatcctagtcgccgtgctcaacaccgagctggaccacgcccttgacgagttgggcaaggctcgggcagagattgcagaactgtgtgcagagtgcgcggagcatcgccatcaggaggacggttcccc

SEQ ID NO: 5929 - DNA, 414 bp, Zea Mays
atcaccggaatgcacccttgctctgtaaaacgccgccgtgacccaccctcaccgacgacctgctcttcggctcgtattctgcccaaaccaaagtgtgtgcataactcctggtgaacccgtgaacccttcctcagcctcaattcggtcgtcctcgccgtcgtttgatcggaacgcgttcgcccctgtaaccatccgctcggtcgccgtggactgctcgattcaatgcccccttgatgaaattgatttaggggaagtgtttgatagaagtttaattatgtccctgtcgcacgggagctccagccatggcgtcagccggccggaattggctcgccggggtgcggcgagggctgttcctcgtcgtggaccttagtctgcaaagggatggaaggtggaggtcctctttgtaaaccgtca

SEQ ID NO: 5930 - DNA, 550 bp, Zea Mays
cgaggttcccgtcgccgtggtttcgcgattacgacgctggcacggtcggagttgttggcctgagtgcttctacgcgacctccggtgtgttccctcggcctctgttggcgcgattgaagctctgcgcgccggtgattgctcgctgtcgtccgctcgccgccgtggggacgaactgcaccgtgtgccgtgagcttcgtgccgcaccagacggtaatactcccccctgcgtctcgcttttcatccggcatcgtgtagaagggcattaattggattttggagtattgggggccgggtttcggtgtgctccggcgatggtccgtcgtgtgcccggggcggcgccgccggtcggctgtgcggggattggggggaatacacgtgtgtcgtcagatgggaatcgaacggtcccgattagatcaagcttcgcccttcgtccgaatcgttgtggggcctcggatcatgatccgacgatcgcgggcggtataccagttcataaaggctatgacctaatcagagccatccgatttagatcggaccactacgatcaccgcata

SEQ ID NO: 5931 - DNA, 651 bp, Zea Mays
atgtgtgtgacaaggacgtagctaggctttgtattatgctaactctccacaagcattgcattttgtgcatggtcttgggctcttattggccgttgccgctagaggcgcacgtgggccagggcaaaggtttctttttgatgcgagagtgagagtggtaagaattggaagatgagagaaaaatagaagaggagaagctagcagtagcagctagggcgtatatgcatgtgtagtccgttccatgcaagcactggtccattctggcagcagcactttgggaggtccagtgctggggagcagtgttggaaatcacaagactgagtgacgacacacgcagttgatctatcccccacacggtactgttgcgtgccacccgctgtcagctgggtggtgctgctggccgcgcgcctggcccccacgcgaccattccggccggctggacctccgatcccctcaatggatgtggatggagaagtgggccagcagcaggaggagggggccggccatgcatgcatggtccactgcagtgtcaaaaaaatcccactctctactttgttgagaggagagagagagatgcatgtcatcatggctaatgagaattattagggccttggccatgatggctttgtgaggagaggaactaatccacgcaca

SEQ ID NO: 5932 - DNA, 2823 bp, Zea Mays
tacataccacaacagaacgatatggtggagtgtccaaaccagtcagtgttagcggtagcacacgcactgctgaaacggagggatctgtcggccaaattttaggggggagtcaatcattgcggcagtgtacccgctcactcgcgctccaactaagaatcttgatggcattgacgtcgtatgaggaatggcaagagtggaagccgacaatcgaccttgatatagtgacaaaaaatccacttgtaggtgacaatgttagtgccaaggggacatggcaccaagtcttaggtgtggttggaaaacagggtcgcatactcctttatagcacgacgccagtgcggatcggcgagcgcggtacgaacgaaggagggtcaaggcaagggactcggagtggtggcggtcgtgagcaccaccgatcagcgtggtgcgctcgaaggtgacggggccgcacgtggcatgaatgaaggcgacgaggtcgtgcatggcacgtcgaaggcgatgacccatgcatggcgccatcaaaactgacagggccacattaggcgcagtcaaaggtgacggtgccacgtagggcacgaaggaggtcgccgggaccgatggtaaggagagagggacgtcgacggaatcgacatcgaggagagtcgaggtcaggaggtggggaactaacaagggggaaagtgtcctcatcagaaacaacatgtcgagagatgatgcgatgggtcagacgatcgaggcactagtaccccttatgatcagagttcccgaggaaaatgcagcaagtggagcagggcgcaagtttgtggggagcggtggcggaggtgttagtatagcaggcgcagcaaaagacgcagagtgcgtttaaaaaggtgtggtgctgaagatgacgaaaaaaggagtgagatgactagccgccttacaggggaggcgaatccggaggtaggtggcagtgtcagtgtggagacccccatcctagtaacgagcaggaagggaggcctaaaacaggaggcttccaatgaggttagtgatggcgcaaatcatgctcccggccttgccattctgagaggtgtacggacacgacatccgcaggtgcacaccgcgtgagagagatggcatgagacatgaagttatcgaactcccgcctgttgtcacgctgaacgcccgatggtgcaaccaaattgattcaacacccatgggaagaagtgagatagggtggcaaaggtctctgacttacaggtagtgagagaagtcatctaggatgaccagatagtagttgtaaccagaaatgcttggtagcgagaatgttcaaaggtcacagtggacaagatcaaaggggcaagcggttcgagacatggaagagggtaagggtaagccaatgtggtgtccaagctgacaagcatggcatggcgaggcaaggttgtcatgggggcaagagatggtcgaggtgctcgagagtctggagagaacgttgtggttgggggcccaagacaaaggtgccaagtggagccgagacagcgacagcaagggcgtagggtgtggcaacacgggatgagggaggtggggtggggaaacgaataggatacatgggacatgtgttgtcgcatcgagcgaccaccgcatgtgaaaagatcccgtgtggtgagcccctagagatcgaacgccatagaacagtggttgttagtggtgaagcgacgaaccaagagaaggttgtgtacgatgtcgggggaaacaagtatgttgttgaggtacaatagaccacgtatgactgtattacctactgaggtgacaggcagagttgacccattaccgaaaatgacggatgaagggaaggtggtgttgtggggatgagataaagagatagtatcgaggtcaagaatggtgtggtacgaggcgccagagtcagcaacccagtcggtgggagtagcagtagtgggttgcaaagacacatgatacgaggagagtcaggggaggcacacccaaagagttgctcagatgcccactagtggcgagcagactaatggcgagcatggttgacgatgaaggagagcgaatggtggcaaacctctcacagagaactgggttcatgaccactatcgcagccttgtcaggcgttggcgaaggcgggaggaggtcggccgcgggcatggcagccaagcacgcgggtgggaggtggccacagggccgagcgttggggaggttagggcatgggcaagtcgggctcgcgactgcatcttggatgggggtagacgaggggaggaggggcacgaccgagggtggagcggcggctagtgcgggatgaggggttgcaaccacaaccatggaagcccaggtgtggtgtagggagggagaagggggtggggttgtcgaccattgccggcattggggggagaagtcagcggatggccctggcggctatgggaaggggaggagggaggagagagtggcagtaaccatgttggatagaatagaaacccctaaccctatttagagtagggttgttgtattaatagatagaaagctatataaattgggcctaagctcattacacctatgacacacacatatgtctaacaggaattgtgcccagcaattaataagtgtgcaatttaatggcataccctcagtgtttgtgaagcagcatctattatttcaacagattcatcagataaataagtcttcaagagtttcaaaagcccaaccagaacatcatcagaaataccatagtttgtggataatttatcctccttggaagcagaaccagtatgtagttgtaaagaataattttcggtggtagttggcagacggaatattacttgatgtgcatcagat

SEQ ID NO: 5933 - DNA, 441 bp, Zea Mays
atcgtcgtgggctatacccggaccagtgggaggctacttgcttggtgcgccgtccggacgatgatctccggggtgcagaagccttcttagagcactattctattactgagagggatactgccgaggcagccatgcaagatgcagcacgatgggcactttctcagtattgctcattgtttagcggggtagttgatggccttgacctgaagtactaccctcaccgttcgactggcagtgctagaggtgtgattgcctcgccagttggtgagggcaatcccaggttgaacagtatggtcaacttggctgtcgtcctcaacacagagttggaccacgccctcgacgagttgggcaaggttcgagcggaggttgcagaattgcatgctgagtgcgcagcatgccactatctggatggtggttctcctgcccctgtcgggattcagc

SEQ ID NO: 5934 - DNA, 878 bp, Zea Mays
cgacggggtccgatgggcgtcgcgatgaattccggcggaaacaggaagtcacgttggagctatacggccgtaagggactacaagttcaccatgcactacccaatttgggacgaggaagggaagacactacgaattttggcttctactgatcacaccggaagatagtgaagacctcactgtggttgatggcacaatttaaagggatggcgacctagctagctacccgcggtcacaaggcacgacgttagtgcatggcgaccacgtaacaaagaagtacagtgtggtagaacttaggcacgagtgacaccgcgacggaagtgcccgagcccgttctgatcttctgtcccggatccgctcgcctcggtgaataaataaagtcgtcaccgcgacacccccaaacccaaagctaatcagacagtgaaccaccattgccgcagttcccgccgccgctgaagcacgcgaccgccgacgtcgggctaccccaagccattcagggagcttcgcctcaacaccctgtcgatgtccgtggtctcaccacacaagtttcgtggccgggttggtgtgaatttgtcgttggaggaagagctccgctgtccacccgctctccgccgtggccaacactacctaggcaataattgttgatgagaatgccaccatcaagctcgcctatccctcctctttataaatctctggattagctgtgatgtagggcgcctagtcgtgggattgtcgaaccccggtgatgcctccgccgtgactggtgtcgcgccgtcggccggatgggcggaagaatgggtgaggggaggaagactgggtcctaaccattggatccagctagaacggtcgagattagattcaagaaaacgtttcggctaggg

SEQ ID NO: 5935 - DNA, 286 bp, Zea Mays
ttaacacacaagtcacctaaatagcacatttttggggtctatcgtggaggcatttacacatggcgtaaaactccataagactacatttgctactgacaccaacaatacctaccgacctattattcaccatacgaacgcagttacaccgcctactagtttctaacataatcctcatatagctcgtaattcaaactactcactaacaataaatcacgcacggcaactaccacatcgaccgtttaatttatttggacaccacctgtctagtgtaccactagtatcccgc

SEQ ID NO: 5936 - DNA, 581 bp, Zea Mays
gattgggcgaaccttaccccggcggtgagcaattcctcgccgtggtactcctccgccgcggcagccgcagtatcacgtggtccgtcttcgccatagctccagcccctcggtatgaccttcgaccacctttaccgcatttgtaggatcgtgatgcacctgtccgtggtgaggatcgtgagttatggagtcggattgcctctctccggcgtgaggacgccgtgaagtcaggcggtggcgccgtcgctagctgaggattgggggaaaacaccctggtcgtccaatcctcgttgaacggtatagattaaatcgacgataacctttcggccctttaaatctggtccgtagaaatgtgatcgaagggctacggttgtttcaaattcagtccgttgatgatagatccaagcgcctataatgtttcacggttcgtcgtagtcggcttctaatctgggccgtctggtctctatcctgcggctgtgggttgttggtaccccttcgcgggtactttttgctaaagagccccctaggaaatcactaatcaacccgcagttcttccctggctagtctgtgtcttaggatttgtt

SEQ ID NO: 5937 - DNA, 421 bp, Zea Mays
gctatggtttatccgtcgtcgccgccatgcatgcctcgccgcagtgcaggtcccctctggcgcctcctgatggtggcggcggagaggaggaacggtggtggtgccctgagtggaggaggcagcgatgccgatgcggccatggcttggctgcagccatcagtaatgcagcggagaaaatctagagagggtaggggaagccgtggatgtggcaggggggctgcctcggcggccatcgcggggaggaggcatgtgcgcacggtgaaggcattggtaggcattgcgagggaagaggcagacgagggtgtgggtgatgtccccgatggaaggcgattgtgggcttactttgaaggcgcgggcgcgacgatggcgatgagaatggcaggagacatgggctcgacggtcgcgacgggagggggtctcg

SEQ ID NO: 5938 - DNA, 935 bp, Zea Mays
ttcagacatgaactgtaatgctgtattgcttcagacatgaactgtagtgttgtatgcatgtcaagtgtttgacaaaatgactatataaaatatatgaaccagggtcaacgcattcagccacccgttagttcaagttttgttacgttgatttgactatctccaaaagtacattagtttaattcttatcattttaaccttttctatttttataacatattttgataaatctaaatataaagattttctttacggttcatgcttcctctgaatctttagaattgtatgcaaaggtatttgatcaaggcaattttttcatctatatttctgaactggatgtacgtcacttgcatggtaccaagtactatatatataaaacctaatgtgattttttgttaagccctcaaattattcatgtgagctcgcttataatagcagatctaatgaactaaaattttgcatgaagtcatgttgaccttttggtgctctgtcacccttgccaccatgtcctctgaatctcgcccacacaatgtaagaactaattctactatgaaggaactataaccttaatacaattttacagttttatcaacctaaaacgttgaaagttcgcgaacatcaaaaaatgaagtctgttggtgtacaaactgaattgaatgggtggatgaaaaaaagaagaaggtccatttgcttccttttgttatcattgatagcttccaagattcagcaatgatgctatcctttcttggtaacatatgaagccacacgtgtttactttatagcattttttgtgttttttttgttatgatatgctaaatttcatttatttggtatgatattattctaacagcctaaaaaggcacaaatgctatatgcagcttaacacctgtgtagcgctcttttaacatcgattttacaggaaagatacatgaatagag

SEQ ID NO: 5939 - DNA, 500 bp, Zea Mays
gatccgtggtgtcagaaggatccaagtgaaaggaaagctagcaccgcgattcgttggtccctatcccatcatcggcagagtaggacccgcagcataccgtcttgaactatcagaatccatgtctgacatccacaatgtgtttcatgtgtcctagctctgcaaatgcctgcaagcaccagaaagtcacatcgaagaagaggcagtacagattcagaaatatcttcagtaccctgagaagctagtaaagattcttgacttagcagtccggaagactcgcaactcagaagtgaaactctgtaaggttcagtggagcagagaaggagaagaggaagctacatgggagagtgaggactccttgaggagggaatacccttatcttttctcaaatccagtctaaatctcgagggcgagattcctttaagtggggtaggtttgtaacatcccaaaatctcaacccaaggtttggaaccctaatctcctaaacccccccttatttctat

SEQ ID NO: 5940 - DNA, 664 bp, Zea Mays
agagatatgactattcaaaggtggtggaggaaagaaggagaggaggaagaagaaaaggaaaagaaaggagaaaggaagggcatgcatgaagcacagttagaagaagcatgtgcatgattgtgtcaatcatgtgtgcgcgtgccatgtcgggccacacaaggatccaaagcgctcccccgcattattaattctggtccagaaggcacaaggatccaagaggaggagcactgcctgcgtccgtctctgacggagcagaagattcttctgcccacccatccatccatccatccacctcctcccctgctgcccattgcatgccagtggagcgagagaaccttggcggcttggccccatgtccggcatcttctctcttttagctaagaacgtggatcaagtgacgatgatgattcaagatccgtcgacttggatggagctaaaagaaacaaggaaagaaataaaggttgcagtaaagaaatgcgtgcgtaggtcgtgcaagtattctatccaagtcaaccgctggcactacacacacagtgagcagtgtcagactgactgactctgactgtgactggttggttctactccattcctcgggcgccgatcccgaggccggctggggcgaaaaacctcctcgctttcagagttccagcagtctgcagtccac

SEQ ID NO: 5941 - DNA, 494 bp, Zea Mays
caaattcttcaccaaactcaacctgcactccggctatcatcaagttcgcatgcgtccagctgacatcaacaagacggtgttccgtacccacgacggcttctacgaatttctagtgatgtcgttcggcctgtgcaatgcaccaacgacgttccagacattaatgaatgatgtgctacgaccgttcctgcgccgtttcgtgctggtattttttgacgacattttgatctacaatgcgtcatggcggaccatcttcgggccgtcctcacggtgcagcagcagcacctcctcttcgccaagcgctccaaatgcgtgttcggtgagcgctccatcgcctatctagggcacgtcatctcagacgctggcgtcgccatggattttgctaaggtgcaggcggtggctgattgacccaaacctcggtccgcgcgggctgtacgggggttcttgggtcttgtaggctactaccgcaagttcgtccacgactacgtcacgattgc

SEQ ID NO: 5942 - DNA, 325 bp, Zea Mays
aaagaaataacaagtggctcagaacttcttagagggtttgtgcaaccaacaccggcgtccgagggatgcctccggcacacggatttctttcctcatcgccatcaaactgctcaaaacgatatagtaatcgacaaacagaaacaaagaaaaaatggagaaaacatgaaggcgaaagaaccatcggacacagagagctagcaacggcggcgatgggaaatctttcgctgtgctctgttttatagacgcacaaccctaacacctggacataaaaccctagatgtcatgggcttgattgctgggtccagcaggagcgccgcggtggaac

SEQ ID NO: 5943 - DNA, 534 bp, Zea Mays
cgagacgccatcgattactggaaaaatcattgggagaaaacaactgcagaacttcggtcttcaaaagaaagatgttatgaaaaatccatgaaatgtgtggaaaaaattaagactagtttcgccagcgtcggcgcatatttgaatgaaggcaacttcatactgggcgatcctgaaggtccaatcgcctggatcaacggcgaagtcgaagcttttgaggaagttttaagtggccatggagatgtatgtgccttctcaggtgtcaggggaattgcggctattttggagaaggcaggctgcgagcatgtgaaggttctggcccaagccgaagccgcgttttctattgaagatacaaaggacccctcggccgaggcaagctttgttggcggaaagtttttcaccgacatctgggaaaatggtggccgaaggatggctcacgaaattataaggaaaagtgaaaaagatacccacgatgctagagaagcagcaaatgcagctgaaaaaactgcagaacttgaaaagcgaataggtattgtc

SEQ ID NO: 5944 - DNA, 355 bp, Zea Mays
gcgatccagtgggtccggacatacggcttggcttcccaggcccaatcctgcaggtcctgttgcatgaatcaaaggatggcagataccagatgatgggtcctatgggtgtgctcctaacacttcaaagccgaagctgtgtgcaggtccaggtcctagtccactagtaggtagtctcaaactgtagagaatacctcctaggggccagaccaccaattttatctttggtatactggtatccagcctcgacacgtcgagcctacctcccaggggggccaagtaccaaggggaagttgatgacgctacacacagcaaggacaaataacatacatataagttccagtttcaactccattaa

SEQ ID NO: 5945 - DNA, 537 bp, Zea Mays
gagagagagacaaggatacaagaatcaatatcctccaggaggaggatatgatggaggatatgaagtgtagtcagggaaaaaagtcctcatcgcgtcctcctcaaaagtggagtcccgaggtggctcatcagccgcagaaaaaacagatgccgaagatgtacgatgatcaggaggaggtggagggtggtggtggtaaccagagccggatggcctagggtcaccaggaatgggtcccggacccgggtaaggaggcggagggtgggaggatgattgacccggatccccatggtagggaggtggggcaaacttctcgcgatcatcaacataggcttcttcttcttcatcgtctgcagacataaaaggaaccccgtaggcctgctggtgccactcattgatctccgggggaggaggatggagaggcacatcaggcgaacgagggacaaaaggcatgcccatggtggaagcttgacgacgaagattgtcgttagtctcccgctgatgccgtgccacctcatggacatcagcataaatgttgcg

SEQ ID NO: 5946 - DNA, 635 bp, Zea Mays
gcctcatcctcctcgtcctcggcaagtatgcactcgccgatcacgtcctgtgtgacgccaccttccctgacgtcgcccactggttccggatggaactccatgttctctcctggctctacggatccatctcgcctgaactcttcgagatcgtcaccatcgccgaacccaccgcgcgcggaacctggctcgccctcgaggagcagttcgtgggcaaccgggagacccgcatcgtcctcgtcgacaccgagttccgcaccctatgccaaggtgctctctccgtctcggactactgcagaaagatgaagaccctcgccgactcgttggtcgaacttggtgagccaatctccgaccggctgctcaccatcaacctcctccgcggcctcaacgacaggttcactcacctccgctcgtacctgaagcgacagcgccccttcccgtcattcgttgaggttcgctccgaactccttctggaagagctctccatgggcgcgtcgacggctccctccgctctcgtcgcctctgcaccggcgtcggctcccatccccgccaccgcgctcgtctcgggtccgcctcctcaagctcctggcaactccggccgccgtcggcggcgtgggaaaacttctggcggctccagc

SEQ ID NO: 5947 - DNA, 762 bp, Zea Mays
aacgagtacgtgagtgggtttaatttggccagggctggccactgtggagcagatcggcgccactacgtggaggtcaccggcgggatgacgggcggtgatcagggccgggagggggtgaacggtgaccgtgtgaaactggtaaagcttctgagatagcttaatttggatctaagtgcctaagaagtgggtggtgaggaactcaccggagatgaggcagtggcggcgatgctatctcgaattgagctgaggggatgggagggggaggtgaggtttgcgagctagaaaggagccttgggtgtcccttttataagcgacctgggagaggagcgatggccgactggactctggcaagcggcggacagtggcagtgaacagggggtggggatggcagaggacagtggtgacatgacgccacagcgatgaagggcggtggtggcgtgcgagttcatgtgtacagcggacggaggacgggtggtgcccagtggtggatccaggattacattaaaggaggggctactaatataaaactaagaaaaattagactaaactaaatgatataattcaaatctttaaaaaagctctaattagttctaaatgatgcgttagaatcatcttttcaccttgatgagaaacctatctatcctaccccataaatgtaaaaaaattatcaactaacctatcaattaattgatgaaataaaattaattaaaattaaaaaacaacctacatagagtgtgagagttgctcgcaacttgccttgtg

SEQ ID NO: 5948 - DNA, 477 bp, Zea Mays
atattccttcgtcaacttacccccgaagctcttgtgaaagtgggggttttatatgggccataaggagtcagggattggagctggatgccagatgcttctgcaacattcatgaattatcttaccagacgaaggtgactggaaaagaacaatatcataataactttggctgttgcagcttcgtgccttgttctgaggcaaattaccctgtgcctacattccggaagaagtggtcaaggacttggatgaagcaatggttttatgtgaagaatgacctggatcagagggaggacgtgagggacgtcattcaacgtcctatatggtcacgcttcggcatcagcaagccatcgattacgagggaatgaagtgcatgcatgccaaatggctttcaacaccatatgcacctacattggcacgagaggtttagttcaagaacacatcgctttcaaagtgtggcctctggcaaatgagtgggaaata

SEQ ID NO: 5949 - DNA, 472 bp, Zea Mays
gtttgggggaaatttgaaattccagagctcaggtgaatgatcggggctaattcttggtgattggatacttaactaccttacggagcttgcggcggggtcaatttatactacgggagggcggcggccgggaatttgatcggtgacgcgcggcggtcagagaaagggaaaatttactggcgcaatggcttggtgtccagcgtcgtggcaattgctccagcgatcaacggggagctagaatgagtcacggtgatgtggtagataagcagagacacgcggcggacaacggcgacggcataacggcggtgagaatccttatccgagggcggtgagcaaggggagaggtatcgcggctagccggagtggcttccagctcaccggcggcgatgatcttttaccccgcgacgttatcgactttccccgagtacgaattgggacgccggcggcacgaatcgtggcaaggagatcgtcggcg

SEQ ID NO: 5950 - DNA, 319 bp, Zea Mays
gtccaatcctcctgctagcgacagtggcctgggtcttagagtgcgaccctctcccgaagaagtcgaggctctggttgcttcacttggtgatctccccaatgatgaaaggcaagttcactttgagatgcctataaacccaagtgatgcagagataagtgctatgctggacatgttggctgaggattcatctgatttcgtccctgctgaaaccatagctattgcaactgtccccgagcctgaaaagaccttgattgctcaaaaatctgatggtgctcgcccaaagcgccttcgcccggccagtcacccaactgctcctgcc

SEQ ID NO: 5951 - DNA, 1248 bp, Zea Mays
cgtgagtgtcccttttatggcacaaaggagaagggagttccatgcatattggacagtgggtcatatccaccagaaatttggctactcctatcatgttgtagacatggagtagcacgcgatgcacgccttaaacatgcacaatgtcaagcatgtcttgctggaagggcagattcaaggggctgcagcctcgcccggccgcagtgtgttaaaggtagagatgtccaaacgggtgggccgtgccggcccggcacgggcccgcctttggcccggcacgtttcggtccggcacgtttcggcccgttaggttgacgggccgtgccgggctgggccaccgtgccacatcctaggcccaagcacggcccgcacatagccgtgccgtgccgggccggcccgcagcccgttaaggcccgccgtgctttgaccgggtgggaagaaaaataagtaaaaaaaaagactaaaaataagctttgctaggatttgaaccttggttagagggtttaaaatgcttagctacaccactctagccaactaaaccaaacttattttatgtctaaactattaaaattgcttctaatatacaaataaatgcactggaaaataaaattaaaaaccgggccgtgctcgggccggcacggcgtgccacggcagcggcccaagcccggtccgactaacgggtcgtgccggcccgggcccgtcaactaccgggccgtgccgtgttcgtgacgggccaaaaccgtgccgtgccacgggccgcccgacgggcatggcccatttggacatctctagttaaaggtaatagtagatcttcagaccaatttaaacgttccactctgtgagccatcatgcatcagtcatgtccacatctaatatgacaatttatttttattgtcgtttatatggggatgtcacataaaatgttatgttaatgactcagtttttagtgaccagtgatttagtttcatctgtaaagacaacaaaagattaaatgtccttatccaacacacgtgcatcatgactgcggcctcgccctagcatgtgtcctaaccctaggcatcccatgtccgatgtccacggtatttgttagtcatcagctgtctgactggtggttgccctccatctcttctatggcacgactacggtcgatgggcacccatgcctaggctctagatcaacaggcgacagtagcgaattggccatgttgcccaccacaaggtaccaactgcttgttgtcagaccaccaacgttaagg

SEQ ID NO: 5952 - DNA, 506 bp, Zea Mays
tcgtcgtgggaagagaagggcggagccacagctagctaacctgggcatcggctcagaatcccctaggacgcgtagagtgctcgtcgccggggtgtcgtcattcccgcagaatcaccgtgcgccatcgcggctcggcgacgggggctagaagatgaatggtggtcgttgatctccctgtgttcggctcagattagtagtccgaaaccgatttggcctggtgcgatctgaaccgttaatctgatatgatgcggctttgatcgatggggtcgtgtgggccgttgatcggtcatccgatggccgttgcggcgtaacccttcgcgatctaatttgggccttcggatcgcgatcggatggctgacaatcaagcgtaccccgtcagccgagactcattttcagaagagccctcgtctttggaggtattcaacccgccgtccattagtgggttagcctgagtctgtgaaatatttcgagttagaccctatagtttctgatagttatgcgcctag

SEQ ID NO: 5953 - DNA, 639 bp, Zea Mays
gcgagatcccactcaggactagccaaaaaacgatctaatttttcaaaggtggggtcaatccggttgttagaccaggtgaacaatctattgctcaaatcaaactctataagcccattttgctcaattatactattaaaaaggaagctccacttgttaactcctccaggtttatttttctcatccgcttttcttataatattaaaatcaccacccacaagcaaaggagcacgacttctcgagcaaaaagacgacagttcactcagaaatctgcatttattttccttctgagcagccccatacacattaataaaattccagatgaaaattttttccctatggtaaatcaaggtacgaatcataaattccccaatctcattttctctcacatcaaaaacatcagcattaaaacccactaacaaaccaccagatctaccaatagggggggcagaaaaccaggcaaaagatttattaccagccagcgaatttaaccagaactcactaaaattacttcttagagtttcttgcaaaccaataaagtccactttctcatctttaatgagttcacgcagaaactgaaccttagagccaatccctaacccctgacaattccaaatgaggcctatcatcaaactgggtcag

SEQ ID NO: 5954 - DNA, 1053 bp, Zea Mays
ccacgtaaattttataagtggtagagtttcaacagttcaacaattatgggttgttcctctctttcgtacgtcatgcccctcatgtgtaacagtctgtcaaggtaatagacgacgacagagaggcaccaaagggtattcgggtgaagaagcaaagcaccagagtatttgggctagattggacccagcaatgggggtacactgttggcgagcgtatgtaactgaggccatgtgggagttggagacttagcttggggaaggagttggcgctggttgtgtctagacggtgacgtcatgtgtgagtgaatcccttctgttcgtcgagaattctagtaaaactctataacttcgtgagagaaggatagtttcaggggcggggctcgctatcatcaccatctatctctcacaattggtattagattcttgttgcgatcctagcggatccatctgagtatactcttcgcccttaaaatcaggcaagggggcaaaacaaatcgacaacatggagaagagtttagccgatctctctcagctgctgcaatctttacaagtccagaatgattccatcaagcaagccattgaggtaaacatagcatctaagccctagaccgaggacgatgtgggtcacctgcatgaaaatgtgggacacctgtcgaacaaagtgaagaggtgatggtctgcgcccaccacacattcatgcatcgaaggtgttcgaaggtgtgctattgaaggatcaagcgacgctggaagtctctacatcgacatcacggcatcagtctgtaccggacctctacgatcaccgccctgctacagcttaccggagtgatggttttggggttgtcaccaccctaacaccatctccggttgcaggtaacaaaacccttttgcatccggattccccttcatctaccttacttcctcatgttgaacccatgtggccatcttattcgcctcatatgatggcagccttacctcaaatgagttttccttagttcgatggtcaccatacgaagatgtggatggcaaagtgcgagtcctactttgatgtgtttgttg

SEQ ID NO: 5955 - DNA, 552 bp, Zea Mays
gccaacactaaggaatctgttcggaagccctttttctgcagtggctgcaactccatctcacatgttactatagaaacagcagtcgtagctgcaacaaacagcttcaaggctaaaaacacgcagcaccgcagtgcccgccaggcaccatcgatgagcatcgtgatgttttggataacatgattgatgctaggagaagccccctcaaaaagtcatttcgccgcttccatagccaccagcacaataagggaattattcccttgcgcatcatagtacccaccatccttggaacaatgaatcatccatactaggggtgtagtgctgcaattaaccaagaattaattaagtcttcatgtcgtcatgtggagttggtgctactacagttctttcgcaattttggatgggggtcttcgttgcatttaactttgtagtagctttgatttagttggtgttctttggtgaggtcgtgtgatgggtcaaagcaatatgctgccttcagttgtaataattggtcgtaacctcgtttgaggccaaggtcagactatgtttccatta

SEQ ID NO: 5956 - DNA, 765 bp, Zea Mays
agctaaagttacttgtcatcccatagtttcatcatgaaaggtatatcttggaactgttaaggggctgagaaaatcgtgaaagtttggtttccttaaagaaatcattaaggacgagaacttagattttattagtctgcaagagactaataaaaagaggttttccagcaattggttggactcgatcagtgggaacaagaccttcttgtgggttcacttgccccccatgggagatctaggggtcttctagtaggctttaatatagatacttttgacatgagggaaacagaaggagagtttatgctgagatgtctggtatatcatgaagaaaacaaaatggaacttcatcaatatttatggggcagctcaaatcagtaggaaagagagtttccttagagagttgtcgacattttgttttaacagtaaattccccatgttaattggtggggacttcaatgtgattagatggtagattgagaaaaacaaactaggaggcgttaatagatggagttttctatttaacgcggttatagcccatcataacttgatggagttggatttggttggtagattgtatacatggtccaataatagagatgaccctacctttgagaaattagatagatttttagctagtccggactgggaacttatgtatgataacactgcggttactagattaaatagaaccttttcagaccacgtccctttgtgtttgagtattggtctgatggccccgttaagaagagatttcatatatgagttatg

SEQ ID NO: 5957 - DNA, 960 bp, Zea Mays
gtgtccgttatgacagcaaggaggatcgaagcccctctcctgagttgccaggtccacaggtttttagcaaagccatccgtaggacgatgttccctccctggtttcaggcctcgactaacatcgccaagtattcaggggagacaaagccagagctctggctcatcgactggactgccaactcggggaaacaaatgatgacaacctaggtggggagagctacgaccccgaccaaagccaatgaattgatggacattgccacaaagtttgcttcgggttaggaggcagtcaaggccttcttccacagggacaagggcagcaggaagcgaaaggaagacatcctcgaggcgtctacccaatgtgacccaaagaagggcaagaagaagaaggcacagtagggtccacacgaggccctcaccatcgagcttgtcgctgcgaccgaaaagcgtaatccttgagcccattaaggggccaggcatctttgacaaaatgttgaaggaatcattcccttaccacaagggcctagtcaaacactccctcggcgaatgcgatatgctccgacgcttttacaacaagcccgacccctcggcagagggaggcaacaagaaggctccaggtgatggagacgacaagggtgatggtttccccgacatacacaattggtacatgatttttgtggggacaccgtcaacctttcttcaagatagcgaaagcaggaacgctggagggttttttggttgagatagcgacaccaatctatatagattggtcagaccgcttcatcaccttcaaccaagatgaccacccagattacatcccaaaccccgagaggtacccgctcatcatcgaccccatcgtcggcaacacacacctcaccaaggtactcatggatggaggcagcatcctcaatatcatctatgctgataccttggagctcatgggggttgggcgatcccaaattca

SEQ ID NO: 5958 - DNA, 597 bp, Zea Mays
tgcttattatttatctcctaaccatatatatgaataagaagtatatatgtgttagagttctaataatcttagctcacaaaccaagctattagaaatgttaaaataggaagctaagtcagagttccggtgagcagggacctgtgaacacaacgatacatgccttctcttcactaatcgcgcgcgtatagattagatcgtacctcgtgtgtgcttagaaaaaaagtacgacaatgttggttcgtgtgtcggccccttgcttattatgtgaaaggtcacaactaataataagttgttgcgcccctcgatcaaacagtgatgcttggtccaagtcaatattctatccaagtcagatgagatgaacctaacattctctcccttgatctcattcttaaacttaatcttttagcttacaatttacattcctccatatatcaatataccaagaccaaggcgttataacaaatattcatacgctattgaacttaatgactacagtaggcctttctatcttaaagcagagaacttatttttgagggagatggttttattgatgagcctttgatccaaaaccaaagtagctccattaaaccatacccg

SEQ ID NO: 5959 - DNA, 452 bp, Zea Mays
gttttgtgaacaccttctcatacacaattgcagatttaagcataatatatgtggagttccatctagttgggacatcagccttaagatatggattgttggttagcttctcttcctttataatttccttaaatttgagcattcttgaaccaccatttctaatgtacttcacagctgccctaacacgcttcactgataggtctacttcttttaggccatcgtgcacaattagattaacgatgtgagctgcacatctcatgtgcaagtacttgccactagctagattagtggtactcaattgcctcctcaaataactaataccggtatcattggcacttgcattatcaacagttattgtcatcactctctccaaaccccattcaaccatgcatcttagcacattttttccaatatcatcacccttgtgtcccttaaccaagaagaaaccaataact

SEQ ID NO: 5960 - DNA, 669 bp, Zea Mays
gtggaaagtgggccaaggcgcaccctgctggggtccccgcgtcggtgctttgccacgggcaccactgccgtaaccaccaccaccaccaccaccgcggccactacggcagcgacggccaccaccgcccccgcctccgccacctcgacccccgccgcccctgctcggctcgggtggatgagggccaagggtagactgtgatggagtaggtggacgggtcggggtgatagccgccagtgctgtcgaggaggacgaggaccccaggccggagatcgatgcagcctgagcacccagagtgatctccagagcaaggtcgtcacgaacctggaggaaggtagggaaggggcgctggcgcatgatcaacgaccggaggtgggtgtagcgatcgctaaggccgcggaggacgttgaggatgagcatgcggccatccacggggcagcctagatcaccaaggaagtccgccatggtcttcatcttgctgcagtactcactgacgctgaggtccccgtggacgaaggtgcggaaggccgcgtcgagtcggagagcccgggcctcggcgttgcccaggaactggccctcgatggctagccaaacagcccgagcgtgaggaaggttccggaggaggctgtggaggtcgacggagatcgtccccacgatctaggtgagcacgat

SEQ ID NO: 5961 - DNA, 1035 bp, Zea Mays
gtagtccattgctaatttaaatgttgcccatcacaactggacaacgttttttcagaggcaaaagaaaagcgagcaaataaggccacaattaaatctaagacctatttgataacagtggcattcagactgttgtaaacaacaagaaagcacagagaggcagaggatgtacctagaattagcaatgccggaagccaagtcatcgccatcaccagttttatcagctgagcctcccgatatcttcctcgcaacctgcctggtggctgaggacccaccttttgatagtggcgttggcgaccttgcacgctatatcgaagtgcataaagtttgtaaggcgacctgagttggtggcaacaacaaatttattgagtgttcgaaagcatgggttaccttatccttgccgtagtttttggtgctctgtggtgtctgagaagagatacctccagttgggacagagtctgctgacgtagacttggatgcagcccgcgcagacgaaattgatgaaggttgggatccactgggtgaaattggaacctgacctccatcaccaatctcggcgacaaccgtgttaacctggaaacacacattgcctaaagcaatggtgctgtctgtgaagcttacgttgaatgtgtacaccttttccatcagcttagttatttcatcaggaataaatccgggtggattatccacgatcaagatgtcaagtggtttcttaacaatgcgttgtgccatacgtccaaatactatgaaatcagtctcgcctgtctcatctcctgctgtgatgagcaacctgtacctgcacataaagtagcagtcacagatgtatgattaaggagtaagaaggcatagatgtaccagaccaagaaacatcacataccttggattaggcggaccaacatggccacaaccagagtccgagcatttataagcatcaccatgagactttgttttcttgaggcactttctacaggactcgtaccaccatagttgatcaatcttaagaacggtaactgttaccaaccactcaactttctaaag

SEQ ID NO: 5962 - DNA, 545 bp, Zea Mays
aaaatgttgtgtgatggttttgaaacttgtttacgggatatagaagtcacccctatatgagtattcgtaagcatgcgaaatcgccttaagtcgttgccgacttgagccgactgctccgttagtagggcatagtggtcaccctgaattaggtaagcgcgagcatgttgcaccgccttaagtcgttgccgacttaagccgattgctccgttggcagggcatagtggtcaccccgagttaagtaagcgcgagcatgttgtaccgccttaagtcgtcgccgacttaagccgattgctccgttagcagggcatagtggtcaccccgagttaagtaagcgcgagcatgttgcaccgccttaagtcgttgccgacttaagccgattgctctgttagcagggcatagtggtcaccccgagttaagtaagcgcgagcatgttgcaccgccttaagtcgttgccaacttaagccaattgctctgttagcagggcatagtggtcaccccgagttaagtaagcgcgagcatgttgcaccgccttaagtcgttgccga

SEQ ID NO: 5963 - DNA, 704 bp, Zea Mays
gtcgatttgtagggtgatggaaaactaggtacgtgttcacctcggttgacgagctagaagaagtcgacattggccctagcgataagccgctgtccacattcatcagcaagaggttgaacccagagttacggtagctaatgataagcctgctaaattaaaggaatattcagattgcttttcttgggattacatggaaatctagggctagataggggcactgttgaatatcgactcccgctgaagaaggggtttcggcctttttagcaacgatcatggttgatgaaggatgaagtactgcaagaggtcaagaaacaggtggagaagataatggaggcatgattcatcaagccatgctggtacgctgaatagatttcaagtgtagtgtccgttcaaaagaaagatgcctggtggcgggtgtgcatggatttcaaggacctcaatagggccacaccaaaggatgaataccccatgcctgacgtggaagtgttagtcaatgtgggtgccgaccacaagattttgagcttcatggacggaaatgctagatacaaccaaattttatggccctagaagacgtgcacaaggccgcgttcagggtacctggcttggtaggattgttggagtatttagtcatgaccttgggtttaaaaatgatggagctacataccagtgtgccatgaactacatcttccatgaccagatcagaa

SEQ ID NO: 5964 - DNA, 566 bp, Zea Mays
aggcgccttggtaccggaggtcgaggggtccctccctccatcgtccaggcgagcagtttctgccgccagggcgtgcagcttctccacggccgcaagtgcagcggcaaggtcgccccgcactgtgaggaccctagctagggacgacatcttgaggaccaaatacccgtagtggggaatggccatgaacccggtatagggccgcctgcccaatgatggcattgaatgggaggttaacctccgcaacgtcgaactggacactctctgtgtggaagttctcctcggtcatgaacgttaccaggagtgcgatgctcccaaggggatgcaccgattgtgggcccactcctgagaatggacaagagggtctcagtcgggaccctgggatctgcagctgcttgaacgcagcgtggctgatgacgttgagcccagccccgccgtcgatcagaacatgatgtagcttgatgttggcaatggcaggggcggtgatgagtggtagtatgctagcccctgccatgttctcggggcagtcggatgccccgaaggagatagtggtgctccgccaccgctgg

SEQ ID NO: 5965 - DNA, 950 bp, Zea Mays
cagtgtactgtgctcatctttgtgaccttgtaacttctaaacaaaagagattttgccctaggtcaccacatcaaagttgtagagcaatcattggagaacaactttgcttaagggtgtgagcatagttgttaagtaaagttgggagataattaagtccaaagttggactatcaggtcactgggtctgaatttttagacaaacagtgcaaccactgagactttgagcatggattcaactatgatctagtatgaatctgcccatggcatctatgacaaacttgtagctggttagtagctctataactttgttgtagagcttggcatgagtggtcattggaaatcgagagaaaacttggctccaagtttgtctgtcagactaactgaactccaatcgccatggtacagtaccgggatcggatcagaacgccagcgtcagaaagatctcaccgccgacgactccccgccgtgattcgtgctgtcgctgccagaactcccactcgtggtggatggataacctctcgggtaaaagaatctctgccgccggtgagctggaggtcactccggtgactcaccgtggcctccctttctgctttgcggcgggagcgataggctcgccggtgaaccgccacctcccggccttatgccgcatggctccgcctttccaccgcgtcgccgtgactccctaccgctgtctcatcaacaccggtgaggttgccacgacggtggacacggattcacgtgcgctagtgccttcttctacctccgaccgccgtgcgtccttcttcaaattcccggccaccgtcgatgcccgctataaattgatggcgcgggcagctgcgctacatcatcctgaaactagagcctccaatcccaccctcaatcgttcgctagagcgcacgaattttgaatttcctccaatttggttctccgccaccgcgaagaacagcttca

SEQ ID NO: 5966 - DNA, 291 bp, Zea Mays
cgaagttgttatgatattgctctttcccggttgccttcgtctggtaagatagctcgtgaatattgcagaagcacctagcatccagctccagtccctgactcctcatggcccatataaaacccccactttgataagagcttcgggggtaagttgatgaaggtatatctcgaatgtctttagaacctcaatcaacatcttgtggagtggaaagcgaagcccagctttcatgaagctcttaaaaatcactacctcattagcttcgggaaggggaatggtgctccccccaatcct

SEQ ID NO: 5967 - DNA, 422 bp, Zea Mays
gttgacacatgctgaggttgattacctaagaagcggggtggttgctactcactaattgaggtccactcagtttgtgctttcggacctccatatcattacgcttactttcaatcatgatcaccctgtcaatcagatactggaaggtgggtaaggtgtggttcatgagttggtagtgtaggggatcaactaagcccctcatgaacatgtactgtttcttagcatcattgttgacatcctcatgtgtatagtgggacaactgcatgaatctgtctctacattcactcacaaacatgggtccttgcttcagggctagtaattcctccttcttcgcaagcattaatccctctgtcatgccctaaggagaagggtctagggcggcagggatagtgggccaatgactacacccgcagctagagcgcccc

SEQ ID NO: 5968 - DNA, 803 bp, Zea Mays
gttagatccctgagtcactcttgtgtctgcttttgatcatgtagcttgtgagaactatcaactaaatgattttgttgttcaatgatagtaagctgtaccttttagtgctttagatttaatattagtatatttgtattgtatttgttctttgcagcggcaacttcatatttaatgctcattgttccaaaatgcgttattaattgtacgcctaggcgcgccccatgtttaagtgtgagttggagccccggcgtgtcatttaggccctgggcgtccaattaaacgtttgacatgggtaggtggtctggagcaagcggcatgggcagacagactaaagcgggagggagtgggagcgcaaagaaatgagggagtgggagtctgggagcatgcgcgggaacccgaaagcagggtctggtggacagagttacctaaaggaatttgttgttcctcgtggcggcggtggctctggcggcaatggagaaccatgcacaagatcctcgccaccccttgcgcctcctttctgtagctgccagcgtagtgccacccaggcaccccacgtgtgtttctgcccctcgccggcgcagtcctacccagccacgtgcgtggaggaaggatgactatgagattaggagagaacaagagtgattgacggcggctgctttgttgttttgtacagtgggaatagggtatcatgatttgtagatgggttggatgggccataaattgcagcccatattgtgcagttcgttaggggagagagcagatgtgccctttcattgtatagtgtgctcatgattccatggaat

SEQ ID NO: 5969 - DNA, 847 bp, Zea Mays
agcaatcccagtccttatttatctgacttatgaccaccagtgaatctccggataccatcaacctcttaatgcccagtgatatggcaatgttcaatccgtggatcagagcttcatattctgctgtgttatttgatgctaggaatgataactaaagagcatatttgagttgttcacctcctagggcaatgaagaggattcctgcatctgctccctgcagcttcagcgagccatcgaaatacattcgccatacttctgcagcctctaggttgtctggtacttgttgctccgtccattgtgatacgaagtcaactagtgcttgagactttattgcagtgcgaggccgaaactcaatgtcgtgagctcccagctcgtaggcccacttggctattcttccaatggcttctttgttgtgaagaatatcccctattggaaacctggtggctactatgactttgtggtcgtcaaagtagtgacggagcttacgagcagttagaagtactgcgtacaatagtttttgaacttgaggatacttctttttggagggtcctagaacttcgctgatgaagtaaaccggatgctgtactggatatgcgtgcccttcctctgcccgctcgactactaacgtggtgctcaccacgtgagtcgtgcaggagatgtacaacagcagatcttctgccggctgatctggcatggctcggtgtggcggttttagcactgtggcatggtcaagaacttctttagtgcatcgagagcttcctgtgcttctgtggtccactagaacttgtccaccttcttgagcaatttgtagaatggtaagcctttttctcctagccttgatatgaacctg

SEQ ID NO: 5970 - DNA, 435 bp, Zea Mays
gttatctctccatttaatcctacccctccgtttcaccatccacgaccctaatcaactctcctctagaatgctcggagatttaatccgatccgcacgtcgaatccgacggtgcacgtacatcgtccccaatcccgcgctcgttcctccgatcggcggcggcgcgagcccaacggcgagaaatcgaggcaacaccgtcgatgaatccttaatgcaagcccagaatttacacagaggaggtgagtacggactctatgggaacacgtaccggtgacgaagggccatggaaatagctagccacagatgatggccgcacggcggatcttgcggactccggcgagcaatcgtcgaggttctagtctccttgcgcccctggattcatgcccacaccttcacgaatacctgcaccctctcccggttccgcacacgggttgaatc

SEQ ID NO: 5971 - DNA, 582 bp, Zea Mays
taacggagcaatcagcttaagtcggcaacgactcaaggcggtgcaacatgctcacgcttccttaactcggggtgaccactatgccctgctaacgcagcaatcggcttaagtcagcaacgacttaaggcggtgcaacatgctcacacttacttaactcggggtgaccactatgccctgctaacggagcaatcggcttaaatcgacaacgacttaaggcggtgcaacatgctcacgcttacttaattcggggcgaccactatgccctgctaacggagcaatcggcttaagtcggcaatgacttaagacggtgcaacatgctcacgcttacttaactcggggtgaccactatgccctgctaacggagcaatcggctaaagtcagcagcaacttaagccggtgcaacatgctcacgcctacgcaatttagggtgatcactacgccctattaacaaaagcaatcgacttaagtcagcagcgacttaaggcgatttgacgtgattacaattagtcatataaggatgatttctatatcctacaaacaaatttcaaaaccatcgcgcatcgttttactactgcaaactta

SEQ ID NO: 5972 - DNA, 1127 bp, Zea Mays
gtttgaacatgacatctccctccccgtcgagagccagctcgtccacgagctggaattgggggaacttggtgtggaaaggcacgacgtcttccaaggatgctgatgctgccaacgtgcccttccactgcatgagcacctcatgtacgccgcgagcaggcggtaccacaccacatgctctggttccgggctaatggcgccatgatgctggagcggcagtggtggaggttctgtgggtggcagcccctggtacttcttgagcagccccacatggaacaccatgtggatgcgagcgcggggaggaagctccagccagacggcgacctcgatgacgagttcgacgacgcggtagggcccgaagaagcgctgcttcagtttgtcgcccaccacttgaggaagagacgacgccacgtgctgacatagtcgaagcagcgcccaatcaccgaccatatatgtgactttgcggtgcacacggttgtagtggcgtttctggtacacctgtgcctgctccagacggtagcggatgttcgcaaggaacttcgtgcgctcctccatgctcttggcgacgggcggcaccctggtttccccgggttcataggaccagatggaggaaggatcacacgcgtgtagaccacgcggaacggggtgtcccgcagggacgtctggtacgccgcgttgaagaggaacttcgcccatgggagccatcggagccactcacatggtctgtctcccaccaagcaccgcaggtacatgaggatgacgtagttggccgactcagactgcccatcgggctaggggtgaaacgccatggtcatatgcagcttagtccccatcatctgcatcaactcctaccagaatgttgacgtgaacaccatgtttcggtcggagaccatggactgtggaacaccgtggaggcggacaatgtcgttgaagaaagcttgggcgacggattcagcggagtacgagtgtgccaatggaatgaaatggcagtacttgctgaacctatccaccatggtgaggatcactgtctcaccgacttgccacagacccgtggcagcgcctccaaaaagtctagcgcgatatcagtccttacgccctggggaaccgacaacggaagaaggagacccgcg

SEQ ID NO: 5973 - DNA, 428 bp, Zea Mays
cgagcatgtatcaaaggatggctactgtcagatggcgggtcctgcgggtgtactactatcgctccctagccgaagctgtgtgtaggcccaggtcccagtcgaggctacctcctgggggccattgccaaactctttcttaagtatgctggtctgcagcctcgacaaatcgagcctacatcccagggggccaggtaccaaggaggaatcagttacaccacacacaacagggacaagtggtacacagataagtgctaatactgcttgataaatagtactcaaaagtaccttacaaaaagcgaaagttattacatccgccttcaagcggagtcctagctccatctctactccataggaatggactactctgcaccagcagggtcgcgttggaagctagctccgggcggctcaccagcggcggcggcggccac

SEQ ID NO: 5974 - DNA, 459 bp, Zea Mays
ttgctgcctttgcctttcttgttgcccccacccccggagcccttgggaggagcactggtgggagcatcgtaggaggagcggcatcccgtggaggtgcaggtggagccagagacaaccaccatggcggaggctaccatggtcttctcgtcattggcgagacgcaactctttgagggagagcatcttgcgggccctagagaaggatggcaggacaacagaatttgcgatgtcgtcggcagtgtcgttgaagcgcgggttgaggccacggaggaggctgaggacgagtcgggcgtccttgatggtttcgccgacgtcccgtagggcagcagccttgaccttgagtcgctggcagtactcatcgatcatcgagtcaccctgctgcaaggagtgaaactcctcaagcaggaagacagcgtggggtgcacgattggagcggaagaggccttaaatcgccacctgt

SEQ ID NO: 5975 - DNA, 406 bp, Zea Mays
ccgggggtccggtctgtacctgcggaggtcctagaccctgcctggaggtccggtccgtatatgcagggatcaggcactgtcccatgggggtctggacccgccgttgataccttggagtgtatcatcttttccggccacgtggcagccccggagccgtccacgtggtggggtcgggtgatgtttaccacgtgaatagagatagccgcatgggcaccatgccttctcactgtagtaaggggtaccactgtttcagggtaccgacagtggcccccgggcccacctcaggggaggatacgagcctgcaggtggagccagagcttgattggcgcgtcgtttccgtgcacttgctgacgtaatcattatcagtccgcctgcggtcacgcccactgccgcgtctatccccgcg

SEQ ID NO: 5976 - DNA, 536 bp, Zea Mays
ttcctcacggagaatcgaagatggggttaccattgcctttatccagactagggtttaccatcaattttctcaccaaatctcaggggtggatctaggccacttttgtggtagattttggtaatctccattaaaatgtatgcttgatagttcttaaatgaattgatgatccctattgccatctctagttaggagtcccttgctctatcgaggctagggtttaccatctcattttctcaccaaatctcaggggcggatctaggccacttttgtggtagattttggtaatctccattaaaatgtatgcttgatagttcttaaatgaattgatgatccctattgccatctctagtcaagagtcccctcctctatcgaggccaggggtttaccatctcattttctcaccaaatctcaggggcggatctaggccacttttgtggtagattttggcaatctccattaaaatgtatgcttgttagttcttaaatgaattgatgatctctattgccatctctagtcaggagtcccctcctctatcg

SEQ ID NO: 5977 - DNA, 547 bp, Zea Mays
aagggcaacaaggtgctgatcttactcgagaaagacaacttagggacttcaggcgtctcaatggtttatgttatgcttgtggagaacagtttgagctcgggcatattgctaaatgtgcaaagaggggttcagctcagttgaattgagtagtggatgaggaggtgtctgaaattttgaccgatgagattctacatcagctagaaaaggaggatcaaagtgggaattatgttgtcatctttcttttcaggcagtttctggtactaacaatgactataacatgagagtgcgatctattatgggtaaacatactatgttgatgttggtggattctgtgagttccatcaattttattagtcaacatatggtgcaaaagttggggttagctgtgacatcttgtccatctgtttcagttaaggtggcacaatggggagtccatgatcagccaggctatggcgaagaatttggaatggtgggcacatgggcatttttatcacactgacatgagaattctacctttgggggcttttgatgctattttgggttatca

SEQ ID NO: 5978 - DNA, 468 bp, Zea Mays
acccaagtctcctaaccactcacggcccccacgccagacttcctctctcacattttttacaagccgatctcacatccttttcttttctcttgcattttcttgtatttgctgcagccgggtcctacctctcattaactgatgctctttcgtctttcctcaaccttgttctcgcacgcacgatggacggaagacgttgccgccaccgcttcttcggagttaggaaacgccgccgcaaccggctgtttcttcgacatctcgtctccacactccagtgcgccacgactacaagcattgcccatctctcttcgcctctctccatcacaccacgccattactcgcgaccgtttcttccccacacaattatatcgccattaatggtcttcatgcaccttcaatctggcgcccctccgcgtccctccacctccctggctatttgtctcctcgccgcgatgtggaggaccccgtgcc

SEQ ID NO: 5979 - DNA, 440 bp, Zea Mays
atttaacacaattgttgttttaaagattgaatcttgcccaaaactagttagtgtgagacaggtagagcatcaaaacaataagcagaccaaacacatggagagattgaacataatatcaaacactaaaactagcatagcgcctgttttacatagcaatccgtcattaatctgtgcatccatatgttatagatccaaaagcaggataaaacattttgatctaggttcctgattgtaccaccaaagaaacaacttacatgggcatcaacatgatgttctactttcataggacaagcataatcatggagtctaagctacaggcagatcagcatgcatcccttgcattgtcgcgatgaacacaaaagcacggtgttcccttatccaggacgaaacctaagagccaataaacacgtatgcactccatagttcttgcgaacacaaag

SEQ ID NO: 5980 - DNA, 820 bp, Zea Mays
gcaggggcattagttaagccaaaagacatgactatgaactcataatgcccatacctggtgcaaaaagcgatcttctcaatatcctcctcacgaatcctcagttgatgataagcagagttcaaatcaattttggaggacacctgggcacccctcaactgtttaaagagaacctcaatacgggggagtggatatttattcttgatagtcacttgattcaaagcgtgataatccacacatagccgctttcttttatccttcttctcaacaaacaatactggggaagcccatggagacctgctaggcctaattaaacccttagccagcaaatcatccaattgtcgcttcaattcaacctgctcctttggggccattcgatacggagccttatgaatgggctgtgtacccggaatcagcttaatctcaaaagctgcatcgcgttccagaggaatgcttggaagctctgtcggaaacacgttagcaaagtcacacaccactcggatgtcctgcacccgcaaggcagcctcaccctccaccaccatggagaaaaagattcccgacttcctggaccggtgatccggaagcaattgcgccaacaaggacaacgtaaacttaggggaacttcccaagaataccacctccctacctgacggcgcctgcaataacactgtcttccaaaaacaggatataactgtgcgatactgggataaccaatccatacccaagataacatcgaatgcccccaaggaaatcacaaccagattggccgaaaagacctcatcagcaagaatgacggaacacccctgacaaactgaacagctac

SEQ ID NO: 5981 - DNA, 568 bp, Zea Mays
ccatgcagtggcggaggacggataatatttttggtatggcggaccaaaaggtgcaagcactgaataactgaaattgttaacatgtgaaacaatccaacaaaacttttagatgtgtccgttctccaaattccaaaatgaacatctaagctttagaatttagaaaggagatgctcatatgcaggtaaacatggtccgagacgatgagcgcgataggctgagatggggcaaaggggcgtcttgctgagcgcatagatgcgctctacactagtgagctagtctgcgatcggtggatgcccgtcccatggaacgcagaggcgtgcccgatgctggagtttggaatgttgaagagggaagagtgaggagggcacaatttcatgggtgctaggagggcacaaacacacgagagctggagagcaccatagaggaataggcaagcaacgagcagcgatagagagaaggaccaagcaggaaggcgtgaggatatggtctggtattgggctgaggtgaggtatgatatgggcccttttgggcgctccgccactggttccatgttgtctataaggactaa

SEQ ID NO: 5982 - DNA, 825 bp, Zea Mays
gaattttctagggattaaacatgttttaataattattttcacattaaaaatcaattctgaaatgaatttcactacctctggtctgcgcgcatgaaatctggaaagcgcaggggcttgcgggtaaaatctcctagacacagagcgtccctggatatactgcggattaatttcctagtattccgagggttcttttgcaaataggatggccgaaggggtatcgtctgttgtgagccgcacgattagaaactagcgcgccagataagttgattcataactgtgaaccggtatcaaatgaaggccactggatccaggatccatgggccatgagtcaccacgtcaaactctcatcctgaccctagatcaacgatcccgcggcccggattgtacaaacgaagggggtacggtagcttctaatctccgccgccagatgcgaaaccaacggtcccaaagtcgccccaatcagaccggaccacggcggcgcaccaaccatccacggcggagcactcgcccttccggtgacccactgtcaacgccccagagctcccaaactaaaattaataggtcccgacgcaaactataaaggaaagggagctgggccatggccttacccgcactggaaggtagcagaggtcaccggctacggcgcggatggcttcacggcggcaccgaagtcgtcgacgagaaattcccaagcaccgcaacccaattcgtgcgcgcagtggccttggtttgcttcctggtacactgaagacgccccctggttcacaagtgaggtcccggcgacgccaaaccggctacacccgtgaaggtcgtcgcagatggttg

SEQ ID NO: 5983 - DNA, 1730 bp, Zea Mays
ggaggccgcgccgagatgatacggtgagcgatctgcgggtttgtgggttgctagtcgggaattggcgagcatgtgcaccagcgctctgggtggttgggtttgtttgagaggatgcgggagtttgttttctatggaatttgcgcagaaaaaactcgggaactgtttgattcgtcagaattgacttggccttgtggactccgctcatgttagtatcattattttgtttgtttcgagtcatacgattctattcgcctcgaaccgggagtgccgttttggtgatcaactaaccctgcaattctggcggttcgttgtcgaaatccgtcccaatcgttttttttaattttgtgtttccccttcaaattgtgatttgccggatgtttggtagagatgggttgcagtgcctgcatatgcggggtataatttcgcgacttcccgcgctcgcctgattctatgtgttctgtagcagctcgcttaacccgtagtttcgcgtggtgccgctagtcctcttactattggcgcgcctgttcctttccgggcgacgaatttgcttcagacaatttattgtagaactgagcctaatgtggcaaacatttactttcacggttagttttgaggtgtttataaattcgaactgttccatagatttgaccaatttctggaaagggtttgaccacttcagttgctatttttgcctgcatttctgctattctacgtcgataggtttgatatgatgtgattcgcgggctatagctctagtgttctgaatatgagctcttttattcacgtgaactgtgggtgatctgagaaggaattttgaactaaatggatgcattcctatattttgtgattgtggtgcacaactgttggattctcctctgtataaacaggagagtttgactttttcagcatcgtactacgtgtatcctagtcctaggtattgccacccgcgtggctacagtggcttttattatgggaacaaatttagtgactgctcgccttttgtagaattcagctctgacctttgggcatatagagtggtgtggaaaagtaagcacaattgacacatgttcatgaattgcttatttacatttgttcgattagactcttcctttttgggttgcgatattctgtttacatcagctgagacaaactctttaagctatgtccatttcactttagtttggcatcttccattacaatatgccatttctagctataatttagtagtgcaatgtgtatacagtgctctaacaaaatcagtgattgcttcttcttatgtgcttagatcaaggagaccggttctcttgagctggggactgcaaaggatacgtggcttcagtcattgtgctctggatttttagatcaagggaccaatgcctccaggataatggcggggaaggacggagtttctctgaaatctgtgtcatacggggcaaggctgcgcaggagttgtgatgcatcactgagagaggcagggtccatgagagacccattcttgaaacacagagtaaagaaatttgatctatctagcctagattggattgatgagattccagattgccctgtattttctccatcaacccaggagtttgaggatcctctggtttatctcagcaaaattgcccctgtggctgcaaaatatggtgatagttgcttctctgtatccttagttgattatattcttctaacaaggtcaaatcttgataatgatgatagacagagaactaatg

SEQ ID NO: 5984 - DNA, 531 bp, Zea Mays
cgcccgcgcagctccccatgaaagcgccatgccgatggagcggaggaacgacaaccgcagtgccctaggattcgacgggtgaagtgcagtggcccactctaggcgaggggaatagaggcactggagggggagatccggtacacatcttttatcgcccacgctttatggggctagagaagtccgtgcgcggagtcgtggtcaccaaagtccgtggttcttgtgcggcgggtatggagcgaggcaataggtgtccgttgtaaggatccgaggaagaaggaagcgcccgccatgcacgcgcgttcgttgcggcgaggaagacggatgccggcctgaccaggtgccccaccatgcagtcccacgcgcacgcaaccagggggactggccatgcggcccacgcggcagtgaccaaatgcgctgacgcacagaggctgaccgagggaacgtgggctgaccgcaggacattttcatcagtgggcgcgatgcgtgcgtaagaggaagagcagatgcgaaggaaaccaagggtggcggcta

SEQ ID NO: 5985 - DNA, 914 bp, Zea Mays
ccggccggataaatcaactaccggtgctccggtgcggttgacacctaatttgacctctaacgatcctttcccctcaattaattgcaagattctagctccgaatcactctgtccacggtgacagcgcgatcaacggacaacccgaggcgttctcggtgatctagcacggtctagttcaattggccgggtcgagaagcatcaagggcatacaagagtggtaaaacaagagctaggaaggcgtgatcggacctgtgaagggctgaccgcggcgagctcacacacgtggcgttcttgaccgatttggggtaaatctcaaattgaagcgctctggtggacgatctgaggcacaggctggtgtattgggtgcatgactacctagcggagccgatggcacactcaatttataggacccgagggcggtggctcttgaatttggcgtggcgcggtggtggccggagggagggactgagtcactggcacggtgaccgtggctgttaccgtggcaaggccttaggcaatagaagggctgtgtattgtgatcaattgcgacgtggtaagatggctaacagcgtggcataaccgcgaggaacgacgacactacggtgatggtcgcacggccacgtcgccggcaagtggatgagcgacagagcggctactgtgctccaagttcatcgacggcatgatcttttcacccggggaacgttatctgcgtttaactgggcgtgaatcgcggcgccggcgtgattccgagcgcaagatcaccggcggcgaggggggggatgaacctgagatatttcaacagacactgtaccatcaggatcttattcagtttgtctgaccgagcgttttgtaagacctggatctctgatttctatataacaacttgttaatccacctgtaacaaatttgttgtcc

SEQ ID NO: 5986 - DNA, 345 bp, Zea Mays
acacacatatacacctgactagttgataatacagtgatacgcaaggatacgatcggtccttttgggacgacaagatcagtgattggtggcgccgtcaaatggtggtggtggttacaaaagccacgttgagccgagttccgaagtcaattgtgattaaaggtaactgctaatgctactactagtttcgtcttgaccagatcaggttgctatttattttattcgtatatagatcatgcatatgcatgctgcttcccgaggacgtacgctaccatgcttgcttgcccctgcagctgcttgctatatattcagctcaaacatgcacacatctactcacacggtcacacc

SEQ ID NO: 5987 - DNA, 470 bp, Zea Mays
ggagaaggttcaccactgggcaagccaagtcatagagtacgtcgaggcccatggtttgtcccatgtggagtgcttagacaatatcccatggtgtgtccgggatatggtagaagttagcattcaccgagggtggtcatatccttgatcgttggggagctcggaatcgtctgtctccctctagatatcccagacaaggggctagaggacatgctagaggtcttcgataaggcggctagtcgggtcatagctaggttgtcctcggatgatgtcattcgcaaggcttggtgattgctcgttgtttgttttcgtttggtctggattgttttcacaaccgagaaacatgaatcagctttccacgctacgtcttagttcttagtacgtattttatgggggatcatgttcacgtgatcatgagggtcccacatcggctcccaacgattttccgtcggtcgacccaccttgggtccgcc

SEQ ID NO: 5988 - DNA, 1614 bp, Zea Mays
atacttcaccaagtggattgaggccagggcagtatccacaataacgtcgaagaccacccagaagttcttctggcaaaacattgtttgccgattcggagtcccatctgagctcacagtcgacaacagcaaacagttcgatagccaggacttctgcctccccatcggcaccaagcctgccttcgcctcgatataccacccacaatccaacagcgtcgtcgagcgtgccaacggcaagattttcactgccatcaaaaaaagacttctcgacgaccagaagggtaaatgggccgaccaactacctgaagtggtctgagccttaaacacgaccgaatgctgggcaaccggattcacaccttttcgtctactatattgatcggaggccatgacgctgcaggagataaagcatgggtcaccccgaacaagcacatcagcggtccccgacgtcgacgaaccaacgtctaaagacctcatcgacagagatcgcatcctcgccctgctagccatcaacaaataccaagctcaaaccaaggcctgacgcgacaacgcagtcgtcccaagagagttctacgaaggagacctcgtactcgtccggaccacccggacagagtcacggggcaagctagagccgaaataggagggtccattcatcctcaagacgaaggcatcccccagcgcgtacaggctatcaacgccctccggcgaagacttagagcactcctagaacattgataatctccgcaaattttttgtttaacccttagggctcacgcgcccttgtaatccaccaaacaatattgttctggcccgcactcttttcctcccgggggtgaggtttttaacgaggcggagccatgtaatatacctacaaaagcccccgcaataacaaaaactcagacccaacgtgtcaaaaaagaccgcatcgacggtcttcggcattcgaccactccgaagtcaccgcgacaggtagcgcagactaccctcgcgtgcgacactccgcgcaaaagtcgcctaagggtgcagccggaatagcacaacaagtgcgttaatcgaagtctctcattaaaaagacactccacgcaaattcgcccatgggcgcagccgaaccaacacaggcgtacgaatacggcaaacaggccacattaccatacatattacaattacatacacatggcgagggcatcacatattacatcggctcaaccttcgggatgatacccatctccctataattaaacaggattatcctcaattcctcaccctcaaaaagcttccgaagatccccctcgcctatgctcgccccagtcagcgaggacaccaattctcgtttaccaacccggtctactcgaagacggccacgctccatccccatacgacggcgcctgccactccgcgaaaattcacccacactatgttttcccaccacccttcgcctcctacacccagtactcgcactaggaagatccctggcaccctccacacggggcaaagtctctgctgcagccacatccaacgcaacaaaataatccaagccttcatccgaggactccgtccaaggaaacgaactcccaggttcaccatcggactcaaaacactcagagacagaaccaaacaaac

SEQ ID NO: 5989 - DNA, 277 bp, Zea Mays
gccacgacgcggtgcctcacggcggcacagatgaccgatttggggaaaaatccaaattcgggcgctacagtggatgatttgaggcgagaagcggtgtgttgggcgcgtaacaagtaggcggagcaggggttgcctccagtttatagaccctagctgagcttatcatgaatttcggattgggatcgagttcaccgcggcctggatatttctatggtggcctgttcaccgtggcacgcgagagggaaatggttcacggatggtaaccggttgcttgcca

SEQ ID NO: 5990 - DNA, 371 bp, Zea Mays
gtaaccccaagtcaggaggagctacgtcatagctcgacgaaggaagatcaaccggaacaatttgaagaacgttgtcaggggttggctcagccccgctagcggatttcagacttcttgcatctggctgaccaacctccaaggcgacttgtttgctcaaagccaaagaagcatgcatcgccatcaccccatcagatcgtggtggagacaacttgacatggacatccatggaggtgtgggaaggagagctcagttggacaccctcgggggctgggttgcggctcgcgccacccaccagagccggatcactaccggcaacacccttgggggctgggttgtagcttgtgctatccaccagagccggatcactaccg

SEQ ID NO: 5991 - DNA, 697 bp, Zea Mays
ctgcaacataaccattgggaaatctaattttttcacccatctcattacctcgatcttgtctttagaggtaagacagaacaaggcacgtggcggcttgccgttgtcattgagcacttgggttggtcggtcacaaagcattgctagatctattagagctttcagattgtcctttgtttttttcaaaatgcatgctggtgtgtatgagggcttcaacaacattactttcttggtgcatgacatcaatgttgtgcacaagaatcaatgacgacatataagggagctcccaaagaccacatatatgtgtccagttgtggtccactccgaatccttcgtacttgtccccttttcatttaggacaaggttgttcagctgagcatatatttctgctacgttaagacgtttaggtggtcctttggtgaccacggtgttctttataaagtttttcttatcgctcctaaaggggtgtttcctgggcaaccaacgtcgatgacaatcgaagtaagtgatctttccaccatgagcaagaaggaagcaatctgtatctgaaccgcaatatggacatgtcaatctaccatgtgtactccaaccggtaaaaatagcatatgccatgaagtcatgcatcaaccacaaatacgcaactcgaagtttgaatatctattttttttaaaacatcgtatgcttcaactccttttcaaag

SEQ ID NO: 5992 - DNA, 1052 bp, Zea Mays
atgcgtaataccctacatcatgtttgatgctgagtattgagtttgctggtagtgcacggattacatacgatttgtgggtgatgatggatgagacctatcagtctaatggtggcatggttgcgacgagaggaatgtcgagagagttttgtaggggtaccctctgagccttatataaccagctgaggagacgtccctttacagatcgtgagatcttatctggatctatctacttttgctactattgcgtgacgactcttccagtggttattcccttcgagttttggcatcatgtgatctgctatccgtttgcatgcagggcgtgttacacggaattccgttggctcctctgtgatatatgtgcatagataacatctttatgtcgtgctcttaggaatctttctagctaaacatgtcatcctctcggtagcacctgtttttcccgaaggtcggcctaatagcacatcttggcgatgacttatcgggggtctgttcaagcgacccatggaacgtgtccatgtgacaatgacccatggtatatccatctcccatagaaggggattgattcacattcagacccacaacacccaagctctccagcaatacaactcatagtggatgtagggtattacactccggtggctagaaccactctaaacccttgtatttcttatgttcatccattcggtcagccaaatctataggccccctcctcatcttaggattagggtgggtgcattccatcactctactggaggatttcccctccgacattttgagcgctaggtagggggtcagggcctggccccttgattgatatgacagcccactcatccaccggtgagctcgatcgtggtgaatctgtcgatatttggcgcatggtagagaatcgacgtatcaagaggttcaccgtcgacctcagacgacgtctcaggaagcgagccgctgccatcaagtgaaggcggtgagagccttgtccatggcagagcaggctattgctgccatctccccgctagtctccaccatgcctgaggtcgcctctatctaacccccag

SEQ ID NO: 5993 - DNA, 586 bp, Zea Mays
ggagacagataacaaaagctgccataaatgctgaatggtgcaagcaacagaacatggttaagaaatatggagagaataggattagcagctaacgaatatggctactgacagtggttggtgccctgacagttgaattaggtacggattaaacataggaggtagaaggagaaggtgggaagcaactacattcaacctcagtgagtggtacatgctacaatgattcaggttaatgaagtggagatggagataacagagaagcactattaggattattagttaagttgcttgatgaggaagcaagatatattataccaaactattatgattcgtgaatgcctcatctgaagagtttggtttagaatacataatagagagcatgtaactgtggatgctgtgaaaaaggcaaaaccaagcaagacaaaaggcaatgacagcgtgacaaacatgcaaaggctatctgcagcaacttcctcatcttcatctactattaaagcttcactctataaacagtacagtctaaagagaaaaacaatgttttgcacgtctatatatacgatccactggccatagccaaataataccaaac

SEQ ID NO: 5994 - DNA, 421 bp, Zea Mays
gcttggacccggtcgacggtgagctcgccgtacccacttgggctgcggtcgagcaaagtggtcctcgccggagttggccgcctaccgaccatgagccacgtgccttagggcgttaccacgtcgtagtaaaccactgaagcatgtctggtcatcgtcggtgaccttgccacggtgaaagccacgaatcctttgcgccagtgctctcccctctctctggccgccagcacgccatgcccaaattaggagccaccaccctcgggccctataaattaagcgtgccatcagctccgctaggtaatcacacacccaatgcaccagcccgtgcctcagattatccagcagagcacttcaatttgggatttctcccaaattagtcaagaacaccgccgtgtgagtgctcaccgtggctagctcgctacag

SEQ ID NO: 5995 - DNA, 587 bp, Zea Mays
ttttaggctttgacagaccaagcggaacaccaagataggtaaagggcattgaacctatctgacagttgagggttccggctaggatctccattttagcgggactgacattgatggggtacatacttgatttattgtagttcaccttcaaccccgtcgaagttgcaaaagagttcagaacggctctgagaaaaaatagttgtctagggcaagcttccattatcagtagtgtgtcatccgcatattgaactatcggaaaatcttgaccacaattcgcggccaggggtaacttgagcaggtcttgctgtcgcgctttattgatgatgctctgtaacagatccgccgcgagaacaaaaagaagaggcgagaggggatctccctacctgaccccacgcttgcaatgaaaggttttccctggaacaccattaaggaggactgatgacgtgccagaccgaagaatatccctaatccagctcatccatctgggcccgaagcctccatgcaacattacctgaagaatcaactcatgctcaagagaatcaaaggccttttcaaaatccaatttgagcacaataatctctttttttgaa

SEQ ID NO: 5996 - DNA, 552 bp, Zea Mays
cccgggtggatggcggtatgcatgggcttgatgtcttctccgcaccctgttgcgcgtatcgggttcaaggttgtgcaccggggcgttgagttttagtcagcggccatggcgccgccgtgctgggtggaaccaccgtcggcgtcgggtcggtcaggaaggggatgaactggataccattgactcccgatccgacgactcggattagataaacgctgtggccgttgatccttggtcctttggccaccattggatatcgggtcgacttagtacagatctaatcccagccacagaaatcagatctggcgactgagattagaatcaacttacccctacgtttatttaaatctgagccatccaatctagatccaatggctttgtgtgcacgataccccttcggcaggctactttactaattagacccttaacttattagtaaacaacccgtcgtccagtatcactgttggctgagtctcgggttacttacaaggaagcccctgcactctctgtttattacgcgtgcagtccagaagtcaatgaaatgaataaataaat

SEQ ID NO: 5997 - DNA, 510 bp, Zea Mays
cacaaatgtttctgcttacctcctttgttggagtcttatggacactttctatcaattgacactttgctcataatgctgctacttatctcattgtgtgagtttgcactacgtctaaacacttctgttgcctgcttcaactgttgatgatcaagtgatgagcaattaaatgctccaatgctatgattggagttattctcctatgattcccaagtttgaagtctgatgatcctgtctttataccattgtttgccatattctgaacagaatggtaccaaaaaacaatgattgtcactgttctctttgaaaacttcaagcattttttaattgagcgtcatagcactgtgattatcctatttcagtattgttgtattccttaccaagatacataggtagtttttcttgcctgtttccctggtcagatgatgagtatttaactgcaacaatatgatgggtttattctcctgtgattccctcgttttaagtctctgatgaccccaccacatttttctg

SEQ ID NO: 5998 - DNA, 854 bp, Zea Mays
ggaaatagatgggtagctaggtggctatatttatataggccataaaggctactatttctactattaggatgttgtagaagcatccaaaaaattagttaggtttgagaagacgactagaatgagcatgcatcatgattgtcgcattataattgtctcttgtgcaccaacatgcttctctcacctttattccaataataagaacttgtgaataatgtgatgtgctgttatgttaggaactataagaaatgctttaccttgtgtcggattggtaagtcttgactaggtcgtgatatgtgtttctcttgccttgctttctagaaggtacgatagttgttcagtccaatttgcttgttctgttcataaaaagacccccgtccaaacaaccttgagtttagcaagtgaaacctccaaaaaaaatcatgctatgtgagtgttttctaacccttgtgtgttttacccttgaatttacacctgcacaatttgtagaaccccgtagcatgaccgctagttcgacctaaagcttccttgtgcacttgtcgtgtcaaaaaaaattgttgttggtgtctagttgcacaaaccctatcaaggccatgtttctttccatagatcctgcccgaatcttcataacctttctggtgctcgtcctcagcaatctcatgcgactacctctctttcacctggatctagtaatcattttccttgtgaatcatgttgtggctttatcatccgaatctctggatcccccattgatcctaccctattatctggatatctgctctaactcgttctcaagtatcagatgttgatataccaaaatctctcaattctggtcattctcataccccttctccgag

SEQ ID NO: 5999 - DNA, 593 bp, Zea Mays
gtccgcaccatgtggaatggagtatctctgctgcggggcacagattcagagacacctatcaagttgtcgctcgcaagaaattgagaaccctatgtcaaatctatgaagagggagtggccgacaccccgctcatattcttcctgcacttttagagagaccatcctgtttagataacaaggatgcatgccttagaagggcagtagcagctggaggacgaccctacaatcgtgtacctcacaacatacctgcttaccctggatggatagtatgatctcttggctcaacatcactgtccgatgattgctcgagcagaaaaggcagggaggcgcaaccgccagctccatgtgggtctcaccacagctcaagctcatgtagctaccttggaaagtcatgaggtcattgttgttgaagccttgaagcaagccaaggatgagcatgtccaatagttgattgaggcctacttggtcacccacaatcaacatagagccctgtggatccaagagcccgcctcatccaacccagttcaacccatgagagttgaagagccccagattttggagggcctcccagtctctataaaagaagagaggaat

SEQ ID NO: 6000 - DNA, 762 bp, Zea Mays
gtaagatcgcatccaccgtcgagctcgcgtcgggagggagagccccatcgccgctgtagtcaatcccgcgcatccgtcgtagcttcaacctcggcacatggtgcatcgcctgtgggtaccgcacccatccatggtctcgccgtgtccggatggcgtgaagtgtgacctgaagtcctcgccggggcaaggaaatcaccatcgtgtcgcaccgcaatgtgggcagcaacacagacgccaccgtttcgggtaagggcatcctgttatgtttctctgtgtcactagtgtggtgtagaatcggttgttcatgagtttggggtgcggggtcgcgggttggccatgcgccggcgagcttaccaccgtggggtggggtcgtggggagctcgacgccgcctttgctggccgccatggaggtagccgcggtgagaaggataaaggagaggcagtcctggctatcgatatgaaaatagatggtctcgattacatcgggcaagtaccggttgagatttttgatccaggccgtcgttccaggatcgaagcgttgtgagtcgattgatgcgtgggtggtgtacggaccatggatcgcggatccgttggacagaatggcttaccgtttcgtttacaagatcagacggatatgcgccgtgggcttctgatccaatggccggtgatcactcataccccttcgccgtgtcctttttgctaaagagcccctgtcctttctccatataaacccgccatccacgcatatgtaaagaccattgc

SEQ ID NO: 6001 - DNA, 466 bp, Zea Mays
aacagacttgtggagcgcgcaaacggtaaaatcttcaccacaatcaaaaaagactgttagaagataaaaatggcaagtgggcggagcaattacccgaagtagtgtggcactcaacccaactgagtcccgcgccaccaggttcaccccattcagattaatgtacggaacagaggcaatgaatccgcacgagctcaagcatggctcgccccggacttaccccaaggccacccccgacattgacgatctagcaacaaaagacctcctcgacgaagatcatgttaatgcccttaatgcattgaacaaataccaagtaacaacaaagacctggagaaacaaagttgtcactcataaagagtttgaagaaggggacctcattctcatcaggaccggaagatcggaatccaaaggcaaactcgagtcgaagtgggaagaacccttcatcgtcaagaagaaaacgtccttgaat

SEQ ID NO: 6002 - DNA, 477 bp, Zea Mays
atttttccttcccgcagaatttgtcttcctctattcaactacataatactgtttcatccttacatttccaaagagtatttaccagcactatagtaaactgaaggcattgctagtaaacgtctatttgagtccaggatatgatgcagtatgcaaatgtaatcggtgtgggaaaccctaaacccactcaaggggttgggtgattgatatatagactgagttagatgggccaggcccattacaataggggcgagagagtaaatacacaggggaggaccaaaaccctaacaggtactaataggtactctaacacccctgcagtcaaaactctatcatgtacagatgttgagactggaccgaaagtctaggaatacacttgacgacaaccccttggtgaatacaatcaattaatccttagttccatttccgtctcatgggcaaggcatccacctttgatccaattccatagaccatcataga

SEQ ID NO: 6003 - DNA, 383 bp, Zea Mays
tcttcatctgagccatttgattctcttccctagcgcaagcccactcgtggctcactcgcttcttcggtcatcgactgaccagtaagtcgatgacctaactcgcccgctgcagcgcaccttgccttctcatcacccatcagctcgtcgactcgtggcgtcatctgtctctcgctaactcattagggtctctccacgccgtcgcaacacgacaatggctatcgcttgctgacaccgtcatctatcgctacctcgcctcatgcactcgctcctcccacacgtcgtcgtctcaccaacgccatctcacgacaaatttgatgactctccagaacgacgcgccggtgcggctgctctgccctagtgcctcgtccttagtcagtccacct

SEQ ID NO: 6004 - DNA, 512 bp, Zea Mays
gcgcgagcaggcctccaaagatggctcaccgcctcgtcaccgacctggcaaggagaaggtcgacgaaggtgacgcggctgcgggagaatgggacctcgagtatcagtcccctgagtaagttctcaaggatgtcttcactagagactctgacttcggtgacgacaacgaccgccacaaaaagctgtacgtgatgtatggcggaagctgggagcttacctctcgtagggacgtgaagtccctgcgccgtgaggtcctttcaacgaccccaggggtcccgaaggcagctccacatcagcggtggaggagcaccactatctccttcggggcatccgactgccccaaaaacatggcaagggccggtatactaccactcatcatcgcccctatcatcgccaacatgaggctacatcatgtcctgatagacggtggggctgggctcaacatcattagtcatgctgcattcaagcagctgtagatctcaggatcccgactaggaccctctcgcccattct

SEQ ID NO: 6005 - DNA, 458 bp, Zea Mays
ggcggttcgccttcttcgcactcgaaggccagcgcgctagctgtatgacctgtgggaccgggccctcgtgtcatgggatggataccccggtgtacatcgggggaggcttctcgcgacgcttcgaggcgggagcaggggagtctgcctttaaagaggggttcatccctcgagtagtagccatgccttgcttctctcccactcgcggtgtcctttcgcctccgagctctctgcgcccctttgccttcaaggtctctgcttcgcgttgtcgtagtttgccatggccttgtgacttcatcccgagcgtgcccagactgagtgagtgctcgaaatggtataccgcctgcttggatggaatgcgccgacgctcggcgaaaggatttgcaccggtgttatccaccccgatgagcttgccgctagagagtttgtgccttttgtcctccccagcatgccgattctac

SEQ ID NO: 6006 - DNA, 768 bp, Zea Mays
tgtcgtggggttactgtcccgaccaaggatacccacgagtctgttatttacattccttttctcatccgcggccttgctcttcctatttctcttttctttcgcggtctccttgatttctaccatctgaatctgactcatctgaatcccaactctattctgcaagtttctatttttgttcacttgtgcgaagcctaccttggaattcttcctcattttggtttgtggaaatacttgtatcactgtcggcctagaatggccgggggcagcaccagctcatgggtggtgcgagtttggagatgcgccatgggaggaagaaagagtacctcgacatcccactcaaggacagcatcaaaggatggcgcttggagtggtttattatagagaatcatgacaagtccctcccccctcggtcagggagacaaccggatgtttgcgctccaagttggactgaatcccccacagacttggagataacagaggccaaggttctacttgccgaaattggtttgttgaagaagagaggtctgactgctgaagctgtagttgcagactttgtttttaagaacattcagccaatgaaggacagagcgtacccgacttatttgtatagtggtgtcactaattcaacccgggttaccaacaagaggattcctgctgtggatttggtaagccgactggatatgattcttagaggcaaagtatcgaatattggtgctcctgttgcatattctgcctggaatctgccaccttccaagacttttttcaatt

SEQ ID NO: 6007 - DNA, 495 bp, Zea Mays
tgggaaaggtggaacaagttgctggtcgagtttgagctcaaggccaaggagaaagagaagtgattggaggggaaagagcgggcactggaggagcaggttcgccggttccaggcggcgtaggctgctcaggcgacacagacagccctgggcccccaggcggtggaggtgatgaggaagacgctcgatgaccttcgggctaagcaacgcgccggggcccagcgcatcgcctcctaggctggcgaggcaagtacggtactggtgtcgttgggggtgagtcccatcccagcgttggtgcggccggcgtccatctccgacgtgctcccggtactggattccgctgctgaccgccttcgacgtctggatcagattcttggtgcccacctggaggccgagggcagcagactctgccagtcggcaatagagtacgtcttgaaatgtttccagagccacgacccggctgtctccttggggtcagtgatcgcaggtccgatggcc

SEQ ID NO: 6008 - DNA, 517 bp, Zea Mays
cccgcgctccccgctttcggcccaactgcggcctgcttccgcgcgcgcgacagccgctccacacctcgccctccctctcgctgacaaggcgtccccacccgtcagccacccgctctctcgctcgctcactccctctgaccaagtgaccccacgggtcagctgcttcgtcgtccgtccgccgtcccctcgccgaagtcacctccagccgtcgcctccgtcctcccctctgccatcctgccgcacagggaagtttggcaccgctccgtcctcctccccttgaccagcgtcctcgccggtaccacctcgccgtagcgtcccctcggcagcgctgtgcgccatttatggcggcactgggaagctcgccggagtccgggagctccaccgccccccttcccccgcgcgcctataaaaagcttcccccgagctccttcttcctcgcaccagcttcggccattcctctcctccctcgtccgagctcaattcgtggaaaggctgctgccatcgtcttcctccccgg

SEQ ID NO: 6009 - DNA, 755 bp, Zea Mays
tataacaaagttagagatggtttgttaggctacaactttgatatagtgagatgatcgagtcactgcatgaattttggaacaactctccctgccattcgctctgtcaggctgactgaacaagttcttgatggtacagtaagcaaaaagatatgttggttcagtgaacttgtcgccagcgacccccgcatctggatttgcgccgccaaggtgattcgtgctcactggtgtccggataacgcctcggggtggaaagatcttcaccgctattgagcttaaggcattgttccgccccgaccgccgtgtccgcttggcccacggccgagttcagataagttcaccgaagttagtcgtcttccgctcggatgacacgtgcctagacgcagtactttgtcgtagtgcctcgctctagcacatctggtcatcgccggtgagcccgccactgtaaatgccaccaatcgcttgcgccagagcacctcctctccggccgccgctcgtctttccccgaattagtcaccaccgcgcaaggatcctataaattgagcacaccctcgactctgctaggtattcaagcaaccagcacacccactcgtgcctccaattgttcacctaagcccccgaattgctcacttccaccaaatcgggtttccgccactgtaaaaaggtcctcgccgtggctagcttgtttcaggtccgatcttatcctctgctctcttgtttcagcacccttacatgcccctgatgctcctcgactcgtt

SEQ ID NO: 6010 - DNA, 285 bp, Zea Mays
aggagaggacgccggagagaaagaacggttgcgccagccaccaataattacgcacgaagcagtaaatgcaatgcgggagacggacaaccagcacgacagctgagcagaggaggcaagcggcactagcgagcatcaatggtgtatggcagttactagcagcgcatgagtgcgggagagcagaggacaggacgaagcacactggcgtgctccacagaagcgaggagacgcgcacggagacgaggagacagctaacaggcgagctagcgcggtgtcgaggcagcagaa

SEQ ID NO: 6011 - DNA, 546 bp, Zea Mays
gttattgtggagactgtcctagcctcaatccactttgtgacatattcaacggcgacgaaggtgaacttgagattccattgagctgtgggcagtggtccaacgatgtccaaccctagcgttgtagtggccatgtatgggcgatgagcttggttaattgcgaagggtggcctaagcgaggagagaacttctggcatgcttcgcatgaccttgtgactcgattggcagtgcaattattgcgggcagtaaaatccctgacgaatcaccttggcagcgagggccttgggtcctgagtgggagccgcaagttccactgtggacttcgcggaggatttctatgccttcggtttcgattatgcatttcagcatgggctaaccgatcccctttttgtacagctgacccttgactaatgtgaagtccctgctcctgtgctttagtcgtttggcctcattgcgatcggttgggtggtagtggccttgcaggtatagtgttattggggcccaccagtcttcgaccatgatgaggttgacgatgcggtggccttcagtg

SEQ ID NO: 6012 - DNA, 415 bp, Zea Mays
cccgtgcgcgcccttccccactacccctgcatctgtatggtcctagccgcaatcggccatggaaggaaaaatcatgtcactgccacagaaggaaacacatcccctcgccgctatccacgccttgcaggaaccccatcgccgacgacccgcgcgcgcaggaccaccccacccaatcgttcttcccatgcaccgcggatgccccgcccatatcctccgcaccccaaacggaatccacgcctcgtcgccatggaaggaatcgcaacccaatcccctcgtcgtatccagtgcataggaccaccatcggcccgcatcccatcgcaagtgcaggaccaccccgccatctcattcttcccattctacgcgctagccccgcccgtatcttgcaatgctcgagtacttcccattctacacgcca

SEQ ID NO: 6013 - DNA, 664 bp, Zea Mays
accagatggaaatatttagtgttcgcatccccttccagcaaacctttagtttttgctctctggtaccacttaacctcctcttctcgtaacatggccgcgagcctattacgaagaaaactgcgcatgtctacttcttgtgtagaaagaagacatgtttcagctttcttatcaagggtgtcaagtttttggagaatttctttcttttccttcttatttgatccactcgtgttttttgcccatcctctcaagtattgtcttaacttccttatttttcgctgccatctctcaatggcagtatctccaccatactcctttgaccaaatttgagtgaccatctcccagaatccctcccgcaacagccatccaagttcaaacttgaattcaggctgtacggaggaagcaaggttatcgccactatttaaaattaaaggggtatggtccgagatatctctagagtgagcaactactgtggacctaggaaactttaattcccattctgtggagacaagaatacgatctagcttttcatatgtgggaatagatcttgaattagcccaagtgaactgtcttccggacagttcgagctctctcaaattcaagccatctattaccgcattgaatagaaaaggccatctcgaattaaaattgtcgttattcttctctg

SEQ ID NO: 6014 - DNA, 356 bp, Zea Mays
attgaaccctgtgaagagtagggggctagcggtgacacgtggcacctttggagcccattttgtcgagctagtgagagccgttgtggaggagctcattttgaaggtctaagtggtgaggggtccccttgtgccaccacgtggtggggtcctagccatgtaggctgctatctctttagagggatcttatcatcttgaactactatgaaggtgggactagtaacctatccttccgcacaggtatagttggtttgtattgcttgaggtacgcatacccaagggcattgacgtggtggatatccgccccattgcagtaatgatgaaggttgaaattatggaaagttagtgttcatcccctg

SEQ ID NO: 6015 - DNA, 1052 bp, Zea Mays
gcttcttttgttcatatagtttccttctttaaacttgtatcgtatattgatatgaagcttgaattctatgaaacactagtttttactgtcctgcttaattttgttatgtggtcttcttgggcccccttgaatttctattctatatccgccattgaggctacgtgcatagccaaaggcacgataacggaccaaaagatcaccaatattaaccacgatgttaatcaaatctagggctagataaatagtaaaccatctatagtaatatcctagatctaatctacaacatgtatcatggtggtgatcctaggaacatccaccacttagagctaatgatcatacacatgaacatggattatgacctttaaagaagttcatcctaagtaaacaatgagactaagcatgtaagatagggaaccagatgtgtatcaatctcccaagttgatgcatgcacatgttgcagcttgcatgtcatggagtgtagcaacagatcaaggaatacacatttggtggtgtaaaatcgatctagtaacatgaagcttaaagatagaaatatattgaaactacatatgataactaacagatcttgctaataacaacacttagtacaagacatactggggtaaagtggtgacactgtactgccctatcacgatctactaaagaacgcatccgagcaacatggcacttaccttggaaaaacccttgggaaatggtggcgatgtgatgaggatacgagaagcatacactgcttggtgaatgaatgtcttctgtttattatcattgcaaactattacattatatagtcctatggacctaaagtgataagcacttcctagccaaactttccatctaatctactatctatctatggcacaatgacccatcttaccacttaggttgaggtctcccgtcgttcaagtctttccctcggacagtctaatgcgcatatgaacaaccccttaccctctccaccactttgtaaaaaagagcccttcacctgctttaacaagaaaaaaatgaaccttgacctatgcaaccacccgctaaaaatc

SEQ ID NO: 6016 - DNA, 389 bp, Zea Mays
cttcctcagggtctggcggccctgcttcctctgatgagccacctcctcagcctcctcatcacccatcctcctctcgcgccgccgctgcctcgcgtccgatggaccgcagcgggagaggaagtggtccgggccagggtcagggccggggccggggactgttcattcgtctggccaagggccttcttggtgtcttcgccatttgccgcacccgggcggtcgaggagtctgtgcgacgtcgcaggaccgaccggctgcatgatgatcttcgtcgttatgcagccgcgactggtcatcctctccctcctgggtcccctccacctccagcccctacaatccccgcaaaccttaatgagtggcaccaacaggagtttggtgtgccattcattacc

SEQ ID NO: 6017 - DNA, 600 bp, Zea Mays
cttagattacttagctgcattggatttggttgtgttggggtctccatcgcgatctgctcctcgcgaagcgctggcgacctcggccgaagcgagggctgaagactcgtggaggcggagggtggttgtgtcaaaacagagcaccagcgagacttcacgaagtggaagacgtcgccgaatgggtatggaaaggtctcgtcttcgactggatcagggtggtcagcgcgagctactttcctcgacgtccgggacgtgcattggagagggggacttgtgggacctatttgagggggaagagttgaggatgatgttgttcaatttccaggaggcgggtcttattctgaaggcggagcctatgtgacattttagttgccctaactgctcttgttgtgatagtgagtgaaaacggtgccctccccctcttcgcaatagagttgtgagggttacagttgtgatttgtattattgcgtgatggtgccgttgagccctttgtttgttgtatatttgagattgcgcgcttgtatgttgtgcttattgcgagttggcttcgatttgtaatcgtgttcgtgtcgtagggatgactatgcaacactttagttatcg

SEQ ID NO: 6018 - DNA, 517 bp, Zea Mays
ggggcatgtctagcaacggatcaggcgcgtgaggcgatgggcgacagggcgacgagcgagtgaggggcacgactgtgggggataaataccccctaggtctccatgggccggatttagcctatgggccgccaaaagacctcggcaggaacgatcgacatgcctggtgggatattcagtcgacccaagctagaggataacgacgtgaacctcgaagacgcgagcgtaactgcttcgtaactaattcccacacatgcagagaagataaaccaaccggaccacacacatacatgttagtcgtagttggttctgcagatataggcatagaaatagtgatatgtttgacctgatgtaaccctaaccttgtcaagtatacaaggcggattagggacccctacaaaacgattggatcttctcctaggctagctagagaattgttcccacgcactatgtaattttgaactcaagagcaattccatcacaacaacacacatatgatgtagcgtattacgcatctgtg

SEQ ID NO: 6019 - DNA, 3159 bp, Zea Mays
gaaaaggcgacggccgcctgggccctggaggagcgagaaggcggaagaaggggagcggcagtcgcaggccgcagctcgttgatggtggttagggtttcgccgcccgcacgctcgacctgctgaagaatcgcccccctgttgaagaggtctgcgcctcgccctataaggctccggggaagaggagatagacatcagtggaccccggcgcgcggctgatggcggagcaggagcggagggacgcggaggctgggggcgatgccgcgggcgcagcggtggcgtctcacaccagcagcatgcaggtgaggtctccgcaccctacttctcggctgtcctgtacgattttgggagctttatgatgcgtagatccgctcgctgctatttgattggctaaacctgcgtccgttgcgtgccttcattttagtttgttagtgcgtagtaggttctggaagggagctgtcggaattttgcatggaggcggtggggaatttctgtgggccaaccgtgccttagatccgagttagctgccgttggagctggtaaattattgttctgagagggattgggtgtgcttatttcttggtgaactgtagtaatgagcgagatatcataagacttggtttttttgttcatgaggaatatgtgggtatgtttttttttgttttttgtgctatccccatgctgctgtaccagcacctgcatgtttgggaagtagtgaggcctgctttactgtggagttagcctgtgtcacttggtttctcactctgtcagtgaacttattggtgatagtctcgatgtgaacagttcagcacaatgagattgacaatttaaacaaagacgaatgtgccctgagcatgatgtaatcactacccatatgccatatcatttcgtaaacgtggggcatacttgattgaattatattgatacaatatatcagctactaccattttgattatttctatgccggcagtagtatccttctatcttgaaaactgtagagccttcccatctcatctgaaatttctatacaatcaaaagttccagcttaggtggatgtgatctacattgataaacttaacatctaggaagtaggaacagaagttgttttgatttaaatttattgcatcatttgattatatgtaccggtgggattttgttcctctgaagccaaatatcccaacttcattgaatgtctcacttcattgtagaaaaacaatcgacttttggtagtttgacctaaaagaaagataataaaaggcacccatgatactccctttcagtggttgttgcgtatgtcagaaaggtcaaaacagcttgtgatacctgccagctgatctatggtcatatttgtatccgtagttaactagttatactacccaatccaagtatcggtcacttcagtattaaacaaacactgatagccatgatttgttagacattgttgcaatggactagagcacgtgatgaatgtttcacttgcacagaatttttattgtggataagaggcccttgcagcagcatgtcattaggtctaggtgcagcagaggtaccaaggatagcaaagtatgacagtagctgggcataatgtgggagagcctagagtgcagatctaaccacgtcaaaagtcctacaagtcttaacgttcatatgattagaccgaaattttgtttttaggaatttgcaaattttgattagttcttactgtgttagtcattggtccaacgtccaatgaatgtttaatttgtgttaactactagcctttctagggtatctatatcgaggaggtccacacgcataatataatgatgaagcattcttctattttctgtctctcgagctctctagttctctctaccaagctatatctgtctgtctcattacaatccttaaccccattcagccatgtatattactaacgatggttacaattctaactgttccagcgtgtcaaagtataccgtttggctgatggtgggaagtgggacgatcaaggaacaggtcatgtttctattgattacattgaggtatgaagaatttctttgctaatatgggtggtatttataatttcttattcatgggtctaagctaattctcatactttctcctgattttctttgatagtgcccaaatatttgtttgcctcttgatctactttagttttgctaccctagtaccttgttgcaacatgcttcatttgaccctcattctgtttctacaaataatgaaattgtcaactattcatttttttcactgtcaagggaacagtgtcccaatgtaaaactaaagaaaaccttgtcgaagtagacatcattttcatatttcatactgtaatggtgattcatggaacagtgtcccaatgtaaaactaaagcaatagtccactaaaaatgaaaataagcacaaattacttgatgatgattcatggatcaatatatcggtgtaaaagtaaagaaatggtccagtacaaatggaaacaagcagaaattacttgtagtctatgcctctatggcaccatgatattctgtcattgtattatgatttctaatctgtgtgcttactttttggaccttatatgatttattatttcgttggtttcagggttcgaaagaactcggtttgactgttttagatgaagatgacaatgagacgctacttatgcacaacatcacatctgatgatatttacagaaaacaagaaggtgaactaactcagtatcactctgtttttgagctaattcatatcttttttgcaacttcctaatccatttcttttgttagaaacaatcatttcatggagagatcgtgaagcagcgacagacttagcactaagctttcaggaagctgcaggatgctcctacatatggtgattgaagcaagagctgtggtgcagttaccatgtttttgttcaattactctttttggtttatttgtgttctttgttggtgctttgcagggaacatatatgtgaaattcagagaaaccttcagttcagtaaccttggtggtgagtttttaaaaatcagctgtgactgtttattcaaccacacatttgcatgcagcatgctcttctcattttaacgatgcctgcagctccggaagttggtcgtcgtcaatcatcagaatctctagaagcctctagaataatgcattcaaatggtacacccc

SEQ ID NO: 6020 - DNA, 362 bp, Zea Mays
ggctctgggtaaaattttctaagactcagctcacccgcacagtggaccgcgggttaattctataaaactacagggactctttaacaaaaattacccgcgaaggggtatcggtcactgtgggtcgttggatctaaagtgcgcgctccagattagaactgtccacttcgcgaatcggtatgggatcccagccgtaggcgtagggatcaacgatcatgattttaaacagtcggccccagtcatacccgcccgatctggcatcaaaggtcctccttcacccgatcgaaggaaggcaccagatgcaatcctaagggcccatcgccaaatcgacggttcaccctgaccccgagtaaaaagctacccct

SEQ ID NO: 6021 - DNA, 476 bp, Zea Mays
aacaaaccaaatcaatctatatataatctaatgcaatttgtaatactgttcacgtgatacaataccatatgcccccctgggctggctccacttgccataacactgctacacccctccatgacagcttgtcctcgagctctaggcctgcttggaactgtggctgagcaatattgaaggtgatgaagcacatttaagcagtcagttgctggatgaagacaaccgtgacaacgatggaagatgtgtagaaggcagtgccggtgtggtagacgtttgtggccaagaccgaggagaatgcctgctttggagcggacaacgtggctctagagatctcgccagagatagtgtgcatgcgggtggtatgtggagatgaccacaaccacggagatgccgtcggctgtggcgtgagcctgggagcccatggaggaagcgacgtcacggagaacacatcactagtacaatttggcgctatacaagcg

SEQ ID NO: 6022 - DNA, 465 bp, Zea Mays
atcatttcaaaaatgctttccccctttccttctctcagaagtcagatggaggtttgctgccaaactagcttttgccagaatgaagatggtttccccaagttgctgagagcatgcacagttcgcctcggaatcaagagccagccagagtatgatggtcgtgaattcgtcgagcatggcatagagaagtgtgtcgtgactgtatacattggatccagtctgcaccatgtggaatggagtgtcactgctgctgggcacagattcaaagacacctgccaagtcgtcgctcgcaaggcattgagggccctgtgtcagatctatgaagaagaagtggccgacaccccactcagattctttccgccctttcagagaaaccgtccagtttggatggccaggatgcgtgcattggaagagcagcaactgcttgtggatgaccccacaatcgtgtacctcactgcatacctgctc

SEQ ID NO: 6023 - DNA, 365 bp, Zea Mays
ccggtattggatagttaggatctagtcgcgtgtacgttgaacctggacccttgatcatggatccaagggccccgtttgcgtaccggttcgggataaaaccgatctaatccgcaccgtcagcttgtgatccaatagccgagatctgactgtaccccttcgcgggtcaacattgctaaagagcccctgcgcttatcagaaaacaacccgccatccactcatactgtgctctgtgtcttagaaaacttacactgagaaccctgtgcttaccagaaattgacgcccagttcagagcccgtttaaaatgtgcaaatgaattagtaaatgtatttttaatacaagaataattgctagaacttggaaaattc

SEQ ID NO: 6024 - DNA, 468 bp, Zea Mays
ggtcgctggcaagaccctccccaaaggtttgctttctccttcttcatgcgtagctctagtcgaagccaggtttcatggacttgcgcgttggtgtggtggtgctccagcgcgtcgcggccaggatgggtggggcgccgtcatgcctggtggcctggtggaagaaaacacctctgccatcgatcggatacttaacggccaggattctgagaaacgtaccgctttggtgggttgggatccagaccgtagatctcgtggttggcggctgtgattataaacgttatacccttcgtccaaatcgtacgcaggccgtcgatcctggatcgttcggtcgtgcggctggcatcgttgtttaaaatctccaccatcgatcgcccatctcacaatcatcagtgagtaccggttcaagaagggtactcgatctaatctgggtcttgcgagtttgatcggacggctcaggcttgaagttac

SEQ ID NO: 6025 - DNA, 341 bp, Zea Mays
agagttgtggcctccaattttggattggtgcgctggcggtcggagaggaagaagatcactggtgactcaatcgtggcgttcaccggtgcagcggttcagagagggtaagcctagatgtgccacggttactaccgcatagtgaagagtcacggcgtggcataattgaggtcaccggagtgtccacgacgacaccggcggtctggccacgtcgcaacggctacaggcacgctgataagcttccctgcgaccacatctgcttccccgcgagatcttttacctccccgtggatatccactgcgtgctcggcacaaatcatggtgaccggcgcgaatccgggtgcg

SEQ ID NO: 6026 - DNA, 330 bp, Zea Mays
tacagatactcagagttgactaggggcttcaccctagacatgtcagaacaattcactatcccatctgaagtgacgacaaaggaaaccacgctcgaggacatcagcaaagcttctagtcttcagggacgcaacaaagttcttacaggccaccaactccaagagggagaggaggaagaagcttcagaggaaggttcagctcccaacacaggaggttgttctgtttattctgcggggaagataagggacacacaacaaggatgtgccaagtcacgatccagaagcaaaaagagatagctgaagccgaagcaaggtagaatcagccgaagtagg

SEQ ID NO: 6027 - DNA, 544 bp, Zea Mays
tctgattcttaaggtagtcagttatatttcgtgatcttacattaatcttgatatctatttgtagcaaaagttggttcttaccatcaaaagtgttaggagaatgaaaccctaactctaatgcgggttaggaatatattaatataactgagtatgtaggccaaggcccattataggagagaaatacatagttacgctaacacccccctgcagtcggtgttagggagatttgttcctttgtttttgtgcacgggaaaaatcgggacatggtaaaaagtggagcggccaaaaaaaatctgaaaccagcagccagattgctggaaacagagaaaatcataaatagctgtaacgttgttaccttttgatggtaaatatctaaaaccgattcttttgatggtatatatctaaaaatgtgttcttttgatggtaaggatccaatttcccccaatgttgtaatagttgggcctagctttttgttgcattgcctgattcacatgcatgactcgtaacataatgttatgtcattgtgactgtgaatccttgattg

SEQ ID NO: 6028 - DNA, 753 bp, Zea Mays
ggagaatcgcctgcgcgtatgggtgctcatcgtagcgtcgttgacggggaagacccttggcgtcaccgtgatttcttaccggaatttgggaagccgccgcgcgccgtgggcagggagctatgccgcgtgattcacggtgtgccctccctatggtgaaccgccttgttccctgctatgcgttgaacaagttgggtgaccatttggggcattgatgtcgggttgcgtgtctctagtgtgccatcaccgctgttgcacggggcgccgccgccagacatcgtcgggggtaggaagaactgctctggccgttgatgttgaatgggcggctgggattaggccggggaaagggttcggtcggatctgatatccaccgttgatgtgtgggatcgatggttggggattgaatccggcttgattgaatctgggccgaggatctcgagatcaacggtgctcggtgcatcgcagttcacataaggcaagttatgatctgggccatcggtttgtgatcgtgcggctcaggtttgatcataccccttcgtcgttgttattatacttaagagaccctggaaaacatgctattcaacccgccatccatatgtgggaatctcgagtcttggggatttttgcagatctgcccccgagctactcattattggatgcgcagtccaggggaaaataaaaataagaaattaattatagaaattgatttttaatacaaaaataattctagaaacttgtgaaattcatagttaattc

SEQ ID NO: 6029 - DNA, 549 bp, Zea Mays
gagcgatagaagattgtatataaggctaaagtttcaagtagacgaaatcgccctcagcaaacttgcgatcagagcgtgttttgtcgtcctgctgtttcatgcggttgagcgcccgaaggagatgctggtggaccatgcgagacatcaactcatgttgcgataaccaagtagacacatctgaatttgcaatggaatccacaggtgtgatgccaagctgtcggggagtgtggccgtacagaacctcaaatggtgagcgacccaatgataaatgaaagcatgtgttgtaccaaaattctaccagatggagccactaatgccttttagctggacaagtgtgcacgaagcagcgaataaatgtttccaagcactggttgacatgctccgtttgtccgtcagactaggggtgataagcggaactcatacgcaattgtgtgccggccagagtgaatacttctttccaaaaggtgctggtgaaaacacgatctctatatgaaataatagcctctggtaatccatgcagtctatacactgtcgacatgaataaatgtg

SEQ ID NO: 6030 - DNA, 552 bp, Zea Mays
gtttgaaggcagcatcaatgtggctgcttgaaggcactatcgtgcctgtaggagaacgaataggagcatgagcaccatgtgggaaaagcgccatataggagaggggaacagaggtggagcatcatatgatcatatccataaggatgagcaccatatggacatccgtacgagtatgtaggagggtacgaataagcgaaaggttgaggaggaacattgatgataagagctttagtgataggaggaggagcgtctatcttaggaggttcagtggtaagaggggcatcaacggatggctggtatggaaatgaaggaggaggatagagatgtgaaaatagaggttatggaatcaaggaatggggacaagcaggaacgtcctcctatcgatgatggacgggagaaatatcattgaagaagacatgactcacacctgcatgggtctcgggatgttgtgaagattgcgtagtgaacaagtcgatgaacgtaccaaagttcggactccaccttggatctatatcaaaacagattgaaagaatacaaatggagagggcttat

SEQ ID NO: 6031 - DNA, 443 bp, Zea Mays
aattggcgtcgctgaagtgtgaagggccacttcacatctgtagtgttgagggcaatccttggtattaagacttcttccccaacatttgatcctgtaagcgctacacagtgcaagatgcgttgaccgagttgagtgacaagaagtcgtgtgccattacagagacctttactttgattcaggttgcgcaacaacatcacaatggcacccttttttagctcgtgtttgtgggtagggaaattgttcgcatcaattgagtttaagaattcggtagggtagaggatgtcgaagtctggtatgtgttccgatgattttgctataacatcacaactcaggtattggatggtgtctctagggacaagcgagagaacgtagttgttaacgtcatcgactgtggcattatttgggcaaacaatggcacgcgaggaaaggtacgtgggatctcg

SEQ ID NO: 6032 - DNA, 677 bp, Zea Mays
ggcatgatcagaccagaccggccaagcatcggcatcgccatgacagcagcagcagcgaggagtgggtgaggtgaacgcgggagtacaaacagaatccaggcgacaaaacgaagggttggtttcaccaaccggcctcgccaccagccgtttctcctagtcactctatgccttccggtgacgcatcgttcaggcgtccacgctagcagtagcagggaaagagtgaggtgaggctagcgacaaccgggaacctgcctgctaccagaccacggatgtgaacagaggtggaagacgacggcgggcgaggacaggcaggctaggcgactactgtacgtcgtcaaccatcagccagccaaccactgctgcctgctcctcttctccccgccgtcggcctccttccctgttgacccggcggctgttccctttctactacggtactaccacttttttgcactgtcgactactagccacagttcagaggtcacggcatgggttggcggaatcactactacgctgaccttgtggtcgaccggccagctccgcctctgcctcccgttttgatctcgtcaacaacaacctgccattttgtctctcgtgacggacgtgacggacgagtgggatcatcagagcaagaatggaacggaagaagaatcaccaatcaatgtacatgcaccaagaac

SEQ ID NO: 6033 - DNA, 310 bp, Zea Mays
tgaaatgctaagatagcaaccgaagaattcaccagagaggatgacagagatgatgaattggattgtagcctacacaatccgcaccataaacatccactgatctccacaactacgaaaccccataatgtttacattggggggaaactcgcttgggttcaaatgctaagagaacaacagaaggactcaccaaagaggacaccagagatgacaaaccggattacagccgagacaattcgtaccacaaacccctcgatctctacaactacaaaaaccatggaggattccacaaaaagccataaaccacctaggt

SEQ ID NO: 6034 - DNA, 349 bp, Zea Mays
ttattattaaatacgggggactcctgctcgagcaattcccaacatgcttttaagtttgaactaggctggttgcttcgggatgggttctacgatttagtacaggaggtatggtcgaatgagtctggcggacagacacctttagagaaatggcaaagtaaaataagaagactaagacaatacttgaggggttgggcaaagcatactagtggtttatataataaggaaaagaaagccatccttaataagctggattggcttgataaaaaagctgaagtaagttgcctatcagctcaagagcttgatttaaagcattacttacagaatagactggtcgagcttctcagggaag

SEQ ID NO: 6035 - DNA, 581 bp, Zea Mays
gttgggcagacccacaataaaatccatgctgatgtcatcccatttccatgaaggtattgataggggttgcaaagcaccagttgatttcaagtggcttgcctttatcctctgacatgtgtcacattctgatacatattgggctatctccctcttcattctggtccaccaatacaagggctttagatcatggtacattttggtgcttcctggatgcatggagaatttggagagatgagcttcatccaagatcttcttgagatccttatttttaggaaccaccaatgtgcttccaaaccacaatatacccttcccatcttggcagaaacacttatacttctctgtcttctggtggaggttctccttaatgatttgcactcccttgtcactgagttgggccatgattatctggtcttgcaaagttggctcaacggaaatgtgagacaaagcaccagaaggaatcacttcaattttcattttgttcaactcatcacacagggtgttgatgcgagaatccatcataacacagttgcattgcgatttccgactcaaggcatcagctaccacattggctttccctgggt

SEQ ID NO: 6036 - DNA, 450 bp, Zea Mays
cgggagcgggggagtctgcctttaaagggggttcatccctcgagtagcagccatgccttgcttctctcccactcgcggcgtcctttctcctccgagctctctgcgcccctttgccttcaaggtctctgctttgtgtcaccatagtttaccatggcattgtaagttcatcccgagtgtgcccagactgagtgagtgctcgacatggtataccgcctgcttggatgggatgcgccggcgttcggcggaaggattttcgtcggcaccctccaccccagtgaacttgccactggagagttcgtgccttttgtcctccccagcgggttggtgctgccgatcttgtctttcctctgctggaggtgcgcggccttgtgggagcggcgctcttccaccggtgcttggcttcaaggatgttcatcggcctcgcggtggtggagagcgagctgagtcgtg

SEQ ID NO: 6037 - DNA, 549 bp, Zea Mays
aggccacccttgaggcctccagactgcagtttggtttctattgcctagctcttgaggacacatttccagctctagctccatcatcagatattagggttgaggatgaggccatcagacaatttgaggatcagggtgcagttgcagatacttcttccgatgatgatgaagatctggggattccgccaccacctcctgtgccatctcattcatgatcacgcggctggtagctccagtgctgctcctccgtctgctcctccagcgattgaccccgctctggctgccattctctagtcactcactcagcagtaggctcatttgaccgcagagcagactaggcaggcagctattcagcaacaaatgtctgagcggatgctatcgatgtttcagactattcgcagacagggcagagcacatggcgttcatgactcacattctccagcacaccggtgttctgatccctccagtgcagtctgctcctcctctagctcttcaggttggtgttgtgtcagctattcagttaggaccccagctccactcttttggtacgtc

SEQ ID NO: 6038 - DNA, 653 bp, Zea Mays
aaaagaactcatcaggctgctcataacatctttgggaagtggaggggtgaatcctcctccatgaaggtccccaacaacagtgtcgtgacgaccttgacccaagcctcaacctcggccagcctaagaggatcgggggaatggtggtcggggtcattgacgccggaatacttgtacaagtacttcagacaggccatcagaggttgaacccgacgttgcataaatgtgtgcactagccatgcaccagtgaggccttgttatttcaacgtgtcgaccacttttagaaggtgctccaccttgctcttgaagtgcgcctccatgccataatgccacttgtatgtcaacatcggctcccgtctggtgaacgacggagcgctgccagccacattcttagcatagaaccactcgcctcatatcacacaaaggagaggagcaggatcttgaaatactctgcattctggctgaagcggagttggatgttggccgagccgacaaacaattgtctgccacagcctagagtcacctgcacgatgaagaaatactaccacagcttccagtagggattgattcccatgaaagcctcacatagcgtaatgaagcacgctatgtggaggattatattagggtggaggttctagatctctagctggtagtag

SEQ ID NO: 6039 - DNA, 571 bp, Zea Mays
agtgaagaagtagtggtcgggctcaaattataggcggtggctggaatcagatgggattcaaaagatctccatgtgcgctggcaagctcgcgtgggtaaggccacgaccaatgcccaggtgaaacgctttggccgaacggcgccacctcatggttacatgtgccatgtcacggaagatttttactgcggccgcaattccgagcagtgcccacggcatcggtggcgttcttatccccggcgaggtcactgaacctaggtcgacatcgtgcctgctagcccgaattcaaatagacattacgccctatttcatgtgcttacttgcaaatcggtccgatcgaagttgtgcattaatcaaggttctttcactttgttacaacgatcataccgaaaatccccatggattaagcacgcgatgatgcccaagttggctcaataacactgaaccttggcttcagtcagatgcagtgatcacatttctatccccatcagaccgactgacagcgctacttcaaggcattgttactttggttttcgtacaacaacaacccaaccttactttagcaaagttatgc

SEQ ID NO: 6040 - DNA, 421 bp, Zea Mays
ttttgtttgtacactaaatacgtatataatttgactaactgtttttttcagaacttacaaaatttgactttccctgccaaagtttgccttacattgatggacacaaggtgtatgttaactccattgtcccattgagaagatcaagagttctgtaataaaaaaagtattggatccctgtgttaatgctgcataaaattctaaaagttaccaactagttgtagtacaccttttaacaggagcatgctgttatggcattggtgagggggtaatggtggttcaggtgatgatgatccttggctacgcaagtgtagctgcgggtatagttgagcgaggtttcacccctttagctccctattttattggagggaagagaaataggaagatcattcattgcttgattatgctccaagggccattcagc

SEQ ID NO: 6041 - DNA, 845 bp, Zea Mays
gaagaggtgagcacgtattagtcacatagtcataagtatatgaaatgtgaataaatacatacacaagagaaatatggcacaggaaacacaagatgagacgatcgagaggtcaaacgacgtgaaaacgacgtttgaaagataaaaagtgccataggaggtttggaatttgaattgaggcatgaaacgatatggaattgagccgatacttcacgaataggtttatgtagatgaatatgagtgaagtgtgtgcttggtttgaatttaggcgaagaaaaagagatttgtgcactcggctcgtaaacgatcgctcgaaacggggaatttggtgaaatttaagcctggaatctcggattggcgtgaaatttgacaagagtgttactggaagtgttgggaaggtgcctgaaaaatttgggtttgattggagcatttttggctggtttgggcatttcaccgagcacgtggcgtgcgaggaattaggttttcggtgaaatggccttttgaggtgggaaaaccctcccgaaggagctaagaacctgcaggagtgttcaaggaatacaggggaacacaatacacaacttggttgcactggatttcacaggaattcacaagattttggaagagatgcacaagggggtggcacagtccaaagaaacagagagaaagagagaagcagaggggaggaaagagggagccagagctgctcaccgaggagggaaggagaggggcacgaggacgccgtgggatcgccggtggtcgccggagagggggaggtcgccggcgagtgctgggaatcgccagagacagagagatggcgctggtgaaatgagcctctggctcggtctcgg

SEQ ID NO: 6042 - DNA, 461 bp, Zea Mays
gtttttgtctgttttctgtagtcatggacgcgagggtcactttctactagttatagtgtctgctcttacgaaaatagtaaatgcatggctgactaattttactggtttgcactttgtagtaaaaggggaagagaatgaaagctgctaaacgtattattttggtcaatggcaaagtctacgtgtctcacttttagctccgcaactgcaaacctgcttatttggtaattgatatttcactgacctccttagctggcatttctggtactagtcaccaatgcctttgtgtactctgactggcaaaacttacaggtcattatatattccagtcactaggtgcgagtgagcttcccgatccgttagatcatattatccaaccatagatgcaaccgtggtttgttaggtttttttaagctagtcaagctgctggtggaaggatttaagtgttaaatgtgatatacgac

SEQ ID NO: 6043 - DNA, 392 bp, Zea Mays
accagaaggtcgtcaagaagagggaagtaaagtacgattcactgtcagccttgctgcatcagctccccattgtaagtaacaccacgtcattagccgatattcaatctgttaaaatttcttttgataatcagattaaaattataatggaggatatagagaatatgacgcatgcattagaaaatactcatacacctgattttttgtcacgtaaactgggcactaaaataaatgcgtcaaaaacatcggcgacaaatgaggcttcttagtcccaaccatattctggtatgccgatggactcatatccaggacgaccgtcaccaccatcttcactaaatggtgagtcaactataagcacggccgaatcgtccgcacacaatcgcggaccgttcggc

SEQ ID NO: 6044 - DNA, 609 bp, Zea Mays
gaacgggacctcaggtatcaatcacccgagggggacctgaaggatgtcttcactggggactctgactccggtgacgacaactaccgccgcaagaagttgtacatcgtgtacggtgggagctgggagctcacctcccgcaggaacgtcaagtccctgcgccgagaggtcctttcggcagtcccgggggtcccgaaaggtgctccacatcagtggtggaggagcaccaccatctccttcgaggcatccgactgccccgacaacatggcaggggccagtgtactaccgctcatcatcgctcttgtcatcgccgacatgcggctgcaccatgttctgattgacggaggggccgacatcaacgttatcagccatgctgcattcaagcagctgcagatcccagggtcccggctgggaccctctcgcccattctctggagtgggcccacaaccgatgtatccccttgggagcatcgcactcccggtaacattcgggaccgaggagaacgtcctgttcgacgtcgtggagcttaacctccccttcaacgccatcatcggcagaccggccctataccggttcatggccatttcccattacgggtatttggtcctcaag

SEQ ID NO: 6045 - DNA, 287 bp, Zea Mays
agaaatgaattccgcgggagcatttttattcggaaaaataatttagcgtgacccgagtacgtgttttgggccaagcccattccagcccaacccagcccaataggcccactaagaaaccctaaccctagggcttcttctataaataggggtgctcacttggcaaattttcactcccacccctctaagtttttcagccgtcactctctcttcctcctcctcccacgcgcagcagcagggcaccctttcttcctccctgctccacggcagcaagcagggagctcggctcc

SEQ ID NO: 6046 - DNA, 304 bp, Zea Mays
cagcagcaggaccggcaccagaagactcgatcatttgggtttccacccaaggggcccaacttcagtagaccagctggacccactccgtcacgattcagccagcagagtcagagcgctttccattccccctcagtggcaagcaaccaacctccggcaaatgcatgttggcactgcggtgatccaagtcacttcaagaacaaccgtccgcaactgaagccaccgggacccgcctactccaactcggtgaatggccccaagaatacctcggcatccgcccccaaggcgccctccgccgtcagccagc

SEQ ID NO: 6047 - DNA, 288 bp, Zea Mays
cggagcagttccacagatgtggccgcctccgggcgccgggcgggccccgcatcggccacgtccacgatgtacgctggcttgccttccgttgattgacgcgggcatcggcctagctcccatgtgcggtcgtcattgcctcggcgtcagatgacgctgcttatgtggtccgtgactccgtgcgggtccacgtgcagcctgtaagggaagagcgggtcgacgcgtagccgtcgtcgccataccagtagtcatctccctcgctcccatgcctcaccagtgacatgcatggct

SEQ ID NO: 6048 - DNA, 565 bp, Zea Mays
aaaggtggtcggttcagtaaaacactgaagatcaaaacactgtaaatatctaaagaacgctgataaagatctgaggcactgtagaactggatgtgttcgagtgatctgctgaagggaatcgatcgtggggagataacttcagacgtggcaccatcccacgaacctagccgagagtggccggagatattccaccggcggtcgccatggctcggtcacttccgccgtggtgtcactcatgcctcgcttcccccttactgtgcctcttctttacatggtaaccatgcgtgaacaatgcaatccacggccgtggatcgttagccggaccgccgtgcctataaatagcgccaagaaccacggcgaggcactcacaacttcatcagtgagcacgattgaagccaaaattcgcactgtctcctcctcctttccccaaattaagtgtacacggtgaatcagtagcactttgcgaccgtgtagccccaatctcacctcctaatttcaccagagcccgtcgcggcaccaaatttcccccttctcagacgccggtgagcagaatcctccgcgctcc

SEQ ID NO: 6049 - DNA, 424 bp, Zea Mays
gcgcccgtaccgctcgtccgtatgtcatgtgggccccagatgacagtcgtttcttccccaacgaatcatcccaacggacgcaatcccgccagcctcggtcgccgcaaattccgggttcctcagccatggattctgctggttgaggtcccgagcaccctcctggtgatccggtggtgatcacaggactcttgtgaacaaccgagcgattgcgcggaacaaaatagcggtggcggcggattcctctcccatgccgttgccgcgccactcctccactgaaatcgggcgggcgtaacaactttcctccccttcggaatccgctttcctcggcttcggggtataaatccgggacacctcgctcgcccatcagccatcaaacaccgtaaagccctcaccatggtagcacccgagggacagagagatgaga

SEQ ID NO: 6050 - DNA, 609 bp, Zea Mays
taattgaaagcatttttagagaagctgctaaaagcatatcaccacgactcatatacatacactgcatccttgaaaatcaaatgtgtgaactgtgaacaatattaaagtaccaaccatgcaaactagaaacagaaaatgatgcaccagaaataaagaatgaaaagagtaaaatttgtaactcacaagcatttgcagggcaccatctttctcaacgcgtggctctggtatgcatctaagaattgcctcaaaaaggggtcctaggtcatcagctaaattgtcaggagatagactggcctttcctttaattccacttgcatagactgtttggaaatcacactggcatgttgaaacagaacatgaacatgaggattaggataagccgtgtgttgataaactgaaaacaaattatatgaatagtaggataccataactgtttacctgttcatcagttgcatttaattcaataaatagttcaaatgttgaattcaccacaaactcaggacgagcagtaggtctgtcgatcttgtttacaactacaacaacagcatgtccaaattctagagctttcttcagaacaaaccttgtctgtggcataggcccctctacaga

SEQ ID NO: 6051 - DNA, 879 bp, Zea Mays
attagctccgccttccccatgaaccgccgctgacccgcacgcgcacgcacgccaagaagaccgaccacgtcgcctgcccacgtgccccaactcccttttgagcaccgctagcacccgctctctccccttgcctcacttcacccatgcccaccctctctcacgctttgccaccaccgctagtgcccgccggagtaaagcgtctgccctgccgaccgtccaggacgctaggagccacaccaagccttcccaagcaccgccccgaggtgaggaaatcgctcccgtgctcagtttcccttaattccgccctgccttggttaatttatgctcgccggagctctgcctcgctggtttgctgcgcccgcacgatggccggtcgatttagccccgtctagagcccctactttggtccatagtgtttcccctccctcgccagaactagtcctggccttagcgcgcccgattccccatccccgtggccaggattcctcaccggagttaccccgaccagcccagaacactccctccgccgttctgtcacctccgatcccattctagcggtcagagccccgccagtgagttcgttgggccctcctcgacggtccgggccaactccggcgacctcaaacctcctagagcctgcacccgccccgtctccgacgacttcgctgtcgtgggcagaagtagcgccgcccgaagccgtcaacccctggtgtttgatctcaaccgtccaatctcgatccagcggttcggatcttcggataccgtttcgggcacgcaccctgcccctgggcaccatctgtcagtcacctgcaccccatggcgctggacccaactggtcagcccacttcccaatcccagtcgctgatccccctggcccgc

SEQ ID NO: 6052 - DNA, 424 bp, Zea Mays
taaatcgtagatctgtattgaaacggcgaatgcggcccgaaaattacggcgtaaaaatctcgtgcgtcccatcgtgatcgggttctgactcagacagattttagcgtaaaacatgaaccaaaacagcgtaaatgattacgaattttagcgtaaatcgtatatctatttcgtaacggcgaatggggcccggaaattacggcgtgaaaatctcacgcgtcgtacacatgttctgactcaggtagatttcagcgtaaaacatgaatcaaaatagcataaatcatcgatctgtttcgtaacgacgaatggggcctaaattactgcgtgaaaatcgcacgtgtacgatcatgcgcaagttctggctcgggtggatttaagcataaaatgtgaactgaaatagcgtaaatgaatatgaaatttgcgtaaa

SEQ ID NO: 6053 - DNA, 299 bp, Zea Mays
cccccgcaaaaatctacgtcgaaaaaagaccgcatcgacggtcttcgacattcgaccaatacaaagtcaccgcgaggggcagcgctagccaccctcgcgtgcgacactccacacaaaagtcgcctaagggtgcagccggactagcacaacaagtgcgaaaaatcgaagtcttcctcaaaaagactatccgtgcaaaagtcgcctaagggtgcagccggactagcacaacaagtgcgaaaatcgaagtcttcctcaaaaagactatccgtgcaaaagtcgcctaagggtgcagccggact

SEQ ID NO: 6054 - DNA, 523 bp, Zea Mays
tttcttgccccgaaccccgaaggctgaggacaaggcatcatcttcggcccttgtatatgtcccaagcaactcgtcgctagtagcttcaatgcagttcaaccagtcatcatttggatcatcaaacttctctctgtacctgaaagtatatttcaatcgaactaatccaccttcgctggattcagcagtagtctccttcggcatctcccagctgtccacaagtggccacactctataggctctatgctcttaaattatgtccctcgagccaatgaaagcacagacagtgctgaaggctttttggcatgcttcgtcatcatctttaatcgccaccctcagccttccgaggccgaagcgagaccagattgggtgctggataatttccttagtgtcctccctctcaatcaagttattcttcacataaaaccattcctccatctaggtcccgggccaacttatccgaaacgttggaatagggtaacttgcattgggacgggcaataaatctataacaaccgaagttgttg

SEQ ID NO: 6055 - DNA, 529 bp, Zea Mays
catgaacgtccatggaagtacaagagggagaccccgctcggacaccctcgggggctgggtcacggtttgcgctgcccacttgagccggatcatctccggcagtaccctcgggggttgggcagtggcttgcgctttccacccgagccgagtcatccccggcaacatcctcgggggctgggcaagtgtcaacaccgtccttgaggaccaagttctctgcagtagccgcctctaaggctgatggaccctcagttacctccatgggaccaagatgatccaagtcagtctcctgaccctcaagaccgcgttctaaggtcgatgaggcacgagatgacctcaacccagcattgagcacatcagcacaaacctccatcacaccatcatctgctggctctgataacagatcctctggaaccatatcctcaagagtccgatcaaaattcgctagagacaattcttgcagaccaatgagagcagacaaagcaggagaaggaactccactactttcaccactggtgacgtactgccgact

SEQ ID NO: 6056 - DNA, 708 bp, Zea Mays
ggaagatgcaacgacaccgaaggaacgctttcctaatgcatcggcttggggacaagcgacgcctgaagagcaggggaatgtcagcaacggcatgccagaggaagcaggggagcatccaatggaggctacggagaacatacagctgcagcaggaagacagcagtgggtgaccaaagcgtctaaggcgctcgaacgtgcgtgtcgttggggctgagtgggccatgtaacgacatgttgggctgaggtgtcgagagtacttaggaactctccctgtgaacggagaactcatcacaaaattaatcaacagaatacttggtttggctgctgtccgcctccagccctatcccaatctctccgatctcttcttccctcagttcgatccagcaatttccttctccctcttcctcggctgacgctaacaatatcataaaaatcaccgcatttaaaatttgaatttcgaatatgtatcaatatcgtattatagtcgctaataaatagattaattatgaaaccaagtaaatttccaaccgacgaacaatcgttttcatatagacatatcatgcgtgttttgttacatgtgcagtgtgggaagttgcatctgcagatgcttaaatcatttagtgtttggttcacagacgaatccatacgagctcgagacgtgcaaaaaagacgtcttagccaggctgagcgcatacggcggctggctggg

SEQ ID NO: 6057 - DNA, 429 bp, Zea Mays
gtactcgtgcataaatttaaatggaggtagccaattctacacaagaagcaagttaacaacaatatcattgttattggacatccctgcgagatcaattgcccctgacgaaacaacctaagaactggatgtgctactgaatgtgtatagactataataatattgtactcaactccaaaccactccctctccccaaaatcgatctgcactgaattgcatgtcttggtgcatccagaaaaccaaccaaattacaacactgatcggcacttatctgcactgaattgcactgatgttgaagtaccattacacattggacaagcttatttaacatgttgcgccgagccaaaccagaaatgtgcctcttctctaaccatccccacccaaactacatcaacctagaaacaaaaactgatccacgccatccggtttgac

SEQ ID NO: 6058 - DNA, 359 bp, Zea Mays
gccaaccgtactctattctcctccaatgacaaacatgtcctattgttgtgaccatcggtaattccacacttttggcatttcctattcgttttctttgtaccttttgctcccaatttaataaccttttgttcactcccctttattgttcttcccttgggttttgagttatttggtcttgccaagcttatcccatcgactgcaaaatccagtttctgcaattcaaaagtatatatttttaagcacataatattatgcagtcccacatccagtctaataccattattacctttctggcatgatcattttgttcatggtcaccactctcattcatatccgcgtgatcctgcaaattaacctgt

SEQ ID NO: 6059 - DNA, 1015 bp, Zea Mays
gtccccgacggcgcatcgagcaaggggcaaagctccggcgagctagactggccggagggagccaagactggtgaccccgaacggctgacactgaattggaccttccccgatcaattcccccaacttaatttcatggttggtaatctatcaagctttgtccatgcggaccacggacgatgaggataattgcgcacgttcccggtgaccagtggtttcccagttcaattaagtagtttggtgagtatcacatacgtatgagagtgcttaaacaagggagcagagggaaggagctgacctgaattgggctggccacgacggggtgtgttttacggtggcggaaatcgaattgggggaaatcagaaatttgtgagctctggtgatcaattaagggtgggagcgggtgcttcggcttcgtgattacatggcgcaatagacccgaccatcaatttatagggttgttaagcgatggctgatgagtttggggcgagacgcgcgatggtcggaggagaggagtttactggtgcgcgtgattggtggcaaaccccgtgtcatccacttcggtgatcatcggacaggcaatgcacggttaactgcgatgtggtaaagcgtcaggacacgcggtggacgacggtggtggctcaacggcggtgagaatctcatccaagggatcggtgaacaaggggagaggcatggcggctagccggagtggcgtccagctcaccgacggcgacacctttcaccccgcgacgttatctatccactccgggcacgaatcgggacgtcgacggcacgaatcgcggcggagggattgttgacggtgagagttctacgctggcagcctgatccaattcaggttactgtaccatcgcgagctcccatcagtgcacctgacagtcaatgtttgggcttaattttctctcaaatttccatggcaacatggccgatgctctgcagcaaagttgtagtccaatataccatcttcatctttgttgtagtattccaagaccaattctta

SEQ ID NO: 6060 - DNA, 646 bp, Zea Mays
agagaactccgcatagggcaaactcttatcccaactgccaccatgtttaagagcacatgctcttaacatatcttccagtacttggttggttctctcggtctgcccatcagtttgaggatggtaggccgagctaaaattcaacagtgtgtccaagcactcatgtaatttctgccaaaactgagaagtaaactgtgatcctcggtctgacatgatcttcttaggcaatccgtgtagacaaactatccgagccatatacaactctgctagcttggctcccgtgtaattagttctcacaggaatgaagtgagctacttttgttagtctgtccacaatcacccaaatagagtcataccctgcaggagtgcagggtagacctacaatgatgtccatgccaatttcttcccatttccactcagatatcttaagcgggtacaacaaactagcatgcctttgatgttcagcttttaccctctggcaaacatcacaacccgccacatgtgcagcaacatcccttttcagtccataccactaatacttctgcttcaaatcctggtacatcttggtactgcccggatggatggagtaagctgagtcatgtgcttccttcaatatggtttcacaaagactgacaatctcaggaacacaa

SEQ ID NO: 6061 - DNA, 587 bp, Zea Mays
aaagaagatccagaagaagaccactaactagggatgccagacagagaagaagaagaagaaggcccctctagcactacctccccccagaatagatgactagtccgacgaagaagatgtatccctagccagcctcgatgatcttctcaaggcatttggggacaccttagacaaggaactcgctagtacctcgaagaacgctctcgtgtagtcccacctgtagtaatcttatgcttgtaatgtgatggtgtaatgaataaaataacttggttgaaaacaatttgcatgtgcatgatagtgactctcttccctggcagatggcttcggataaaaccacgcctaccgcctcagggattggagcaggtttcccccgaagagctgaaggggaagtcgttagagaagaaagtgaaacccacctccccgcacctccacccctacccttagacctagcccaagttctagccaatcagacccgactcatcgaggtcctcactcgaaatctggaaaatcaacggccgaatggtggaagaccgcaagacagaatgggggacttcttaagactcaaacctcccacgttcgccggatcaagc

SEQ ID NO: 6062 - DNA, 634 bp, Zea Mays
tggtgctcgaccaattggcccgctacccccctgcgcgcgtgtctcctcgactctgtctgcatagtgcttggctaggctgagcgtagggtggtgaaagaaggtccctgcaccgttcattccatgatctacggtaacgattagaagatcatacccccttcattgttgtgatctcggcccttgatcttagatcgtagggttctgggcggctcaacatgttcgaacctccgtgtctgttggatcatgggtgcatgaataggattagatccagggagtaccgtttcatcattcaatcccaaccgtcaatcccagagcggacgactaggattagattggcacatacctcttcgggttgtaagatccgactgtcgataggttatcgggtggtttagatgtcacgtaggtctctgaccatagatctccgatccaagggctcggatagcataccggttcactaaggggaggtttaatcctggcgcttggttcagatcgggcggccgagatagacttatacccctttggctgttactttttacatgagtccctacctttttgatttatcaacccaccgtccacgacaatataaagaacaatacagatcagccatgtttttcacaagttagatcctgagctctcg

SEQ ID NO: 6063 - DNA, 876 bp, Zea Mays
ttgatttctcggttgcctggactgcggccatgattataggaaggtttaggggctaaagtatcaaaaataggacttgattataattattttccactgctagaggatggcgggttcaatctgcgaaacaacaaaggcttttcgacaaagtagccacagcgaagggttatcccgaatttcaaccgttgcgtcccatccggacgacccagattagatcaaatctatatgaaccggtatgatgttcaagacactcggatctcgatccgatggccacagttttatgatgccagacatacgctctcaccccttagatccagatcgaatggctctcaagcacccccgcgaacgagtatgaacacttctaatctgagccgttcgtctaggtccaacagccagtggccaccccaccccaccaacccacgacgcccagaccgctcgtggcgagccgaggcgcggtggcaccattgcctcagactccaaactctcctagacctacctctgaactccaacccgtaagattctaagcgtagcagaggtcaaagcgagcataggggaaggcaccttaccgaggaagatggcgcaggcactcccacccccaacgcagggcggatctgtggtggtgtgttaaatccgacgagcaattgtgctcgccccgtgtgtaggcgtgcttcccaacccgtgctgtcgggttcttggtccccctgcaatccttcgcgacccttatccgacccccgagcgacgatagggaaggtgggcagcgttggcaacgaaaatttctcagctctctctcctcacagcgtggcgagctcttggtgtctatggcttctggcggcttgggttcgggacgatgagggagccgtggggtcgtgtaaatagccc

SEQ ID NO: 6064 - DNA, 502 bp, Zea Mays
ctcatctaggcatgcccataccaccccctggctacgggaacccctggtccggctgcgtccaactatggccacatggctacggtgtgttcctatgtcacatgctgctcccgccgctcgatcagcagcctcagccgggtctgcacatgatgccagcctccactcctggttttggctatggtggtgcccccacccctggtttcggctatggtggcgagccacctacaacactgtctccttcgaccggcatggctctgtacgcaccctagaataccatggccggcgggtcttgggaccaggcgtccctcaccagcaacttcaacaccatgtcgctgacgctgccgaactccatcgagtggtatgccgactctggtgctggttcgcacatgaccacacctccttgtctggtccctcctcgattatcgtcggtaatggttccttgttacccattacctccactggctcatactcgtttactactccacggcgttcccttgttcttaat

SEQ ID NO: 6065 - DNA, 398 bp, Zea Mays
gaaactaccccaatgggtgtggccgtgcaccagctattgtccgtattttttacgaggacgaagaagaggaagaagaaattccgctaattcgtaagaatagccagcgttatagaggtagtggtggggatagtgatattccttctctagctctgtctgctcttgttagccttcaagaattatccataacagattttgaccaggcccttgaggatgtcattcctgaagatatgctgtcggagccgactgctggtgatatgatggatgtttgctctgacattccagatgtgggattagaggtattccgggcagtatctcatgtatcgtcaactttggaaggcagtcttcggtgtcaagaagttggttaggattgctcgactcccatggaggtgactgaggat

SEQ ID NO: 6066 - DNA, 506 bp, Zea Mays
cgagtggcttgcacttttctagtcgtcggtgccatgcagtacagcagtagtttctggtggccgtccgcacaacaacaatgaatgttgatggccgtccgttgctggccaccaacgttgatggtcgtccgttgctggccaccgacgccatgctggtggccgtcagctgctgtcagcattcacgggcaacgatagcggaccaaagaagttctctagacttagcggacgctcagaacctccgctattatagaggaccgtatagcgttcattgttggagcgataaagttggtgaagaaacgctaaatatagagttcagaacgctttagcgttccttgttggagacagtcttatgggatgaatattcgttgcttcaccctatcacccgctcattcactcaatcactccactccctcgtcctctccgctcaactcatcgcaagtcgccaggcgaacgagatgctacttctcgctcatgcgtacctacctcagcagttcacagtgggaagcggg

SEQ ID NO: 6067 - DNA, 309 bp, Zea Mays
ccacggttactagatggctctataaaatctttgtcctgccatagcatgcagtcctcagatcaatcaaccagcaagtcgccttcttcccatccctctccatcaagcaaaagactgacaggaaagctaaaccccaacaatcgccatgggattcttccaaggcaagacctccaagcagaccacgagggtcaagaagcttctcggactcgccctgtcgcgcctcaccatagcacgtcgtccccgccttgctcgcaggtccatctgccgtagcgatgtcggccagctcctctccctcggctacctccaccacgc

SEQ ID NO: 6068 - DNA, 1001 bp, Zea Mays
ggaaaatgttcgcaccagaaggacccaccccagttagtcccgaggcactgagctcggggtcgagcgaggcggaacctttcggtcgggtggatcgagaggaagctactcgagtggattccatgcttgacctaggactgatccgtcgtaagtgaccgaccacatttactatgcctagcaccaagccatagagggggagtcggtccaccgtctactcatgacctacgaacctctaggcctatgacccactcatgacctattaagcctagacctgagtgcactggccacctacaggacccgcaacacgacgagccacgccgagacccaggctacggcgacaaggggtcggcatggcacaaagacgacaatgaagttgctagagctcttcgccgcccacgctgcccaacataaatagagtgactagggaagcccagacgatcgaggcacatacagacaaacgtaactttatcaaagtagaacgccctgttttaccatggcacagtagatccttcctgaaggataggtaccgataacagacccccacctcggcttataaaaaggagaatgtcggctagaagatggacgaacagacatacacacacagacggtgagaccaaaagacccggaggctagagccaaggagcaaaccaccatgacatccaaggcttagcagagagcaccagtctcgtagtctttaggtatagccatgcataagatacttggagctcctccctctctcgttcgtttgtaacccctactacaagcattgagcaaaaaagtatcgaaagcgcgagccaccaaaaattggatgtagggacgttcttaccaaaccagtataaatcttgcacccacctagcataccatccagaccacagaatgcacacaaataaatttacttgtcggagatggttcgaaacaccgacagtttgctcaccaggttggggccttgcgcgttcacgacgctctcttccccaggatctggatgggagccagtgacaaaaacc

SEQ ID NO: 6069 - DNA, 494 bp, Zea Mays
gaggtacatggtctgatgtagcctttctctaacatctcatcaatttgcttcttgagttccaccaactctggtccggacactcgataggctctcttggagataggggcggtgcctgggataagctctatggcaaattcaaccttcctttcaggtggcataccgggtaactcttcagggaacacgtcggggaattctgacacaattctaattgcctcaatcggattggactcattgtcatctgctgataaatggtgactgactccttcttctagtttaggcaagtacagctttgttactacttcctttccggatggggacaccaacttaactgttctcttgtcacaactgatagtggcttgatttctgtgcagccaattcatccctaggatgacatctaacccttgagttcccattactactaggttagcggggaagtttacccccccttatttcaatccttagattcggacaaatcctatcggactgaacttttc

SEQ ID NO: 6070 - DNA, 609 bp, Zea Mays
gtgtaattacctagcggagcagcgggtgcgcttaatttataggcttcgggggcggcggcgcatgaatttgggttggtgtagtggcggtcggagatgaaaaggggtcactagcgcacgtgcttagtggctttcaccgtggcagctctcctgcgatcaccgggcatgcacgatgtgattcactgcgacgtggtctaacactttatcacgtggcgcactgcacggcggtaagcggccaacaacggcgaggtctatccgaccgatcgatgagcaagtgggtaaggcgagcttagctgtgactgagctcgagtcgatcaggtgccaagatctttactcgcccacggttatccgcaagtcacggcgcacgagtcacagcggccggcgtgaatcgcggtgcgacggtcaccggcgccgatgggggatgaacttgggatcttgttcagtcactgtacaatggagtctctatttagtgcgcgtgacagcccaacttgcaaggcctggatctcaattttccatgtggtgacttactaatccaccagtgacttactatccagcttcaatcttgctatagcaatcactcccaaattcttactagatcatgctcgaatcccg

SEQ ID NO: 6071 - DNA, 342 bp, Zea Mays
gatcacaaaagaaggtccaaaagcttactggctacatggaagcacttagtcgcttcatctcacgactcagagagagtggcatgccattttacaagctactcaagaaggtggatagattctagtggactccagaggctcaagaggcattggaagcactcaaaacattcttgaccactctgctggttctcaaaccacccaactgagctgccgccgaccgatcagctgaagatttgatgctataaatctcatgcataatccacgtggtaagcaccgcgttagtggttgaacgggcggaagaagggcatgcacatccagtccagcatcatgtgtacttcatcagcg

SEQ ID NO: 6072 - DNA, 480 bp, Zea Mays
ggtgttctggtcatttatctggttattgattttctgaggtgtctgctggttgcgccttgggcagttgttagcatagtggcccagctcaccgcacttgaaacaaccattgggttggactggtgcgttgttgcttctggcttgcgtgttactggcgccaccttgacgattctgtgaattcccaccagacctctggttggtctgggagttgctcctttgctggttctgactctgattatttctctggccttgctgtccagagcgttgcacttgataattgtttccactctgatttccagagcagaactgcgaaccttgagcgttgttcgggcgggtgttcctgctggactgaccttgaaatttccttttatggtcagataattcctttcttttgctttcaaggccaattgccttgttcaacagggtctggaaattggggaaagtatgactctgaagttggtaattcagaggtccaatcagtcc

SEQ ID NO: 6073 - DNA, 738 bp, Zea Mays
caactgcatattgcacatggaccgagtcatgccgaagtttaatcttagcgaactcatcaccatactcataagtttttcctttctcttctcgtcagctttcatgtaaaaccactcgctcatccatccagtcagctatttggtgcagtagcctatcatgggggggccttcatgtcctttcggtatgcgaagttgtagcatccaaagttcttgtgtaggccatcagcccttgccttcatctggtaatgaagctcatgaacccgatagaacccttcagcgttagcgctctttccttagcttcaaagagcctagatatatacgctgagcctgacaattgggttcggcatcagctgatggaggtagatctcaaactttttcaaaatctcacctatcatctcataaagaggaaaccaaagtcccaccctgaagaagctcttgaataccacaacttcatcttccttcgactctagaattgtttcctctccagcaaagcgaaccagttcatcatcattttctccaaaatatcctagtttcttcattagaattagatcttcagccttaactatggacctcccagattcaacatggctaggcttagttggacatagaatgctatcatcatcttcactttcattatcactctcaacttcagtcacggcttgttcagcttcggcattagaggtaccttcggcaatagttccttcctgcacaaccagcccaaaccgcctcatcatttctaag

SEQ ID NO: 6074 - DNA, 749 bp, Zea Mays
gagcctacaagcaacaggagacctaagagatgctagaacatccaacagagaggcattaaccaacctgaggggggctatccacgatgagacactctcggcggcgcggaaaacagatttgggggaaaagagaaattaagaggctatggtgaacgattggaggcaaggactggttcactgggttcgtaacaagtagtcggaacaggacgaggcatcaattgatagaggacgaccgtgaggagggcgaatttggacggggaagtgcgcacggtgaaaagggggaggagtcaccggagtttgctaacgtgacgttcactggtttacggtctacggtggtcactgccgagtcttcacgacttgcgacgagtggtgagattacttaaggcaggtcacaaccaagctagacggcggcacaacggcgacggtcgcgcagccacatcgccagtgcaagtgggtacgacgacagggcgaaatagtgccacaagttcatctcctgtgcgatatttttcaccctgtgtagttatctgcactccattgggcacgaatcgcaacggcggcgaggatcacagcacgggatcaccgacggcggtgcactgaacctggcgatcttcgtctggttactgtaccatcgcgaactctcatcagggcgcttgacagagcaagtttgagagcattttacttcaaaaatcgttcagcgccaggtcaagcttgtataacaaagttgtttactaatgttagagattcaactttgc

SEQ ID NO: 6075 - DNA, 644 bp, Zea Mays
ggctccgccaccgccttcggggggtcctccgccgccggcgcaggggctggcaaagagccttcaccggacacagtagacacaggtgcagcggaggagccttcaccggtttccaagggcagtgctgggttgacctcagcctcaggcagcaccaggttgacctcagcctcgggccacgcgccgttcagatctccaaggtcttcgacatcctcggcacgcgccatctgcagcaatagcacactcattcagcaaaaccacacgtacccacactcaaccacacgaaacaaaagacaagctttacctgctctctcgcccggtcagaccgctccctaaccgcctcccggccatgaggaccccacatccgatcaaagagtgcccccgcagaatcctttaccacagggtcctcgaccttaaaaatttcacgctcaaagttttcatctgactggtcgaagacctcatagtgtttgcacccctcacgggacaacgcattcatgggccccctcgcatgtgacgagggaggcgtaggacatgaagccctgcacattagtcgggagcaccagcagctcctcctgcaaccattcaagaaagcggaggctggcctcgtggtcgggcacttcgaaatctgcagtccgcgcacccagatcgcg

SEQ ID NO: 6076 - DNA, 356 bp, Zea Mays
tcccaatatgcgattgaccaagtaaacactgacctaaagaagaagaattgcttcatgagaggactcaacgaccggctccaacagaaaatggccacctacctagatcttacctacattagagctatcagcacggtgctggcagtagaagccaagaatacaggccaaggaaaatcaaagggatttggaggtgacaggtccaatcagggacctgagaagcgaaccaggttggtaatccgaccatttaatcagaatcgttcttcgcctcgtccaccgtcctatccgttcaaacagcctgttttcattcgtcctacaactgcccccacttttacaaatcagccaagtgcccctggtgctcg

SEQ ID NO: 6077 - DNA, 524 bp, Zea Mays
gtcggagactcggaggaggcttcttgatgacaaaccaacgattgggacatgcagataagatgatcgagaagtgacgtggtaaggcgtctcctcagtagcacatgcctgtccagaccacacatccaaagaggtagatgtcggtatagttgatgtcagtgttggagtagatatgtgcggggttgatgaatgttgggcgactcaaccccgatagattgggcaaatgatataagcaacaacaggtgagaaccaatgttaatggagggcgacagggtaggtcatcaagaggtgtcttttggttacacatgcaacatggcccacatgtgggctcaccatgcggattagacaaatctcgtcgacgcgggagggagcggtagtgtagactgtagagacgacatggatcggcggtggggcaggttggcgactgtggaggacgccgaagcgcatggttggggcgtgacctggctcggccgccaacatgacagcacaaggacagttcacaactaagcgtggccgcaccacgatag

SEQ ID NO: 6078 - DNA, 476 bp, Zea Mays
gccgacgctcgtgagcccgggccaagctcatggctgtttggaggttcggtggtcgcttcagctcgacctccgttcgcaagggttcccctaggcctgcagtaaagagctcaacctgctggtgaggcgtgacgtcgtgcgcacgacacaggagctgggagaattgtcgttggtagtcctccacggtgccggtgcgatacaagtccttcagctccgccaagctattgtgtcgcagcggaggcccgaaccgcatgttgatgtacttggcaaagcggcgccacggcaccataccgtagtcgagctcgaagccgaagtaccaatccagtgctgcaccgtccaagtgcagggacgccacccacactctgtcgtcgtcgagtgtgctcatcccccgaaaataggtttcacacttattgagccatggtagaggatcggattcaccgtcgaacgatggaaactgcagtttaggccgtcgattgtga

SEQ ID NO: 6079 - DNA, 355 bp, Zea Mays
ccggggttgaagtttgtgttcaaagttataaatttcaggtttcacctattcacctcctctaggtgactttcagatagcaaggagtacattacttgccacgtgccatcggactcaacaagtcgatcctagagatggcctgcctcgatttggtagcatctagggtggcacatgtagtggaaaggctctctcgaagctcaaaagctgaggacgccggggagggatcccacgagcctgactaggacgacccaatggagaggagcatgtaccgaccaccgtcaatgccggacatcgcacttaagcaagaaaccgaacaccaggaagtcaaaaaggaaaagtaaacaacttcaaaccaaag

SEQ ID NO: 6080 - DNA, 964 bp, Zea Mays
cggtcgtccagagaagccaagcggcagattccccatcgtgtggcacggctgacgaagggagagggtgagcgcagggagccgagaagggagtttgggttcttcaacgacgaagcacgcaggggcgggccacggtgcttccccataccgcgcgggagtcgtccacgacttcaccgagccggagaccggagcatcgctgtcggatcgaagggcaccgtcacgccgagaccttccgtaggcaaccgtatttacgccggtaaaaccacgttcctgtaattcgccatcctctccgctatgcgtaggttcgatccgcgttccaatccatactctagggccgcttatccgcctgtccgccggatttgcaccctcccagtgcatggcgccaccgtccggaatgtcgtggggaggaagaagatcctagggccgttgatcgggtaatatgcggtggagactagaccggcgtgtacccgttcgcaggatttgatcggtgccataggaggggtgatggagggtgtagatgtagtggtagtcgtggctgctgctcggccgtcgaacacaggatcgacgatcctagtcacaccacaattcataaaactcccgatctcatctggtccgttggtgggagatcggacggctcaggttgaaagataccccttcgccgtgtaattttgtttatgagtccctgagcttctacatattcaacccaccgtcctagcctatatatttccttaaggttaggtccagtttttcacaaaaaggaccctgtgctttctagaaatcatacccgcagcccagagtgctgggataatgataaaaatgaatccgaaaaatgatttctgatataaaattaatcaggaaacttagataaatcataacttcttcgttttaactccaaatttagtgatccttgaacctacggtttcgtgtcgatttgtagaataatattatgcagttgttctcatgtttg

SEQ ID NO: 6081 - DNA, 972 bp, Zea Mays
ggtaaacgtgcaaaaaaacccaggaatctaggtacaatcaagaatagagataagataagtcttgcaagtggtaaagtataggatatatccatgggtgagataagtaagagaccacgcttgaactaaggtgggagattggaggttttagataacgaacataatgtaatcgccaaggtaagattgagagatgagaagggtaaaggcaataagaaacaaaagcacaacaaaggatgaggttacaaactcgcgagccaaagaagaggatacgaccaagagagggaaggtatgagacggaagaggggcgattttaaagggcaggtatgagacaaacatcaatgtaggatatagaggtgttaagggtgcatatgataataattaaaagcatgacaaaggatatagttaaggcaagactcacgaaacgacaaggtggggaaaacaatcaagggtaagataggtaaggttccaacagaagggttgaagtaacagaaattattaccgagggaagttatgaggaaacagtgagatcatcaaggatgtgtgaaatagaatggtcgctcagggaccatcaagaagcaagggtgatcaagggcatattaaccgaaaggttttgaacaatcattgggatatgaaggtaagcatatataaaaatattagtatgcaagattccaatggtacgggcgtaccaagaccaacggaataggaaaagctaaaaaataacggcttcacaacggaataggaaggggggtctcaggagacaaggagttcaaggacaacgtctaagtaggcagtagaaattcagatgtaagtatttgaaacaagagtattgaagaatctatgtgtacgagcatgttaatattaagagaacaaagatagtcaaagggtagcaatttaatgacggaagagggaagaatcccaacagacaaaaaaggttatggtcggggggcatctacaaagatgtcgcaagcacaagag

SEQ ID NO: 6082 - DNA, 429 bp, Zea Mays
ctgagatcctttaccacgtagtcataaccgtggcacgcttagaattactatccctgcgtttgtatgccattgagcgccacgacggactcgccagtacaatgccttgtcacagtcgtgctccgctctcctcccaaattcagagccaccgcttcgagctgctataaattgatgccccggcctgcttcgccaagttattacgaactcagaacactagctctcgcctccgattagtcactgtagctcgcgaatttcaaacttcccccaattctgttttctgcaccgccgtgagcacccctccgtcgacccactgtcatgtcccttcaaccgccttcctagctgccgttcttgagctctggtacgtcgctaaagcttaccgtgcccttaatttggatgttgttgtactatatcgtcaggaacacgatggaaaag

SEQ ID NO: 6083 - DNA, 457 bp, Zea Mays
gaggcagcggagggagatacaaagaaggggaagtcaaacacgtcgaagacaacgtgacgagagacaaggacgcggtgagtggagaggtccatacaccggtaccccttgtgattaggggagtacccaaggaagacacaatgagtggaacggggcacaagcttatgaggggcagtggcggagagactaggatagcaggtgcaccaaaaaaacgaaggtgatcgtaggagggagaggtgccaaagagagcaaagtaaggggtggggtgaggaaccgccttggtggggaggcggttgagcagataggtagcggcggccagccccttggcctagtagcgggggaaggaaggtctggaacagcagggaacacatgacgttgttcgtggtgcggatcatgcgttcaactcgactgttctgagaagaggtgtaggggcacgacatcctcagttgagtgccgtggg

SEQ ID NO: 6084 - DNA, 859 bp, Zea Mays
aaataacccagacacaggtttcccacgcattggacggcgggttcatttcggtgaaacccaggggctcttaagtaagaatgccaagcgaaggggtacggataagtcctggccgcccgattagagatggtgggcccagatcacatcgggacggcatcgaaccggtataggcccacagtcgttggatccgagatctacggtcgggattagaagcgcacagggggtatacacggcgcgatcccaagcgttcaactagcatcagatggtcgaggcttaatattttcacgatctaatcttgaccacccatttcggatcttgcagccacggcaccgtcctcttccctcagccgatacccagcatgatggtgaacagcccgcggcggcgccgccccgtcgtgaccaaatccagtgcccggagctcgacaaatcaagtggcgaggtgtcaaaatgctcccaatatcatgacggaccaacagagggtgagattaccttaaatcgagatgggccacaagcagaccacgatgcgaggcggtccgacggcggcggacgaatcccccatgtgaaattccttgttgtacctccccttctgccgcacagagaggacacagacgccaacccagtgcggccgcgaatgcccccgatcgatcatcccgagttcgtcggtgtggtacccacggcttaacctacggcggcatagattttctctccctcactctctctctcaggtgcgtggtgaagcttggcgatggtgcgctcggtgcgatgcggggttcggtttatatagtcgagtggcggggaggagattggcaaccgagagccgatttccacggccagcgcgaaacggccgacgcaaggatcccgac

SEQ ID NO: 6085 - DNA, 421 bp, Zea Mays
cttgcgacataggtgagcatagggataatacagacagtgtcatcctgtcccctccgcctattctctcatacctcggtaacgcgcgagaaaagtggtggtcataatgaagggaacccaagcgacgcattgagtcaatggtcttgccttggtaacacgtgggtttttgatgcagtgcaggccttgcagggtgtgtgccacctatcactgacgtgagaacagtcgtgcactctgcctcaccttaaatgtaggtgcccctgcttggggcttacgttaggttcttcccgacgacttacgtcacacgccataagacacgtggcagcaccaggtcttcaccccaaaagggatcgactaaccatgagtgtatgtatacatggcctagctagactcgtaggccactttcatcttctaccttcaacaatcg

SEQ ID NO: 6086 - DNA, 399 bp, Zea Mays
cagcatggctaaggatggtagggcatcggggagggcgggcgtggcgatctacaggctagacagggggacatgcacgactaggtcaagaagggtggcaacaacgacatggtggctaacaggggccctagctagtagccaaacgtaatggcctagaggccgattagcgtgggggatgacacgtagggtctaaagtccagtatcggtcacctgctcgccagccagggaaggaaagagagaagagtggtcatggttagttgcatgctggccggagggtgcgagagggttgccacggtgtcctgagcaccaaccatagtgggggaaggggtagtccagccctaggacgtgatagaggatggtatcagagagggccaacaatgagggcattcaaagggagtggaa

SEQ ID NO: 6087 - DNA, 719 bp, Zea Mays
gaaattctagaggtaatgactgaacccctgcctttcacgatgctaagtcctctaggattagagctaacaagtttattacagccacagaagaaaaatgttgtgagaactaccgaagcaaaggtaataaaggatcctttggcgcctagcggggggaacgctcaaaaaaacgtcggatgatgaatgtgatgagagctatccttgataccccagctccggtggttcgagaaaaaattgtatccactgtggccgacgaagatccccaacaagctaaaaatagcggtggtcacctcgggacaaccttatcagaaatcgatagacttattgctaatgttgcacttgggaaaaatactgagggggcaattattgcggagacttcagcgtcgaaggaaaaaagaactgaataagcctcttcggaagacaaaagcttcgatcttcggcacctgagcggccaacagctttccaaagaggtatatctaaattgaaggaattttctatatctagcggctaccagtcttgttctattctcttcggtggcgtggatgaagagattttaggatgtatccgtgatcgcactagggcaaaaattgtgagcacgctgtcgaagagtatcggatttccgaagctaaaaaattcattagctgttacagaagacaacatgttataggcagcttattctactcaaatttcaaggtatgattcctctattgtttctccttcgc

SEQ ID NO: 6088 - DNA, 651 bp, Zea Mays
tctctcagacctactttgagaaggagactcatctctcaccttacaccctttattagatagttcctgccaatctttctagaaggttgaagggagcccctgctaaagctgccaggcatgattactcatctgatgagcctacacctatgcccccttatccatctgtattcctcttgtattactgttgcatcgtgtcctatgggccacggtgggtgaaagagaggtcggggtcgaggtttgggatctcggatggcacgtggttttgcggccatattctctatgtgtcgcgacatttcggccgatgtgcatgagttggcttggcaccaatgggagactgatgaaaatatatgtctttagtagtcttctcctggtgtgtcgttaccaccttgctctcaggatgtgcctctccatccacccttcaccgacattgatcagtggcatcagcatcactttggtgtcccttatatgactccaaaagatgatgatgatggtgattggggacaaggccagtatgttcctcgtcctcctccacgcccagatcagatgttagcttgccatcctcctctgcctcctcctgatcaggtgcctttagatgattaggacttcactgccgccttcaccgagcagttcttctctccgcctctaggtggtgtt

SEQ ID NO: 6089 - DNA, 570 bp, Zea Mays
caatttgcttcttgagttccaccaactctggtccggacactcgataggctctcttggaaataggggcggtgcctgggataagctctatggcaaattcaactttccttttaggtggcatgcctggtaactccttagggaatacatcggggaattctgacacaattctaattgcctcaatcggattggactctttgtcatctactgataaatggtgacaggctccttcttctagttcaggtaagtacaacttggttactacttcctttccggatggggacaccaacttagttgttctcttgtcgcaactgatagtggcttgatttctgtgtagccaattcatccctaggatgacatcttacccttgagttcccattactactaggctagcagggaaatctatccccttatttcaatccttagattcagacaaatcctatcggactgaacttttccctcaactgaattaactcttaaaggtgggatcattggttctatggggatgttatgtgattctacacaagatgtagaaacaaaagaatgtgtggcaccagtatcaaatagtacttttgc

SEQ ID NO: 6090 - DNA, 422 bp, Zea Mays
tctggtgttagcgttgcggccttgtgtggggtactcctggcgacgagctatgtctccggtgggatgttggttggcgatggtgttcacctgttgctggttgcgatttggcctgctagattcggactgtgccggtctgacccatgttctgctagaatgcggggtgtccttgggcttccgttaagattccatcttgcgctgatgtacctctttggacctgccgtacttttcgaataactgatacaactcttgcaagtttttgggtgggtctcttatgcagtggttgtataagacactggtgcggagaccgctgattgcatagtgaatggctatgtggtcatcgacatatggcaattgtgacttaagtaggaggaactttttgtagtactcccgaagggtttctttctaattttgcctgtagagcg

SEQ ID NO: 6091 - DNA, 276 bp, Zea Mays
acacagaagagacccaacctaactggcgcaccaactatcatcgtgtgatagtgagggatagaggaaatgtacctcgtttaggtttggtagggttctaggcgcaccacaatatcacctaccacaaccagttggcccagtccgaaaaacataggagtgaacacgacaaacacaagggaaccacgagggagacaattaaaggacatagataggttccgaccaccagagcataagcgtggaaaggacatagataggttcaagggaaacacatagatacat

SEQ ID NO: 6092 - DNA, 529 bp, Zea Mays
accggggaaggtgaggtcatcaggttatataggcttggggacggggctaacaaccaacgaggaacgcgcggtcagatcagcatgcatgtagctactgcctcaaacggcctaacgaattgagataagcggttatggcctaggatccgcggtcggctaccgcaggcttgcgaacgggtttagaggtgaggcagaagacgaagaaaacacgctcaagcaggggacgaccaggttggggttcgcgtcgttcgccatggaggagtccggtcaggcgacaggcaaatcagcaacgaattgtgcttgtatcaggaataaaataagaaaaacaaactggaaggagacgtgggccacatgcttaggagaagctgggccgagctgcatggcatacgtaagtcttccttcatctgtttttttattaaagttttcttgattcttttctatttcagtttttttaattccaaattcaatttgaatcgaagtctgagtttcaaataaatagaacaggtgtacatgcaaaaacacctacacgaat

SEQ ID NO: 6093 - DNA, 403 bp, Zea Mays
agggaggggaggaggaagcagaacgtcaagtgcgtgcggttcgccgtcggcggcgagtgccgggtgctgctgttggccaacagggacatctccaagggggagaggctctactacgactacaatggctcggagcacgagtaccccacgcaccatttcgtgtgatgtgaccacgaggcgaggcaatctcagtccgtgtccaccattgcagctccagctccacagctgccaaaatttcgtgtgatgtggggacctgtttgaatcggctttggctagtgactagttggagcgggaagttaatctagattagctggccttcttgtttggacagattagagtggctaactaaaatgtcgattcttgcataacagtgagggcagatgaagcaatctagatattcatcagc

SEQ ID NO: 6094 - DNA, 327 bp, Zea Mays
cgaacagtcacgtggaagacgcttcctgaaaacctcattatcgtccttcatccaagtaggtgaactcataaatgacgtcgatttcgaaggtctactcttacaataattgtgtgcacaggaattgggacgtgaaaaactttggttgcaacttaattggcggggtgatttgcacgagagaggagaatgtatgtcaaataaaatcttattttacccacccgcggagaagaagtatttacaagaagaaaccctatgacaaaaccatcccatgtccaacaccacatcatgttggttatggccacaccatggtaacagtggggcacacatttg

SEQ ID NO: 6095 - DNA, 449 bp, Zea Mays
cagctaccaggccagtatcaagatgtcaccgttcgaagccctgtatgaacgaaagtgccagacccctctgatgtggtccaacgtaggggaaaagacgctggaagggcctgccttcatttaggaggcagaagagaaagttgccctaatccgcaaaagattactcgaagctcagagtcggtagaagagttacgcagacaacaggcggagagaactcaggttcgaagaaggagacttcgtctacctcaaggtctccccgatgcgctgagtcaaaagatttcaagtgaaagggaagctagctccgcgattcgttggcccctatcctatcattggcagaataggacccgcagcctaccacctcgaattgccagaatctatgtcagatatccacaatgtgttccacatatcccaactttgcaaatgcctaaatgtgccagaaagtcacatcgaag

SEQ ID NO: 6096 - DNA, 765 bp, Zea Mays
caatgttctagaaatcctttaatcttgacagaaaaagaaaaagaaaaactcggaacagtgttaggctgaattcagcccaaccgacctgcagaagggagaaagcacgcgcgcgtccgcgctcgcgctgccgaccttgcaaaaaggcccctgctgatttgaataacttgaaacagggtcgcagtacaattcctagagtcgctgacatctacaaaaacagcccctagttctatttctttacatagctcggtccacgacgtggagcggcggagcaggcactctggcgagctcactctggccggaatacgccacgaccagtgctctaaattggtttactcctaattcaacaccgaagaagcatttcccctcgatcaattgcactagcggagctctaaatcgtcctgcccacggagacagcgcgaacaacggatgaacacgggtgttcccgacgacctggcgcagcttagctcaattgaatgggtcaaggagcatcaggagaacctaaggacactgaaacgggagagcagagagcatgaacagacctgggagtagctagccacggagtacggaggattttcgttcgccgatgacaaaaaagggggaaaacggcgctgcgacgtttccgggcggaattaggaggtgaggctggggctacacggtcgcaaaggactatggtttcaccgtgcacaaccaatttgggagaggtggagaggatttcgcgaatttgtgcttcaaccgagttcactggtgaagatgtgaatacctcgc

SEQ ID NO: 6097 - DNA, 518 bp, Zea Mays
tagggggagtatttaggagaaaccactgcgggagatgaaaaagtaggggatacactattaatgatgtgactcagaaaagtgatatagggggaaaaatttagagggaacctgcggatagccttaggcacgaccgcacgaagaaaaataatggaggctgctcaaataaaatatatatactctgtacgttattcttacactgcatgcattgctgcgcaccgcggattgtgctccacttgcactatccaacgaagagtctggacgacaaacatgtacgattgcgataaagaaatgcgccgtggcaacgaggattgtggtttggaagaggcacgcgagaccgatccgtgaatccgtcccgtcctcacgttcacggccataacgtgccaagccctttcatcgtctaaagaggagagaccatctcgtactcacccaacctcctccgcgaacggaacaatggtgccgccgagccaacccgctgctgcaagaacaccagggccgcaagcacgatcgccgtgcacggc

SEQ ID NO: 6098 - DNA, 759 bp, Zea Mays
caaagatgggctgtcagactgcttggagtctgaattcagactaacagaggaattgcatgaacttagggctcgaattcaatcatgatccaatggaaatttgactagggatgctatagcaaaggtgaagatggtttgtagggctacaactttgctgcagagcattggttatcttgccatggcaaatttggagaaaatctgccctaaacatcgactgtcaggcgatttttaactgaaacgtggcgcactgttcatcggatttcagaaaagatctcgtcgaagataagaacgccaccgcggttggggatgggtctatggccacggtaaagatcatccatgatgtggcattaaaacgttgcggtggcactgcacggttaatcggcggtcaccggaccatcgtcgtggctctgcccgcgcgggtgagctcgccagcgtggttacagctccgcgagtctcatccaactccggccatcggcctataaattgagcccggatcctgcttcttcaccacatcacgcacacaagcacttgagcaatcaacttaatttcaccagaagaacgtacacagtccacaaaaccattccgccctgttcttcgcgctgccgtgaaggactcctccgtggccagcactccccgggacagttactccctaattgcttcttgttctagcttgtttatagctttctattgctctcggagatgactaattgaagtttgccagagtcccatcaccggaacactcctctgctccgtagaacgtcg

SEQ ID NO: 6099 - DNA, 751 bp, Zea Mays
gcacacaggggtattgaaacgagagcgaggagggcatgatcggacctgtagagagctggccacggcgagctcactcactgcggtgttcttgactgatttgggggaaactctaaattagagctctctgggggacaatccgaggcacgggctggtgtgttgggtgtgtgattactcagcggagctcactagggcggcaatttataggttccatcggcggtggcggctaattttgagaagacgcgtggcggccggagaggagggaggtcactagcgcaagtgattcgtggctcttactgtggcaaggcctcaggcgatggatgggctatctatggtgattaattgtgatgtggtaagatggctgacggcgtggcataaccgtgaggaatggcggcacgacagcgatggtcgcacggccacatcgccgggcaagtgggcacagcaaccaggcgaaacagtggcctaagttcatcctcaacgcgatatttcttaccccgagtagttatctgcacttcaccggacacgaatcgctgcgtcggcgtgaatccgagcgtgggatcaccggcggcgagggggctgaacctgagatcttattcagtttactgtactatcagattttcatcagagcgcctaacagaccgtattgcagagcccagatctcagatttttatgtagtaactacttaatccatctatatcaaagttgtagctctataaaccagctacaattcggctataaagaccttgctcattta

SEQ ID NO: 6100 - DNA, 872 bp, Zea Mays
acttttcttcgagaattttttaggcattgctaagggtagaactttctgaggtgttctatgttccacgagttccctacttctgtgccgtccatctgagtaagtcgatatgatcccggctgcgtgacctctgctacaatgaacggtctttcccatggtggtgacaacttgtgctgcccctcccccgttagaattcgacggaggaccaagtctcccactgcaaaagatcggtgtcgcacagctttgtcgtggtagcgcctcaaggtctgctggtacctggccgactgaattactgtgttcaatcgttcttcctccagcacatcaatgtcttccagcctagttgcttctgcctcagctatgtttttgaaagtcaaccttggcgccccgaagatcagatcagcaggcagcactgcatctgacccataaaccatgaagaacaaggtatttccatgcagagctcaactgggttgagttcgcaggctccagaccacgtatgtcagttctctgatccattttcctgcaagcttttcgctcttatcgaataccttttttctgagtgcttccagtatcatttcgttggctctttccacttggccattggctcttggatgtgccactgatgcgtacttgatccggatgctcctttgctcgcagaaatcgaagaactcagggctggtgaagttggaccctaggtcagtgatgatgttattcggtatcccgaacctaaatattatatcatggataaactccactgcttttggtgaggtcaaggaggaaattggcttgtactctatccattttgtgaatttgtcaatggcaaccagtacatgagtataacctccctgagccttcttgaaaggcccgatcatgtctag

SEQ ID NO: 6101 - DNA, 320 bp, Zea Mays
ctagattgcccggtagaaacaatggatcgacttcatcttcctgaaaccgattcgagcttctgctcttagtttctagttcgaaatctcgatcagattttctgcagagcgagatgtcttcgtacgcgttccttccgtgctgttcgatccttgacgcccaatgtttgagttgtcatatgctgcgagtgttcatagtttgatggattcttatcgttgcatctaagtttggttttctagctggaaatcccgatcaaggaatccggttattaggactgaaggcaagtctagtaggtagctgttacatgttctttgttcgccaaaac

SEQ ID NO: 6102 - DNA, 772 bp, Zea Mays
cactctcgactcaattttactccggaacgatcaccacggatcaccggccgccaacaaacttacagttcagacttgtgttctgtctattcctctcagttcgccgccaccttctcctagtgtaagccaatacttcttattacagtctgttacaaggccacttgggccaaataaacttagccactcacagctcgggccatatcgctctcttactccttctgagcccgtcgaggcctgcttctggcttcacatccttctcctttcccgcactggtattcttcgcttcttccgcgtcctggttgctgatcaccgggacactgacattttccctcccttgagttccagcttgtccccaagctggtgcaaaggaaaaatgtcgcttgatgtccgcctcctcttcccatgtagcgtagccatggatgtaggctagcccgtccactgagatgattgttgctaccagcatgcagttttcccatcgcagaggaggcaatcctgagataaaatacatagatactaccagccacgtatggtgttgaaccggcaatggaaaacgttcagagtatttcacccggtcttcccaattacgtatcgtaggatcaaagctaccttcactttgcccggcaggaaatgacaagttcgaaaattcgtgaagacctattttatctgtaaacaagttaaacccaaacggatgcctggtcgtcgcttgttgacagttaacacaagatcgaacaaagtcacgcactgagggcttcattcctggccagctcaacactgc

SEQ ID NO: 6103 - DNA, 993 bp, Zea Mays
gtcagccaaatcagctctgaagcagctataagaagaggggccctatcagatgaaagaaaattgctgtcatccttatctacagtaactgcatttagcaacataggataaccagcatatttgaatggttccaagacatccccatatctcttgtacaagatgcattgtgccttcagcaagagtagcagcctccagacttgtggtccctgcaatccctgcatactagcctgcatatagaaatgatagacactgtaaatagccaacaatgtgaaaatatacctaagttacctaaatagggtccgctagtttgcacatattctactaacaatttgtaagaaaaggagttcaataggcacatagaataataaaatgccagtcattctaatgaagtacaagggagaattaagtaaaacagtttaagcaacaaaaggagaaagcatgaaaagatatcatgcataactgggcaactggtcatacaaacagggggcacctgcaatcgctcataggccttttgcacagcaacaaacttctcccttccttcagggttcttgtctggatgatattttattgctagctttcggtattggcgcttaagcttctcttcatcaatgttttcagttttgtttccggaattagccgaacttaagtcagatggccgcttgctgctaccgttctcaacaagcacgagatcatcaagtgaaatctccagtatcttacaggcttcttcttcagataaatccattggacgacgagttaactcttcacgccacattaccaacaatgactgcaaaaactccacgtgttctacaatgggccagttaggaaacctaatttcatcacataggttacggaggtagtaacgatggcaccacatctcatctttcagattcggataagtcacgggtggcataggagcataatcatacaacgaatggcaatgctgtgctaatttctgaggaaagtcaccgagatgctgcaggacctgccaaaaaaaag

SEQ ID NO: 6104 - DNA, 643 bp, Zea Mays
cgcaggtgtattattcgttgaacttcaagtttggtttctctagtgcatgggtcaagcgattggatgctactagcacttcattctatttctcggcattctttattattaaggtacaatcctccccctaatgccgggaaatgctcttcgtcgaagatgctatcagcgtaccaagccgtgaacagatccccagttctaggctctaaatatttgattatggacagaaattcataaccaacaaagatccccaacttccagtgaggtcccatagatgtacgctcgggtggtgatatcggcacgtatacaacacaaccgaattttcgcagatgggaaaccactggttgttgaccacgcgttaactggtggggagaagcagagtggtaagcagatggtctatattggattaaggtcgcagcgtgcaaaactgcatgtccccaacaactggtcgggagtttgctatcttgtagaagtggcatggctatgaattttattcttttaattaaggactcggcaagtccattctgtgtatggacatatggtacaaaatgctctacatttatgcctagagcaagacaatagtcattaaaggcctttgaggtaaactctccgacattatccatcctgattgagtgaatgtggttctctg

SEQ ID NO: 6105 - DNA, 544 bp, Zea Mays
aggtggtggccatgctggggagcgagggggtcaccatgccggagccccgccagccggcctactacaacgtccggatcagcagcctcgccgtgtcttcggactcgttcgccgagtcgtcctgcaggatgatcagcaacatcaccctcacggaccacgaggaaggcaggtagagacgtagcggtgcctgctgtagctcgctgacggtaaactgtacaggacggccgttcatatgatctgaaattctgaatacagagacacgagaagaaaaaaacacacggatcgggagatagtaggttaacatagttggtgcaagatatgcccgtgcccatcgacgtgttaacgaacgcttttaggctccagcaattttttggtccacagttgacttggtttgctgaactgcacacctgtggtatttgtatgtgcgcactttagtaggcgacagttagttttacacttgtatgtgcttccgaatttttgtgttatacacccatttttgtcaaaacagttttccactgcaataagaaaaaaaactgatttttttgtg

SEQ ID NO: 6106 - DNA, 630 bp, Zea Mays
gcgaagggcggtggtgaagcgtagagtgagtgaagtggatggcggtcggcttcgtgtgggcagggctggcaagcgtgaattgttgtcctcgccggttagggcgagtgtaggtgtgggggagttgcgaagtctttttgagggtgaggagcttaggataatgctatttaactatagggagattggaatcattccgaaggttgaacctatgtaaggtgtgatgccctcgctgtacatatgtaactatagtttgtatgatgaggctgtgcgccttcgcgcatccggctatgtccataggggcgttacacacttggtctagtacgtttattatgccggtccggctgcgcctgtagtcggtctttgcgcggacagtttcttggtgtagacttttgcacggatagtcttttgaggaagacttcggttttgcgcatttgttgggctagtccggctgcacccttaggcgacttttgcgcggatagtcttttgagggagacttcgattttgcgcacttgttgtgctagtccggctgcacccttaggcgacttttgcacggatagtctttttgaggaagacttcgattttgcgcacttgttgtgctagtccggctgcacccttaggcggcttttgcacgga

SEQ ID NO: 6107 - DNA, 384 bp, Zea Mays
ttagcttgcatgttaaaattgcattgtggcttgctgcaggtttgatcgtcggtagcagaagaatattatagactttaggaaacaccatagggcatacattgaagaatgggatttgatgggtgagaatgtggacgacaacgaggagccgcacaacaacagactataggcagtaccaagtttggtagtaaggtgtgactcgttgcaagcttaggggacagtggacacaggatgactacaccgacatcgattcgtcggacgacgaagacacggcgtacaaccaagacactcgagtggggacacaagtggaggcagcaccgatcttggaccgagtggtactggttaaaacttgttactcaattcgaaatgcacaaaatatgacatcta

SEQ ID NO: 6108 - DNA, 683 bp, Zea Mays
gtctgagcaaaagccgcctaagggtgcagtcgggcacgcagaaagcaaggtcctcatcccacctgagtaccacaccaacacgattacaaatcaagacaatcttacaataaacgcaacactcgatatgccatcatagtttacatacatacaacgaagggcccgtcgaccacttcgcacaagcaataccaatcgcattttgtcgccctccctctctattgcgatgcgggggagggcagcgttttcactcactatcgcaacacgaggttgaggccagcaaaaatgctacatcggctctgccttcggaataagacccgcctcccagaaattaaacaacatcatcttcaactcttcgccctcaaatagattccgcatgtccccctccccaatgcatgtcccggccgtcgaggatagtagatcgcgttggctaccctgatctaatcgaaaacaggatcattccatacccatccggcgatgcctcccacttcgtgacatcccacctacactctgtttcgacaccaccttttgcctgcggtggtcttcggctatcgccctgaccaggggagcagactcttcgcatgcatcagattgcggcggggactccgatgcaaccaaatccaacgcaacaaagtagtctaaatcttcctcagaagactcctcaatccacaaaagcgggataccaaaat

SEQ ID NO: 6109 - DNA, 1384 bp, Zea Mays
ggccattcgatacggggccttatgaataggctacgtacccggaatcagcttgatctcaaaagctgcatcgcgctccggaggaatgtctggaagctctactggaaacacgtcggcaaaatcacacaccacacagatgtcccgcacccgcaaggcagcctcaccctccaccaccatggagaaaaaaatttccgacttccttgaccggcgatccggaagcaattgcgccaacaaggataacgtgaactttggggaacttcccaagaataccacctccctacccgacgttgcctgcaataacactgtcttccaaaaataggatataattgcgcaatactgagataaccaatccatacccaagataacatcgaatgcccctaaggaaatcacaacaagattggccgaaaagacctcatcagcaagaatgacggaacacccctgacaaactaaacagctactaatggagccattagcagaactaaccaaaattgggtgacccaacctctgcaccgaaagaccagcccacgacacaaaattctccgaaacaaacgaatagatagcgccagaatcaaaaagagcatgggccacaaacaaatcaactaaaaccgtacttgtcaccacgtctccttgctctctgccatccgcagcgggtagcacataagctccggaaatacccgcagaagaggaagctcccggagtgaaattaacagaagaaccccactgagccgtcgggtgaggcaaacgcggagctccaaactgagacaacataggagtagtcggtgcaggagtaggcgtagccaaatactgaggaaaaccctgcatcggcacgaactgagaagtcccaggcacataaaactgctgcggaggaagtggaattgaaaattgctgctcagcacttgacatcatgttgacagtgccctgagaagaggaggaagtcactggctcccatctgagcttcccattaggattcctcctacacaccacatccttgtggtcttgactgcagatagaacacctgccactccactggcactctgcacggcgatgcgcatcaccacaacagaaacacaccagccccaacccgggcttaggaacagcccgaaacctctgagtacttcctcccgaagtacccgagtcagaagatttgccacggtagggatggtggcgctgatgctgagacttgcccctcttgtgggctggacctccagtgttgcccctcctcgcgtcctggccacaaggctgatcaacacccgaagacttctgcgactccatggtatactggtgttgcatctccacacccagtgcctgctccactgtagtatggaagtccaccaatggaaaggctcccagggcatgcctgatagaaggttccaggccctgacggaac

SEQ ID NO: 6110 - DNA, 306 bp, Zea Mays
gtcgaacccgattaagtaattaatcctttttaactaagtttgtctatgtgtaagtcatcagaaacttatgtgtacttaactaatttaatataaaagtagccaatgaataattaaagtgaacatggtaaatgcttgtactcgtgatgtcgtgtttgtgttggtcaaatataggaaatgttcgtcgtctttccaggaatgttgacttgttgtgcccaatgacgtatagatagctagcgttaacgtatggatgtttatgtgtcttactagttaatgttagttcgctatcatgtacttaaagtatcttgt

SEQ ID NO: 6111 - DNA, 468 bp, Zea Mays
gtcaggctgtcaggctgttaaagtctgaatttcagactgacagtgcaactgcagtgactttgggcatgaattcaagcaggattgagcaagaatttgcttaggattgctataaaaatattgtagctagatcttagagctaaaactttgctaaagggtgatgatcatgttactgcacaaaatcgggagtaaacaaccctgcaaatcgctctgccaggtgactgaatgggctttcccatggtacagtaacctaaaacggatcaggacgccaactcaactcgctgccgacgatccccaccgcaattcgtgtcgccgccgtcctgattcgtgcccggtgaggatcggataacgccggggatggataactcgtacgtggcgccatctctcgagtccagccggagttcttcaccggcggccaccgtgactcgataactttcgccgcggtgtcactcatgccgcgatctgcctcac

SEQ ID NO: 6112 - DNA, 511 bp, Zea Mays
gcagagttctcttacaataatagctatcaggccagtttgaagatgtcaccgtttgaggctttatatggcagaaagtgcaggactccactgtattgggatcaaactggtgaaaggcagttgtttgggcctgagattatacaagaagcagaggaacaagttcagcaaataagggagaatttgagaactgcacagtcaaggcaaaaaagctatgctgacacccggagaagactgcttgagtttaaggagggagattatgtctatttgaaggtgtcaccactccggggaatgagaagattcaaagtcaaaggaaagttgtcccctcgctttattggactcttcttgatcttaaagcgagtgggagaggttgcatatcgattggagttaccggatcatcttgtggatgttcatgatgtatttcatgtatctcagctgaagaaatgtctcagggtacctgaggaacaattaccaatggaagaccttagtgttcaagaagatttgacttatgctgagt

SEQ ID NO: 6113 - DNA, 2464 bp, Zea Mays
tgcagcttcaaataaatttggtatcccactgcaaacacacgttttgacctctgtttattggcctgatgttgcatacgctgctgggcgcggagcagattatgtttgatgcagcgaagcatgagttctcgctgggagagccaagcactgagatcgacatgtgacactgaatcatctgcagacaaaccaaaatgacggggagtgcgccatatagaacttcaaatggagatcgtcccaaagaagagtgtgggcaagtgttataccaaaactccgccactgacaaccatgcagaccacttagacgggtaggattgcacaaagctgcgcagaaatgtttccaagcattggtttacccgctccgtctgaccgccggtctgtgggtggtaggatgaactcctctgtagctgtgtgcctgacaaacggaacaattcacgccaaatgttgctggtgaaaatgcgatcccggtcagagacgatagacttcggcataccatgaagtcggtagacattagacatgaaagcttgggccactataagagcagtaaaaggatggcgcaacggcacaaaatgaccatatttagtgagacagtcgaccaccactagaatggtgttgtattggccagaggaaggcaatccttcgatgaaatccatggagatcgcctgccatgcctaggtaggaacgggcagaggttgcaacaatccagggtagcgagtccggtctggtttggcctgatgacatacagtacacgcagccacatagtccttaatgatttgtttcatgtgaggccaatagaacaactgtttgatccgggcgtacgtgactgggaaaccggagtggcctcctagagcactggcatgaagtgccatgatgaccttggtttgcaattgagaattattatcgagccaaatacgctgcttgtaccgaatgactccatctttgagggtgtagtgcaactgatcagacagcgccagagcagacaacaacttcatcgcacgagggtcagagatgtagccataaattacctcctggaaccaagcgggagaagccactgacaaggaatagaggtgaccagtaggatgtggacgacgcgaaagggcatcaacagctgtattatcagtgcccttcttgtattgaattcgataatgtaatctgagcaacttggtgaacaccttgtgttgccatggggtgtggagtcgctgctctgtaaggtgggaaagactacactgatcagtataaatgacaaattcagtgtgctgcaagtatggtagccactgatccacgaccaacaagattgtgagatactctttttcatatgtggacagtcccaagtttccagggcccaaagccttgctaacaaacgctagaggatggccattttgctgcaacactgctccaatgcctgaacccgaggcgtccgtctcaattgtgaaaggacgagaaaaatctggtaaagccagtaccggtgctgaagttagtgcttgtttaagggccacaaatgctgattcctgcacagatgtccagacaaaaactgaatgcttcttgaggagggaagtaagaggcttggccaaaaggccaaaattgcgcgcaaacttgtgataataacccgcgagaccgagaaaccctcgcaattccttgcatgaggatgacacagaccatgaagaaatagcagccaccttggctgggtctgtggccatgccagcactactgattacatgtcccagataagcgatctgctcgtggccaaaagtgcatttagacaatctgacctaccaattgtcgcgcgcaagcaactgcaacaccaactccaagtgtgccaaatgtgcctcccaggttggactataaaacaggatatcatcgaagaatactaaagcacacttacagagcaaggaggataatgtacggttcatagcactctgaaatgtagccagtgctccggttaatccaaaggacatggcccggaactcaaactgaccatggtgggtagagaatgctgtcttgtgttgatcctggggtgccattcgaatttgatgaaaaccagcacgcaagtccagtgtagaaaaccatgcagccccatgcaactcgtctaaaaactcatcaataactggaataggaaaacgagtcttgacagcgagagcatttaaatgacggtaatcaacacaaaaatggtagctgtcgtccttctttttcaccaatataactgacgatgagaaatcactccgactatgttgtatgatacccgactgcagcatgtcccgaacttgtcgctcaatctctgacttcaaggcgggagcatagcgataagggcgcatacgaaagggttggcctcctggtattaaaggaatctgatgatcatgatctctctcgggaggtaagccctgaggtactgtgaagaccgactggaacttgttgagcaaagactgaagctcctctggtagagtggacaatattccttgctctttttctgataa

SEQ ID NO: 6114 - DNA, 790 bp, Zea Mays
gggcagagttcaagcaaccgttcagggaacactacattccatatggtgttctacaaatgaaactggaagagtttgttcgcttaaagcaagaaggagattcggtaatgcaatacctcgccaaattcaaccatctctccaagtatgctatagagcaagttgacacggacctgaaaaagaaaaattgttttatgagggggtctgaatgatcgactacaacgcaagatgttcacttgtctatatctcacatatagcagggccgtaagcacaacgctttcggtggaagccaagaattagaggcagggaaagacaaagagatatgggcatgaagggggtgaaggatcctctcaaggatctgagaagcggtcgaggttggtaattcgtccttttaacccaaattgctcttttcctcgtccacccgcctatcctttcaagcaaccagttttcatccgtccaactcctacccctactcaaaacaatcagccaagtgcccctggtactcgtttcctggccttacctagttcatctaacagttgctttaactgtgggaagtctagacacttcatcaaggactgtccctatccaaaacaaaataaatccaattttcaaaatgcttctggaagcacatctcaaggcaaaggaaatgtggcaagcactcaggcaggcaaagatcaaaggaaaactggacgcgtctactatatcaagttgctaccaccccggaaggagagccggtgatgatgggtacgttttccattgccaatcatcctgccatcattattttttattctggtgc

SEQ ID NO: 6115 - DNA, 415 bp, Zea Mays
ctttcccctttccttctctcagaagtcagatggaggtccgctgccaaaccagcttgtgctagaatgaagatggtttccccaagttgctgagagcatgcacagtccgccttgaaatcaggagccaacgagagtatgatggtcatgaattcgtcgagcatggcacagagaagtatgtcgtgactgtatacattggatccagtccgcaccatgtggaatggagtgtcactgctgctgggcacagattcaaagacacctgccaagtcgtcgcccgcaaggcattgagggccctgtgtcagatctatgaagaagaagtggccgacaccccgctcagattctttccgccctttcagagaaactgtcccgtttggatggccaggatgcgtgcattggaaggtcagcagttgcttgaggacga

SEQ ID NO: 6116 - DNA, 303 bp, Zea Mays
aaggacgaatattaaacttgcaccgagggactaaagaagttagaggaccgaccgtgagtggtggatgacatttggtgtcatccacaagtgcacggggacgaggatatggaagagtagaccatgttgatcgagtcaaactgatggttgacaaatcaagcggaggcactagaggacttggtgatcggatggttgaggaccgacagcgacacaagtcgagatcgtgaagggaatgtatcaaaatacgttattcatagggtttggtggtttaggcctcaaaactatcgggcgaaaagtttcttgggt

SEQ ID NO: 6117 - DNA, 354 bp, Zea Mays
ttaatgaagaatgatattgctttctctgtgtcaattgttctgctttgtaatcagttaacttccgctgtgatattcattgctcatgatgctctctggttgtagcataacttagagttcttgaatcattcctccgcccaccttatttgtgaagttgatttccttggaatagtaagtaaataactcgggcatcatatcgacgcttttagaggtagctgccgagtgacttgaaaacgacgtcggagtttttagagataactgccgagcgaccaaagacgacgtcggcgtgtcagaggtaactgccgagcgactgaacacgatgtcggagcattagaggtaactgccgagcgactgaac

SEQ ID NO: 6118 - DNA, 310 bp, Zea Mays
gtgagggcaatcccaggctgaacagcatggtcaacttggctgtcgtgctcaacacagagttggaccatgcccttgacgagttgggcaaggttcgggcggaggttgcggaattgcgtgctgagtgcgcagcacgccactatctggatggtggttctcccgccattgtcgggattcaacacccttactgttcaccgccctgtcgtcgcttcgactatggtaccccagactgcaggacccggatagatttggatccctagatcgacagagtcggagtctgtaataatgcttagttcaatgtcttagtctagtc

SEQ ID NO: 6119 - DNA, 552 bp, Zea Mays
ggacttgctgcccgccagcatttcaggaatggcagccaactcttgagcgcaacaggacccactgcggttcggttccactgccccgtcttgtgccacttgctgcgcacccgacacagccactaaccccattccactttcatcatccaaagcagccccctgagcaattccagacttggaatgatgggtaattgttcccccagtggcagcagctggagcccgatcacccatctttccaagctgaccaggaccagccccattgagatcattaccatcatcatcccccaacaggtcatcttcatcatcgttaaaccccttttcatcattatccgtctcaggccgaagccccccattcccatcttcaacccggaaggacagaaggtatacttcctccccgattaccacctccaccgtgctgggaataagattagcatcaagaatcataacttgaactctaccaacctcaaactgcctggtgtgtttcatgtccacatcaatagatgtacccagcaaactgcccactgcccaaattgttgggaaagtacgatacaccat

SEQ ID NO: 6120 - DNA, 481 bp, Zea Mays
accttcaggatgatacccatctccctgtaattaaacaacattattctcaattcctcaccctcaaaaggcttctgaagatccccctcgcctatgctcgccccaatcgacgaggacaacaattctcgtttaccaacccgatctactcggagacggccacgctccatccccatacgacggcgcctgccacttcgcgaaaattcacccacactatgttttcccaccacccttcgccgcctacacccagtactcacactaggaagatccccgacaccctccacatgtggcgaagtctccgccgcagccacatccaatgcaacaaaataatccaagccttcatctgaggaatcctccgtccaaggaaacgaactcccagattcaccatcagactcatcattggcagatcgccaaaatcacagcaatagcacattccatcagactcatccagatcgccaagatcctcaacctcttcgtcgtgcgccat

SEQ ID NO: 6121 - DNA, 601 bp, Zea Mays
agattactttgcggccttggatgtggctgaggcggaggcttctccgcgtgttacggatgctgaagttttgcctggtccgagggttgggcgtaggcggcgaagggcggtggcgaagcggagagtgagcgggttcgatggtggtcggcttcgtgtgggtagggctggcaggcaggaattgttgtcctcgccagttggggcgagtgtgggtgagggggagttgcgaaggctttttgagggtgaggagctgaggataatgctatttaactatagggagatggggatcattccgaaggttgaaccaatgtaaggtgtgatgccctcgctgtacgcgtgtaactgtagtttgtgtgataaggttgactgccttcgcgcatctggctatgttcgtaaggcgttgcgcacctggtctagcacgtttattatgtcggtccggctgtgcctgtagactttcggactgatgtaatgcgcctacgattttttgcactcgttatgctagtccggctgcacccttaggcgacttttgcgcggatagtctttttgagaagactttgaatttacgcacttgttgtgctagtccggctgcacccttaggcgacttttg

SEQ ID NO: 6122 - DNA, 585 bp, Zea Mays
aaacgaccaagcaaacacacccgactcggtctctcgcagccacgggcatctggctcaggtggggggggggggggggggggtgtgccaccgctatagctactctagtactatcaacagtagcaggggtgcatgattgctcaccatctgcatgcaggcagctctccgcagatccatgcatccacgagcgagagctagcccatgccgtgacaacagttggatctactgctactacagtctacactactagtagtaagatctgagtctctagctaatgaccgatcatcatctacgcctatgctatctactactacttcttcagtcctactaccagcagcagatgagcagtagtgtcgacgatccatccgagcgcttcggttgcctacttgccttgcatgcatgcatgcatgatcagctaccaattcaaccagccctcgtagatacagtcctgtgtcgttccatccttcttgccggccatctttctatgctgtggcgcccaggcacgcgtgcatgatgtgagcctagcttcgtcgcctctatctctagggagtacgtacgtactacatcgctagtaggacggagtactag

SEQ ID NO: 6123 - DNA, 603 bp, Zea Mays
caaaaaacatcaagtgtagcatacagttcaatattttcaaagaaagcatcatagggcaaagcaactatgaactatctcacatgtatcacaagccttaagaacagggctgctacatcacagggctgctacaaatctcaagaacaggtgtcacaacattaaaacaacactcaggttatcaaaaatccatcacaggactgctacaaaccacatgacacaaatatcagaaggcaccatactatatcattacgccccaaattgcatcacaagacaccagattgattcacattgcatgtttatggcccaaattgcctcacaaagcaccatctcattcagttaagttttcagaacacaaacctgagagtatttggccaatgtctcctgagcacaaacgatggctacactggcatgttgatacgaacacatagcacatttttccgcctccacagcggattcaagaacatcaagcatcaaaaccacatggttgcctactgatgatgtggcgcagagatcaccagctatcacacaggcggcagtagaagcattgatggtgtcacgagctgcttcaacgaccgcggagaacttctaggcacaaagctcagcgac

SEQ ID NO: 6124 - DNA, 521 bp, Zea Mays
tgcgatgcgttctgccgcaaccttatcatctgtttattcttcatcctttatgtacctgatgataggctctctccagtcattagggtccgactctggttggctcaaggtattgcattcctctgtctgatctgagggaatactcgggcgtgacacttcctggatgaagatcccgggtgggacctaggtccaactggatcccagctttgacaacgcgtctgctgctgcattgtggtctctttccacatgatggaattccaacccttcaaacttgtcttctaattttcggacggctgcatagtacttgcctatagaatcaatcgagcaatcccagtctttatttatctggcttatgaccactagtgaatctccgtataccatcaacctcttagcacccagtgacacgacgatgttcaacccgtggatcagtgcttcatattctactgcattatttgatggtaggaataatagctaaagtgcatacatgagttgttcacctccaggagcaatgaagaggatccctg

SEQ ID NO: 6125 - DNA, 1075 bp, Zea Mays
tgaactttgagctcgattttgaatgggatccagtgactttttgtgggagcacattgtagcaaagttatagatggattatagctctacaactttactacagaaagttggcataggtttcacataaaaattggagaaaatagggctccaacttggtctgtcagttaagctgtccactgaatctggcacactgttcacggtcttctgaaatatcacgccgtggatcagggttagtccccccccccccgccgaagataagaacgccaccgcggcatgactggtcgtcggtggccgcggtaaatatcctcggcgtcgtggcaaagggttaccgaggtggcgagctccggttaaacgtcgacccccccgtgccatcaccggaatccgccgcgcggaaagcttgccagcgcatccgtagtccgcgcttcttctccaactccggtcgacggcctataaattgagctcggactccgcttcttctccccattacgcatctcagtgcttaagcaatcgactcaatttcgccagagaacttgcgcagccccaattctctctctcctctgttcttgctccgccgtgaagaacttcttcgtagccagtgttcctctggtcagtaactctcaacttactccctgttttagttagtccttgatctcctattgctcctagatgtggcaatttagagtttggccgaagctcatcacaggaacgcacccgtgcgctgtcaaacaccgccgtgaccccccccccaccgtcgacccgctcttcgggtcttgttctgcccaaaccgaagcatgtccatggatcctagtgaacccgtaaacctttacccagcctcaatttggccatccccgtcgctgtccgatcggaacatgttcactctcttgtccatccgctctgtctctgtggccaggacattgtagtgtgccgttagtgaaattgatggaggggaaatggtcagggtggatcgaattgtgttcccgtcgcttgagagcacccgtcgtggcgtcatctggcctgactaagctcgccggagtgcggcgagggctgattcctcgtcgtggactttgctctgcgaaag

SEQ ID NO: 6126 - DNA, 676 bp, Zea Mays
gatccaggccgatgacctctccaacgatgaatggtccttcccatggtggtgacagtttgtgccatccttatcccgtcagtactcggtggaggaccaaatctcccactgcgaatgatcgatgccacattgctttgtcgtggtagcgcctcaaggtctgctggtatctggccgactagatgaccacattcagtcgttcttcctccagtatgtcgatgtcctctagcctggttgcttctgcctcaattatactttcgaatgttaatctgggtgctccaaagactaggtccgctagtaataccgcctccgacccgtataccatgaagaatggggtgtttttgtgtaaagctcggctaggttcgcaggctccagaccacatacggtagttccctgatccattttcctgcaagcttcttgctcttgtcaaacacctttttcctgagtgcatcgagtatcatcccattggctctttctacctacctattagctcttgggtgtgccactgatgcatacttgatttggatgctcctctgcttgcagaagtcaaagaactctgagctagtgaagttagatcctaggtctgtaataatagtgttaggtattcccaaacctaaacattatttcttgaatgaactccattgcctttgctgaggtcaaagaggcgatgggtttgtattct

SEQ ID NO: 6127 - DNA, 793 bp, Zea Mays
ctcgcgaagtccctggcctcgacccgcgccctcgccctcttcagcggccggccgttgaccaccatctccccctccgccgccgtcgtcagatcccctcagatctgcaacgcaccgtcgtcttcctcgtcgtcgattaaccggatcggaactcaggttagggtttgcggcggcggcggtagctgcgagataacgaggaggatggtgatggggtcgattccttcgaggtgaagcacgatcaggtgcgcctggtctttgtgcaccagaggggacggagcaaatgtcgggcccacgtaatcgtgcgtggcgtacagtggagtgggtctatgcatgctatggtggaatgggctcgtcaggtcgtggcagagcgctaaccagggttaatcgtgggtggggtgggtggttgggttcgagagctttccgaaaaggaggcgcgagaaatgggagggaataaaggatcggggcagtgtcgtcattttgtatccatggctcgatgagaggtccagtacggcacatcaaagtgatcctgtgtagggacaaattacacaactgccctcatagtccgtggaccctagaatgcttttatttcgattcgttgtgtacagaccacagaatccctccactcgaaacgtgtccactgtaatctttataggcgactttctcaagtcacagagacaagtgatacggtattttttaagtatacccttctgcaaacatgttgtcgtattgggtagttgccacaaatttgatttttttctataaatctgcaatataaatttctatcatttattcagtc

SEQ ID NO: 6128 - DNA, 544 bp, Zea Mays
acagatgatcatgttgtcacacaaaaattgaagaataaagcgcttcaattagctctgtcaggcgctctgaatggagttccaatggtacaatgacctgaagaagatctcaggtgaagtgcacctcgccgccagtgaccccgcgcccgaattcgcgtcggcgctgtgatccgcgcctagtaacatgcggataaccactctgggtgaaaatatctcgtcgtggatgtggtcggggcactgtggttgctcagacgtcgtacccacttgccggcgacgtggtcgagcgggcatcgccgaggtgtacgctggtcgtagtgattgcgtcacgccgtgacccttttcaccacgtcgttgctagccgtaataactcagcaatgaccgtcgtagctcctcagccagagaccgccatgatagctcgcgttagtaaactccccctctctccggccgccagcacgccttctccaaattggacgccaccattgttggcttctataaattgagtgatcaaccaggtctgctaggttattatgcacccagtgcaccagct

SEQ ID NO: 6129 - DNA, 749 bp, Zea Mays
ctattacaagaagaatctaaagtgttggaaagcttggtcatgacgtcaggtcctgggtgcccgagacgacgatgccaggtggtggaggtggtggtggagaccaggacgggtggtggagacaccccggtggacgacgaccggagtgtgtagaggggcccgacgctgtcacatcaggcgagtggggtcctggtggccagatccttcacagaaaacctagtagagtcaaactcaatggaacaagaattgtcggtggtgaaccgacggacagaaaggagattgtgagtgatgtgaggggctacgaacgtcgttgaggtagaacgatacagggagaatcgaggcacctacagaggtgacgggaagagtggacccgtttccaacgacgatcgaggtagggtgtatggaaggaggtgggtgggagtgagatagcatggctggagtgggagtgggagtgctgttatccaactctatgtaagctagagatgttcatatatgataatatgaacaaaaaaaggaacaaagcagctgcagtccagcaaactccaaacaacttggcctcctgccctttctaactgttatgttcaatatgactgtagaatcttctgagcctatattccagtgtatactgtatagcattcctgatttctcaaaaacatgacttttaagtccttataatatagaagtgtccatgaagactcactacagtgaaggtcacagactaaatattttgcacagctgacactacaaagcta

SEQ ID NO: 6130 - DNA, 487 bp, Zea Mays
ttgagaaaagcctgctgatcaattcgaggaagcaaggatcgcccacctggaaggtgtaactcgaagagatgacgtcctcggagactcgtcatggcctctacggacagagcgacgccgcaggccaggatgcctagatcggcagctcgcctttcatgagcgctgagggtaggtcgatctggcttcttctctatcatcgcggcctagcaagatccgaaggagcgcgtggaggagtgagcgccccccgacaactcatcatgacctcgacagacggagccagaggagaagacggtgcgggaggcggttggctaatgaattgttggtcggcatggtctttaagcaggacccaaatcggcgtcgatggaaggtttgcgtcggtttggggcgatgtcggggcgatgacggcgatttggaggccacacgctgttggcgctgtcgaggccacgcggtgatgggaaggcgccgtaataggaagccctcggccatggcg

SEQ ID NO: 6131 - DNA, 310 bp, Zea Mays
cttgcacaagatccctggtgctgattccactctgaattctgctatggccagcgggcatgctgaccctggcttcatgttgcacaagggtctggtcatcccgaagcttaaggatagcgggctcatcaccatcgtcatcagtttccctcttttcttctcatcagccttaatataaaaccactcactcttccagccagttggtcacttggtgcgatagctgaggaccggagcctttgtatccttgcgatacgtgaagttataacaaccaaaattttcatgtagcccgtcttctctggccttcgtttggtaatgc

SEQ ID NO: 6132 - DNA, 1197 bp, Zea Mays
tgcaaaagtctcatcataatcaagtccttgagtctgttggaaaccacgagccacaagacgagctttatacctctcaatggaaccatctgattttgtcttaactttgaagacccatttacatgtgatagaaacaacatgcgagggtaaaggaacgatatcccatgtatcagtgcgttcaagagcagccaattcatcaatcatagctagctgtcactcaagaatctcagaagcttcttgataagtagtgggttcaacaattgccacactagctcgtggaaaaccataacgatctgggaggttcaatggtaccacggtcacgaagacgatatccctgattaaaaacatcattagactcattattattagtacaagaatcgggtacaggatcacgatcagggccagccgtagaaatggagcgggaacgacgaatgtagatttggatgacaggtggtctgaaagactaagaagaagatgacgtggaggtggaaggtgtgttataagaatgagaacatcagatgtggatgtagaagatgacggttcagatgcaggaatggaaggaagacacatgaaagaagtagattatgtgaaataatatgaggagtgagtagactgattatgaaagaaggggcgattttcattgaaactcacatctctagaaattcgaatacgacgagtagatggatcataacaacgataacctttgtgttcagaaccgtatccaagaaatacacactctacagaatgagcagtcaatttagtccgctcacgtggtggtaacaagacataacatatacatccaaacacacgaagatgatcataccgtggaggagtcacaaaaagaacttcacccggtgatttgccagaaagtttagatgatggttgtctattaatgagatacacggtagtggaaacagcttcactccaaaagtgtgagggaacaaaagaagatatcaaaagagtacgagcacgctcaataatatgacggtgtttgcgttcagcaacaccattttgggcatgagcaccaggacaagaaagttgagctagagtaccctctatggtcaatatctggcggaaattatcagataaaaattcaccaccataatctgaacgaaaaattgtaatagtaacagaaaactgggtgtgaaccatgcgagtgaaggacttgtaaacagaaggcaattccgagcggcgtttcat

SEQ ID NO: 6133 - DNA, 686 bp, Zea Mays
aatccgtagaacttgaccttaataaagattacatataatctaaaagccattacatacaagtattaattcaaaattagattcatcatcgctgaactggagataaggattaggttcccaattaataacaatgtggcatgtgcatacttaaaagtattctctaagaagaactgaaaaaatagagacaatgggtattccagttgaatttgcacatgaaaaacaacatcgtatgtcacttttacttgaatcattcaggccttcaagaggatagtgctaaaactatcaaaaatcagaagcacactcatgtagttcctccacataaattcgaaccagtcacaatgtacaagctctactcccctgtagtgttgaaaagaaccaaactggtactaaaacaccccaatgaagtttttaaataggcaaaaaacaacaaacatgtgtgccattctattgtcccaaaattttaaccaaatcatacatagagcagagtatcttcagttatcagttggtctgtactaacatgggtgcctatatttagggggcaactcaaacaaaccacctcaaatcaaagccctggtccaactaaatttcaagcgttcaaaacaattttttgcatcacgggatcagaaacacaaatttggttatttaagtcattcttggaatcagtggagagtcgtccacctaaaacaata

SEQ ID NO: 6134 - DNA, 414 bp, Zea Mays
ccgccgctcaaggcctctataaattgattccctagcctgctccgctaggttgttacgcgcccagtgcaccagccctcgcctccgattagccactgtagcgcctcaatttgggattttacccaattcggttctccgtgctgccgtgagccaccgcgccgtggaccgccgtctctaggtccgctctcatcctccttaccctcgtttcagcacccttgcatgctagggatgcttatcggcccaaccaattgaactagaccatgctagatcgtcgggaacacctcgggttgtcctcggttttcgccgtcgcagtgggcagagggatttcgggccagaatcgtgcaattgatggagggattagggtcgccaggggtggaatcaggtgtcaaacgagtgagaagccattgcatattccgg

SEQ ID NO: 6135 - DNA, 672 bp, Zea Mays
ccagattactgcattatcagaataaggccagattgctcttcaagttagatataacaaaagcatttgattctgtttcttgccctttcttgattgaagtaatgaaacatatgggttttggtctgatatggagagacatcatatgtgagcttcttggatcatctaccactcaagtgcttttgaatggcggtccaggcacaattatccaacatagaagaggcctcagacagggagaccatctgtctccaatgctatttattatttctatggatgttctgagttttctatttttcaaagctgaggaaggtttgttacagcatttatgtagcaggaaaaaattacacagaatatcaatctatgttgatgatgtggccctgtttatgcatcccacccaggctgatatctctaccacccttgacatcctaaaactttttggggatacttctggactccataacaatgctcaaaagtataatgtttatcccataagatattctgaggaaactatactggctgttcaaaacatcttaccttgtgagattgcttccttcccttgcaaatatttgggccttccattatccttacataaactttctaagcatcaatcctggcccttggtggacaaaattgctgataggttacccaactggaaggctgatttgcttaacagggcag

SEQ ID NO: 6136 - DNA, 344 bp, Zea Mays
gtggccaatagtgaccattcaaagtccatatgaggttgtgttctcagttcagcaggacaaagttataaggctccatgaacttggggtggatagaagtgcagctttcagcactatattgatttcaacattttatgattccattgtttgggagtattttggaagggctgttagttccatgcttaaagagcaattggtcagggatcaacagttcatggaaagtgacgaggagtgtataggattcaacaatgacatgcgccagtttgccatacattttttgtgtgttctccactaccttatttctgcaacaatgactagtgtgaagtgctgccttcgtgtcctggaac

SEQ ID NO: 6137 - DNA, 810 bp, Zea Mays
tcatactctgtgacagacttcttctcttgcttgtaggactgcagatcaatcttcattttctccaggaaggtgaccgggtagaacctcctctcaaactgcctgatgaaaacatcccaggacaggactcctggtgaagaggagtgagctgcctgcacgcctctccaccaaatctaagcctctcccttcagcagctgtgtgccaaagcgaacacgatccccaattccccaaacacaatctcgaagacattcatcttatcctccacgtaagttagccaatctgccgcctcgatcggagtaccactgccatcaaaagtgtccaacttcatggccatccactgcatcataggaagaccactgaaggcacctcagccccgcgacctgaagcagcacccgcgggaacagcgcccctaggcactcctccaccaccagcaccctaagcagcactcgcaggagcaacaggaatagcctacctcagaatggccaactcctgctgcatggcctgcatcgcggctaacattgccgccagactcatagaatccccactaggggcttgtgggctgccacgagccctacgaggcagcataactgcaaccacaagagtaagtaaataagtaaataagattggcatagcacttcatcaaacaatgtcaatctagcactgacaataacataagatatcaatagtaaagcaggaaacccatcctacatgtgcagtgtgtcaatttattattattccacatgctaggacctatagcctatacctctgataccaactgtaacaccccactgctcccacacaatgaatgttacc

SEQ ID NO: 6138 - DNA, 474 bp, Zea Mays
aagggaatggacgaggaggaggaatgacgtcaacggagcgagcatgatcatcctttcaatacatttcatctattcttcgtcttcacgtttataactgatccctctcttggcatataaaagaaggacaaccgacacactctcgatcttggactctcactctctcactcgaattcaatccgaccgatctaaggagaatagactcgatccaacccgacataatcaggacataacaccatgcatgaaacacacgctcatgaagcaaacacaaccctcgaaccaaagacttgggagctcctgcatctctcgctcagcttgtacccctactacaaataatcatgtaccggtagcgaaaaccagtgaatactggagtagggatattccaacagaaccggtataaattctcgtccaaaccttaaaacacgcataacaaatttgctcaacagtatgtctctcgtttcaaactccgctagccat

SEQ ID NO: 6139 - DNA, 614 bp, Zea Mays
aaaaaagaagagaaaggagaatagaaaactcacatattctgccaaaaaaaagaaatcggtccaagtcccatatacatgcatgcacgttttatttatttatttttattcttctctctaattctttattctcttgcgtgatgggttttccagtttagtccgtatattgttttctttattcatgttggccggagtatgtgttagcatgacatcaggtatgaggtcatctcattgcatctccagttcgctagcaaattggtcgttgaattctcttgcatgcatccgtttgcgatcggcatgtacagggccatgcatgtcgggcggaaggacgctcgcgggcaccggctcgtgctctggtctgcatgacatgtgggtcccttgagctgactccgtctccctcgctaagcccgcgcgtaacagaatctgcgtatctgcagggtccgcggcggcataaccggatcgcaccatcgggtgctggctgcccagtcctgggtataaataccaatgcctttcttcgatcctcatcccgtccaaccatgaccacgcgccaccataaaaacgagcaccccgccgccatgggagagaagggtggtcggagggagaaaagtggaatccgc

SEQ ID NO: 6140 - DNA, 1229 bp, Zea Mays
caccctataggtccgggatctcttctgcttcacagttcacacgcgccttccggcgcctggttctgctctcctcgtggagtggtgttcttcatttggtttcccctgtttgcgacctggcattgtccccttccccattgcttcgtgatgcgcaggattttcttagaggcgctcttgtcgacctcacctcgtccccacttcgcgttggcaattggcatggtcgtttgtgtggttgcagctcgcacacgcgtgaaacatggtctcgttcaccacggtagccttcttatacaacgcatcacactatccgactcagtcacaggaccgagacgacatcatactcgtgtcttaatcggggcgcaacaacccgttcgttacggctttcattcgtaccgtttaaacaaatagagatgatgtttgtcgtacttatcgctcacactgtcacacacaccaagatttgatcatctctccacggctagtgaaggaatggctgccgccatcgtcttcatcgcgtccgaacgccacaatccgactcccataaccgctactcctaatcgcgaaggtatacctctgttttacgttttctagtgactaagttacgagctaagttcatagactattaacagtggtactagagccaataatagtgttctttccttttatttattttattttctgtatttcctttaagttgggcaaggttttaagcttgagttcaaagttttaagaatgttttttccctgcaagaattttttttcttctcaatttcgtcgtaccttcttgcctcctacacactaagatccaatctctctgtggtctcccaatcctaaagatatatcatccgatctatttattgtctagtggttaggacgttaggttacgggttaaggtcgtagattgctaacatagtgctcagtaaatcttgcacggaacatgttgagtgcgcaacggttgaaccatggaattaaattcagaaatgactcccctcattctgacaacgatttgctcacgtagttgcgtgtcctgttcttctgaccagccatgcgtttccacaggttctaccgtaatagatgtcaggtttgatggcctacacatgcctgatccaagattggtattactatataaccatgtcattggacttacctggatccggcacatgcatatgttcttcccgatgaggcacacgtgcctcctgataatgctttcactgcaataagcactgacctgtcccgaac

SEQ ID NO: 6141 - DNA, 903 bp, Zea Mays
cggtgagctacagggaacatgaggaaggctagaacaccaattaaggaaacttgaactgaactgcagaaggctggccatgacgaggtgttcatgcggcggtattttgactgattttggggaaatgggaaattaggcggctctggtggataattggaggcaagtgctagtgcattggatgcgtaattacctagtggagttctctgaggcttcaatttatagaactcaacgaaggtggcgctcaatttggaggagaagcgctggcgaccggggagacgggaggttactggcgcaaggaattcgtggctttcaccgtggcaatttctcgggtgatggacaggcttgctacactggttcattgtgacgtgctaagcttccaagacgcgtggcgcatgatcgttaagcggctaacgccggtgaggatcatcccggccagctacagtttaagtgggtacggcgggcacaacgttgagcgagcccgaaccaattcgagcgctaagatctttgcttctctccgttatccacttgcactgggcacgaatcacagcggccgacgcgaactcgggcgctcgatcaccggcgacgaggggcggtgaacttggagatctttttcagtactgtactatggcgattaccatcagagtgtctaacagagggatttcaggagccaggatatttgaatttcatgtagtaactacttaatccatctataccaaatttgtagccctataatccagctacaatcttgctatagcaaccatagtcaaacaattactggatcatggtcgaatccaatctcaaagcttgcccaacttcactactaccccttattcagttcattggatgactgtcagcttgactttagacctaattatctccaaattttacatgacaccaaggcttaat

SEQ ID NO: 6142 - DNA, 451 bp, Zea Mays
gcatgagcgagcacggttgcccctccgacgacggcatcgtccaaggaagcgaccctgtgaccgtccgcagatttttttaaccaaaagggcaaccatcacgggtcacgagggtcgccactcaacaaggatgactacatcccaacagagcaacgccaaaaaagggatcaaggatctacgttaccgttacacagaaatccagacttacaaccttatttagatcaactaagccttactagacgcttacttaattgtctacaaccgatcaatctcagctgcctggaatcaaccataaccgatcaaaggcaagctaactgacaacacacgcctagaaaatcagaagaccaagcagattgtgagacaaaaacacagtcaccacatgatacttcttgtcactggagcccacccgtgcgcacgattaaacacctctcttgtcgtctctgtgattcgctta

SEQ ID NO: 6143 - DNA, 594 bp, Zea Mays
ttttcttgagctagcttgtaaatacgtggattgtgtctttgttcattacataacgtgttctgagcaacacagaaaactagatgttgatcttcctccacatggtttttggtggagcactaataatgtagtatttgttattcaagctgtctgtttctgggctatttacttttattcgttagtttcttggttgatagttttgtagtaggtgcaatggttgctttttctaatggacgcaaatgattaaacaagtaccccaattgcgttgttctttgggtttggtgtgcatgctcaaatgtcatagtgcactgtatcatcgttatagtatgacttgtcctattgatgctgtttggcccaagcagtggagctttcaatgtctgatctggaagaatgtgaaaaatggaatacctgtcactttcaagtgctcatacagttgtgccttatcactgttttgcggttccattaggtttaaacctcctccccttcttcaaaatgagtgaattgatgagtgggcgtgtgcatatgttgtttgatgtgataaggtgatcaaattgtttatctgcccaactcctaatgtgctgcagctgcctgtattac

SEQ ID NO: 6144 - DNA, 531 bp, Zea Mays
gttggtggtgcagttcacatttctcattggaatagctgggatttggagctcatagtatacgcatggatttcgtcctccggattttgcacttgtgcattgatgtttgtgcagtggtattgttagaactctgataactttgtatccattcccctcatttgtttcatatagaatccagaataactgatacattctttttgtgcgtgggtagtagacttagaatggacgaatatgtttgaaaaacaaaacatcttgcttgggattattagttactcttcatgcagtagcactacagttttgtcacgactatggctgtgcagtagaccagtactaagggtctaacagactaacaagtgtaaaatgcccagctgtatgtgttttgttagcatctgtgcttgagtgcttctaagtttgcatgggatgctgcacaatctgttgatgttgttggaatccacaagcatctgaaggggtattcagattattctttcattctgataacgcagaggagggtgctgttgtggttgctggaagcct

SEQ ID NO: 6145 - DNA, 1032 bp, Zea Mays
tgcttaagagagtgagcatagttgttatgaagaattctgagataaatgagcctaaagttggactgtcaggctgttatggtctgaattttcagactagcagtggactaacatcgacttcaagctaaattctgagcatgatccagtggaaatctacctatggttgccatagcaagtttgtagttggtataatgctctacaagtttgctgcaaagattaacttgtgttaccacaggaattttggagaaaatcgaccctcaactctggctgtcaggtgctctgatggggtgttcaccatggtacagtgtacagctgaaacagataagatcgccagcaaacccaccaccgacgaccaattccaccgtgatttgtgccgttgccggcccaacttgtgctcgggatgggcgggtaaggacacacggtaaaggatcctcgccgacggtgagctggagatcactccagtgactccccgtggctctctcttcctctttgcggttgagcggatttacttaccagtgaccgccgcctcccggccgtgcgccgcgtggcttagcctttccaccgcaccgctgtgacaccttaaggttgtcccatcgtagccggggagattgccacgccgttagccacggatttacttatgccagtgcttccttccatctccggccaccgggcgtcttactcaaaattcgcggccaccgcccgttagtactataaattgagtgcaccatcagcttcgttatgtattcgagcatctagcgcacccttctgcacctcaaatcctccaccagaaagcttcaatttgggatttcccccaaaacactcaggaactccgcacagctagacctcgccgtggtcagcccgattcaggtccaatctcaccctcggtttccttgtttcaacatccttgtttgctcttgatgctcaccgacccgttaaatcgaactagaccaccccaattcgcgggaacgtgtgctcccatgctcggtttccgccgtgcacgtggaccggccgttctcggggtgttcgggtcaaatt

SEQ ID NO: 6146 - DNA, 596 bp, Zea Mays
ttacagtttgaagttcatcttggaccagcggctctccaccattccccaacatacatgggtcagaaaattatttggctatgatttggttgtagaatatcgtccaggcaaattgaatggggctgcagacgccttgtctcggagggaggaacccatgggctctgtgcacagcatgtcacttccaacattctcgttgtttgacaacttgcgagatgaggcaacctctgattcccaggtggcggctgttcgggctcagctagcagcagggacggccaaagaaggatggactgaaatcgatgggttgctgctgtttaaaggcaagatctttgtaccagatgcatcatctctatggcccctcctcttggccgacgcccatgatggggcgcatgaaggtgtcgagaagacggtgcaccgttggcgggctacattctataatgctcatgccctccaacgaatcagagattatgtgaagggctgctcagtgtgtcaacgtaacaagtcagtccacttacaccctgccgggctattacaaccattatcaataccagcaggtatttggagtgatatttccatggattttgtggaaggttttcccaagg

SEQ ID NO: 6147 - DNA, 403 bp, Zea Mays
tggaaacggcgcctcgagcctatccacgtcgctccaaaatttcgtagtcgttagatttgtcttcaacgcttaggatttcagatcgtgggttttcccagcgtttgaatcttcttgccgactccaatctcctcctggactccgtatgaccatgcctacccccatcctcctccttcgccgccgacgaagctgaagcccaatctatccgacgaggcgacaaccttggccacctgctgctccactcactcctgcgtcgcgtggacacgatcgagcacacccttccctgctggttccggtcctcacctccggcttgccgaccggtacacttgaactctcgcccgcgccgcatggtcagctaccacgagcaagaggtggacgacgatgaatcggagacagaatactcgcc

SEQ ID NO: 6148 - DNA, 392 bp, Zea Mays
ggagaaggtggtggagccctaaatggcgatgcttgtggtggagacggtgggtcagaaagaggatgaggagcagcatgtgaagattgaaggggtgatgatggatgtacaataggaactaaagtttgaggaggcagagatggttggggatgcgatggcgacagcggtggtggatcaaccaatttgacatcccttcgagaccaaaggatgaaattttttatggcctgtccaagtgtctcaataccttcgggcccagggatgtctaccatgttgtcctcggatccttagacgaccattgacacttcttccctgcaataatcatctggaatgtcgcttccatgaaacttgcgtcctgggatcgcaatgtttgtgcctactttcttcatacgatgatt

SEQ ID NO: 6149 - DNA, 404 bp, Zea Mays
cttgcgggagtgggaggcacttgaagctgagcaccagcgcctcagtgactggtgcacccaactggaggagcgcaccaagacggcgtcccgacagttcacctccatgcggtcccaactcgagcgggaccacaaggagtacaagaaagaccctcagagggtgtgtgccagggagctggaggcgacccggagggagaagaaagtggccaggagggaggaagccgtgacccagaaggaggccctcacgacggagtaccagaccaagctgagtgctctggacacgactctggaagcccagcaggcccagcaggtaaaggtcgtggaaaggctgcagaaatggcagcaagagctcgagggcaaggccagcgacgtcgccctcgctgaggaaaaccttaaggagaaggagc

SEQ ID NO: 6150 - DNA, 507 bp, Zea Mays
ttaaaatgagtaagttatactcattcaagggtttccatacttattttacacctacaaatgattattaactacttaagtaattgtttatttattttattctagacttttggacgacgggcataaatcttagaaaacctagggggttttatcaattttgcagggcacagatgacattaattcgtacaggccggggacgatgggtttattacccttaaccctgagggctcattagcaaaatcaccacagccgcccacacacacgcaaaccacggccattggatccccatccaacaccccacaacatatcccgaagcggtactcgactacatcagcctgatctaagatcaagggctgacacacgccctaatctagtgaccgccaggttcgcatccaatggctgcgaccaaatgcgcgaacggttaagtgttgtcatgatctcgctcgttcatatgaggtcgacggccgcaagccctttcttccccacggtgccgagtgaggcggcggaaac

SEQ ID NO: 6151 - DNA, 400 bp, Zea Mays
cagggggttctggcgtaagtttaccgagactcagagaataggaaatgaggacggcgggttgaataggtacaacctcggggtctctttaacaaaatatacccgcgaaggggtatctacggtttctggtcgttggatcgtaagtggacggctaagattagaaggctgttaaaacgaaccggtttccaatctagacctttggatctgaatctaacgatggcaactctatgcacgcgagatcggattggatccgtcggatcatatccaacggtccacggtccaagtcctaaagggtatggctcaggtctaatctccaccgcccaaagaagatcaaacggttgatctccgacatcccgcctggccgcacgccggtgacaccaaaccagagtgcgacggtggcgcg

SEQ ID NO: 6152 - DNA, 773 bp, Zea Mays
gaactgagagcggctgatcacggtggggtcacacacggtggcgtagacggccaatttggcggaagaacgaaattctccggctatggtggctaatcgaggatgagggttggtgctctggcttcgtaacaatctagcggagctatttgtgcactcaattgatagtatccgtgagcggtggctccgaatttggaagagggaagctggcgaccgaagagaggggtgagtcaccggtgcaaactaccgtggcgttcaccgggaaaaaggttacggctgtcacttgtttatcctccacaacacacgacaacgtggtagaatagcttaaggcgtgtcgtgaccgaggtaaatggtggcacgacgacgacggtcgtgtggccacgtcgccggtgcaagtgggtacggtgaagccggctcaatccattccccctctgatctttttgcgtcctcggtaatatcctccccgagctgagcatgaatcatggtggacaacacggatcacagcgcggatatcatcggtggcgaagttcattgaatctgatcttgttcagttattataccatcgcgaacacccatcagtgtgtctgacagagcaagttagagggctttattctccaatttctatacaacaacccattaatccgtctggagcaaagttgctcttctaaaaaccagctttgattttgttatagcaaccttaatcaaacatccactggatcttactcaaaattgctctcaaagtttgtcccagttcactatcagtcgaaattcagcttcag

SEQ ID NO: 6153 - DNA, 678 bp, Zea Mays
ctgattcaagctccggtattagctatcccaaacttccgcaaataatttatcattgaaacagatgccagcgggggaggaattggtgcagttctacaacaggaaggacaccctattgcatttatcagccgagctttagggccaaagaatctgggattgtccatttatgagaaggaatgcatggctattctctttgcaatggaacaatggcgctcttatttgcaacatggtgaattcataattaaaactgatcaccagagtttaacccatttggatgaccaaagattgtctactccatggcaacaaaaggcattaaccaaattgcttggtctgcagtttcggatcacatacaaacagggcagcgaaaaccgcgtagcagacgcgctgtcgcgccgtcctaacttggggcaggatgattttaagctgcaactgaatgctacttcggtgtcatcagttattccgagttggctgagtcaagtagctcaaggttatgaccaagatccgagtgccaaaaagctactgagttgtttgcttacgggtgaaacaatggaacactacactctgtcccagggcatcattcggtttaagggaagaatatggataggagcaaacaaggccatacaacaaatgattatgtcggaactacatgaaagtgccattggtggccactctggatttcca

SEQ ID NO: 6154 - DNA, 1053 bp, Zea Mays
tggatttctatttcatcaccaaacaagtccctagcgacgacgcgttcgtcctccggccaccccctcgttgggattcgcttcaaactgtgaggaccgccgaaacctagtatcagatcatcatctccaatcccagacgagcctagttcatgccctaattgaacacatctaacccgaaattccatccgcccactacgacggtgaataccgaggacaggcagaggtgttcccaatgactagcacggtagcattcaattgatcgagtctatgagcaacaggagaccctaaggatgctagaacacgaaccagagaagcacgaaccaaactgtggatggctggccacagcaatgtgtctcgcagcggcacaacaaaccgaattaggggaaactgaaattcgggagctatggtggacgatttgaggtgagaagcagtgtgctgggcgcgtaacaagtaggcagagcagggtgtgcctcaaatttatagttaccattcaagtgtttcacgaatttggggaggggataagcttgcggccagagcgaaggtgagtcaccggagttcgctaaccatttcacacgataccatgcgacgtggtaacatggtcagtaacgtggcatatccggggtaacggggaccaccacggcaacggccgcgcggccacgttgtcgggcaagtgggtacggcgaagctggctctatccactctccttcggatctttttaccccccacccccgtgactatccactcgccacatagcacgaatcgtagcaccggtgcggatcacggcgcggagatcaccaacgacaaaattcactgaatctggcgatcttgttcagtccactgttcaccactgaacaccaccccgagctgcctgacagaccaagtttgggagcaatttactctaaaaattgtacaacactaggccaagcttagtataacaagtttgttcattaatattagggcttcaattttgccacagtgaccctggtcttaactccactgaatcaatcacaaacaatcttcaaagttgatcaaatgtcactgaacttccaattttta

SEQ ID NO: 6155 - DNA, 599 bp, Zea Mays
gatgcggtctttttcgacatgttgcatctgagtttttgtttttgtgggggcttttgcaggtatattacatggctccgcctcgttaaaaacctcaccccccgggaggaaaagagtgcgggccggaatggtattgtttggtggattacaagggtgcgtgggccctgagggttaaacaaaaaatttgcggagattatcaatgttccaggagtgctctaagtcttcgtcggagggtgttcatagcctgtacgcgctgggggacgccttcgtcttgacaatgaatggaccctcccatttcggctctagcttgccccgtgactctgtccgggtggttcggacgagtacgaggtctccttcgttgaactctcttgggacgaccacgttgtcacgccagaccttggtttgagcttggtatttgttgaaggcctgcatggcgaggacgcggtctccgtcgatgaggtctttagacgttggttcgtcgatgtcggggactactgatgtgcttgttcggggcgacccatgctttatctcctgcggcgtcatggcctccgatccatataatagacgaaaaggtgtgaatccggttgcccggcattcggtcg

SEQ ID NO: 6156 - DNA, 943 bp, Zea Mays
ataccatgtgggaaaccctaaccctagaatagggtggggtgatgtattaatagtttaggagtgttgggccaggcccattacagagggggcgagagggtaattacataggggagagccccaaaccgtaataaccctaataggtattctaacatttgagtttgcccaagtttacaaagtttctattccatactgctgacactgcatttagcacccccctttgattgtgttccaatagtctttataaaacctcccagtgaaaccatcaggccctagggccttatcagaaggaaggtttctgatggtatcccatacttcctgatctgaacaaggggaatccaaatccgagaggtcatgatatggtagtccaagagcctctagatcaatagttctctctgtgaattcagactgtccaatgaggttgttgtagaattggtccaccagagctgttttttcaggatggttaatacagatattttctctatctcagcctggtcaccaaatttttcttttttcggtatctggcatgcatatgaaaaaatttagtgtccgcatccccttcctttagccatgagattcttgatcttaaccttgtcattgttcttctaaaggaggctaacatcaaggactgcttcttgagtttattccttagccataattcagcaggtgtaagagccctatgatcctgggcaatctcaaatttatgcaatagcttctttgccaaagaaagctaggaagccacatgcccgacctgcctgtcactccaactctgtaatcttgtagctgtctccttaattttcctatccaaggtcagaaaaggacaactggaaggctcaacagcgttccatgcagcctgacaacttcctgaaaaccttccatcctggtccaaaaggattcaaagtggaacctcttcttgccaagagtattgtccttaacacctaaaagc

SEQ ID NO: 6157 - DNA, 737 bp, Zea Mays
attaaattggattttagactcgggagcatcaaagcatgtcacaggcacgtcaagtgagtttacatcatatatgagatatccccccacacgtaaagaaatgattcaaactgctgatggtactccacgacctatcaagggtgttggcacagtacaatgcacttcatctattaagttgtcatcagttttgtatgtgccaacttttcctgttaatttgatatcactaagtgctttggttgatcaattggactatcagattatacttgaccgagataattgtttaattcaggagaggagaacagggaaaagacttgggacagctaccaggcgtagtggattatggtatatgtaccatgaggagacaaatgatacaagatgcactatgttggcaacgaagttggaagagaaggaagttgtagtgatgcttttgcattgtagattcgggcatctctcttttgataagatatgcaaagtttttcccgatgtaatgtgtggggtggataaaagcaagctattgtgtgatgcctgtgagtttgcaaaacacacgaggacatcttatataagtcgaggtatcaggagtatatctcctttcgtgctagttcattctgatgtttggatgtgtcctgtgacttctattaatggaatgaagtactttgttacttttattgacagtttttctcggatgacatgggtctatgtgatgaagcataaagatgaagtgttgaattgctttcaaaaat

SEQ ID NO: 6158 - DNA, 316 bp, Zea Mays
gttttgtagttctactatctactccctccgtaccactataagtgcatttggttcaggttatgtttagatttgtaaatttgcactacaaatccatcacatcaaattatttatccatcgtatcgagtcgtcacatcatctctcacagcacgtgtttcaatacacactttttcacaagttacgactttagctgcaccttaatgcactattcatttacacaaatttggagagctaaacaagcctgaagtgcaaatttagtatatatctaaaagatgacaatcagtctggacattgcagcataggccacgtatacacccag

SEQ ID NO: 6159 - DNA, 665 bp, Zea Mays
ctcgggacgatatgggtagtcggggaggctcgccggggtatgggtaaaccaatgcccccaccgatttggcgatgtgatgctcggagtggacgaaatcgcgtaccgagcttccgacgccgccgcggatccgccgtacgctggggatggggtttataggtgcacaatccacggtaagatgcccttgaccgtgttcgtttcttcctcctaattgtttttgtcggtgtacattcgccattttgtgctagtgcttggggctgggtgggccggccatggtgaccaacgcgggcgggacgttgggcgccgctgcatccgacctctggaacaagaaggcgtaatggtcgtggattcagtaatagacgacacgaattaaatctcgcgtaccctttcggctagaacaggtctgggttgtagatcatcgatcagagggcccgtactcgatctgtagcgtggcgatttcgggccattgatctttgatcctagggcagtgaacgcatatcggattataaccttccccgatctaatcatggccctagatgcaagatccaacaaccagaattaatcagtacccctttggcccgctctttttgctaatgagcccctggatttcttaaaaataaaacccgtcgtccctcgatggttagagattcttacatcgaagtccctgt

SEQ ID NO: 6160 - DNA, 685 bp, Zea Mays
tgcgggcgtgctctgagcgcgcccccgagtgtcagcccacgtcgaacatgtgtgggtttacttctgccagggttcaacgaccgatttgattgccttagcgtgcagatcttggcaaaacccccgtgtacggtctcttccctgcaccaaatcctacctttttgatgtaagttccaagcaaggatacggtcgaagtagagagatatgggggtgagaagtcggctctgtcagagctgtccacaccgcgacaaaagccatgccaagtcatgtcaaatggcttagggttgggttctaacttttccagggtgttctaggggtctttgggcgccattttgtcaattgggccataaggttttgaggttgggatcaaagtgaacatgtttgatttttgaaagagggtcggttttgaacttgagaaaaacttgaattttcttttatgcctttctctttggtgacctttttggggttcttctgaatcctttttggggtcacactctttctatgttttgtagggtattaagtgtactacaacttttataattagtccaagtcatgacaatgtgatttacatagactttttgccataatcccctctagggctccatttgcctataagggatgtgaattagggtttgggtcattcccttctcttttgtgcatgataaggccaaggcatgacttctaagat

SEQ ID NO: 6161 - DNA, 293 bp, Zea Mays
cgagacccgagctctcgtcctcgacgcggagtttcgcaactttcgctaaggcgaccactccatcaccgactactgctgcaagttcagagggatggctgatgccctcggtgatctcagtgagtcggtccttgaccgcactcttgttctcaacgtcattcgtggtctcaatgagtgtttcgccatcatcggtcttcatctttgacgtaggcaacctctcccaccttcctggaggtacgaaatgatctgctgcttgaggagctcacccttacgcatcactccatagttttagcttc

SEQ ID NO: 6162 - DNA, 604 bp, Zea Mays
cttccacacaacattgacgtgatgcacactgaaaagaatgtcgccgaggcactttgggcaacgattatggacattcctgataagtcaaaggataacgtaaaggcaagagtggacctggcagagttatgtgatagaccaaaccaagagatgaagccgcctagtgatggaaagacatggagaaggcctaaggccgatgtcgtcttgagcagggcccagaggaaggaagtactacagtggatcaagatgttaatgttccctgatgggtatgcagctaacctgagtagggggtgaacttatctactctgcgagtcttagggatgaagagtcatgactttcacatatggattgaacgaattcttccggtgatggttcgaggctatgtccctgagcatgtctggctagcgcttgcagagttgagctatttctttcgccagctttgtgcaaaagagttgtctcggaccgtggttgcagacttggaaagattggcacccgtgttactgtgtaaatggagaagatctttccacccggcttcttcaatccgatgcagcatttgattcttcatctcccgtatgaggcacgaatgggggggccgtgcagggacgtt

SEQ ID NO: 6163 - DNA, 432 bp, Zea Mays
cagggcagctgcaaaatgtccccttaccactaccttggcctacaactacatactcggcgtctccgaaaaaaatcatattcatcacctagtggaaaatattggagagtggctcacggattggaaaggacaacttctcaaccgggcaggacgtctcactctagtcacatcggtgctctcctccatcgcgatctatcacatgtccaccccctgcacaatgggctaggaatcaaattgataagattcggaacaagcgttctgtggaaataatgcacacacatggccctccctgcgcgcgctcccgctgccctccctgtgtgcgccctcgctgccgctgccagcgatgaagtcgctgccgctgtggtctgatctctcgctgttgtctccctgctcttgcgctccgcctcttcgtgtgctttggagcaatggggagtc

SEQ ID NO: 6164 - DNA, 514 bp, Zea Mays
gagctatgtcatggcttgacggaggaagatcagcaggaacaatttgaagaacgttgccaggggtgagttcagccccaccggcggatactagacttctcgcatctagctcgctgacctccaaggcgacttgtttgttcgaaaccgtagaagcatgcatcgctatcgccccatcggattgaggtggagacgacccaacatgggacatccatggacctgtgggaaggaaagctcatctgaacacccttgggggctgggttgcagcttgtgccacccaccagagccgggtcactaccggcaacaccctcgggggctgggttacagcttgcgctacccaccagagccggatcactaccggcgacaccctcgggggctgggtaactgccagcaccaccctcgggggctgggttttctatagcagccacctctaaggctgaaggcttccctgtcacctccatgtgagtcgagcaactcggaccaacgtcttggcattgaagactgccttccaaagtcgacg

SEQ ID NO: 6165 - DNA, 595 bp, Zea Mays
ccgcggaagggctagatgccctgacctgacctgacagtgcgatcggggtgtgagttctctgccgcgtcgggattctcaccactgtaaaaaagaaacaacaaaggaatcagcgatgttatggccgctgtcttgttggaatatacgtcaacagagaagggaaaaaacgtcacattttaacagcaaatataataagcccaattaaaccaggtgacagcagtagtacacgcattacctgaaacagacgcgtcactgaaagcccgaaaagtgcggtccggtgccatgcatgtgcgacattcatgtgtgagcaccccacccggcggcacgttcccaagttttggaatacccgcaacacagatttgtggtaccggtcctccgctcccggccggcagcatacatacatacatgcaaacgcagcgccatcagcggacaaagaacaagcggaagccaggaccgtttgatgcgcgcacatgcatgtgcgatctggcacgcgtgcgtacgtgctagcgtgcatgaccagtcaatgaaacaccctgagatctagattagattatacacccccaacacaacgaccaccaccaccaccacacacacacac

SEQ ID NO: 6166 - DNA, 276 bp, Zea Mays
tcgccgcggtcgtctgtttttcccagccaacgctcccgaagcggcgaagaggctcgatagaagcccctgaccgcgcaccaaccccgaaggagaacaccagtggtgtccccacacggcgacccacccctatctctctctcctccaatcgctaggcttgcacggcggcggaagtcgcaggatgcttggtctagggttttcgccaggcggaggagggagcacacgccgaggttttatactcccccgcaggtcgatacgggcgcaagtggtgcggtcgag

SEQ ID NO: 6167 - DNA, 3294 bp, Zea Mays
gagagggctgcgtcggaggtggcaccggcactggctggtggtcaggggcgccctgcagctcgtgctggcaagggatgctcgggtcggggcaatcgtgctggcaagggatgctctcgtcggcccagtatggagattgagtatggtctctgcgctgtctccctggaccacgaggctgtcaagacatggatctatccaagtgagggggtttgagtttctacagcattttgccaataactgttctttgttctggttttcatgctgggattcagcttatgggtggagttgtcttggaaaatagacatctttagtgaatgctggcactttattagttaataatggcagccatcttgcttgaggatacattccagcagttcttgctggtactgaagtgtacaagatgcttgggaatgcggaaactgactctaaactttgttttgttaagcacttgagcagccatattaggtagacgattgcatcaggaaatcaagcaaaaaactataacataaggataagtggtttagtttgctggagtagcactgcacccatagaagcatgcacctcttttagttgaagcagatagagatggactaggagcttgtccaccctttgcaatatgtttttgttgtatcaaacaaatgtcatttttgaggatgttattgttgcaacttcttagcttggttatttggattttgggatatcttggcttgattattcatgtctttagaatgcaggttttactaggccttcacatgagttcccgaaccactgtcagggtttccacttttagttgcagattaagtattgagtgcactgtggttgtcgtattctttagtacaactggattacatgtttgttgctcacatggttgattctattgctccgcccattgcatctgctaacaactgttaaattgcactattttagtatagtggtatgagatggatatatgcattctactaaatgatatcttgattgtgaattgttaatgcgcaacacttcaattttttccagtttcttttatctgttgaaggaaatccttgattttttagcagtagctgcctaaacaccatagggaaacacccagatttcaacatggatgcacaaagtttcattcctcagatgcaaatgactagacgacattaagcgatttggaaaatagacaatggaaaattcctgtcaaagtttctgtttattttttctggataatggttattgttcagttcttatagaaccatgtttgcttcttaaatacactgcactagataactatgttgttatatgcaatccaagcagcacatcttgccttagtaatttattttggctatttttatacgcgctgcagctaatgtagaagtccgagagtaccagaagtatatggttgaaaaggctctgtttaccaatacgttaatagctttgccaactggacttggcaaaacttttattgctgcggtagtgatgtacaactactttcgatggtttcccgaaggtaatgtttcacattgcattgtaaccgttttcttctctgatgctgtattttatgaactttgtggaaattgcttgctgaaacattgtttttatttacaatggaaattcaggaaaaataatatttacctgcccttcacgtcctcttgttactcagcaaattgaggcatgtcacaatacagtgggaataccacaggtaccacaataaatctgctgttggtgattttcttatttttatttaggtagaagtctatttttggccatccaattattgcccgagtttgtttttggccatgcaactcaaaaactataaatccttggccactgaactatcaatactggacaaatgtggccagtttcaaagggcttttgtattttctgaaaatagtaaaagctggtttattttttaaatgataactaatttattttaaatcagaaaaacatgaaaacggcactgattttttttttaaaatataatgtgtctattggtgctgaaattggagttatttggattttatttttgccattcctagtgttttattgcttgcgcctgttatttttttaaatcaccattttgtgccatattaaacctagagatcaaacaagagaatccatactcaaaccaataatgttgattaaattaaccaaattatttttggaggctagcaatgctatactagttgcaatggtatatatctagtggagcacggcacctgcaaggttggtgtcattttccatatctttttgtttactcatagtgtattatggatttttaaggtcaatctcgggtataatatagtgcaaaacgatgatttaataagtaacgaacataactacgagcaataaaacacttgtaatggaaaaacaaataaattcaaatagagcaccaacaaatggattatattttataaatattttggtactggtttcatttttttctgatatcaattgaattggttattattatttttcaaataaatcaactttattgtcttcagaaaatacaaaagcacattcgaaacaaattgggtggccaaatttgtctaatcttgacagtttggcggtaaaaaattctacttttagagttccatggtccaaaacaaacttgagcaatagtatggtatctataaatctcatttttgctttgtgctgtacatttttctgtaatgcgctgcacatttttctctgccgcatgctggaaactaacatagttatgcattttcaggagtggataatagatatgaaaggagatcaatgcccttctattcgatcagttcactggaagtcaaagagagtgttctttgtcactccacaagttcttcagaatgatatacaatctggtgattatttgtaaacgtttctggaaatctttattgctagttccagttaattaaacttgacgctcagacaacaaaaataagaagaaaacaagctgtttccattgtccagaggttgtgatatattctttggttgttattgctaatccatcttgctatcagttgaaggtccgtttactatttttagaatgataactgaacacgaacttacttgaaaatcagcatttaagaactctatatagttggtttttttgttttatgttcatacttttgttatatgcttcaattttacttttattatttatatacattttttcattataaactttggttttaaaaggtatatgcatggtacaacaaatagtttgcttagtgatagatgaggctcatcgagcgtcaggaaattatgcatactgcatggttatccgagaggtatgtttcactgtcatgtactacactcatttgttttacctgc

SEQ ID NO: 6168 - DNA, 467 bp, Zea Mays
gtggaccccctaggtcagtcttggggtgtgcttgcacatggcatggctctttctaacgggtagtgcactactgtactcttgttgtggtgtcctgtctcattcgttcggcgtacgagtccatgtagcttgttcgatgacaacatagtcgtacctgatgggtcacacagagcatgctcatggtgaggttgagggtcgtgtttagtacgacttcatatttcatcatggccctttcgtaaccttccaacatgcatgggcatgcaccaggtatggtgtgttgtcctatcctttctggtacgtgggtctttactatggagactcttatgccgaggtcccccttggtactgcatacatggcccagacatggtttggtgttgttgcgtcttgtcgcagccgtcttggaccggcagtgtcgagctaggtttcttccttgcgggtccgctcggcggggacttggtcgtttgccccgg

SEQ ID NO: 6169 - DNA, 360 bp, Zea Mays
cttcgagagcaacacaggtcaagcctagcacttcgtcacattccataacttcaacttcatagataaaaggtgtccgctctccactagcctgcaatctacccctaccagcacaactatcgatcaagaaattggcccaagtacagtgacaactctaacccctcacaatatattatgagctactaagtggcaatggcatcctctagaggtgaagataatgcaatggcaaagtccttcatcatagctctagagggcccagctctcacctagtacacaagactaccaccattgtccatcgactcatggaggacccttcgtgagaactttttgctcaacttccagggctacaagacagacaccgat

SEQ ID NO: 6170 - DNA, 618 bp, Zea Mays
gtctaaatgggaaaatgagataataaatgattttggaggaatagctagacatttggatgaaatcatagaagaaggcaaccagctcaattcaatacattccacacttcaaattgtaaacactgagatgtccaagttaaaagatcgtatgcaacttcctctccatgttcccatgatcaagccaatagctcccacaaccttgccatcatctgtaccatccaaatgggttcacgcaaaagtttcagagcagtggaaaaggctagagattgagaggaaaatccttgagagctcaaccatttctaacttgcaggttagctatgataatcttgatctgcaactgaagttgtgcttgttatgcttctctgtcttcccagaaaattctatcatcagcaagagggccatgatccattggtggattggcgaggggttagtagcagccacaagaagtcagacagccgaagatgtcggaaaggcatgctttgagaagctgattgctctagagatgattgaaccggtgtatcagaaatgcaggtatggggtaaaccaatgcaagttacacccctggattcgtcgtatgttgattaaagttgcaaagcaagcacggttttttgaatttgattc

SEQ ID NO: 6171 - DNA, 457 bp, Zea Mays
gaaaaggtgtaggcggagcttggtaggagagagggggaggccaagataggtctaggggaagccttccatatggccatcaatagaggaggagatttgttgtgtgtggtttgtgttcatatgcatggggatggctacacttttactgaagtagatttttaggcttgtcatggagctaaaatggttgagtgttggttttaggtgtgaggcatcctcggggtggcctttgaggaggatcagggtgtcgttggcataatgtaggaccgtgcagggttcgcggggggagaccgggtgcctgatgtgggggtcacgattaatgatcacctgcaacatgacggtgataaggatgaagaggtaggggacatagggttcccttggcgtagcccatgtttataggtgaaccaagggacaagggacccattcaccaggatatcagtttttgaggaggctagaaattttg

SEQ ID NO: 6172 - DNA, 663 bp, Zea Mays
tcttacggctcagtcgccttctcacttcactctgcccacgaccgtcgccgctcacggtgcccgccctcagcccgacctctccctccccctcccaccgcagctccaatcaatctatcgtttcctccttctgctccttcgcctccgatgacgatgccgagcaccgctggcacagcaacaggtgccaccacctcctcgaccggcaccactcgtgttccccatgtacgaccagcaccacctccatcgccgacgagcgccatgtgttcctgaaaaagcgtcgccacgggatacacaaccacggtgagaagcgtgtgcgcctgcgcgaacactctgcggtgcgttgcatgctatgcgttgtgctcctccttctcttccttcggcaaggatgacacatgcaagatgacgttatgtgttcctcaagccgcaccaccatcgggtatgccaccgtggtagccgacacgtgcacacacgcggacacgctatgccgcgccacacgtcgtgccctgctactcctccctcttcctcctacaagtgcagcgtcaagaaacgaatgtcgccgcggttggtagtggcttggtccattcgcatgagctgttcgatgctatgccgcagtggattgctaacgactttgtccatgcacgggagctcctcgatgctatttgtcac

SEQ ID NO: 6173 - DNA, 397 bp, Zea Mays
ttagcacacgaggaaggagaaggagaggtagaggatgataagttcggcgtgaagaagaagataggggatggagatgacggcaaccagccagattgttgtggttttttttggattaattcgtcgatagcttcttacagtaccagagtatgcttataaactattgcacagtctggcccagcaggccgattacacccattcggcccagttactcgtgtgccgtcgtggtcgcgtttggacagcttctttctcctaatgcttcttcatagtgttcctttccgatctcctgcatcacttccttgtcgccttgctcttcagtggtcttcagggcagcattgctcacagtatgtagggtctattggccatagcgacgtggcaaatggtggccggcaaccaaaca

SEQ ID NO: 6174 - DNA, 562 bp, Zea Mays
ttgtcttgccactttcattcttcctttctatggcatctacaaaaccttgaaacagactcacttctttatgaatagtactactccatcgatgcttcaaggacgaccaattgcgatccgaatcaaaattcttattgtcatgaaagtatttttcaactctttcccaaaatctaccatccttttgatcctttccaacaacagcatctttacttatattaagatatgctgaaatcaacaatatatcttcagcttcattgaaattcttggaacgaccctttggttttgactgtgagatcaattcgttcactggtggggactcgataacttcattttcagttctcatgttttcctcaaggataaaaacatcgtcatgctctcggttcagtaggttagtgaagtacccaggtgacatcgagctgcaaaacataggagtaaactattgaagtgaacaagacattacttgggcatcaatcgaacaatttagtgtacatttaactgaacatgtcgttgaacataccaaccgccatgtctataattgcatacaaggcattactacaacaacaac

SEQ ID NO: 6175 - DNA, 765 bp, Zea Mays
ttcgagcgagaggatgtcactattactgccagccagattcgccagctctttggttttcacgagtcgtcgacttgacttcacagcttatgctacggcacctctgaccctcctcgtcgccctcacggcggtgtggcttcgggtacagctcacgtcgcggctctgttccgcccgcccttctcagatgggtcacgacgctcaccggcagatttcactacagtagcgaagttcctatttcagcttatgagacggacacttctgccgtggatgggatacagggaggctaccacacatatccagctctggctccttggtgccctggtctctcactctgagtttgacattgttgatttccttatttgtgagatcgaggacaccgtattggatggtatgcgtgctcgtcgtcagctgccatatgctcactacttgtgccacatttttgctcagttgattcggcctccacagttccagggcacacttgaggcctcacgccttgtttttggatcctaccgtccaacacctgaggatcctgtgccagcttctgctccagtgtttgacactcaggccgaggatgctgctcttcatcagttcgaagctcaggatgcagcagttgatgatgatgatgattttgggattccacctccgcctccgcctcctatgcctccatgctcacatgatcatgaggttgggagttctcgtgctacccttgctgcccctcctgctattgaccctgcgcttgcttcgattctacagactctcactcagcag

SEQ ID NO: 6176 - DNA, 668 bp, Zea Mays
tttttgatgttattggttttgtatacccagactactgctacccttcgcgaaagtcagggaagaaaagaagagtcgatgcttcggtgatctctaatacaccgaagccaaaaaaggttaaggttttgacacatcgccccaagcgcgatgaaacagcggaagagccgaggcctgctgaaaggtcttctgctcttgagtcaagtcatcccgctcccgccgaagctaagatggaacctgctgaagagccaaaaccgaagatagcagcggaacaattaaaggtttcgagtccgtttcaagggacggaggtaccaaagatagcaaaaattgcttcagtaactccaaagagaagaagaatggctagcgtactagaagctattttagaatccacaaaggcattaactcctgcatccaccaaagcacctagtgtggaaggcgaaaatacgaagaaatctgccgaagttgtcataacacaggtcgcaactgaggctgggccctcggctctcgccgaagcaagaccttcggaggctgttgaaaagggtgctgaaacaagaccttcggatgccgcgaaagctccgttactgttagaaaaagagagggctactgaagaatctgagtcccctgcccctggagcatctattgaggaatttgaatttatagtgtgtcatgcttca

SEQ ID NO: 6177 - DNA, 763 bp, Zea Mays
cagaaaggcccagtgcaattgtatgagcatggatgcaagggttaccaccctgtgtgataaattgtgcaagctgaacctagaagttgtttcttcaggtgatttgagttatatctcggtggaacccacattgcaagagcaaatagtgagggcacagattgaggataagggtgttcaaatgattaaggaaatgatcaagcaaaaggcagaaaaataccagtgtttccgtcaggacagcaagggaattttatggtttggagatcgattggttgttcccaaggaccctgagctcagaaagaagatactagatgaagctcacctttccaaattttccatgcaccctagaagcaacaagatgtaccatgatctcagatctttatattggtggaccagaatgaagagggaaatcgccaagtacgtatctgagtgtgacacttgccagaggataaaagctagtcacttgagggcagcaggccctttgcaaccccttcccataccatcttggaaatgggaggacatttgcatggactttatagtgggattgcccaatacatccaggcaccatgattctatttgggttattgtggacagattgactaagactgctcatttcttaccagtgcacaccacccacaggacagagaagtatgcagagatctacattgaccaaatagttcgtctgcatgggataccaaggactatagtctcggacagaggagcaacattcgtggcacgattttgggaacaattgcaagaatcacttggg

SEQ ID NO: 6178 - DNA, 493 bp, Zea Mays
cgtgcgctgatgatgcacgagattggagaggtagatcttgctgaggttgtcgcaggagacgagggtggcgcgggcgatggggctgtggagctcatgaagaagttaacagagcaaggacgtcccgaccacgtcattggccatatctcgatacttggcctccgtgttggagtgggagaccacgggctaccgctttgagtaccatgagatgagtctagtgcccaaaaacacaatgtagtcagatgttgaccggcacatgttgacgcagctagcctagtcggtgttggtgtagacatctagctcagaagtcggagagggccgaaaaaggagttagacggtgtcgtcgtcccaccattggatgaacatggatgtgtccgacttggcctcgatgaatttgagagagatcaagtaggaggcaaagcgactataccaagctcgtggtgcctgcttgaggccatacagagagtagttcaacttgcagaccagacccagttga

SEQ ID NO: 6179 - DNA, 548 bp, Zea Mays
gatcaggcagataatcatagtcaaaagtaaatgaacatgtcatgaaatgtattcaacaatcagtgtgtcagtgaaatgccttatattggtgaagactaaaatactacgaaatggtaacattccacagaaacggcagaaatacaattggttcacttaataaacatctgcttcagtcgaatgaacatcactggggaaatagatttggtgtcatggctaatgttaggctacgagtttgaaaacctttgttccattagcatgtacgggtgaactgataaattgtaggggccgtcagcatctcctagaaacatgacgcccaaagaagggttcaaagttgttccaaaagcacgactactgactgttggtgtgtaatccaactttaatggtacagacaaagtttgttgcacaagggggctaaatcggaggatgaagaacgtaatcagaggtgaaactacaagtgtgggtctgctaaactcgtatgggctggccaaaataaaataggaatgttgaacaaaaccattgctaatctaaatatttcctgaattaagttt

SEQ ID NO: 6180 - DNA, 490 bp, Zea Mays
gaactttgaccaggctagctgaaacattatggagcggaccctgttggcttgttgaagctcggtcctttgggaggaaacccaaaagattgaactctctggtgcatgtcttactgctgagctcggagaacttgaaacttcatcttgaggtgacccttttcttcttctcgagcccattccacttggatggccttgtttgagaggtgcgagaaactgaggaaatcttggctggcgaagatggtcttgagttttggtctcagccccttcaagaaacatgccatcttcttggcttccgtgctgacatcatcaggcgcatagcgagccagttctgtgaatttgtggatgtattcactaacagatctccctccttgagttaactcccgaaattcttctttgagctggacgatttccaagggcacatgatgctctcggaaaactgcttcaaattctgcctaggtagcatctctaacgacagcgctgaaagtatcccacc

SEQ ID NO: 6181 - DNA, 546 bp, Zea Mays
gaatatacaaatatttaaataactagttcatattaaaatacacattgtgatgagcttgaaacatggataaaatcacacatagcttataactgaggaaaagatgcggaacgacttcaaattgataaaaatacctcaaacggcgacggaaacctcgatgtgtgtgaaggtcgagcgatactgcggaacttcacgaacaacaaaggctcttcaatcggggctccaagaacgcagagtgatgccgtggagatgaatgacagcggtagaagtcgaatggccaatcgccttggtcggaccgcctcagtcgtcgggattcagtagtttccttcctgttccacggagacagttgatagaaaccctgccttctcgcacgggcttaccggtcgtgattgcgtgaagacagttttagacggtgtcaaacgagtggggtcgcgtgcgtggctaacagacgtgggtggggatatgctgacaatgtttggttcaaccggagggcacattgactcgtctgtgcttcctctattattggaagcctaggactcttgtctagga

SEQ ID NO: 6182 - DNA, 442 bp, Zea Mays
cacgggtcggccccccagtccaggccctacaggtcatgttacgtaactcaaaggatgaaggataccagctaatgggtccgatgggtgcactactgaaactccctagctaagactgtgtgcaggtacggatcccgctgggggccaggtcaccaactccttcttaagtttactggcatccagcctcgacaagtcgagaccacatcccagaggggccaagcactagggaagaagttgacaacaacacacatagcaaaaggaaagtagcatacagataagttataatgttgcatggcaggaaatacttaaatgtatcttacaaaaccagaatatgataagccgctcccagcggaatccttgctttctttccacagatccgactactcatcagtaggatctcgctggaaacgcttggccaccacgtctacaacgtcctgcaccctcc

SEQ ID NO: 6183 - DNA, 959 bp, Zea Mays
taattttcctttgcaacctcgacaacacctagtgtacacatgtattaacataattagacataacctaaatagaaccatagcactcttcataatattaactccaccccatcactaaatgaaagaaacattttgcaacatttaataccaccacttttcacccacatagaacctttttacctattttgaacatatacccccaccggagcattattcacatattctacgaactgtcaattcgatacgatgcgactaaaccaccacgcatctctcttgctaaactataaggaccagcgtgactgctatgtatattcaatccattaatttaaactaaatagctagaacaatgaattagctcaccagactaagttgaacttagatttttgcaagaaccaagacgttcactagttcatgcatcgtcgaacactagacaggcttcgtagcataggggttgcccttaccatacaaaccttatgggattttctctcctgggcgttcactgctggcgaggagacatgtgacgacgtcgcggacgcgtgaaatataaacaagcagcgtgccgatgagcccgacgacgcggaggggttgtgctgacatccagaagacgcgaagatggggcgaatgcgggcatccgcgccatggcaatacagtgctcggcgaggaggccaacaacacatcttgttgagcggttggcgcacaaccaacacggcacaggaacgtcgcgacgtcagagtcgatggcgaggcatggatccgagcaggttgacggtgacgacgcgacgacgaacataatatcgatgtctagagtggcgagtgccattgtccacgggtggaacaaaacagtgaacatgtggagcgcatcggggaatcagatgtccatggtcggtgatgtccacgatgggaggagcagggaggctgatcgacggccgcgtggaggggcttggctgggctgggcaccggcag

SEQ ID NO: 6184 - DNA, 559 bp, Zea Mays
cgactacgctgcgaatcccacagacggccactttgcccgactgtagcgcacatcgagagacggttcagctagcacctcgggaagatttctgcatcaaccaagcaggggctctgatgtcgatgagtgctgcagggaatctcgacatcatcacgcgccaggacgatgatgtgccccgtaagccgcctttggcccatactcgagcgttgtttacaaccactacgtcatgggaggcctctacgggttggttaaggactcacggtccaaacaccgacagttggcgcgccaggtaggggctagtcgcgtgaaacatccccagttctcgccagcgctctagatggcaggttctcaccaccactcaggcttgggacaacgatcaggttcgggagtcttgagttcatgtctcttggcatcgagtatgacatggtactcctactgcctgcccctcttgaggatcaaggctcccgttgcctcccttcacatcataagaggcaaagacggagcaaccgcaatcgtgccccatggggcactgtgtgagcagaatatgccaccgggaatgatg

SEQ ID NO: 6185 - DNA, 510 bp, Zea Mays
agccctgctgtaggagaggtcgaggcaggtggccatcttttgttgtagccgatcattaaggcctctcataaaacaatttctcttcttcaggtcagtgttgacctggtcaatggcgtactaggacaaatgattgaacttgttgagatactgtgtgtaacagtatctccaccttgcttaagcttcataaattcttcttgcttcatatggaacactccttcttgaatgtagtgctcccgaaatgccaacttaaattcgtcctaagtaacttgatggtcgacaggctgaatagccacataatttccccaccaggtgctggcagggcctcttaactactgcgtcgcgaataatggcttctaaatctccttgcatcggagaagtccaaacttctgctcaataacccgaatccattcgtcggcttcaaggggatcttcagccttgacgaatagtgggggacgtgtttccgagaaatccaaatatgaagtttcgcggggtccttgcggataagctctc

SEQ ID NO: 6186 - DNA, 801 bp, Zea Mays
agggggggatacgacggtgagtcaccggagtgacgtccagctcaccggcggcgaggatccttaaccccgcgacgttatccatccaccccgagtgcgaatcctggcgccggtgacacgaatcacggtgagatttcatcggcggtgagatcttttggtctgatcccagccaggtactgtaccatggcaatcgccattcagtcgactgacagaacatcttggagcatgatttactctcaacttccaatgacaactcatcccaagctctgcagcaaaattgtagagctataaactagcaataattcgactatagggattgaactcatttgagcactagatcaaggttgaattcacactcaaagctggctctgttacactgaatatctgaatttcagaatggaaccagcctgacagccaagctttaggcttaattatttccaaattcttcttaacaactatgcttatgctcttaagcaaagttgttcttctatgttaggtctataactttgatgttgtagcctagggcaaaaaccctagtatttgaaagttacaagactcaaaatttgagcccacaaatctgaaattcagacttagagtaaattctcaattggggtcctttttgcaaatcattccaaaacttagggtttggcttgtaaacctttccaaatgtgaaccatgagactttatatgtcttgacattgtagtttttacactttagtccaaatgtgcactgtctttgcacataggcccctagggtttggacttagggttttccagggtttcaaatggggtttttggtatcct

SEQ ID NO: 6187 - DNA, 607 bp, Zea Mays
tctgagatttgggccctgcaaattggtctgtctggtgctctgaatgaggattccattgtacagtagctgaaaagatctcaggattcagtccccctcgccgccggtgacctttgcgcaaggattcgcgctgatcgcggcgattcgtgctggattcgggcaggatagtaccgggagggtgaaaagatcagatgaggagcggattgggtcatggggtgaagtttattaaccgcgcctgtagctgtgcgacgtggttggaccgccggtgtcgtggtggaaactccgacaaccttagttatgccacgctgtgactcgttactacgcggtagtaaccgtggcacacctaggattacaatctctgaaccgctgcaccgatgaacgccacgactgagccaccagtgaccttcttcctctctggccgccagcgcgccattccaaattcaagagccaccgcccttgggttctataaattgagcatgccatcagctctgctaggtagtcacacacccaacacaccagcccgtgccttagatcgtccaccagaacgctccaatttgggatttcccccaaatcagtcaaaactccgccgtgagtgagctcaccgtggcta

SEQ ID NO: 6188 - DNA, 410 bp, Zea Mays
cacactgtcctctccaccttctctcaaatcgattgcacacggtgaaagcccagtcccttacgatcctatagcctcaatccccacccctaatttcatccagagactttgaattgccacttcccccaattcagtccgccgcgccacccaaaacagcccgcccgtggccagcgtactctgggaagtcattgtccaatccttgcgtcgttctagtgttcttgcatactcgcgaagctcacggtggcggccgtttgctctgatcgaccgtggtttggcgagaacatgtactcccgtgctcggttcccgccgtgcacgtggaccggctgttctcggggtgctagagttaaattagtgggtgttccgaggccgtcttaggtcggtaaagcctccccgataatcggcttgagcaatca

SEQ ID NO: 6189 - DNA, 639 bp, Zea Mays
ctcaaggttcacagttccgctctggaaatcagggtggaaacaattatcagatgcaacgctctagatagcaaggccagagaaataatcaaagtcagaaccagcaaaggagcaactctcagaccaaccagaggtctggtgggagttcacagaatcgtcaaggtggcgtcgttaacacgcaggccagaagcaacaacgcaccagtccaacccaatggctatttcaagtgcagtgagctgggccactatgctaacaactgcccaaggcgcaaccagtagacaccttagaggagcaatactcagaggaatgaccagaacacccccgctcgtggatctgcacagaacaagactccgcagaaccagagtagaggaagggtcaatcacgtcaccgcagaatcagtgcctgaggatgccgacatggtgtatggtatgttccttgttaactccatacctgcatcagttttatttgactctagagcatcgcattcgtttataactgagtcatttgtggaaaaacataacataccaaagtaccctcttaagaagatgttacacattagttcaccgggaggtaacatgaaggccacacactcatgcccccatgttaatctcaagattcaaggaatagatttttcagtcaacc

SEQ ID NO: 6190 - DNA, 557 bp, Zea Mays
cgcgaggcggagtgaacgaccaactttatgacaagcaaccccacgaggcaaggcaagcgaccaggacccacgtagatctaaccggcatatagaagggtcgacccaattctatgggcttacgtcagcgtgacaagacacgccatcaccaaaccatgtccgagtctcaagtacgacatcgaagggtccccatcaaacgtcaaatggtacgtcgtcatgtactatcccaggcaaaaaccccactgacgaatggggtcagtcaacctcggttgcagggaccttagtgtcggggtctctacagtgacccgcataccaggaaggatgcgatagatacaccatatcagtgtatgtctacgcacgacggtaagtgacgcaggtccatgatgatgagcaaggttgcgctacacacgacaacaacatgggggctaacccacgggccggccacgcactaccacaaaaatgtcagtgtaggactcgatataggggccatatgacgaatgaacgagacgatacaccatatcaggaatatggctacgcacgaccctacggactacgccagc

SEQ ID NO: 6191 - DNA, 662 bp, Zea Mays
tttataatttccagggggttcatatgaaagtgtgctcgcgaaggggtatggagcgacaacagccgcacgatcagaggcacacggtgcagattaaatctaacttcgcccgaaacggtacgcatcatggagccttggatccaaatccgacgacccgcagtcaatccgcgggttggaatataagatccgatctccccctgtctgccccaagatcaacggtcatcgatctcatccggacgaagcagtaacccgactaatcttagctgttggttagaagattaacgacggacacgtcgtcttcttccttacgaccccaagctgccgctctttctctctcttcctggccgacgatgacagcccatcccacggcgatgagtacaccagcgaccagtgcccacgacgttcgaccacgacgccatgcccacccgtgcaccaaccattccgcgaccgcacgtagaagaaacggagaatgacaactcagtagaaagacacttaccgacgatgggtctgtgatgatgctggccacagcttgccacgacccggccatgaacctcggaatcaagatgaaatttgccaaggctccggtgttcttcaacgcatcggtgaatccccaagctcagcatgcacaggcactacgatcctatccctcccgatttctttttctc

SEQ ID NO: 6192 - DNA, 649 bp, Zea Mays
gctaaacaataaataagcataaatcgtattttacccatttgtagcagtgttaatcatttagctcggaaataacaaccgggggcacattctaattcacaatttgcatcataccttcatggattaaattaaaaacaatggttgtatgtatgggtattaactcgatctaggggtagggattgggatggcggcgtcataccttgcaccaagttagcagaaacagaggctgtagagaaagctgcgcttgcaggtgttggtgttgcccttatcgtgcctaggttgtggcgttcagaaacaccacacacacattgttggtggtgaaggtctgcacaccggcgatgtttagctagctccaaaatcaacaaagttttcttcttacaaattaaaagcaataccttgccggagatgggagacgtgcacaagaggagcagtgagcaggagaagccaatagcggtaatgtggtcggcgtccgggtacagcaacccgactctggtgtacacgcgtgctcggacgacacagagtccacacatgctcaccatttatcttcatcgaatgtgtgctaatccaggcgaagtggaggtcgtggggacgaagcatgcaggagtggacaacatggggactgaggaggggggagtcggttgcacgaactgtg

SEQ ID NO: 6193 - DNA, 385 bp, Zea Mays
ccagaccactcatgcagaaaatggaactgtagttttttactttctcaacaactacatctcatgtattctgtatttctattattgtcaaagtaaaaccaataagaacaccatactaaaaacactttgataaccacatacacctttagggcttggatggtgagatgtaatgggaacaccacttcattatattgggaacaggagcaaaccaaccacttagtgtaaatcgtgcaagcagtcatgataatttttcaaaacagtcatctcaccgtgcatcagctttcaaaatgacccttccacctcccatggtacatttttaaatacaccctctcacctccaccaacgcacggtttgcaccaagcgtttgatttgcaccagatatgttccc

SEQ ID NO: 6194 - DNA, 473 bp, Zea Mays
ggaaaatattggatagagatgagtagctgacaacactagatcttcctgagcgtgtatcccttgttggtctcgcacaggctcctgacatcctattcctatcctcttgttttgtcttatcagagtacgcacgcagcccttgaggtaggttgcgatgtagtctgatacgctgtcgtgcgtaggtgtgggcgatgtcgactcgtctcctccacccgtcccttcatgcctcataacgcacgaagaacagtgaagtcacgatgaagggcgcccaagcggtgcattgggccaatgctctttgcctcggtaacatgcaggcaatagtaaaagctgcacgttacagacctgacgcgccgcgcgcatttaatgcaggggatacgctactcagtgttggcgtgggtaagtaagtgtcccatctgtactcaatactggcaggccctatgtcagaggcttttgtcaggcatcgtctggtggcttac

SEQ ID NO: 6195 - DNA, 369 bp, Zea Mays
gccttcgcggcgttgtttgtaccgacaggagtcacccgacccgttacatctctcctccctagtcccgtggccaagcgctctccgcacgctttgacctagctttttggggttggtgagctgggacccgtgccacgcttccttcgagcttgagaggttgtcgcgacatagcatcgtttgtcattggcatggatgcggtgcagccgttggtctcttgttcacgacatcagaacatggagctctcgacatgttgatgcacaacaagatcgaggaggtcctggatctagtgggtcttctattcgcttgatgttttcgtcttggggagcttgtctagaagcgttgcagcagctgcgatgttttggctcacccggg

SEQ ID NO: 6196 - DNA, 451 bp, Zea Mays
gcggtggcgcccaatttgaagggatcgcgctggcggccgagatgaggggttgagtcactatggcggtctaccatggtggtcactgggtaatgagctacggtggtcactgggtaatcaccacgactcgcaacgacgtggtaagacatcctaaggcgtggcgcgaccgggtaaacggcgacagccacgacgaagaccatgcatccacgtcgtcggcaagtgggcacggcgacagggcggccacagtgccccaaactcatccatggtgaagatcttttcactatcgtgcgtaatccacccatccgaggcacgaatcatggcggccggcgagaatccaggcgcggaggtcaccggcggtgaagtgcagtgaacctgaagatcttttcgtgcactgtaccatggccatcatgttcagtcgttctgacagcgcgatttgaggagccttgttctccat

SEQ ID NO: 6197 - DNA, 1105 bp, Zea Mays
gttgtataaaaattggagatagatggacttaaagtctggctgtcagtcaccactgaagtctgaaattggtctgacagtgggttttgatgaactttggagttgatttgatcttgatcgagtaagtaaatgatcaagggtcctatagtcgaattgtagctggattatagattaacaactttgctacagagggctggtcaagttgtcacataaaaattgaagaactaagccctctaattcgctctgtcaggcgccctgaaggaaaatttcaatggtacagtagtctgaagaagatcttgagttcactgaaccttgctgccggtgatccctgcgcttggattcgcgctggccgccacgattcgtgctcggcgcaaagtggataaccgcggggagtaaaagatcttggcgccaggataagctcggacctggtcactggattggccaccgtacccacttgctctgcgggcggccgagatgatcctctccggcgttggccgcttgccgctagtgcgccacatagtcagtggtgttaccacgtcgcagtaaaccgccttaggtagtttgtccatcgcctgagacgttgccccggtgaaagccacgatagtccgcgccggtgactcacccctctctccggtcgccagccttcttcatcccaaattcgaacccaccgctcctggaggctataaattgagtgcattgttagctccactaggttgttacgaagccatagcaccagccctcgcctccgattagccattgtagcgccccaattcctttcttcccccaatttggttctccgcgccgccgtgagccaccacgccgtggaccatcgtctccagatccattctcgctctcctcacccttgttttagaactcagacacgcttggcatgcttgtcgacccaattaattgagctagactgcacccaatcaccaggaacacctcgatttgtccttagtgttcgccgtcgtcgtgggcagacaagcttcgagccggatttgtgcaattaacggagggcttagggtgcgaggggtaggaacaggtgtcaaccaaattagggtgtcagtcattgcgcatcccggccggtacaagctcgccggagggcgcg

SEQ ID NO: 6198 - DNA, 574 bp, Zea Mays
tgggagggacaggagagaaggagagggcaaagggaacgtgaggcggcggtggagtactagtccatcaactgcaccgacactatagggaggacgggagggcgcaagggaggaggtgaaacgcgtcgcgacgaagaaagctggctgctaacgcgatgtcatgagtgaatggatggaatcgactgttggagcgtgtggagaaagggcttgcaaagatacagagccgatgaagccgcttccgttttacatgacaagatgggtagtacgatgctaggatgaacaacatcggcgaacacataaaaagggaatggatatccatttacggaacgtagggtggacgaaccaaacattctccttttctatgcgtgtgcatggacattagcaaatctataccactgtataatccaccaatttaaattttacaaaacgcatctaccaaatcaccccacactcataacctctcctagatccaccaaacaaattgcactcacacaaaacacaccttcaaaaccaacggttcagatcggcccttgcccttcgtcgctcaaatccgatgaccaatattatttggatcatc

SEQ ID NO: 6199 - DNA, 658 bp, Zea Mays
cagggtgccataccgaataggcgaatccatccgcacggaaggacgacgtagggcccacgacgacaagagaaggttgtgccatataaatcaagcctcgaagctgaaccacgagacccgccacatatcatccagggacgtcagccacgaacccgcaacagcaacaggtgtgacagacgacaccataccagaagtactatttcgcacgacctagaggagaggcccaccacgacaaccgaaggactctctctctctctctaagagagacatcgatgtagtctgccccttaagatataaaagggaaggtccctcttcatctcatacacaagcacacttgttgtaacacgctccaagcaatactacgatcaacactacactggaatagggggtaaacctaaaccagtataatcctttgtcttagatctctcatcgagtcccagcgattcaccattcggagtgagtccgcgctagcactcctgctgaacataaatcttattccccccggctcccgaaaccacgacataagtgcaataagctggtgtaggtgggctatcccaaaacattttgtgagggtaagagatggaacaaatattaaatatgtagcttatatcatggaaaaattattgtactagttgttttttagttagctatatatgactga

SEQ ID NO: 6200 - DNA, 704 bp, Zea Mays
ctttgttacaagtgtggcttggcatattctcgaggtcacacatgtccggacacagtgcagttacacatggtggaagaactgtggcagcaattccagtttccacatgaagacaccatatctgaagctgatcccgaaactctgaattgcttacacttatgtcagtccttgtccagggatgactgtcagtccaagtctatgaggtttgtgggagagatcgggggactatctgttcttattctgttggattcaggcagctccatttccttcatcagttcgtccatcgtacctcatgtcccactgctaccggtcagctgtcagccgttactggtccaagtggctaatggctctaagctgtcttgtggtgctgaactcaacaatgcagactggtccattcaaggccatcggtttacttccaccctcaagattctcgaccttcaaccatttgacatgatcattggcatggattggttatccgaacatagcccgatgtgggtccattgggcagacaaatggttgtctttaacagtggggtcttcgctggtcaagttatatggagtacaagcttcagatggacagggtgctttggttcaattgtgcagcctttcacaacttccagacaccgaccaacatattattcattcacttccaccagaattacagtcattgttggatcgttattcatcagtgtttgcggtgccgcaagg

SEQ ID NO: 6201 - DNA, 353 bp, Zea Mays
ggttctcaaactgatgtcaacaattaatgcagggtgggacaggcgtgggcctgacctcacttgttagttgtaccccctcccatggcctataaaagggagaggatgaccccctatatagtgactcttctatcacgctcatgatttccacacttaggctcttacaaccatcattgtgcttggcacttagatgtttccaagcaatccaatctagtaaaagagtatggtattacgctctggtggcccacacatctctaaatcttttgtcttcctcacaatgctcgtgtgtgtttgttgtgctcgctctctggttaatcaaactgatcccaactggtcgtgtaggtgtttgggtgata

SEQ ID NO: 6202 - DNA, 313 bp, Zea Mays
acacgctcaagatctaacggccacaatgctttctctccttcacccgacagaccaaggcagcaccgccctgaaccgcggcggagattcatcggcgttcccagacgcagcacccaggtgcactaatcggacttcggagaggtgctacacgatgcggagagaagggcgagtgccacgaaggtgacattacctgtgattatgtcgcgatgatccctgcccccggtgcgcagcggtgatgcggtggagtaagagctctggcgagaaatcaccatgtctccaaggcttctggtgctccaaaccccttccgaacacgttg

SEQ ID NO: 6203 - DNA, 537 bp, Zea Mays
ccgaccttgtgccgcgtgtcccaacctcgccaccgcatcgccgtgactccctctagcttcccgtcgaccaccggagttactgccacgacactgaacacatattcaccgcaccagcgttcttcttcacctccggccgccgcgcgtcagcgcccaaattcacggtcaccgctcgctgaacctataaattgagcccgcggctagcttcaccacatcatcacgcaccaccccaaccagtattgctcccagtcaatcaccagtaagcacgaattttaaacttcccccaaatcagttgaagaacaccgtgaactccagctctctgtggccagcccaaatcaggtccacacttgtcctctgcatgcttgttttgacgttcttacttgctctagatgatcactaacccgtttaattaagttagaacctcgtagatcgctgggaacacggttgtctcgccgtgatgttcacggtcaccgtggccagagcaagccattgggccatagatgaaattaggttaggggaaatgctcgggataggtccgat

SEQ ID NO: 6204 - DNA, 686 bp, Zea Mays
gaaagatgaagaaggaaccctttggttcagggaccgtttgtgtataccaaagggggaggcacgagaaatcctgctcgatgaagctcacaactcagcctactctatccacccagggaccaccaagatgtacgtagacctcaaggctagatactggtggagtgggatgaaaaaggagatagctcagtatgtggcccggtgtgacacttgccagcgaactaaggcagagcatcagaagcctgcaggtctactgcaacccctcccagtgcccaaatggaagtgggaagaaataggcatggatttcgtaatcggactgcctcagacccaaaaagggaacgattctatctgggttataatcgatcgtcttaccaaggtagcccacttcattccagtaaaaactaccttcggaggagccacccttgcccggatatatcttaaagaaatagttagactccatggcattccacggaagatagtgtcggacaggggaacgcagttcaactcaaaattctggataagtcttcagcaagctatgggcaccaagctagacttcagcaccgcctatcacccccagtcagaaggtcagacagaaagagtcaacaaagtcctcgaggatttattgagagcttgtgtgttgacctttgacaggagttgggagtctagcttgccgtatgcggagttttcttata

SEQ ID NO: 6205 - DNA, 987 bp, Zea Mays
atttcccacattggcttgtccgttttctggacagtgtattatgttctacttgaaatgagtcaacaatagccaaattccagccattggtttaagtaacacatatgaagtaactttaaagaaagacagaagagtaacttctattctagtaaacatcacaactcagacatcaggtctgatgtcaggactatctgaatcgagccagagcaaaattggcaacagatgtaaagctcacaggactttaagaatgtttcagaagcaaaccagcatcattatgacatcaccagaggattgatgatgaaataattaataactttctacagtgcccgttttctggtttgtttcacaaaaacttttgtcgtggggatctcccccacagtgcatttgtcggaataagggatcacctgcctcaaatccagtatccacactaacttgtgcatagtcttaatgtgttgaactggaccgccgacacatggcgcgctagccaggtcacccgcacacacaccccaggcccccgaacgcacattttaagtttgttgggccaacacccaccaaaaacaccagcccattagggggttgcaccctccgatagactcctgtttagggttaggttaggaatttcctgcatttacctaattacccccctatgggcttggcccaccaaactcttttatataatatatactacaaactctatattagggttaaggtttcacatattccaacttggtatagagctaggtatttttctctcccctcccttccaaccgtcagcccctctccaccattggccgccggcctcaccccaccactgctcaccggcaccgccgcctaggccagccgccgccacaaaagtcacctttgcctggtcgctatgccacccgcccgaacatgtcatccccgctgtcggcatgctctgctcaggatccgtctggccttacccaccgccagcctactctgccccctgccatcggtctgatctgcccagga

SEQ ID NO: 6206 - DNA, 421 bp, Zea Mays
tcgaaacgtgccacatcgaaacgcagaactaggtgcggtagttgtccggagtgccgaatatcatgggcaaggagacgtggtcgagggggtattcccccttggtcgggacgatgccaaagaaaggagtgtcagactcttatagctcgccgacagagatctcgagtgcgttgagagtccgggggaaggtgacgttgatgctgttctcccatccatcagcaccttcttgactcgactgtctttgattatggggttaacaagtagggggtactgctcgggtgatcaaagctgagccagtggttggcccgactgaaggtgattggcatctccaaccacctatagggcattggtggtccggtcgcagccaccagtatttgccgatctgtcagcttctgttgcttcttgttctcctaggacccatggc

SEQ ID NO: 6207 - DNA, 1103 bp, Zea Mays
cgaaggcgaccccattagcttggacggttttgagctatagccttggcaaggatcgaagacccgacgcctcagggcgaagggtgccacgcacgggcgaagaccgcgcggcccaatggcggggcccatgtggttttcattcgggctgatttgtaagcccctccctagggtagggtttattgtgtatttgattaggctgtacttaacatcgctgtaatgaccctgtagggggaatattctgggtctgtagcaggtaaccgggggcataattgtacttataagggcgcacccacccacctggttacctataaatactcctgcactgtacattgatgggacacacttaacaagacgttagagttccctgcctattattttgttgagcacctgaataccctctttccctagtgtttgggcccgcttgaccacgtgtcgatcggtgccaacatttggcgcccactgttcgtgcttcgacaaagcaatcgcacaatgactcccaagaaagtgacttccaaggccaccacctctctggctgtcgccgcaaaggcagccctcgtcgagaagaaaggcaaggcagccctcgtcgacaacgttccccaagaagcacccaaaaacaatggagcagtcaacaacaagcgccctcgcatggagaacccacccacccctaaaggcatcgtacacacgtgcagctctgagggactcccttggaaccctccaccaggttttacccccagaggatgatgatatcatcgaggatggcaaggtcctaggcatctcagctgaagaccagctcaagttacgagaacttcacattaaaaacaatcacctacaaaaacagaaggagatacttgaagccaagtgccagcgcatcaacatgcaagccaaagtcaggtagatgatcctagaagaagagaagaaagcagagagctggaacaggaaatcgcagaaacaaagggcgaggacgccccgacgccaccaacaacagcaggcccccgcactcaacataaaccctcgtcacccccatgccagtcttcgcactagctaccttccaagggttaaattaccttgatgaacgaagccttcttgcaccatagcttcaggcctcc

SEQ ID NO: 6208 - DNA, 569 bp, Zea Mays
ccgctgcaactccgccccgcgccgtggactgggtaccgtcgcggccaaatccctggtgagccatcccctatcgcactcgcgctagctgcaatttcatttttttgcacatcaccgtaggttagcttcaccggatcggcggattgggtggctctccggtgatggcgcgccgccgcctgcgctcgggcgccaccgcctgggtgaccgcgtgtgagaggatgagccctggtcgttgatctggccacgaacgggcccgatctagccgcgtgcacccccttcgctcggtagaataaggcccattgatccgcgatcggacgttctctggggcattagcatcacattaaatccacgtcgcagatctccgatcagacgatttgatttactcgcaggtttggcatgcgccagatctaatcgacgccgttcgtttctaatcggacgaccgtaatcggccgatacctcttcgccataccactttgcagaaagacccttatagaatttagaaaataacccgccgtccaatgctgcagccctctgagtctcggtaatcttacgccagagcccctgagttcttc

SEQ ID NO: 6209 - DNA, 642 bp, Zea Mays
ttgcgggggattttcacacatatattacatggctccgcctcgttaaaaacctcaccccccgggaggaaaagagtgcgggccggtacaagattgtttttgcgaaatcagccctgaggagtcaaacaaaaaatttgcggaggttgtcgatgttccaggagtgctccaggtcctcgccgtttggcgtcgtgagcctgtaagcgctgggggaagcttttgtcttgactatgaaggggccctcccacctgggctccagcttgcccttggactccgtccgagctgttcggacgagtacgaggtccccctcgctaaactccctcgggatgactgtgtggtcgcgccatgctttggtctgggcttggtatttgtttagggcctgtagggcgaagactcggtctccgtcaatgagatcctttgaagttggctcgtccacatcggggacggttgacggaactgttcgcggagacccatgcttcatttcttgcggggtcatggcctccgatccgtatagaaggtggaagggagtaaacccggtcgccctgcactcagtcgtgtttagtgcccagactgcctcaggtaacaaatcggtccatctgcccttcttttcatcaaggagcatcttcttgacagctgtgaagatttttc

SEQ ID NO: 6210 - DNA, 457 bp, Zea Mays
tattgtcgttgtgtgatgttgtttggaactgaaaagataccagaaggccttctgcaaatgttgttgataaaatcctccttgcgtgatctcctagtgagtccttcatctttggcatcagatccattctgagccaatctagagggcggcaacagagcaggtaccccagttacatcaccatcttcctcacaaatttcttcttcaaacaattgatctgcttactgatcatgctgctgctgatgcttcaagttcttcctgaagtagactttcaaaggcgtagactcgtgggacatgatagaagacgtgggggggggagctcctcggagctggggggagacaaggaatacaaccggcaaaataaatgcactaggtaggggcgaccacgtacaggcctgtccagcaacccattaggcatatcctgttggggtgaagaaggcctgcccaggcccaacaacccatt

SEQ ID NO: 6211 - DNA, 690 bp, Zea Mays
ggacgtgaatgattctagtgaatgaaatatgttattttgtgaattgtgggaattaacaaaaaacatggggggattttggcctccttggaattacatatgtccaatggctttgatccaggccgtcagacatatgagtcgaacataccactaaattatgtccgacggtctatatacagccatcggtgataatacagttatgtttaacgtcggacataaccttgtggagcccactggacgtcgttattcaggtttaaatgttgacggtccgtggaggccatcagagatagcttatgtgtgatgttgccgtaaaaaatgaccttatttctagccttttagaaccgacggacacttaccatcggtcataagccctaagtcgtcagaaataaattatgtctgacgatataaaacttatatcccacggtttaggtcgttagaattttttggctttattgttgtgccactccctaaaggcatcaaagcaaatgcctccctagacgttgggggacacaatcctctggtgcttgccattccctcagcttcatatcagggcccatatgagggaaccttgacacaatggagattcatctcaatagtggtcatctcactgggctcattggtgcctcgacttcaacaccaacaacatcattggacctctcatgtgcaagtaaccaaggcagtaccaggatcaac

SEQ ID NO: 6212 - DNA, 982 bp, Zea Mays
tgctgggacattggtagtggcgcctctcccggaagctggtacaaccttggatattcagagacctatcagtgttcgcccgaaacgcccttgccgagccaatcaacttgattctcctgctgatgagcagaaaaagaaaaagagacgtcttcggcgagtatctagtttggatcgggacgttggtccttcggttcctgctgctgaggaagtacctgtgcctgaatttactgatgctgaccccaatgggtgtgatccatctgtcgctgatcccaatgggtgtgctccatctgctgctgatcccaatgggggtgttgtctgtgttgctgatgaaaacgacggggaggaagaagatgaggtccctttgactcggaagaacagtcgtcaatatgtcgctagtggggaaagtagtggagtttcttctcccgctctgtctgccctcattggtctacaagaattgtccctggcgaactttgatcagactcttaaagatatggttccagaggatctgttatcagagccagcggatgatggtgcgacagatgtttgtgctgatgtgctcgacgccgggttggggtcatcccgggcagtgtcccgcgcctcatcgaccttggagcgtggtcttgagggtcaggaaactgacttggatcgtcttgttcccatggaagtaactgagggaccttcagccttagaggcggctactgcagagaacttggtcctcaaggatggtgttgacacttacccagcgcccgagggtgttgccggggatgactcggctcgggtgggaagcgcaagccacgacctagcccccgagggtattgccggagatgatccggctcaagtgggtagcgcaaactatggcccagcccccgagggtgtccgagcggggtctccctcttgtacttccatggatgttcacgcaggatctcctccacactctggttgcatggtggtagcccaagctttgggtcagggattcgctttagag

SEQ ID NO: 6213 - DNA, 534 bp, Zea Mays
gcgagtattgcgtggtctggggatttaaaaccaagctgggtcttccccctcggtgccatccaacgtgtgattgcgtcgtgccgccattggctcagggagaaagcaggagacagagagagtgggaggccgccgccgacgttgtcctcccctaccgcaaatctcgaaccaggaagggatcgagtgaagtggcatgagcgtctggaaactgtctgtggtctttccgggtgcgattgtgggccaacgacgtcggaatcgctcgccgtagcttaagtgccgccgcgaacccgcctgatgtcgaggacagcttcactccgccacccaaccctcggtaatgctcagttttctgtttcgccatgcgcctaggtccacgttgcaccggttcaatttggttttggaggttgggtggtccggtgggtggccgtgcgcagatggggatccgctgtgggctgaacgcgccgttgtgcttggcagtcggacggggaaggaaaccccctagtcgtccgattggctttgggcggctaggattagaataat

SEQ ID NO: 6214 - DNA, 344 bp, Zea Mays
aaaaggcaaagaatcgttactgtgacagaagtcattgaagcaacaccaccaggagcttcagctccgaaggtgccggctattgaagctgtaccttcggaggctaccgcagaagaggccagagccgaagatgtcaaatccgaagatattaatttagaaagcatggctgctgatatagataaaatactactaaacatggtcgcggaagaagctgccgcagaagaggctaccgcagccaccgaagagactacgaccgcaaaacccgagaaagaagaaatgaccgaaggtacttcggaagatgaagcctttaactttcaaaacttagttggccaagagctgacaaaaac

SEQ ID NO: 6215 - DNA, 731 bp, Zea Mays
aagacgcgcgcgcaaggggccaaccggccaagggcgaagggaagggaacacgccatggcgccgtgtgcgcatgtacttaccaaggaggagtccatggatccttctgagaaagaaggaagcgtgcgcgacttgtgctgcagacaatggaccgtgcatgatagtactgcacgtagctgcactgtactcttgtttatttggaggaaggtgtgaaaggaatctacatggaatctgccttgaccagtcggaaacgatttgcaattgatgggcactcacatgctgccggccggccgcgcacgaccactagctcagcaagcaatttgtaggtaatcaagccagctgcatcatttggcatttatctttggtcgagttgaacatatagttgggtgcttagatagatcctgcaatggcagcatggagttagatgatttacacatgttccttgttcagctattccacctgacaacatatctttgatcgagttgaacatatagttgagctcttttcgtaaaattaaaaaaaattacatatagttgggtgatcaggtatatcctacaataacaccgtggagttgatgacttacacatgttcctgcccagctattttcctgccaaacatgatgtgtatgttccttgcaaagctaaaagcaagaatgacggccagtttagatccatgatatatgtacatccaccggtagatatttgtcagtgttcatgaatgaccatacttctgaa

SEQ ID NO: 6216 - DNA, 315 bp, Zea Mays
acaatattggagacccactctgcgtatctacacggtctgataaaatcagcttctagcagccggtggatttcgtccttaatgcgtgggagaagatctggacgaaatgttctagctctctgcttgaaaggtctgaaaccagatttaataggcagccgatgctctacgatctctcagcttaatccaggcatctcaatgtaattccaagcaaagcaatctgaatattccttcaatagaccgatcatctcatctctaggatcggtctccagggtcttgtttacaaaagtcagccttggagttttaccatctcctatgtca

SEQ ID NO: 6217 - DNA, 432 bp, Zea Mays
caagttgtgctattgttcctagttatgtggtgtgcgataccgccatctcccatcaggtctcccatgccctcatggtcccagtcgtagccctagattcaccggttgtgtcctctctggtggcgacatcagtaccctcgtctgcactgtctcacatcgccaacccaatgcgtgtctatcagcgatgtgcatgggagggtgcaccacctcgctctctggctaagctgacggtgtatcgccccccttcactgcaaacccaccatgtccactcgatggtgactcgtagggacgctgacgttctttgccctgtcgagtattgaccacattatgctctctatggcatcctctgcgctggtgtcccccgtgccatcttccatccattgcgcgctcgtcaatcctcactggcgtcgtgccatagaggaagagtagggatgg

SEQ ID NO: 6218 - DNA, 571 bp, Zea Mays
tagtgctaatctttcttggtgttgtaggcctggttgctgggggtaagcatggttgtaattgtgttggtgctgagggtggtatggttgtttgttttggtaatgaggatatggatatggatggggttggtaggtgtgagcgatggccctatggttgtttgctagggcgactctggacatgcggtgtttgatttcctttgtttcttggcaatctttggttgggtgccctgcgtcctcattgtggaagacacaatagaacttactttgttgctaggggcgtcagcctctgcctctcgatgcgccactagtgtggccttgttgcaggtggtaatcctagcgctgagggaggcgttcgcctagttgctgttgattagcaatgttatggacttggagctactggcagcactcctggtgggggtggtcttgttgtggggccctagtccacgttcagctggactgcagagtctcctttgggtttcgctgcaactcaactttcctatggtggagctcctctaagcgggcgtgtttttttgaagagctagtatagatcttggagtttggatgggggtctctt

SEQ ID NO: 6219 - DNA, 322 bp, Zea Mays
gaggaatcccatgatattaggggagaccagcaggaattttgggaggaagacgggtatgattcgggtggcgagaaagaacacagagagaagtctattcttgctcttgcccctttcaatccggcgcactgggtttaggacttagaacacccctgcgcccctgctacttccggttctggtatacaccaaggcatgcatacatagacatatacagttactcctacttcctaggcctacttgaaagttgaagcaaaatagaaggctaacaccaggtttcatttgtagttgatagttgactaagtaagaagcctgatccactccaaat

SEQ ID NO: 6220 - DNA, 480 bp, Zea Mays
cacactgggtggggaacgagtgtagctccggcggcactgccgtcgtgcggggaccgcggctcgccatggcgctcgcctagggatgaagaagctgcatgcgccgttggatgcacagcgaacggctctgattagatcgcgcttaccggttcgttctgattacgtgtcaaccgtgcgatcaggatcggatggtggctactcgtacttggactcattaaatcgggaccgtcggattgtcatcttagggttcgcgctgtgcggttggcgagatctaatctcgtgcgcccatctccgatcgggcgactcagatttaatgataccccttcgccctgtcgtttttacacaagaaccctcggaaaactaagaaaacaacccgccgtccacattcattattcactgagtcttagaaaacttcggtttaggcccctgaattttccaggatttgtcacccagtccagataattaatgaaacagggaaaatca

SEQ ID NO: 6221 - DNA, 412 bp, Zea Mays
ctggctctctggccgcatcatctttggcttcggctgacccgactataggcaccttcggcactacaatcaatccttcagcgctccgagcggcaagagcagtttgtttcgcttcggcagcggaggaggtcccttcaccaaattcaggcactacggctgtttcaatatatcgtggccggtgggtcaaaacctttattttcttgcccttcggcacaacagtggtggtcgaagcggcagtttttctgttttttccttgccttcgcaaggggtagcagtaatcagggtatatgaagccaattgcatcaaaaaccttgttcaatattttcttgccccgacccccgaaggctgacgataaagcatcatctttggctctagtatatgccccaagtaactcgtcgctagtagcctcaataca

SEQ ID NO: 6222 - DNA, 363 bp, Zea Mays
cgattaaagtgagtaagaacaccctaatcgactccagttttgtccccgcaatgtgtagatacggttaggactaaactctagtggccggagtcttgcgtagccgagtctggcgatgccgtcgccggtgcgaatgcgggcgtcgccgtgccccgtgttagatattggggtgaagcgccttgaccgtcgatcggggaaagcgcggctaggattagttttggggcgcaccgattcgatggcttacccacgccgttagatgtagatctgacgcacaatggagcgccttagtctcattaactcacatccatggatcgctgatccggcgatcaggatttagcgcaggtttgtagcgggcctagatctaat

SEQ ID NO: 6223 - DNA, 614 bp, Zea Mays
caaccttctataatcgatgcaaaacctccaactaccatctttcttctgaaccagtaatacgggggatgcaaatggactagcactgggcactatcagtcctacagttaataactctgtcacttgcctttctatttctgtcttgtggaaaggtgaatacctataaggcctggaattcaccggaatagaccctgggagcaatgatatatgatggtcatacatcctaatcggaggtagtccagtgggcacaacaaacacatcttcaaactccttaagtatctgcctcagtggttcctattccttttcagcaccttcctcctgcattgcatccaacatcaccaaagcccacacttcatttcccttcatccacctgctcagctgtacagctgacacttgcaacacttctgtacttcctacaccatcccccttcagctgcactctgaccccttcatcccagaatgtcaacgccttgttgtcccaatcacactccataggactatggctctttagccaatcataccccaatatagcatcataagcttctaaatccagtactctcatgttactggtataagtgtgtccttctgcccaccactccagcgctgccaccctttttg

SEQ ID NO: 6224 - DNA, 492 bp, Zea Mays
tcatcaacagcatgactgtgccacatagcaaaaaacctcgctatgtcgttggccagacgcacaaacagacctcgaccctaacccatgccctgacctcttcctcgatcgccacgatccatcggacgagaggcggcagcagcacgagaggaggtctcatggagaggaggctaaggtggtggctcattagaggatgcaggacctcctgacctagctggagcccgcttggaccttgctgctggattactggaatcaacccagtaaggaacatagcgggagtgcttgactggcttctcatattgaacctgggtgacaacttcaatcatcttcatgataaagggtgcatgaagacaacccttcaatggtgaccaagatgcctaaagaatttcttcctagattatatcaaagacattaattttgccagtgctggtaggagtcataagcatgagaagaacttgactctccccaaggacgttcgtctggttgctgccctta

SEQ ID NO: 6225 - DNA, 431 bp, Zea Mays
gttgtagtggcactaagctttcaattgttaatgatgttatgttacaactaaaaggaatatggtaacaaaaaagggttattaatttctttgacatttcatttgatattgatcaactataatatcggaaatgtaggattaggcacaatgaatagtagattgattatacgagatatggtggaggtggcttctcctgacaggtgcaggaggagcacgtggtgcgctggcagccaccaccatggaagtgggggtgtggatgaccattgcatatggttcagttccttcagcagcatgtttgttctgggcttccaggaacatgggggaagggacgaccagatttaatgtgaaggccgatggagacgaacatgtcgttgaggctgcgaattaggatgaggacgagggtacggttaggaacatattcaccaaggtcctca

SEQ ID NO: 6226 - DNA, 301 bp, Zea Mays
agcagtaccaccaacaggtagtaggagctagaagaacaccccacaaaaccaaaccaaccgcgcagcaataacaaacactcggtctatttgagcagcgtggctgcctctccaggcccggtaaggaagcacgaacacccaaaaataaactcaacgcactgacctgtatcggattgatttgatatcaacacaaagaaaggcaccgtttgctaggcagaatgtggcggaggctgtccttttagcatgcatggctccatcccacttgcaaagttgctgctccacaattgctagtgacctaagctca

SEQ ID NO: 6227 - DNA, 494 bp, Zea Mays
agtgaagataacgcaagatgcgtttcacagccgcccaatgaagagacgtaggggcggatagaaattgacaaacccgattgacagagaatgatatatctggtcgtgtcaaggagagatattgaagggccccaacaacactacggtagcgtgtagtgtcttcagctgagagaggatcaccactttttaacagcagcttgtcactaggaagcataggggtcggaacaccattgcaagaagtcatgttggtgcgctgcaacaagtcttgaatgtatttgtgttgtgtcaataccagaccagtggatgtgtgatggacctcaatgccaagaaagtatccaagagtgccaagatccttgaccgcaaactccgtcttaagttgattgatgagacgatctgtggctgatgtggaggagctcataataataatatcatccacataaatgagaatgtacatctgaacaccacctttgttgaagatgaacagagagacatcagcc

SEQ ID NO: 6228 - DNA, 1018 bp, Zea Mays
atctacgtaattgttggcttctaagtaaaggaaaaaggcattatgggactctttggtggcttgcattagcctgtatctaggcttctgcagtgtacttcgcctgtttggttgtggaaatctttatgtaggcttaaacaatgttcaaagtactagctagtacatagattaggcgatgtagatttacacaagctgatgaacaaaaaaagtggagaaattctcatctctttctaccagtactagaaacataagttctctactaaaacatggatgtgactgcatataacacaatgtaaggaaccaaacacaactgtatcagtgcacaatgattacataaatcaatttacaatatctctgagaacaacgaatgaataattaaactaaatctagcgatggttagggtttaggggttggacctttctgacttctgtgcctccttttgttcaccatcaaggttgtctgcgatgacccaaatccagcgatggttagggtttaggggttggcgagagcaatgtggatggggcgtgttgggtggaaggggcgagagaaatgcggatggcaatgagatagagcgggatgcggcgagtgaagtcggcgatgacgcagctcatcgacgcgatgagaggtaagggggcggcggtgaggtacctgttcgagggggcaggtcatcgacggcggatgtgtcccagcagcggcggtgaggtacctggtcgagggggcaggtcatcgacaacggtcgtgtcccagcggcggtgattagggttggagaaaatagtgggggagaaagaagaggagtgggggagaaagaagaggagtgggggagaaagaagaggagtgggggagatagaggatgagcggcgtctattttagtgacgacggcgaaacatgttttttggcgcctaatgtgtttggcaatgcggaggctaatgcatttaagtatattagcgctgggtatatattgaaaacacgtgcatagctcaatggtttgacctgctaactatgagactgagctcccaggttc

SEQ ID NO: 6229 - DNA, 509 bp, Zea Mays
gttggggcaagaaaattattatcagagagcaacgaaagaaccaaaagaacatacatggacgtgaagcatgcacagatggttagagcagctgcaagtacacatgcatgcatatgatggggatggatcccgagaaagaactaataacacgaatacaaatagcagccacagaagccttcagtctcaagaatatctcgctttcctaagtgacaactgacctgaactagcataacttaaggcaaatagagcttgctcatgaaaggttttgcctttaatgcaacaaagtgatttacttttttcagtctatagcccttaattccttaagctcatgaccttgacaaaaagcacaagttattgctaataactagcacaggctaaaccagcacttatatgatgaaccaaaaatagcaaccaggagttcttacagtactatcactttacagaattaagagaaggaaacagatttaagtcacagaacatatatagtttacagtagactaattacgaatgct

SEQ ID NO: 6230 - DNA, 695 bp, Zea Mays
ggccctcctcacctcagttggccacctcatgcatgatgaggttgtcgatggcgcaacccattaatggcttgtttgctggtctccaccggcaagccgaaggatttgggacttaaccccctcgagtgtgggcgacggtggagactgagcacaccatgagtttgtgcagcggccgatgatgggcaccgcacgtgccgggggaccaggatacagactagcgcaatcgactactctagcccttgttcctagcccatggggctctactaatggattctagagaggtcatgttaacgaatgcgtagccttcattattatagcttcctaaaacccattggcaagtagaagaagccactccccatgattgagggaggtgactccacctactatgaagcatggcggccgatagccggcggcggtgttgctcgcacttggctgccagatggcggtggtcaccttgaataccaccatgctctaccagaggtcgcctcctatgaccctatgcatgacggagcctgggggagagcttacggcggtgacctcaagcaaagtgcttgaggcttctgccaccttcttcgtgatggcgtcaatgcggctgttgaggcgccgcttgagatcgacggcgagcatcttgagatgtcgcttttgcgccctccaccatagttcggtgaatctttctcgatcgaactcgtcgtcgggtg

SEQ ID NO: 6231 - DNA, 500 bp, Zea Mays
gcaaagttccctagctaaacgggcacggactccctaccgccgccagatccgaaatggatggtccggattagaacaactatcaaccaaactggtactccacaatggccttaggatctggatccgacaactcggatttaaaaaaatccggactacgcgcagccccacgattaccgatcaacggtgcagatccgcccagcactcagcgttacgatgatctgatctcgtccgcatattgctgatttgacggcccaacggtcatctcctcgacatcgatacccatcacgacggcggcccctgttcgcgcggcggagcgtcgctagagtacggccaaattggctagctagtgaactaattccctacccgagacatcttacgcgacgtgtgtttaacggcgaacatcatgggaagacttacagcgtgcatggaacggcaatagaagcaggccatggcaaggcgcaatccgcggcggtggtgtaacgacggcgagaaatttgcccggt

SEQ ID NO: 6232 - DNA, 753 bp, Zea Mays
actgtgccattttgacaaagagaaacgaagagccatcagggaggagatcggtaaacttctcgcagccacatccgagagatacaccatccagagcggttagccaacttggtgccagttcaaaagaagagcaggaaatggaggatgtgtgtcgattacatcaacctcaacaaggcatgcccgaagaatccgtttcccctcccatgctttgaccaggtggttgactccaccttcggttggtaggtgttgagcttccttgacacttactcgggctatcactaaattgcgatgaaggaacctgaccaacccgccacctcattcatcacccccttcggctcctattgttacctaacaatgttgtatcagtgatgcatgatcaaatgcttccgcgacctcgtcggaagggtcgtagaggcgtacaacgatgacattgtggtcaaaaccaggcgatctgagggcctcataaccgatattatgtgaatcatctaggccccttagtgatgttttggtaattaatgataaccatttgtggactaacaattcttggagaaataagaatgcaggttggaccatagaggaaagtatgtcttggagacttaaagcattggttgtggatcaagtgaaggcaaaggtataacatatgtttttcttttgccggtcaccaggtgttttagagaagaaattgaccggattagtaggctagatagtcgtactataaagtggggtcaatgactttgttctgtgtaaaacttagtg

SEQ ID NO: 6233 - DNA, 317 bp, Zea Mays
cctttggaagcagaagaagcaaaaattgcaagggcaactgaaaaaatgaaaatgtcagagcctactttggtcgaagagattgatactgctgtccccgaagcatcttccaaattatgcgattatatcgtgcgtcatgcttcagggaaaaaattatcggaagaagaagtttttgaagctaattactatgccaaagaattgaaatatccgaagggggcaatagtgttcaatgggacaaacgaagaagatttcctatactgcctcccagacaataaagaattatccgtctgtcgggagatgtctagaagtatggggtttcc

SEQ ID NO: 6234 - DNA, 750 bp, Zea Mays
cgggcgaggacttcctccggcgagtcgtggttacgctcaggcgaggactatgctcgggcaagtcgtgattgcgctcgggcaaaatgcggctgcctcttgcccgagtattggccttgggcgggatgtgaatgcctcgggcgaatcatgttttgactgcctcgggcgtgtcctaactgcatcgggcgggttgtggctttggacgagctatggtttcgggcgcgttatggccttagacgtgttgtggcctcggggaagtcatctttggtgtgccatatgaccgaaggtgtaccacggtcggctcggccaatgaaggaaacaaatcactgattgtttcaatccggtgcaagcatacatggaaggttgattgcttcccaaataaggatccaacggctcctaggccttggggctataaaaggaccccctggacgccatggagaagaatcgagaaacacactgagacaaacacaagagcttacaacatacttcgggacactgatctatgttacataaaaccaaaaatcccactagttcccccacttgttcttggcgcatggcacgagttccacaacttcacccgaagtcttcccagtccacggtgtgaacgtgcacgtaccaaactacacaatcttgccaccaacaaccttcttctgccagtgaaggcattagttcttggcgaatgcctcaaccgaaggctcaccaccatatgtggcctgtgccaacataaacttcgccaacgccaccatggcattt

SEQ ID NO: 6235 - DNA, 272 bp, Zea Mays
ataattaatggaatagtcatagggttaaaactagaaactagtgttctcgcaccgtttgggatgttgtagccccattgcgcatggttacgatcgcgggtaaaaatttgtaatgctcatgtggtgtctaagctaaaatgtgaactagtgggtgaaaagcgctttgatatacatatatgacggatttgattattgtggtaaatgtgttgattaattgtatatggtaattatagcacatgaagtgacttgaataaaatttataagtctacttgttg

SEQ ID NO: 6236 - DNA, 520 bp, Zea Mays
aagttgtcggctcattgaaagtcgaatcttcagactcaacacctgttcctatcgttgagccataattgttctgattcccttgcagaaccaccatccccatgactaaagctccatcgtttggcttattatgatcactctgtaaggaattatcccgcatgaccgtgtcttctgctacctcctccattggaaaagaatcatttccatgcttttcagaataatcttcattctctccttgttccttatcatctccgtcccgataatccatgttatccttgtcaatccatctcccatctttgagaaccttatcaactttgaagaagatctcgtaaagcccttcaccaactattatttctgcagactccggaatatgattcacatccgtcactgccaccaaaatacggaccacccccattttccgagtgtatcgcatatccactttctgtgttgcacccaaaatagatcctactgcccacaaaggaagaaaggagcggatctcaaaaggaaccccataaacattcac

SEQ ID NO: 6237 - DNA, 469 bp, Zea Mays
ccggaaccgcagaacccgctgggtcggtggccttggagtctctgccaacatacgtgcttcatcctaatattcctcctcaacagctggcaggccaaactccaccagaacgtgtaccccatgcaacagccaacgtggaccatgagaacatgcatgcaccagctacatctccacgtatagaggatgatctggttccatcatctacgccatctgatgctaacacaggccatgctcatccatatggcaccagacttcgccacaatctgcgtcaaccaaaggtacggacggatggtacagtgacctattcagctattcgttcttcatcaagtgaacctacttcccatattgctgctatatatgaaacaccctctatggcgccaagctatgaacgatgaatttcatgcccttctcaaaaacaagacctggcaccttattccgcctagaccgggtcttaatgtaattgattgcaaat

SEQ ID NO: 6238 - DNA, 1004 bp, Zea Mays
gggagaacacttcggatctttagactagctagggctgatttttggacttagagaaaaatggcttgctctagggtgctctccacttggggctaaattttggggttttgtaggccctttttgcaatacctcccttactatattctatagatttaataaggtacttcaactttggtaaagggttcaattcatgaattggtcatttgcttaatttttccctttaatccaatgtttggggtttaaaggctcaagaggggaaattagggttttagaacctttttcataggtgaagatacatgaaggctagggtatccctcccatcatgatcatcacttagggttagccaaagtactaaagctttgggtgccttcactttccacttaacacatgggataataggccataggtgtgttcattgagccagggccttgggtaacacctgggtgttacaggaagggcctctgccgctacatcatcaggagccggagcagaagggcctacaccttggtccaagcatgacagtcgccgaagtcgcctcttcttccttttttcctcaacaggtgcagtcaggcggctcactcggcatggacgctttgggcgggcacctacgggtttccgagtctccacctcttcaccaagttcttggccagctgtgatagccattggctcggcgtgggtcgagtcagatgattccccagccagcaaactaagcacaacatctatctcctcgtcatcagcgctatctagcatctcaaaatgaggctgcctctcatcctctggaagactccaaagtggtgcaatcagaggctcaatgtcctcaggagagggtcacactctaagacccaggctaccatcacgagcgggagggttggacacaaactcagaaaatggcctaagtggtgacaggttccaggcagaatatgcaacaggagcaccagcatttgaaactctacaactcaggatcatatccagtcgactcatcagatcttcagtaggaattttcctgt

SEQ ID NO: 6239 - DNA, 350 bp, Zea Mays
gtgatatggatgggcggcctagattgacatagccatacgtgtcgtgggatgtcgggtctgcggtcgggattaaaagatgagcacccttcgttcttttaatatgggccgtggatcacagatccaatgggtacgattgcataccggtttggtatgggtaacttctaatctgtgtcgttgaatctgatcggatgacagatattcacccataccccttcgccgtttacgttttctaaaagagcccctggatttctaaataatcaacccgccatccctaatcgttgtaaaaccattgcacttaagttcaaatgtttctaaaatagaccctgggttcttgaaaaattgtatcccca

SEQ ID NO: 6240 - DNA, 576 bp, Zea Mays
ggggtatcgggtgaatctaaccgtcagatctaaaaccaacggctgagattagatctgcggccgagggcgcgcgcgcgggcgggcgagcgagcgctgacaggcgggccagggcgtcagcgatagagggtgagggtgcactgaccgagtaggcccaacgccaggggacttaggcgctgacaggcgggccagaggcacagggcgcgcgtgctcgaagcggtattcacgatctgggtcgtgcgatgaagatcggacggaggggatcagaccaggcagtggtgaacgactgcgggcggcgctattcttctccgcggcagagaggtcactagagttgaggctggcgtgagctaaggtggctccggggtcgccggagttgggcacagagggagagaatgtcacggcgaactcaatggcaaggaagaggccatgaatccgagggcagagaggggagaacggtagagagaagatctcgggcgggctgaagtaactccgatgaggcattccggccacggggagggggcttaaggcgcgctaaggccttggctagcttcagcagaggtagaggcaccttagggacta

SEQ ID NO: 6241 - DNA, 658 bp, Zea Mays
gttctacactttcgtccataaagtgcttcaaatggtgccatctttagacttgcctggtaattattgttatatgagaattctgcataaggcaaacttttatcccaacttataccatgcttaagagcgcaagctcttagcatatcttccaacacttggtttgttcttttcgtttgcccatccgtttgtggatgataagctgaactaaagtttagcttggtatccatggactcatgtagtcttttccaaaagcgtgaggtaaattgggttcctcgatccgatacgatcttctttggtaatccatgcagacaaacaattcttgacatgtataactctgctaactgggctcctgagtaagttgtcttcacaggtataaagtgtgccactttagtcaacatgtccactataacccatattgaatcgtagccatctcgagtacggggtagtccaactatgaaatccatactgatttcttcccatttccatgctggtactttgagaggttgtagcaatcctgctggtctttgatgtttggctttaactcgctgacacacgtcacatagtgcaacatgagtagccacatctcttttcaaatcgtacctccaatacttttccttgaggtcctggtacatcttagtacttcatgggagaataggataag

SEQ ID NO: 6242 - DNA, 340 bp, Zea Mays
cttcgatggcataataatatcataatcaatgtctccttcattagcatcaccctcttcaatatctgcctgctcggtttcagcagtgggtgattcttcgtcagcagcgccttcagtcacaaccaatcccgaccgcctcataacttcggagatcggagcagttccagcagcttcggcttcgtctccgtcacgagtaactctagctgtcgagcgtaccctggccatttgatgttgaattttttgcattttgacgaagttaaaattttttatctttgacgaagctctttcttgtcacgaagctagagcaagatgatctatcggttcagaatacagtggcaagctt

SEQ ID NO: 6243 - DNA, 481 bp, Zea Mays
gaagtctggaaaaccagcgcccaggcggtggaaggccccaggacaggatgggagaattcttgagactgaagccgcccatgttcgcggggtccagcaatcccctcgatgcagatgactggcttcgcacaatcaagaggaagttggaagccatcgcttgtcctgagaatcagcgtgttcagctggcagctcatcagctttcaggaatggctttagcatggtgggacactttcagtgaagccatcagagatgctacatgggcagaattcgaagcagccttccgtgagcaccacgtaccccaggggatagttcaactcaaggaggatgagttccgggagctaacccaaggcgggagaacagtcagtgaatatgtgcacaagttcatagagctggcccgctacgcgcccgaggatgtcagcaccgaggccaggaaaatggcccgttttctgagagggttaagacccgagcttaagaccatcctcgc

SEQ ID NO: 6244 - DNA, 437 bp, Zea Mays
gattaggagagcataggtatccaactacttattatgtaggatataagagatggataggttagggcaagaatagccaggggtaagaaagtttatggtgaggaagaactccgtgttgggtggtaatgcatctgaagattgagtttgacttctctcctttcttaacgaggttgatcttttcttttccggccttggtctcatttatttgaggttagtgtatatcattggggttgaggactatggttaagatatggatgagatagactacatgatgcaggtcataagtttgtttgatgttaggtggggataacagattatacaattcatcatgactctattggttgggttagctcttctactcacggttgagttggtttaatgcactaattttaggtttaagtgcatgaggggagaacaaggtttataggagtaggatctag

SEQ ID NO: 6245 - DNA, 552 bp, Zea Mays
gtgacaaagcgtcaccgaaatcatagtatgaatctccttgttgtttcgcctcagttcattagtagcatagcgtaggtaggttgggagttggcacgcttggttgcacgtccgtctgcgccgccatggccctgttgtggtttcgccaaacgttgtgggcagatcctgctgctgcccatatacagtaaggatctcctccactgtttcaactttgccttcgcatcgcttattgcttgggaatatagggtttagcgcatctgggtgctggatgggcgtacgacaccgttgcattgccacgaagtcatgcatgtcaccgtctatcgcgttcggaggtactacgagccattggatcgggcatcaacgataagcattagatcgatcttaccccccccccccccccctcaccatattaaatctgtgtcgtggatcggttatccggggggccaagaataaagcaagacatggacatgtgatggtcattggatcatgatctgatggacgacatcacatacttgttcaattataaagggaattgaatccggaccgccagatcgc

SEQ ID NO: 6246 - DNA, 290 bp, Zea Mays
gtgagtatgacgatgatccccttcttcaaatgacatataggtcatagagatcataccatcgttagcatgatgggatttgtgtggcttgtgaaggggtggagggcaataggaatggaagaacttactcgtaccagtttagtggtgtctgtgccctcctggacttcaacaaacaacattctagcaatgatggcgacacccgacagcctgtgacatgagggagagaacctaagtagtgaatatggaggagatgtgctcgagcgatggtggagaaggaagttgggccacaaagc

SEQ ID NO: 6247 - DNA, 293 bp, Zea Mays
cccatgcgaccagctgcgccgtatagaaaaaggttaagccacggtcgtcgtcgtgaataatgaaggaagaagacaaaggccgtgcgtttcgaatgttactacgatagtgagagggaatgagcagagaagaggatgggcagagcgcaattggccaacgcctcaacgggtgggccaccgtgtgtatgggccgggccgagccaggcgaggaccaggccaaggggacaaaacgggggtaaacgccatgagcacagtgtgtgtgagaggagaatgacgacggagttatttattgctcc

SEQ ID NO: 6248 - DNA, 469 bp, Zea Mays
attaagcttgcttcggccgaggggtccttcgtatcatcaatgcagagggcagcttcggcctgagccaaggttttaacatgctcacaatctgacttctccaaaatagctgcaattcccctcgcaccagagaaggcacagacgtccccacggtcactcaagatttcctcaaaagcttcggcttcgctgctgatccactcaattgggccctcaggatctcctcttatgaagttgtcttcactcgagtacgcgcccacgttggcgaagctagtttttatcttgttgacacattctatagatttttcaaaacatctttcttttgatgagcgaagctctgcaactgctttttcaaaataacttttccagtattcactggcatctcggtcagcttcggaaatagcgcatttcaatttggcttcggccagttgtttttggaggttttcaatctcgtttctttggatttcagattggg

SEQ ID NO: 6249 - DNA, 626 bp, Zea Mays
cttggggccggttattgtgggtccggtggccgacactgaagatgctgcccgggagggtgtacaagatgctacggacgtggtggttgggcgcttccagcgggatcctgttgacgatgagtagccaggcctacatggagaaaaacgagggttccgctggggagcaggttgcaatatgtctttgattttgtaagatactctttaggtactacttgtcggtgacattacgacttatctgcatgcccccttttctttcctctgctgtgtgcattgttgccagcttctttcccggtgcttggctcccctgggatatggcctcaatatgtcggggtcggatgccaggattcttaaggtggcactggtgccatcacccccaaggggcaatccctactgggacccttcgtgaacacggcctaggccaggtatccttaacagcacacccgtaaggtccgccagctggtatttcttatcctttgattcacgcaacaggatcggcaacagggcggtggggtgtgtgtagtcttgtggttcttgaccatgtggccgtacggcccctaaccaccccatcgcctagttgccaggtctggctactcaattcggatgtcgctataccagccagggagggagac

SEQ ID NO: 6250 - DNA, 631 bp, Zea Mays
gatttatattatcttggatctaggtgctcgtagtagggatacaagattcgtcgagagagcgagtgagtcctaggtctcttgagtatgattgaggcaagtgccaatatctaggggtggtgtgaggagtgagggttgaagtgtcgtgttcaacattttttgacctgcacagagaaggattagggctcctccttttatagtcgcaaggaggaggcccacacatacaggtgtagctacgttattgttgtggtcgtcggaggcgtgtccgagccctggagcagcatggctgggagaacgacctttggaggaggcgtgtccaagccatgtagcagcatggctggcgggatggcctggtcctttgtgtcgtctttggtcagcagcctgacacatgatccatgttacctgtcctttttgaggtagagagccgaggctaggtcgggagcatgagcaggtgtctgagcccatcctggacgagacatttgttgagtcgtagttgttaaaacagtgcttgccatggtgaaaaagtgtggtgatctggtctgggcgtcatccacgacggcggaaagtagattggacaacagtcttgttgtttatgtagccatcctatcttcagcgtgttttccgggatagcagg

SEQ ID NO: 6251 - DNA, 604 bp, Zea Mays
gaaacagccgcaaaagtcgcccaggggtgcagcgagatcagcacaggcgtgcgaatacagccaacatgccacattaccatacaaattatagttacatacacacggcgaaggcattatatattacatcggctcaaccttcgggatgatacccatctccgtgtaattgaacaacattatcctcaattcctcaccctcaaaaagatttcatagatccccctcacctatgctcgccccaatcggcgaggacaacaattctcgtttaccaatccggtctactcgaagacggccacgctccatcccaatacgacagcgcctaccacttcacgaaaacttacccacactgtgttttgacaccacccttcgccgcctatactcagtactcgcactaggaagatccccggcaccctccacacgcggcgaagactgcgctgcggccacatctaacgcagcaaaataatccaagccttcatccgaggacttctccgtccaggaaaacgaactcccagattcaccatcagactcaaaacactcagatatagagccaaataaattatcatcagcaggcactacggttgaggccgccacaaaattagtattgtcagca

SEQ ID NO: 6252 - DNA, 608 bp, Zea Mays
gaaagataagaccggtagcaccaacccactggggaggacaaaaggcatgaactctccagcggcaagttcatcgggatggatggcgccgacgcaaatctttccgccgaacgccggcgcatcccatccaagcaggcggtataccatgtcgagcactcactcagtctgggcatgctcgggatgaacttacaaggccatggcaaactacggcaacgcaaagcagagaccttgaaggcaaaggggcgcagaaagctcgaaggagagaggacgccgcgagtgggagagaagtaaggcatggctgctactcaagggacgaacccctctttaaaggcagactcccccgctcccgcctcgaaacaccgtgagaagtctcccccgatgcacaccagggtatccatcctatgacacgggggcctagtcccacaagtcatatagctggcgcgttggtcttcgagtgcgaagaaggcgaaccgtcacacaaggagcgtgctaccgccccgcggttgtgcaccccttcatcttcgccctgaccaacggccaagaaggtgaaccgtcgcacaaggagtgtgctaccgccccgcggtagtgcgccccttcatcctcgccgcgac

SEQ ID NO: 6253 - DNA, 376 bp, Zea Mays
cgacagtggaccccaccataggcaattgttcatctcccatcccattccttgctcccgtccgttcactcgacaccagataacgacgtcgccgttcgtcctcctcatcgccttcccctagtgcgcatgccgccgacactccattcccattcctctccactcacgccgagctcgttactcttctcccccattgaaatgctgctaatgtttcttcttgaacaccattaatagcagccgcccacgcccgcctcttctccttccccactagtcgtgccatcaagcagccccactcagctattaatggccgtcgaatcctgtcctctcgccatcgacgtctgtttcttctccaagttataaatagcagtgccggcgccctgtg

SEQ ID NO: 6254 - DNA, 1881 bp, Zea Mays
gtcattggaggaagggtagtcgtggggatggggtggacaaagggacgcccattggcccactctctacaacccgtgaaccggtcgcatctccatgtggcatggcctgtccctaggtggaccttccccgcttctgcctccacctagctggcacacctgacgatgcccaacccggggtatcctttcggcccacttccctctgcgccaccggcacctcaaccaacgttactactcctatcaccccactttgttctatcctagaatttgtggcctggtgggtgggatcaacagttacttgctagctcgttcagcacgatgaccctgactcctattgtcaccaactgagttgttgattctggtgcctcctaccacaccacaccagacgctggtatactttcttattcccacccacctctctcgtctcatccttcatctattattgtgggcaacaggaacattctcccagttacctttgtaggtgatctggttcttcgtgagccttaccatattcgcaatgttcttgtcgcccctatatcattcaaaatattttatatatttgtcaatttaccaccgataactcttgctctattgagtttgatccttttggcttgcttgtgaaggatctcactacctagagccttctcgcccgctatgatagctctaggcccctatacaccatgcagctgcctacatccacttctccacctactgcttctgctatatcaccgccttcatcctcgccgcaactgcacgcactgacttcttctagtacctccaacacttggcatcattgactcgatgatcctagccctgatgtgttgtccaagttgtgtagtagtctagtcatctcttgtactaggggcacctctgagaatctatgccacacctgtcagctaggtcgtcatgttcgacttcctttccctagctcatatcaggttgtgcatacttttgacctcatacactatggtttgtggacctctcctgttattagtgtttcgggttataaatattatctagtgattattgatgattcactcattatttgtgaacttttcccttgcgtttgaagtccaacacatttgcaactctcatgtacttcgcttgggtttccactcaatttggtcgcatcattaaggtccaatgtgacaatagctgtgagtgataactcctctaggtcattcttctctcatggtgtacaacttcgaatgtctagcacctacacttctcagaatgtcaaggttgcgtgcctgattcacactactaacaatatcatgtgctccttgctatttaggcatccgttcttgcttcctactgggttgatttgcatctgcacaccccacttttctctttttagcgccactccatcctatgaccatttggcgtctttgagtgtgcatgctaccccaacctttctgtcactgctccccataagcttaaccctcgctccaaccattgtgtcttcctcggttactcccggatcacaaagggtatcaatgtcttaacctcaccactcatcgcctattgatctcccaacacgacatcttcatcaagacggattttcccttcacgagtcccttccagcccaccattgacttctttcctgagttgaactatcttcttgaccctgaccccatggctccctatggtcaagcaccctttgttttttcacaccactcccgcctgcggcactgatgccactggactccctccagactgccctatcgccctcgatcagaccatgtgccttcccgccaaactttctcgaaccgctggcgaccctggtggccccatcttcacccctggcatctccgaccttgcccgcgcaactagggacctccctggtgcccttgccggccccgacgtcccgtcccctccttgctacac

SEQ ID NO: 6255 - DNA, 1060 bp, Zea Mays
cttcacacgaacgggtgacccggttggccgcacacacaattgctggccaatagaaaccttggcgtatgaccttggcagggagggctcttggtctcgaatatgatccgcatatacccgtgtggacttctcggagaagctctatgcctttggcttcagttatgcattttaacatgggttgacttatccccttcttgtatagttgtccatcgattatagcaaagtctctgcttctatgttttaaccttttggcttcgctttggtcggaaggatggtaatggccttggagataaagggtgatgggtgcccgccagtctttggccattattagatttacttttcggtaattgtcggcatcttgtgttatttgcaagccctcagggtttcttacgactggtgtgctgattgtgtgaaaaaatacgttggatggcaagggttcgcccttcgctgctgctttggctaacatgtcatcttctccgttcttgttccactcaatgtgctgtaaggtgaatcctttgaattgcttttctagacttcagacagtagtgagatattgcatgagtactgactctttggtggagtagtatttttcgatttggccggcgactaccatggaatcagctttgactatgcatgtggtcactctgagggctcgcagcttgcgaaggcctaagataattgcttcgtattcagcaatgttatttgtacatttatctgagtccagtgcgaaacgaagacgcgcgacatatctatgtttgagtcttgtgggtgatgtaatgattgctgcagcgccggtgcctgcgtgacaccatgccccatcatagtggatggtccagagagtctttgcctgaatttgttgtggctctaaaggccctgtccaatctactatgaaatcagccaaaacttgggatttgattgctgtcctgggttcgaaggtgatgttgcaaccagagagttcagcggcccatttagctatcctagctgacgcctccggatttctgaataactatccaagaccccgatctgaagtgactcgtaccttgtgtggctcaaaataatgtct

SEQ ID NO: 6256 - DNA, 586 bp, Zea Mays
ggcaccagcgaggcacagcagcagggcgaattccgcagcatcgcggtacagaatctagcgttgaaatgatgagcaggctacgtgtcgatgaagcgacgacgagggcgacagctccagcgagctgaacgagcacgggcaatatcaacgacgtggacgcagcagggactcatggtcggtgtgtgagcgaagcttcgacgcggtgctgcacagcacgacggcgagcagcagcagcgcgcgtcaagcgcgggacgactggctctgaacgtcgacgacggagaggcatagctggcgtgagcgcgcggtgtggcgaggcggcgagcgcagaggcgagcatagcaagtccggcaagcagcaaccgagtctgggagcacaaggtcgtgggctgtgggttttataggccggcgagggggaagctagagtgcctggcagggagtaatggggaggagagaaaacagccggtttgaagaagattgaaggccattaatggttaattagacgctgttaatagagggaggccactcctcttgattcctcatagaaacggacgagcaagaaacttcagacattaatggtgtcgaagaaagga

SEQ ID NO: 6257 - DNA, 441 bp, Zea Mays
gggcgcagtgccaggaatgaggtctatatagaactccactcctctttcgggtggcattccaggcaactcttccggaaatacatcctcaaactcttcgattacggacatgttttctgctcccaggttaaacatcattggatcattggcgggcggctgggcttgacaggaaactacttttccttggagatcggtgagaaggacggtcttatttgcgcagctgatgatacctttgtgcttagttagccaacccattcctaggatcacatcaatcccttgggatggcaagacggttaagtccaccaggaacactaccccacttaagagaattctgacttgggagcacctgagttggcacaggaggtccgatcctggggttcgggtgaccaaagggatggctaggggtgtagaggggatgccatgcttttccacaaacttagtggc

SEQ ID NO: 6258 - DNA, 277 bp, Zea Mays
caccaatggaccatgctttcttgctccatatcgatccactcgctaccacttgaatgattgtgctgtccaagggaataacccatccaatgccaaggaattgttcaatttgcgccattcaacagctagaaatgtgatagagagaatgtttgggctattgaagatgaggtgagctatattaaggaaaaactcatattttgacttacaaaatcagattaggatcatcaatgcttgttgcatattgcacaactttgtaagggataggcaaagagatatggat

SEQ ID NO: 6259 - DNA, 596 bp, Zea Mays
ctctgaacaacttcccaatggtacagtattcggatcagaacaccaggttcagatgtctcatcgctggcgactgtgcgcccaaattcgtgcccgccgcggtgatttgtgcccagcgcagatggataacgacgaaggggtaagaaatattgcactgtgcatgaactccaaccactattctactccagccgccgtacacgcctgagtcatggccgcttcagatagactcaccggagttagccaccttgcgaccttgctccacgtgcctgggtgctttaaccacgccaccgtgagtcaccttagcccatctggtgatcgccggtgagcttaccatggtaaacgccaccaattgcttgcgccagtgcacccccttttctccgaccgccaccgcgtgatctcaaattcacgggccaccgctcaagggccctataaattgagcacaccctcggctccgctatgtaattgtgcactcaacacacccacccgtgcctccaattactcaccagagcccccaaattgctcagttcccccaaattagttttccgccgccgtgaacaagctctcaccatggctcatgcactctaggtccgatcttgtcc

SEQ ID NO: 6260 - DNA, 558 bp, Zea Mays
gtggaaaggagtagagcatcacccgtgcaagtggagtctggccgcggcatcgctcggtgttgtgggggcgcgtcgtcgccgcaattcctcgctggaatccgaatttggccgtggaaccgcgcgtcttcgtgggcaagtcacggcgctacgtgaattacggtatggtttcctcccctgtgttcgcgcttatccctatcgcatattgcacctctcgggtggggttttggggcgctgtgcgagggtaatcgaactcgacgacgatgtgctgtcacggtggagctcgccgtcgccgatggtgaggacggggggtgatgacggttgtggtccgtccatttgttgatgagcgcctaggattagatctggcataggatggtcctcgcccatcgatcctgcaacgaacggctgcgattagaagccaagttaccctttcgcaactttgtctggtgacggctggatcgggatcctacgactgcgattggaacccggcattccagtgcgggcgtgggttgatagccgttgatctcgtgatccacggctcatgtgtgtaggcgggtttga

SEQ ID NO: 6261 - DNA, 871 bp, Zea Mays
ccgaggttggttcctttctatgagtttctctggctctcttcctacgcccgatgtttctctcctttatccttccgttgcaggggggtcgcgggcgatcaagaggtcatgtcgccttctgttgagtcgttatggctgggcttctcatcccctctcccttgggtgtcttaggggagttgtgacgtcttccacacggcacaagaggctatcgaggcggaggttgatctgctttgcatgtagctctctgaagctgatggtcgtgttgtccggtgctgccatgtgtcttagggtgaaaatgctctaggactactaccatgagtctgaacccccgcaagtgggactcggatccccacttatgtcatctagaccccatgggcgggtcctagacctccatgtgtactattcaaatccccttaccggggcacccaacctccctgtttgacatccggacagtagcaaacggggcccaagtcttaaggccagcatgtgcccttggtccccactctccccttgaacagaggtcctatgctaccacgtggctcatgagtgcatggcagaagccttcggctagaagcaagctcgcttctcgcattcaatgcgagaagctgaggtgtgccttgctacgcatagggcatggacaggcttttgtcaggctgcgcaggcacgaatgaccgctccacgcattaccaatacgggcagttgtgtgttagcgtcgtgcgtagggcttgtacggtgcgccacgtataccgaggcacatggttttgtctcagtgccacatgcgtgggtggtgtcatcatgagaagttgttgggtcgggcagagcatgcacgtccatcgcaataattctaccacacattagcaaggttgtccccaac

SEQ ID NO: 6262 - DNA, 615 bp, Zea Mays
ccgaacattatacatcaatgttcgagacagggcacttctctaacctactgcaggatgttttgcatgtgttgggaacctatgttcgacccctgtatgagaccaggcaagtgtgcgaaccccctcgggcttgctactacatcactcgcattcatgttagggtgatggatgcaagtgatagagggttcaggactctgtcagctcatgagtctctgacaccgctatccacctacgctgcttcggtcagcgatgctgctaggcaaactctatggtccctcagccacacctaccggcaggagctgcacaacacgaagtacaaacatctccctctgcgtcttcgtggagaaagccagaccagcattgttccaggtggagctgaagaagatcgcctcaacaccctagctggtgtggtggcaggtcttaacaccgacctggatagtgctaccctagacctctctagggtacacttggagctggaggatgcacacgcaaggattgcagccctggaagctcaactagaaggaagggatccccctgaagctcaaatccctgccatggcgttgtcccctccccacaagaggatccgcgagaaccagtatccatcaccaggctgctata

SEQ ID NO: 6263 - DNA, 700 bp, Zea Mays
ctgccagcaagtttggagtcatgacctcgaactcgaatcaagcaactcgcaaagaagccatcccttttgacgcgaaagatgccagtggtgacaccatcattggtgtccaacaatcgatctaatgtttctatatctgtggtgagtatccaaaattccaaatgctaagcttttgttgtcttcacattatttgttgtatgctaggatgtaatattgtcatcttgaatcgacatcttgataagtgcacttcctaccaaatcaagttggctgaggcaaaatcaaagcttgctcaaggtactctcagcttcgctcttgatgatggttctcttgttgttaatcccactgaatatgattatgaacacactagaattttgattgccaagatgattattgttcatgagtattcactacaaatggtagagcatagatggtttaatatcttgatgaaatggatgaacaacagctatgaaagtataggtagaaagacgataaaaaatgagtgcatgaaagtgtatgaatctgaaaaggaccttctaaagaaaactcttagagatgctgaatccataagtttgactactgatctgtggacatctaaccaaaatgtccaatacatgagtttggttgcacactacatagatgtcaattgggaattgcaatgttgtgtactgaactttgtggagttggatcctccccacactggtgt

SEQ ID NO: 6264 - DNA, 432 bp, Zea Mays
cggctataaatgaatgggatgctcctgaatcaaaaagcacagaagcgggagtaaattcgactaggaactcactgagcactactcccggggcttgctgggcttcctgagcgtcgacgtggttgacccgggccctgccctggtactgagccctgctctgctggctgctggaaggaaacgccttgggggtgggtgctgatggaaccttggggccattcaccgagttggagtaggttggtcctggtgccttcaactgggggcagttgttcttgaagtgattagggtccccgcagtgccaacaggcatttgctggcggctggttgcttgcaacggagggtgcctgatgggagctctgactctgctgactgaagcgtgatggagagggtccagattgtttatgaaagcttggacccctgggtgggagcccaaagggtc

SEQ ID NO: 6265 - DNA, 370 bp, Zea Mays
aatcccattctttgtttatctgacttatgaccaccagcgaatctccatataccatcagtctcttgatgcccagtgatatgacaatgtttagtccatgaatcagagcttcgtattctgctgcattgttggatgctggaaataacaattgaagagcatatttgagttgttcacctctaggtgcaataaagaggatccctgcacctgctccctgcagctttaacgagccatcaaaatacattcgccatacttctgcggtttctgggttatccggcacctgttgctcggtccactctgatacgaagtcaaccagtgcttgagttttgatggcagtgcgaggtcgaaattcaatgtcatgagatcccagttcaca

SEQ ID NO: 6266 - DNA, 899 bp, Zea Mays
agggggatctctgtcaccgagtactgccgccagatgaagggtatgttggcctccctctgtgacctaagggagctcgtctttgatcgcacactcgtcctaaaccttctccaccgcctcaataagcgctacgatcacctctgtgcggcccggcccggatggaccttcccaacgtcttcctccagcccagtcaactcacctgacgatgtatagtatggggtttcccctcggccaccttacctctgcgccaccggcaccggtcaccacttctaccattacagctccactctgctccatcctagaaccgactcctcccgtcgtcaccaactgggttgctgatttcggtgcctcctacaaccactccgaacgcatgtatacattcttctttctacccacctttcccatccactacatctatcattgtgggtaatggaaacattgtcccggtcacctctttagatgattcgattcttcctaggctctttcgtctttgcaatgttcttgtcgcctcacatctcaatcaaattattttatttgttcgctagtttatcacaaataactctttctctattgagtttgatccttttggcttatccatgaaggatcttgctacccggagctttctcacccattatgatagctccgatcccctatacaccctcgtcgcagccacacgctctgactacttccactacatccaatacttgacatcttcgactcgatcatcccaacccaatcgtgttgtccaagctgtgcagtattttagtcatttttttactaggggcacccctgtgcatctgtgccacacatatcagctaggtcgtcatgtccaactccatttctctagctcctctcaggttgtgcacaattttggtctcgtacactacgattgtggacctctc

SEQ ID NO: 6267 - DNA, 458 bp, Zea Mays
gttccctcgcggtcggtcaggagcgcgagaattctctcgcgacacgcgacctcgcctgatgcttgctcagctgcgtgtccatcttttgtggttaatccacttccactactacgagtctacgactacaagcgacgaaagcgagagggattagggggaactgtcaccgacggcggccgcgtcctacgctaatacacgcgaagtcgccaaattagagtcatgtccttctgagttttgatggtgtcgacggctacgaagacgaccatattttttatacattagggtttgggggccctgtacccttgatccacttgcgctgcgcaagggacaggcttggcccatgcgtgccaacacataagcaaccaaggagctagcgaggagagaggaaagaataggacgaaggcggcacatcgatgatattgatctctaccgatataaaaagactgattgtaaattttctt

SEQ ID NO: 6268 - DNA, 353 bp, Zea Mays
acgatctggagagctcgcgaaggtaggcggcttgtggctcataaattcctggtgcttgtcccggggtggaagtggtggtggcggtggtggcaatgggacttgctgttgttgccccatcctcttctgacgcatctcatctctctcttggcgcatctcttggcgttcctgctgcatctgcgtgtgcatatctgctagtatcagccatctgttgcattatccgcatctgggctccaactgctggatcagttccggctggtggaggatttggaggatccatctctgcttgttgttgttattgtataagtaccctctggttgtgtcgattgtggggtagatcaattcctcctcccttc

SEQ ID NO: 6269 - DNA, 446 bp, Zea Mays
ccccacaacaggaggattatcagacaacagcaaacagaaatgaatcctccaaatcctcctccgactgggaccgatccagtggttgccgctcagatgcaaatactacaacaaatggcaaacatgatgaacaaaatgcaaaatcagatgaggaaagaacgccaggagatgcgttaggaacagctggagatgcgtcaagagatgaggcaagaacgcctggaaagacagcaacaaccaccactacctccaccaccgctagctccacccagagagaagcaccgggagtttatgagtcacaaaccaccgacattctccaactccacagacccactacaagcagatgactggttaaaatctatggacaagatgctcaacatagctcagtgctctgacagagagaaggtgctatatgcatcgggtcgccttaccggcctcgctgcggattggtg

SEQ ID NO: 6270 - DNA, 388 bp, Zea Mays
acacaaacactagttatttatgtgtcattgggcacacgtaaacactaccactggaaagacgacgatcactacctacaattaacccacgtaacacgttatcacatgtacaagcatttatttagttgctacggcttttcattagttcttttattgatcacacaaaagcatcacaaacacaagtttaatagaggaccgatgcatcaatatcgatggactcctctatcacaatcaactacagcaagcaagcatattaatcatggaacacatgttaacctaagtttagccatcacaagtctatgtccgttaagtgctaactaagcatttttttgccaaatggtgaactaaatattcttttgagcgtgtgcagatttttagaacagcagcacgg

SEQ ID NO: 6271 - DNA, 530 bp, Zea Mays
aaatacctaggactgcttttgccattacctattcctgaacaagcttggcaaacagtgaccatggatttcatatcggggcttcctccatccaacaagggcaactgtattttggttgtagtagacaagttttccaaatacgctcatttcctagtgttgaggcatcctttcactgctctgacagtcgcaaaagtcttcctgtccgaagtatataaattgcatgggttgcctacggccattatatctgatcgtgatcccgttttcaccagtcggctctggcaagaattattcaagttgacaggtactcagttatgccttagcagttcatatcatccccagtctgatggatagacggagagggtgaatcagtgtcttgaaacgtatctccgttgctttgttcagtcatgtccacgacaatggccaatgtggttgcctcttgcggagttttggtataatacttgctatcattcttcattgggcaaatctccttttctggtactctatggtcactcaccatcacaattgggcctggt

SEQ ID NO: 6272 - DNA, 370 bp, Zea Mays
tcacccccagtcctgccaccgtgagctccaattccaagttttccccaaccctattccgaagcaccgcatgatcgagctcaccgcggccagcccaatttaggtcagttcatgtttctctgttgcttgttctaacattctcatgtgcccttgatgctctccaaaccatccaattgaactagaccgccatgaatcgacgggaacacattcatctgcccgcaaggtccacggtcactgcggccagagcaaacctagtagccattcgtgaaattgaatgaggggaaatactcgggaggggttcaattcggtgaaagccactcgagagcgccagtctttgcataaattggcctgtacacgagctcgccggagctct

SEQ ID NO: 6273 - DNA, 540 bp, Zea Mays
caggaggcaggcgaccccgctcggatgaatcgacctgccagtgacctttgggacaccagccaacttcaggaccgagactctgccctctgaggtggttgggttcaaaggaacctatcacgctatccttggaaggctgtgctactcaaaattcatggtcgtcccaactacacctacctaaagatcaaaatgccgggtcccgctagaaccatcaccataggcaccacgacacaacacacatatgaatacaaagtcatgtgctatgacctagccgagggagccactactgcataaggaagggcgtacggtacacattgggtctaagctctccccaaaataggaaagtgtgcttgttgacttcctccatgaggaaaaagacaactttgagtggaaaccatttgacatgaggggcatcccgagggaagtcgccgagcactctctatgggtcaaccccagctccaagcccgttaaacagcgactgcgccaccttgatgaggagaattgtcgggccatccggaaggaggccagcaaactcctcgcggc

SEQ ID NO: 6274 - DNA, 720 bp, Zea Mays
aatcagtacatcatcgatgaaaaccatagcaaacttccttagaaaaggctctaaaattgagttcatggcacattgaaaacttgctggggcattggtaagcccaaatggcattaccctgaacttgtagtgaccatgatgggtcttaaaggttgtcttatgctcatcctctattcccattcttatttggtgataacctgcagtcatgtccaaacttgtgaaatagctagtgcctgccaactcatcaagaatctcatccacaagaggcattggaaacctatttttgattgtcatatcattgagttttctataatccacacaaaacctccatgagccatccttcttctgcacaagtagcacatgagaggcaaaagggctaacacttggcactatatggcctgcctttaacaattctgcaacttgcctctcaatttcagacttgtgcaatggtgaatacctatatggccttgcattcacaggcactgatcctgggagtaaaggaatatggtgatcataaagtctggtgggtggtagagcctttggtgtttcaaagatgtcctgaaattcctttagtaactcattcagaggttcagactccacaatttccactggttctggaacaggttccaatagaacaaacacctaaacctcatttccttttaaccatttctgcaccttcagtgctgccacttgtgggacttcagttaccaacatagaatcccc

SEQ ID NO: 6275 - DNA, 291 bp, Zea Mays
gcgtcgatcacatgacccagcaccagtagtttctatcgctcttcttccttacatcaccttgaagcacccccgcacggatcggacctcgaacagtggcgcacattgggttttccccacggcggcccatggcggcaaaagatggagcctgacaaagtagccaccccaccgcggtggcgattggtcctcgggttgaagcgacgaaggccgacctcgtggcatggcggcaacacaggcagtttgatgctctctctttcctggcgtccacagcactgtcttcttcccatagatacc

SEQ ID NO: 6276 - DNA, 831 bp, Zea Mays
tcacgccgaggactgggtagacctcagctaaagttgttgagattgttccttgtgctaggaataagtggggcaattggtgggacttttggttttatgtggctcccgaggatgtcgaagggttgtcgagttttccccctgccatcctatgctcacattgctatgtggcttttccacattttgaggtggcagaagaagatgaagacgagggggcccttcagtacgcggcccgcctgagtagcggacgtgacttgcttgaggagtttattgcctgcgcggtgtggcccctagcgcatggttgggcactgggtgagattaccccccgccagatgccgacactaggggactagctggtgcgaagtcctgccttcgccgtggatctacgcggccgagatgcgggcgcatttgtgcgtgaggtcgaggcggaggccgtcaagattgtcagcaaatacgcaccgaagacagagaccttgaggagctgggatatccgcggttccaacgttaggttgaaccgcgtgtttgagctgaatcatctgtcatacggttcttatccggagggggactctgcttacaccgctgatcgctgagggaagcaagcaaggcctcggccgatgaaggcccctcaagggataaggctccgggtccggccgtcagaaagagaaaattaggtaaggcggctgaggagttggggctgagggcatctggtcattttattggggaattgctggagatgtgcgcggctcccggggaattgatgtcttcgcctaagcttcgtgaaacctctgcgcaaatgctgagggttaccaggggtcgatggcctaggaatgatccgat

SEQ ID NO: 6277 - DNA, 623 bp, Zea Mays
catcgcttcgaccactgaccgatggacccacggtaccccgtggcgtatctcgcttcgctggcgcgtgggccctttccgtcagccccttcaccacgatcggcctcaacagcatgaaccacgtctaccgccggactttgcgccggtgatgcggcactaggtggataccctcgcggatatataatggaggaggttcctcggccacgcccgcaacgccatcttcctctgcctctatacacagagacctgaccaacgccggtaacctcgccgcggcaagccgagagcgaacggagaggagcggcgctacgagagtccaacctccgcccacccatcgtgacctgggaacgtccgctttgtgactcggtttgttcaccccgtctaattccctcgatttgtccagtagaatagcacccgtcggaccttagctcggtcggcttcccgcagtcgtgtgtggctagcacgacgcgccgtggaccgtgatccacgcttgatggtggcagaaattgatggggggaattgggttcggagagttattaattaggcgagggccaagtgaattggaaaatggcgcatgggttggccggattcgaaaccccggtggccttgccgcctcgctgtggggggcg

SEQ ID NO: 6278 - DNA, 321 bp, Zea Mays
caaggctggtggagtcggcggaggcgtgccgacgaacttcttcaggacgttgacatgaaaaacgtcgtggatgggagtctgtggagaaagagccaggcgaaccgcgacgtcgttgatcaactcctcaacgcgatacagcccgatatagcgtggtttcaacttgcccgtggtagcttgcggtggggaagacatggtgcgctgacggaggcgaagcagcgcccaatcgcccacttggtaggacacttgtcgatggcgacggtcgtagtggcgcttatgcacctgctgcgcctgttccaggcggaagtggacgtcagcgaggaa

SEQ ID NO: 6279 - DNA, 404 bp, Zea Mays
cactggtgtgtgaggtgagggtggagaattttgtgcaccccctgaatcttcaacacttccacctgaaacacctggcggctgcaacacctgaccaggcacaatgtactgaaactggaattcacaaggaccagattctgtctcagcttgctgaacattttcatcactgtcccaattccaccccacttcttcttcaaacacaacatctctgctgatatacagtctcccagctgaaggatcatacatcttctgtagtgatgccaatgcctgatcctttgtgttgaacagatctacccacatatacatgctgtaatcatctactacaagcaggaaataggattttgcaccaactgtctttggtctgatctgcccacacaaatctgcatgaaacaaatctagtccctttt

SEQ ID NO: 6280 - DNA, 843 bp, Zea Mays
atctccctccgtcccacttccccggctatagagttcagtttctctccccactttccccatttttaccgcacctctctctttctctctcctccggtcctccctcaaccccagcagcttcgtctcccctcccctctccccagaaatcggaactagatagatagatcagccctatctttgcctcctcccggacgactcggcgcaaggtcgcagcttttctctcgatctttcgcgcttcctctttttgacgcttgctccgcatggggttcctggagatctttggggcggttcgctgctgagatggttcgccgcatcacgcgctgctgtgactctcaacaggtgggcttccgtagactttccactttcttactccgatctactgtacggagcagccggggagtagtattcactaaccttctctgccggctgagagcgtgagctcggtggaggagtcctgatctagccaaagattggatttttgtggggttgattcgaggtgttttttttcttgcgcgatttggtggtgtgggcttccttcctttcattttcgtagcatctatctttatattccttccgatttcgtgtcacttctagtccatatctcgcactagtgatgacttgcttgactagtttcttgactggtttcctctgtttatcatcgtcgcttcagttcttccgatccgacgagccccggtgatggacggcacgccgatctctgcgtcctctacggcaggcgtcgacgttggcgcggtggcgaccggcacgcccatgaagaatgcgatgacggcggccgctgtcaccgagatggcgaggcatctcacagtcgacacggaagacgccttcgcg

SEQ ID NO: 6281 - DNA, 396 bp, Zea Mays
gtcgccaccgctggcgagccgctcggagctagctacccacgcgaccctactggtgtggaggtagttcatacctgtagagtagtgatggagctaggactccgcttgaaggcagatgtaatacttttgctttttgtaaggtacttttgagtactatttatcaagcagtattagcacttatctgtgtaccacttgtccctattgtgtgtggtgtaaccgattcctccttggtacctggcccccctgggatgtaggctcgatttgtcgaggctacagaccagcatacctaagaaagagttggcaatggcccccaggaggtagcctcgactaggacctgggcctgcacacagctttggctagggagcattagtagtacacccgcaagactcgccatctgac

SEQ ID NO: 6282 - DNA, 339 bp, Zea Mays
gattgattgattggtcttgctgttgtttctgctttttgttatactgtgctggctgcgcccttaggcggttcctgcgatagacttcggatttttgcgcgtttgtgcttggtccggctgcaccttttaggcgacttctgcgcggatagtcttcgcgatagacttcgttttttgtgcacttgttgtgctaagtccggctgcacccttaggcgacttctgcgcggatagtcttcgcgatagacatcggatttttccgcacttgttgtgcttagtccggctgcacccttaggcgacttctgcgcggatagtcttcgcgatagacatcggatttttccgcacttg

SEQ ID NO: 6283 - DNA, 677 bp, Zea Mays
cacgtgcgtacaccatcggtggggttccggagtcgggtctgggagctccagctcgtccccgggatgatgctcgtggtctcgccgagctcgattggcatgcgtcgcgccgggaattcctcaccaaagaagctgcgaccgccagggacgtgactcaccgtggacgtggctcatcactgcggaatcctcggtaaataccacactcctcgcattagttccatacgctcatcgtgtagcatcgacccgaaccaaagataatgcccatgtgcccagtaatttctcaccggagctttggttcgccgaagttccgcttcgcgtcgcggtgggcacggtagtcaccataatcctcacgaagtaacccccgatcgtgttcgtcgttgcccccacattgtttcgcaccgagaatatgtcgaagttgtgcacctgttcacgaagtgggcggtgcgccggcaatggcaccgccgctggaggcctgggcgccgccgtggactgaccgggattgggggaaagggcttctggccattggatctgttgccaacgcttaggattagatcctgataacggttcgacgtgggcgcgggtgtgcagttcgatcgtgatcgggcgggcatgggttagattcgcgataattaaatcgggaccccagattgctgatccgacggaccagatctcataccgct

SEQ ID NO: 6284 - DNA, 873 bp, Zea Mays
gtttgtacaacagcgtgcaacttgtcaaaaggcaaagagtgaaagaactcatccagctgggttattacaacctttgcctgtaccacagggtgtgtgggaagatgtgactatggatttcattgaaggtttgcctaagtcggatgggtttgatacaatcttagtggtggttgacagattttcgaaatatagccatttcttccctttgaaacatccttttactgcgaaaggtgttgctcaagtctttctggacagtgtggttaagttacatggagggcccaagtcgctggtatctgacagggataaggtgtttactagcagtttttggaagaatttgtttcagctgatggaggtcaagctgctgatgtctacagcctatcgcccacagactgatggccaaagtgagcgtgtcaaccaatgtctggagatgtatctcaggtgtgctgtcaattctcaacccaccaaatggaagaattggttggctctagcggagtattggtacaatactactcatcatgctgttttgggttgtacaccattcagggtgttatatgggtatgatgctcctctgttagcccttcctagactcatcaatattgaggacccagatgtcactaagtgggtcaaggaaaggaatgctttttctgccatgttgaaggaacagttggctagagcacagctgcgtatgaagcaatatgctgataaaggcagaacaccaagagaatttcaagtaggagaatttgttctgttaaaactccagccatatgcacagaagacagtggtgaatcggccttgtcccaaatcgtcctttaaattttttgggccttacaagattgcagctcgagttggggcagtggcatataagttggaattgcc

SEQ ID NO: 6285 - DNA, 777 bp, Zea Mays
acagactgcagcagccgcgtgatggagggggtgcagctgacgctcgagcagactggagagggccaccggagcacagcagggtggcaggagaggagggcgatggagaaggtgcggcggacttggagaagggtacacacgtgagcgcgactatgcgctgcgtaatgtgtgtaccgtattggtacaagtagggcaaaacaatgtttgtgatgtatagatggtgggctggcccatgtaacagagaccggattagtggcccaaaacaggcaaaactagtcaaccactatacctagtcggatgactaatcgcgattagtcggcgactaggacgactaatcgcttcctagtcgctctagtcgagtcggagaccctaatcgagctccctctagcgataaggccgactaatcgcgattagtcggacgactttaaaaccttgaccatgactgtcgcctgtcctcccttgcagccaaggccactccttggaaaagtctatggtttttttctccataacgttacaatgtcttcctttgtcttgcctctgttcaaacggtgtttcttgagcctgatcgcacatcacatagcaagcattggactggatgcgagtcctgtcccattctaatttatcaaatgtctagcaccgtttgaactcggcctctgcgctgaagcattggactcggcatctgcgctgaagcgggagacgacagactgtcgcttggcggcctaggagacaaggttggcacccaggaacacggcatagccggaggtggaccgacacgtgtcg

SEQ ID NO: 6286 - DNA, 1124 bp, Zea Mays
cgcgcatttgtttcactggcaccgctgggccaccactcagtctctctccctccacctcgccacgaccgcgcagaccgcttccttcgccggcgaagacggactccgttcaaccatcgccagccttccctcgcgcctgcttcctcatctgtgcactgattcactgggcctacgcatcagtccccatttggccatctctactgtccgcgtgcttgacggtaacgacctcaccgccattgccgcgcaccaaccccacctccgatccctctgcgctcgggatctccagctgacccacgcctgcgccaatcccgcagataaatgagaaggcaccccccttgaccttgcgtacgtgccccattgtgggactcaccgccgagagagagagaacagggagccgccgcgggcctccaccaccgtctatcgtgtgcagcactaattttgtgctcggtgcgtggtctggggctccgtatcagtgcctggatcatggagggggcggtgccggggtggttttgcgttcggagcaccttcaatttgacgtcgtcgcagcgaattcggtgtgcgccgtggccaatgaccttgccgccgtggaacaaggtaatgtacccccctagggcgttcgccatgtcattctcaacatttatctctggtcaattttgtgctcggggaatgtggctggccggattttaccctcgccggtgagctacaccgccgcgggtgaaccttgccgccgcgtacagggtcgcgttgggggagaagataatgtgcgcgccgttggtttgattatgcacgactggatttgatcaagcggctcaggctagttagcgaagatctggatggttgatctgtgaaccaacggtcctgaacccacgatacctcttcgcggatcagttttgcacaagagtccctccgttattttagaataaacccgccgtcctcagcgactgtttcctgtgtcttagtatttttagcaccggggcccctgtgtccttcagatattgatgcccagtccagagctcatgaaaatcaaataaataaattcagaaatggatttttaatataaaaacaattcctagaaacttatttaatccatagaaaatccatttttagtccaaatcactccattccag

SEQ ID NO: 6287 - DNA, 506 bp, Zea Mays
agggatctctgtggcataagcagtggtatgacctaccccatcgcattcaccattctttggggatcatgtagatgcacaccatttagctataggggccctggtgccgcaaacctgttgttcgccggttggtgcgccaccgccgagctcgccgctgttgctcggctcgattcctgggaggaaggacgggtctcggccgttggatagccagggagcgaccgtgatctgagctgtgaataacccttcgaccgagagaaccctagccatagatctctgttcggtcggatgagatcgaatcctgtcacattaaaatctggaccgtcagatctagatccgagtgaccacgctacgtaccggttcgctggattatggatctaatcctctccgttgggatttgattggacggtcgggattcatccacactccattcagttgcacaaatgcaaataaaacactctattatttagtattcaacccgccatccacaggaactgttccctgtgccttag

SEQ ID NO: 6288 - DNA, 714 bp, Zea Mays
gtcgtggctagagtttcgcccgcgaggttgttagactgtatcttttttcttgccaaaatgtaatgggcctagagcccagcccatgtacctgatatatatggaaaactcagcccactctagggctagcgtttttatacattccagcacaaagtactaaaaggtgtaaaataaaatacattctaccgtgaagcagtacaacttttttcctcaaactggcaggagctgccccatattattataataaaaagaagaacaaattacaaaaaagtggatagatgcaataaaaacaagcggtaatacataacgatgatgatagatgtgagatgacatattttgctatattttccataacaatattaaagaatgacatatttcctataagaacaggtgcactgatttggaatactcacagcaagctctgccagaggtgactctgcatctgggccattgcgaagttcaagcaacgcatactgaatttccacggtcatgacaacaacggtacgtgaaagcaacaaatggttgctaaggttgactttatctgcaagtaaacgaattgactcctttgtcctgttcatattttcacgaaaacttgggggaaggttaggtgtatcggacagatttgtcgaaatacagcttatcgcgacattgtattctttatctgacatgacaccatgaagcaatcctatctgcagaaggaaacaaacatcagggtaa

SEQ ID NO: 6289 - DNA, 656 bp, Zea Mays
ggggtatgcacctattgaatcaagagcgtctatcggaaatccgacggtctgaaggcttcgtcttcatccggttagccacccgcggtggtgcacaggccctcacggcagagctcccaccggcggcagccgtcccagcacaccggtgccctaatccccaatccagagcgacccacgcgcactagcgacaaagcgtacgagatgggagggcgtaccgggtatagggaagacgccagggaagctacccacggtacgtggcgaaggtgcagcagggctcccactccggcgaagaatcccggagatctggagcacgattctgcctaggcgaagccgtgacgagcatccttgtgcgctagactccctcccgggtcgatcaccaagggctggacgcaggtggtggagcccgaccatggagcgcagtggcccagcggcggaggatctccaacagcgaggaatttgtagcgcataagtggctccctctcacaaatatggtggtgccccggttcctagtgccgaagcgaaggtctacgagtcactcccgtaccctgtatgatggtcgagtagaggggtgattgcggcagccaattcctcagccccaactatgacagtgttcgtcgacggtgcccatcaaggcacggccggatggaatgggtatgcga

SEQ ID NO: 6290 - DNA, 845 bp, Zea Mays
gagcaaccaagcaagtccctatcaagcaaccctgtgaggcggagcgaccgagcaagtccctatcgagcaaaccttgtgaggcgaggcgaccgagcaagtcccaatcgagcaaccccatgaggtgaagcgaccaaaaaaatccctatcgagcaacacatcacgacagagcgaccaagaaagtccctgccgagcaactacgcgaggcggagcgaccgagcaaccccgcgagttggagcgatcgagcaagtccctgccgagcacccctgtgtggcggaacgatcgagcaaatccttgcctggcaaccctgcaaaagggaggtcacaaccccgtgtcaccgacccacgttagatacgatatgacgtgacgacctcaagatacgtatgagccacaagcgtagcattccaaaggcacgccaagaagtcactgtcgatatgactgcgcgcctctgcatacgaaaccaggcgtactcttgataacttgtgagaccagtcaacccgggtcgtgtggacctcagcaccaaagtctcaacagttacccacatacagaaaaaggcgggataatacaccatatcgggtgtacgcctatgcatgcaagagggtgatgcaaggctcgtgatggcgaatgaagttgtaccacacacgacaccaaaacatgccataagtctatcatgtgggcctcgctaggagtcgctacatcaacatcagacttgctacagggacccatatactgcgcgcacggaccacgtcaaaagaactacgtcaagtgcaataggctaagaaccctctagtagaatacaagtctcactgtaaggtcctacccttgagatataaaaggataggcacccc

SEQ ID NO: 6291 - DNA, 275 bp, Zea Mays
gaagacggtgctccagtgcaaaattcatcggtgccggacgctctcaacccgatgccaatgaacgaatgtctccgctgggttctggcgacgctactcgaccacaatccagagacggggcgcaagcgcagcaggggttccaccgtcgacggccgcgaggtggcactctctctctcactcagcttcgtttcctgatctctctacggtggtaattcgcgagagcaggagagagaaggaataggcgagcccggggtcatggcaccctatatggacgcgga

SEQ ID NO: 6292 - DNA, 386 bp, Zea Mays
gagagaaccccattacagcacacacaccgctagagactaactaaggatcaccgactaacatggaggaaacacgacccacaacgctgttttaagccagcaactcatcgacttggaggaaggacagggccttggctctagtcaaggaccagagcaccgcctcttccctagccaccataagggctgtgaccaagctaggattacaaccataaaaaacacatctattcctatgcttccaaatggtccaagcacctaggatcactaaagaattgaaaccttttctcaaaagatcagatgcccgagagctgctagacttccaccacgactcaaaggaatcctcatgagctggacacagctcctgcagccccactgaactaaggaaatcaaac

SEQ ID NO: 6293 - DNA, 692 bp, Zea Mays
cggcctcgcagtgctgccgtggaaccgcgcgctcccgtggccggagctacctgtgtcgcaacccctggtaaaaatgcacttaatcaccttccgttcatctccgcatcggaaatcgtcgcattaggggggaattttgggtcgggatcctcggtattcccagctccggccaagctccgccgcggctctggtcaacgccgctggcaatggctggaggggggaagagggcgcttagcccttggatgggaaaggtgcggttaggattagatcaggggggcaggtggattctgaccgttgatctaagatcgaacggtcgggagcttggggcgggattcgaagtcagtaaccgttagatcgacatcctggggctctagttgtgggccgatctgttgtggcgatgatctaatcagagccgttcgtttgtaatcgtatggctctcggcgttggataccccttcgcgttggcgttttgcataaaagtacccacagtagttgagtatcaacccgcggtccatccccctgggccctgtgtcttaatatttttagccccgagatccctggcctttctgaaaattgatgcccagtccagaaaggatttaaaatagagaaatgattatagaatttagtttttaatacaaaaacaaatctagaaacttgtaaaatgcatagaaaattcattttagctccaaattgaac

SEQ ID NO: 6294 - DNA, 285 bp, Zea Mays
gcagaaaacccagcccccgagggtggtgctggcggttacccagcccctgagggtgttgccggtagtgatcctgctctggtgggtagcgcaagctgcgacccagcccccgagggtgttcaggtgagctctccttccgacacctccatggacgtccatgttgggtcgtctccacctcgatccgatggggcgacagcgatgcatgtttccacggctttgaacaaacaagtcgccttggaggtcggcgagctagatgcgagaagtctattatctgctggcggggctgag

SEQ ID NO: 6295 - DNA, 512 bp, Zea Mays
taatggcaagttcgttcacccttaaaggttcatcgacatttcccaggtcgataatcctcgagttttccgatgcccccactttggatatgcgcattcctaaaggggtttgtggatcatgtccactttcatcaatggttaattgatgtgcattcaccgtctttctctactttaaagcagataaatcctgcttggatgccatgtttcttccccttttgtttccaacttggggttgagtggttttatttggtacctccactctttcaggtgcattccttgcaggaataaaagacttaataacacctttgtaattagtgaatgcatctggcagattatttgctaaatcttgcaaagtaatgatcttttgaacttgaagttcagattcattagtacgtggatcagaggatgagatacttttagcatcccagtcaatttctcggcgttctttttggtacttattatctccccctaatgccgggaaatgttcctcattgaatatgcagtcagcaaaccgg

SEQ ID NO: 6296 - DNA, 464 bp, Zea Mays
caccagagttagccacctcacgaccttgcgccacgtactttggtgctttaaccacggcgcagtgagtcaccttagcccacccattcatcgccggtgagcttgccacggtaaacgccaccaattgcttgcgccagtgcacccttttctctctggccgccaccgcgccatctcaaattcacgggccaccgctcaagggccctgtaaattgagcacacccttggctccgctatgtaattatgcacccaacacacctgctcgtgcctccaattactcaccagagcccctaaattgctcacttcccccaaatcggttttccgccgctgtaaggagggcctcaccgtggccagtgcgctccaggtccaatcatgtcctctgctctcttgtttcagcacccttatgtgcccctgatgcttctcgacccgaccgattaggctagaaccccttagatcgccgggaacacttca

SEQ ID NO: 6297 - DNA, 522 bp, Zea Mays
gcctcttccgcctgcaaaggcaaagaagaaaagatatttagcgatgtcaaaaaaatctttcagatcatacaatatatagaccacaacaagcatagaaatgtagatccaatctaatataatgtttaaaacagtctttgtcgtggcacattgacacattcaggaagtctgactggtgttacttgacagattgttatctgctactaaaaccaattctgctgccacaaagcatacaaaaagttggtgttcacaaatagtaatcagtaaggcgatagcatgtatcgtcgaataaataaggtcagctagctaagaagtttggcaaacaggggttgggcattattgaacttacaatgacgccaagtagctgctcaaatagttttgatggctcaataacctccaatgcatcaaagatgctctagctaagcctgttttaacatgttacaaaacaggaagctttaattgtacacttaagggcatgaatagattgcattgcatgtacatacaaataatgaaaatgcaaatatt

SEQ ID NO: 6298 - DNA, 829 bp, Zea Mays
gcatacctgaatcgagctggccgcggtgaggctaaaccgagcggggttcttgagcgttttggggagaatccaaaattggagttcactggtgatcgattgagagcaatacttggtggctgggtgcgtaatgatcctacggagctcacggtggcctcaatttataataggcaagagcggtggccgggaattcgagcgacgacacgcggcggttggagaaagagagcactggcgtagtggattggtgtcctattaccgtggcaatctctctggtgatcaacggagagttacaacgggtcacggtgatgtggtggagataccagggcacgttgcgcaaggtcagcaggcgaccgttgccggtgaacttatctgcgccggccgcaagacaagggggtacgacgaacctcatccgtgttcgagtctgagttaatccagtgcctagatctttatcttatcatcgttatccctttgccagcgaacacggaccgcggcgacggcgtgaatcacggcgtaaagatcgtcggcagcgatgagggatgaatcgagtatcttcttcagttactgtaccatggcatacatctccggttgacctgacagagcaacttgaagctagattttctcctaaattcgcttggcaaccaatccaaggctctgcaacaaagttgtagtctaacataccatcttcatctttgttatagtattccaaaacaaattcttactagatcatgcgtagaattgagctcaaagtctggtcaaacccactggcagtccaaattcagacttcaaacagcctgaaaacctaactttgggtgtatttatctccaaattcttc

SEQ ID NO: 6299 - DNA, 589 bp, Zea Mays
ttttgaagaaattctcagtaatagaggggatttttgtgccttcaccggtgcccatggggctgtatcaattctgaaaaaggtcggctgtgatcatgctaaggctgttgttcagccagaatttgttttctcacccgacgacattaaaaacccttcagccgaagcttctgcattaggtgggaaattttactctgaagtatgaatgaagggcagtcgtgagttagctgatgaagctactaggaaaataaaaagaatctcacgatgctcaagaagaagccaaaagagctgaagaagctgctgagcgtgccaggcttataggtacatctattgtggtctagcttcgtactttgttttagctttggaactaacgaacacatattatggtgtagctgaactatctcccctgccaaagccatacgacccagaagccgacccgaccctaaaggaagtgctcgagacgattagaattgccaacgaagctattgacgaagctgtcaacaaactgttagatgaacccgccgagaaagtcttgaatgaagattaaagctttgtatatttgagagtttagtctttgtacatagctttcaccttt

SEQ ID NO: 6300 - DNA, 694 bp, Zea Mays
ccttcaaccagttcagaccactcctatgtctggccattgttctctctaatgatgccagccccaaagagtggtgttttagcttacgacgcaaccattcttcatgataggaaagatctcttgagtctctagcaacttccaggctatgcagaatctcattagacatcacaagctaccatttaacatgcccaacccttttgctactccaagattagaggtgtttagatagccgttttaacttatctgccatccgctgcaaaggacaaaccgcagcaattggttgacaccaggaattttctacctctgtcatgaaaccttccaacttagtccaataactttcaaaatgaaaacgatgtttgccttgagtgaactcgtgcaaacccaccaacaatggacagtgatcagagattgaggaagaggaactttgcatcaaacaattaggaaataaatcctcccagtccctggaatagaaaaatctgtcaagacgcacaagggtgggggtgacctttcgttggaccaagtgaatttccttcccaagagcaggagctcaattaactgcagatcattaataatcctctggaatctccccatcatggccctatcaagattgttgttatttttgtcttcagcccaataaattagattgaaatccccccaactgcccatggcccagcacaaacagatcggaccatgtgga

SEQ ID NO: 6301 - DNA, 424 bp, Zea Mays
aaactgaatctcagatcccaacgatcaaccacttccgcagtagtcgcacggttcccccacggccccaccttccgtccttcccagcaccgccgcggaccataatccccttcgtcttccccagcacactgcacaccttcactcccgcatcctaagctatggcggcgctgagctggatccggctccggccgccccgtgctgccattctcattttgctgctcctcgccctcaatatctccccctcctttgccgctaacttcgagggcttcgactccgacgaccttcctgtcgcggccggcggcctagatgctgacgatgacgagggcctcgacggcgtctacctcccgccccctccgcccatctccctctccacctccgctccttcacctcccgtcacgacgacaccggcgccgaaccctaacccggc

SEQ ID NO: 6302 - DNA, 421 bp, Zea Mays
tagtattctagttccctgcggatatggcacggtgtcgaatcggtggctataaggcttccgatacgattgtcctgtacctgacacactaacaccgagtttgtctctgaacatcccggctacctcatctctgatcctctccgccatgtctggcgaccatccattgggtttgtgggtggaaatctcaggttgcctgacatcattctgtcggctttcctcccaggggtgtttgaagtgtgtgttaggtgttctattaatgtcaccagctcctgccctattcctctcaggctctcttgtggccgaatagtattcagccctatgtccatgaggtggtatggcatgattataatgtgttgctggtgggacaccataatgttgctgcgatgaatgtgggaactgtgtgtattgcgcagctctcggctct

SEQ ID NO: 6303 - DNA, 724 bp, Zea Mays
ggccaaacaaaaacttctgaagtgtttatgtccttacttttattctctatccccttcatttatccttcttataagctttctcacccagcgaatctctacaacattcaaatttactatgggtgagcaaagatttagagattgtggcaatcagacacagtgagaccttaagatgggatgagtctatgaatcctgtgttgatgccaaagggcgagagcggatatggcatctatgatttggaggcgatgagttgggatctcaacgaggtagcaggatgagatcttgatgaggtagcgagctaagagcttgaagtggtagcaagatccttggatctcacctaagcagttcggtgggaccatagagaggaaccaagcgaagatcctaaagcggtggcagtggcgacgagcttggatctggacaagacaccactatggaatctcaaagaggcaacaagttggcattctagagtgatagcgacgattttggatctcaatggggcatcagggggggttgaaagaggcaacaagcctagagatcgaagcaacgacgatgagctcggatctcgataaggcagtaggatgggaccttccaagattagagctcaaagcaatggtgttgaggtgggataacaaaggagcaacatgtctagtgccaaaagaggcagcaacaattcagggtcttggtgaggcgacatgtcgagctcttaaaacatcgaggatgagttggg

SEQ ID NO: 6304 - DNA, 520 bp, Zea Mays
cagtcgactcccatattgcagaagtgttatttgatactagagcaacgcattcattcattactgcatcatgggtagaagcacataatcttccaataactaccatgtcaacccccattcaaattgactcagccagtggtagaattcgagccgatagcatttgtttgaatgtatgtgtggaaataagggggatagcgtttcccgctaacctcatagtaatgggtactcagggaatagatgtcatcctagggatgaattggctagataaatatcaggcagttatcagttgtgataagaggacaatcaagttggtgtccccactaggagaggaagtggtgaccgagttagtctcgcctgagccgaagaaaggaagttgttatcagatggctgttgatagcagtgaagcagacccactagaaatcatcaaggttgtgtccgagttcccagatgtgttccccaaggacttaccaggtatgccacctgagcgaaaagttgagtttgccatagagcttcttcctggaac

SEQ ID NO: 6305 - DNA, 308 bp, Zea Mays
ccgagctatattgagattggcggctctacactgaaggaaagagacctgcaagcaatgaggaagcttggctattttagcaacacggtcaacgtgcgcctccctggggaggagacaacgccgaagccagggaaggacgaagttgtcgtttataagagttttttcaaggcaggactttggcttcctatgtacaagatgattttaaaggtgctacaacggtatgaggtatacatgcatcagctaactccaaatgcaatggttcgcctgtgcgtttttatttgggctgtacgaagccagggaggtcataccga

SEQ ID NO: 6306 - DNA, 468 bp, Zea Mays
ctaacaaaattagcttctatcagctggtgaatttcgtcctttattcgtgggagtaggtctggatgaaatgttctagctttctgcttgaaaggtctgaaatcggacttaataggcagccgatgctctactatctctcggcttaatcctggcatctcagtgtaattccaagcaaagcaatcagaatattctttcaatacatcgatcatttcatctctagaatcagtcttcagggtcttgtttacaaaagtcggccttagagttttaccatctcctatgtcgatctcctccaaaggatcggccaatgtaaacccctgtcctaatttgttgagatccctaaattcctctattatgcctccctcagaagaattaggtggtctctgcgccactctggatcgttcggcctcgaaggccggaccgtccatgatgccgggtctgtgctacaacggctgcccggcctcaagggccgaa

SEQ ID NO: 6307 - DNA, 373 bp, Zea Mays
cccgggtttggccccctaaattcgggtgtgacagatgtcatgatattgcgatgatcacctaaacccttatggaacctaaaaggggttcttcttgtacccctagttgtcaactcaacgttagttggtgtgctaggtagtggctcataggtgtaccattgcatcatcaacacggtgactaatatgcccactccagagggagaggagcgcagcgccaactcggacgtcacctcccactctactgaacgccatcctgcatacacgtacgagccatgtccatcgcaatcctgcctcctcctctgccgccacggcagacctagaacattgcaccctagctagggtgcctcactcagggcatcatgatgcttaatcacac

SEQ ID NO: 6308 - DNA, 400 bp, Zea Mays
tttagatatgtgccttgggtgttgtcaacgagtttgagttgctttaatttgtttgtggacttagtggggagtaccctggattcgtcgcattatttttttgtagactctcggatcttgttgacagactgacagtagtactccagttctctggtagttgacgaatgttgcttgacaacaagaagtagagattctagtggtattggctggggcattgcctgatagtttgttagggtgtttcgtctatatctttagcatttcacaaatttcggtctctttagcttgtcagaaaaccactgtcttgtgggttgtaacgaggtgggtctgtgtggttccaattctcactagcttgcacattttccctccatcctggtggtggtaaaggcgtgttgatggcatgttc

SEQ ID NO: 6309 - DNA, 400 bp, Zea Mays
taagctcatctaacatatcatcaaggcatggaataggatatcgataacgaactgtgatgttattaatagcacgacaatctacgcacatacgccatgacccatctttctttggaacgagtaaaacaggaaccgagcatgacctaagagactcacgaatgtaacctttatcaagcagtgtctgcaccgggcgctggatctccttcgtctcatctggatttgtacggtacggggcgaggttcggaagagaagcgctggggatgagatttatctgatgctcaatgccacggagcggaggaagacccgatggtaagtccataggaaaaacatcagcatactcctgcaaaaggttaacaacagcagggggtatatccaagacggtgcatcatcaagcggaacaagc

SEQ ID NO: 6310 - DNA, 295 bp, Zea Mays
tgacagtcggcatgtcgccaccgtcaaacgttgctgtagcgtttgtcgaatccatcaatcctctctggcagtttttagatgtggaagggtctagttgtatttggtatcatcgggtagataattgctaactttgaagtcttcttaggtataaatagagatagatatgtgcttctacctctccccaaacaaaatgacttttgacgaatgccttttcttaactctgagtctcacactaactttggttcactcttatccgtccatcatgatggagtattagtgattgaatttactgtat

SEQ ID NO: 6311 - DNA, 526 bp, Zea Mays
ctttttcatatgtcgacaatccttgagtcttctgccctagaggcttactgatgaaagccaaggggcgaccgtcttgcagcaaaactgccccgacaccattgtggcaagcatcagtctctatacaaaaagttttgttgaagtctattaaggaaagaactggagcagtactcaggagatgctttaaggagagaacctgagcagtactcaggagatgctttaaggtgcggaatgttacctcatgatcatgagtccacacatatagtgttcctttcttcctgagttcagtaaggggcttagacacaatagcaaaatgcttgacaaactttctataatatcccgccagtcccaaaaaaccccggagttccttgatatttgtgggagaaggccaattcaccatagcttcaacctttgatgggtcagtggcaaccccctgcccactgataatatgccccaagtaagcaatagatcttgcagcaaaagtgcatttggacttcttaacaaaccaagagtctttctgtaacatcag

SEQ ID NO: 6312 - DNA, 524 bp, Zea Mays
gaaattactgaccagggactaactgcagctaactgaactaggactagggaaaaactgaagataactgaactgaagctaacacgattagactaggactaactgaagctaactaaaaataactgaagccaactgaattggactgaagcagccataccaaactgaaattgcagatgtgctagaactggcagctgtctgaaaatctggcagccataccaaactgggcttctgaaaacactgatatcgccaactgcattttcactagaacatctgcagctgtagcaaactagcacaacttccatttgcatttgcatctgcattttcacaagcaagctagcacatgtgcatttgcattttcactagcagactagcacaactgccatacctgaaaatcagtgagagctgccagctcctagctctccatcgtggggttcaccgcaatgcactataaataagatataaataaagcctttaagcttgttaatggtcatgatcatagtaccataccaaattccaaggaagtgaag

SEQ ID NO: 6313 - DNA, 472 bp, Zea Mays
tcgggatgttgatccttcggttcctgctgctgaggaagtgcatgtgcctgaagttgccgacgctgaccccaatagatgtgatccatctgtcgctgatcccaatgggtgtgatccatctgtcgctgatcccaatgggtgtgctgtctgtgttgctgatgaaaacgaaggggaggaagaagatgaggtccctttgactcggaagaacagtcggcaatatgtagccagtggggaaagtagtggagttccttctcctgctctgtctgctctcattggtctacaagaattgtctctggcgaactttgatcagactcttgaagatatggttctagaggatctgttatcagagccagcggatggtgacgtgatggatgtttgtgctgatgtgttcgacgccgggttggggtcatcccgggcagcgtcccgtgcctcatcgaccttagagcgcggtcttgagggtcaggaaactgacttg

SEQ ID NO: 6314 - DNA, 544 bp, Zea Mays
ggacattaactggtagattatcctccattctgctccatcaaattgttaaaaaaggtcattcctatgttgcaaatatatcgatttcagccatacacattttagagaattagcatacagaatgttcctttttcagtgcaagcactaaatcatttcaatttggagctttggacacatataaagatagagatgcatcggtaaaagaaaacggtatatcaaaagaagagaaacatgcattggaaaccaagaatgtggaacaaaagaaaatcactgctgttattctcagggtgggtttgcttgtggcacttatttgtttgttgattggatccaagattaagcataggttataattcagcaagaatgtgggtcagctacctattcacttaatgaagaatcatctagattaagcataggttataattcagcaaaatagcaagtggcatcctttcagtcctagcgcttggaacatatgtgcaacctagaaatatcatgaatggcaacctatatcaggataaatgtgatctcaagtacagaaataggagtattt

SEQ ID NO: 6315 - DNA, 440 bp, Zea Mays
gcctgggccagtccgggcggatttaagtacggagtaaccggggctttgatctctctcatcaccatgccgcaatcgacctcgtcggggctcgggtttgggggagaataggtgtgggaagggagacttagaccgccgacgtgccttcccatccttgcgtggtcgccggaggccgtaggagggatcggggaccatcaccggggtaccccgaatatgtgcgtgggatccgtgggcatcgttggaggaagcactgctgggaattgctcgccggagtaagacaaccgcgccgcgccgaagttcattgcggactggcctcctgaacgcgccattctcggtgagtatttgctcctccatttcgttttgcttagcgctatttgatgcaaccaatcaattggaagatagcgcgttaggatgggtgatcgttgtggccggtgatggcgccg

SEQ ID NO: 6316 - DNA, 394 bp, Zea Mays
gacacgtttgctccaaatttggaaagaagaagatgagtggagagaagaagatgagtgaagagaagaaaacgaccagggagatgaagctgtatgaggagaaaaaagttgcagatcctttcattgctggataagtccatggaaaagcaaatacatagaaaattactaaggagatcatggagggtttatccgaagattctggtgatagtgatagttatgacgtggaaagtagggatgaagactctgaggatcggccgtggcacccaagccatactatcttcgaaaagtctactatcaaacaaagtcatattgacgccatgagggggaggtattttcgcgacatgtctattgtcagagttggaggagatagcactgcccctgctccggacgaaaacga

SEQ ID NO: 6317 - DNA, 808 bp, Zea Mays
tgccagtgaagattttggatactcagactagaaggagtcgcaactcagaagtcagaatctgtcgagttcagtggagcaggcattctgaagtagaagcaacatgggagagagagaagacgcgttacgagccgagttccctagtctctttagtaattagctgaatctcgaggacgtgatttgacctaagtggggtaggtttgtaacaccctgattttcgtcgctaagtaaaatcttgttttatttcgcaatcatcttaatacattaattttacacgcatgatgttagtaaacacgtgactaggcaaactatttacaagtatttcacctcctttctcactagctataaattaatccatctcaagtactaacgtcaacactctactccaatgcaacttttgcacaaggatcccaccttcgtaacattacacttgctagcaaactatctcctcttcccaggagcaacacacgccttgacacagtgattccagaagataagctagctatctgttccttgcctcggaagcctcttaagccagtcgtacctcacaacaactcacagtcaactggtagtagtacctactcaccattactgacaccctgacgacgaggagacacatccatggcaagaagctttcgtgtgggaactggaagctgtcttctacctcccctgactagaaccaatgcacgcacacaccatgatgctggactaggagttgagaccacattgtcaagccaaggagacctgaaacgacacaacaagcagagaaagcagtagcccgacaagcccctgcgcgcgcagtcgaatcgaa

SEQ ID NO: 6318 - DNA, 452 bp, Zea Mays
gtgaaccaagcgttctaccctgggtaaagctacacgtgctcgtgggcccacgaggttgcctggtagtcacgtatttattattgcagatgacgcgggcagcgtgggtccatgcgccatcattctggctatgtcgacccttagcctttgtagcttggggttcagcacggctcattgtgctgcactctgccagcggtctgcgcactcatgcctagtcccgataggtcaagagtgtgtcacatgccgagggacgcgcaggccataaatgcgctgcaatctgaggggtttgtaggtcatgggtgatctatgccccaaggggttcgtaggtcatttgtgggaagcagaccagtgcctccactacggctcgacgctaggcgtagtaaatgtggtcgatcatttatgatgggtcagtatcaggacgggcatgggatccaatcaaatggtttcccttcgac

SEQ ID NO: 6319 - DNA, 439 bp, Zea Mays
cagagttcgccggactttgccttgagcacgacgcgccaccgcccgccaagccacccgagcctcggccaccgtggctatctcactccagtcactcccagtctgcgccagctgttcggttatcttcgctagagactcgtgaagctccccgagtcctcagacccagcagagcctcaccggagaccctgaatcaccctcgccggacttcttccgctcaccgacgaacgtggaccgggtaagtctctacgccattctcaaattccttccgcataccgcctctacgtcacctggtcgagcctcctgagctaaccaattgaactatcgtgccgtaagcaggccggaatactcatcgtcgacgagctcacccacctgcgcatgtggaccggcctatttcgaccatccccggagacgatccgcacatcagcgtgaccgtcaagacctc

SEQ ID NO: 6320 - DNA, 331 bp, Zea Mays
gtaagatctacatgtaagcaacaaagtgaatttagggtgttattgtcttttcccttcatagtcttgataaacaagtctttaggatttctccctcccctcgtcagtttctttatcgtgtgtgcacgccattaagccgaagctcacagcttcgtttccacagcggaggcaactacatgtcatcttgtacgaaggtagtgttcgacatttttaccctgttaaacctgaaatggactcataagtaaattataccccaatgtttttcaggaccttcagctaaggaagacccccaacaagcatcttcatccctcgctttaaacccttagcctagaac

SEQ ID NO: 6321 - DNA, 771 bp, Zea Mays
ctccagtggcgtactcggcctggaacttgcctccttccaaagccttcacccttttcgtgtcgaatccacccattacttatggcagtttgggccttagagtgcgaccctctgctgaagaagtcagtgctttggttgcttcgcttggggagattcctgatgacgaacggcaggttcattttgaggtgcccctgaaccctagtgatgcagagataagtgctatgcttgatttgctagctgaggattcatccgatgctgctcctgctgggacgttggtagtggcgcctctcccagaggctgatacgactttggatgttcagaagcctgtcagtgctcgcccgaggcgcccttgccgaaccaatcagcctgatccttctgttgatgagcagaagaagaaaagaagacgcctccggcgagtatccagttttgatcaggatgctggtacctcagttcctgctattgaagaagtgcctgcgactggatttactgacgctgaccccaatgggtgtacccaatccgctgttgatcccatagtgggtgccccatctgttgctgatcccaatgggtgtgctgcttgtgttgccaatgtggatgatgaggaagaggaaaatgagatacctttgactcggaaaaacagtcggcatttcatcgccagtggtgaaagtagtggagttccctctcctgctttgtctgccctcattggtctgcaggaactgtccctggccaactttgatcagactcttgaggatatggtcccagaggatttgttatcgg

SEQ ID NO: 6322 - DNA, 297 bp, Zea Mays
ctggccacggcgagggctataccacggcgatggagagcaggtttgggggaaatgagaaattagtgagctctagtggatgattcaaggcacggtttgcttcactagttgcataattacatagcggagcaggcggggttggtaatttatagcaggcttgagcggtgaccggtgaatttggattgagacgcgcggcggccggagatgaccggggttactggcgctcgggatcagtgtcatttaccgtggcaagctccccgacgatcatcggataggcttaacacgatcgactgtgacgtg

SEQ ID NO: 6323 - DNA, 877 bp, Zea Mays
gccaagtgtgcctgagtgctaaaacaagggtgaggagggcgagaatggacctggagacggcggtccaaggcgtggtggctcacgacagcgcggagaaccgaattgggggaagaaaggaattagggcgctacggtggctaatcagaggcgaggtctggtgctctggctttgtaacaacctagcggagctaacggtgcactcaatttatagcctccgagagtggtggctccgaatttgggaagaagaaggctggcgaccagatagaggggtgagtcactagtgcagactatcgtggctttcactggggcaacgtctcaagcgatggacaaactacctaaggcggtttactgcgacgtggtaacgcttcttagcacgtggcggccgggcggcaagcagccaacgccggtgaggatcatctcggccggccgcagagcaagtgggacggtggccagtccagtgaccgggtccgagcttatcctggcgcctagatcttttactccccgtggttatccactttgcgcagagcacgaattgtggcagccagcgtgaatccaagcgcggggatcaccggcggcaaggttcagtgaactcaagatcttcttcagtccactgtaccattgaaaccttccttcagggcgcctgacagagcgaattagagggcttagttcttcaatttttatgtgacaacttgatcatctgtctgcagagaaattgttgttctataatccatctttgtttttgttatagctccacaatcgaacagccatttgatcctactcaaaatggatcacaaagttcatttgacttcactgtcagtcaatattcagccataggactgactgacagccagacttcaggtccatttatctccaaatttt

SEQ ID NO: 6324 - DNA, 767 bp, Zea Mays
gttcacagcagcgcgcaccgccgctaaaatcgcccctgcaaggctcgatcggactttctgtcactatcaagcaatggtggggttctcacccaacatatacatcccttatccccaccctattcctcctggatcgacaccccttaatgccaagaagatcacggcggctcccatcactcccccagtcacgctactctcgttgttgctccctccttccaattaatggcacagagctatataagctgccctagcatgctctactcacctcagatcaagctcctagccactcgatcaccctgtccattcacccagtcccattaccattgctcataagctccccagaagtgttttgcttccatctgaggcccttcgtctccaacactgtcaccttcttcttatgtttgtttgggacacccgtgatgcaccccggaggaatctctaccgacatatatgccctagacccatgataacctaacctcatagtgccctcactaaagtcgatcgctacacttcatcacatgttgcccttctcttcactactagtagcttcacataacggtaatgaacatcccgaactctttctcaggaccgattatgcctagaccctaaggcaattggtcgatgtagttacttcgagctgtcacgagcaccatcctcgtcggtcgtgctcctcccattgatccccatcgccaaacctagctcagaatgttcgttgtggccaaatatggtatggcaacgagccccatccccaattgaaccctagtttggcc

SEQ ID NO: 6325 - DNA, 398 bp, Zea Mays
gtaagcggcagagggagcaagagcggaggaagcatgtgtggtggtaggcacaggagtggcaaaacctggcgtagtggagggaggtggagtggtagtgatgactggagccgtggggtcaaaacaagtaggtgtggagcgagtccgagatgagatgcgatggacacgaaaggcgatctgatcagaggcaatcctcaactggcctccctgctccgctctctccgcagctgctggtgctactactgctcgagtagctctatccaactttctcttcttcttgcctccttgctgctcaaggtaaacatgctttcccttgccctatctaaaggggcaaggagggtcctggtcatctcctccccctactggggtgacattctttgtccgcaccatcctaactgcag

SEQ ID NO: 6326 - DNA, 657 bp, Zea Mays
ataaaaggaattattcaacgtcacatttggtctcgcttcagcatcaggaggccagccaccgctcttgggaacgatatagaggcatgccagagaagcttcaacactgtgtgtacttttattggcacaagagatctggttcaagaacacatcgcctacagagtatggccgcttgtgaatgaattggagatgccgaagaaggctattgccgggtctagtcagggcggcctggtctatttaaaatatagtttcaggtatagaggcgagtttgatgagccaaatgatgaatggttgagcagtattgaggcaaccattgacgaattgcttggggcctacacaagggccgaagatgatgtaatgacattggccttcgaagaccgaggcaagaaaagattgaatagcgtttttgacgtcattggtttcatataccctgattattgctatccctcgcgaaagcagggaaagaaaaggaaaactgccgcttcgaccatctctgttgtgccgaagggcaaaaagatcaaggtcttaacacaccggccaagatacattgaaacggccatagtgccaaagcttagcgaagggacatcttccactactgaggcagaacagattgaattgccgaaggtgcctacagccgagccagtcgaaacgctaaaaaat

SEQ ID NO: 6327 - DNA, 608 bp, Zea Mays
gttgtatgaattcttggtgatatcacttgggctgactaatgcacttgcatacttcatgtatctgatgaattctgttttcatgcctgaattggacaagttcgtagtggttttcatcgaagatatcttggtgtactcaaagaacgaaaaagaacatgccgggcatttgcatgtagtgcttcaacgtctgcgagagcaccgtctttatgccaaattgtcaaaatgtgatttttggctaaaagagatcaaattcttgggtcacactatgtctcaggcaggtatagttgttgatcctgataaggtgcaagaggtgatgaactggaagccgccaacgactgtccgtcaaattcgaagttttctgggattagctggttattatcgaagattcattccggatttctctcgaattgcgaagcccataactaaattgttgaagaaagaagtcaagtttgtttggggtcagaagtgcgaagatgccttccatacattgaggcaacatctgaccacagcactggtgttagtgcaacccgacaatagcaagccatttgatgtgtactgtgatgcctctggcactggactgggttgtgtcttgatgcaagacaaccgagtca

SEQ ID NO: 6328 - DNA, 499 bp, Zea Mays
tttcaccgccgttgtgccgtcgccgttgtccgccgcgtggctctcactttccaccgcagcaccgtaagccttagcggctctccgttgatcgccggagcaactgccacgccactggacacgtattcaccgcgccaaggttcttcctcatctccgaccgcccacactgtctgctcaaattcagcgccaccgccccggggatctataaattgaccccgcagtgagcttcacaacatcatcgcgcacccagccaccaaatatcgtcctcaatcgttcacctgagagctcgaattcctatttcccccaaatcggtttgaacaccccgtaagaacacttcaccgcggccagcctattccaggtgaattcatactcctctgttgattgttctagcatccctaggtcctccttaagctttccgacccctttaattgcactataccatcacctatcgccgggaacacgacgatcttgccgctctgctcacggccaccgtggccagagc

SEQ ID NO: 6329 - DNA, 464 bp, Zea Mays
agaacaaactaaattcacagattcttctaggaatatgcgcagaaaaagggacacacgatgtggatgtgaagcttatatttatattaagcgcacaagtgaaggcaagtaccaaataacaggtctacatgagggacataaccatgagtttgtgacacccagcaaacgccacttacttcgatccaatcgttgtgtcagtgagcaggtaaaaactactcttttcaattgccataaagcaagcataggcacttcacaagcatacatgctacttcaagttggtgcagggggttttgagtatgtgggctgcacaaaaagagatctacaaaactactatagtgattttaggaacaaaatcaaagattttgatgctcagatgtttattgacaacttgcatatgttgaaggaattggacccgaactatttctttgaatatgaagttaatgatggtcggttggtacgagtgtttt

SEQ ID NO: 6330 - DNA, 632 bp, Zea Mays
gtcgcagtatgctattgttatgtgcaccggccaccggtggtgacgacggaagatatagggtcggcgctggcgggcgaaagggtagcggaccggatggtgtttgcacccacaagggaaagcatatacacaaaaatggtctttgtttccctcaagaaagaagaggatggaggactggtccatgagagatggaagacgatgaaaagatgggatcagataccggatggaaatggacaagtgtaaggatacgtgggcgtcgcccgtgtggtttttgaccttggaagctaggaaaaggagggaatcaagaaacgacgacgagcaggagcagcggggttgcgtagtgctatgccgatccctaccccgacaccaatgctggtggaggagcttctgttttgtcacctttctggaccatgtttgttcgcatcaaatgcatgcccacatcacagttcctgaatcagcagctaattttataccacgtcgttcctggatcaggaatagaacaatgctgagaagtatgattacgccaatgaatcaacgaacgtttttaatccactgtttaaaatcaggaatagatcttcctatgaactttaatcatctgtttttattagtgtatatgtataacattacgaatcaac

SEQ ID NO: 6331 - DNA, 551 bp, Zea Mays
gcgggatgtcgccttccttcttcaatgtccactgtgagatccccttgggggaggaaccctttgttctctaggccaaggaggcgactatgttggatcgagcaagcgtggaacgatgccattggcatgaagctactaggacagatgcaacaaggcgagaaccaaagaaagaaggcaacgaacacacgggtgagaaggcacggttagtggaaccgactctaaatgcctccttgtcctttttatgcgtagaaatagggacacgaagcggcacctaaagggtgggcccccacggacaacacaggggatccgccacgtcggtattcccctagctaagggcgctgcaaggaagaatatacattttgtagggcttacgccactttagacgatacaatggggagtgcacggggagaaaaggtgtcagcgagggacagggcggttaaccacaccatcacgccaaccatacatgataaggtgagtaggttgtttcgcatcccattgagccgcccacgctgaacaacgccacaatgatttttttaccacatcaccaccacaac

SEQ ID NO: 6332 - DNA, 402 bp, Zea Mays
gggcaatctaaaccagcttcccgaccctcaagaccgcgctccaaggtcgatgaggcgcgggacgctgcccgggatgaccccaacccggcatcgagcacaccagcacaaacatccatcgcgccaccatccgccggttttgataacagatcttccggaaccatgtcttcaagagtttgatcaaagttcgccagagataattcttgcagaccaatgagggcagacaaggcaggagaacaccactactttccccactagctacgtaacaccggctgttcttccgaatcatagggatctcgtcctcttcttcatcatcctcatcaacaacacggacagcacacccattggggtcagcgtcagacgggtcacacccattgggatcagcttcagtaaattcagacactg

SEQ ID NO: 6333 - DNA, 345 bp, Zea Mays
cgccgatggaacctataaattgtcaccccagtgagctccgctaggtagttgtgcatccagtgaaccaaccatcacctccaatcgtcccccacagctccccaatttggaatttcccccaaatctgtcaagaacaccgcagagtgtgagctcgccgcggtcagcccttcataggtccgatcacgccctcctacctcttgttttagcactcttgtatgcccttgatgcttctcgacccggccaattgaactagaccgtgctagatcgatcgccgggaatgccttgatttgtctgttgatcgcactgtccccgtaggcagagagattaggggctagaaccttgaaattg

SEQ ID NO: 6334 - DNA, 738 bp, Zea Mays
gtagaatccgaatgtgtccaaacgaagaggagacagagatggctggggtaggatagctctgaaccaatgcacaacttgcggattaggccacgtcggggcggggatatttcaacggcagccactgtggctcggtatctccgtcgcggtgtcactcgtgcctaattctaccacactgtgctccttggttacgtggtcgccatgcactaacatcgtgcctcgtgatcgcgggtagctagctaggtcgccatccctttaaattgtgccatgactcacggtgaggtcttcactgtcttccgttgtgattggtagaagccaaaattcgcggtgtcccttcctcatcctaaactggtagtgcacgttgaacttgtagttccttacggccgtatagccacagcgtgactgcctatttccgctagaattcatcacaacacccatttcccccatcgaaccccgcagagcgcactcatccctgcgttcccatggccaagcgaacctagtatggttctatgcctttgatttggtgtttgaacatccttgtgtgctagtgaagctcgccgtggtagctgtttggccattactggcatagttttgttggaacgcgtgctcgacgtcgcgtgctaacctgttgacagcaccagtgtcgaccaacaaaaattattgtggtctgacgctaattcttgtgtgcaccatgacctgcgtgacccactgatgctccccgttccctttatttcgaaattc

SEQ ID NO: 6335 - DNA, 504 bp, Zea Mays
cgccggcccatgcggcgatgcgctggaccctggcgtgatgctccgcctggagatcttcaagtgctttcttcgtcgcctccatcgcctgggggcccagtgccgtctgcgccgccaggaactgccggatccgcttttctagctttttctccttctcctccgcctcgagctcatgctcgaccagcaacttatcccgcctttcaaacatttcctccctgaaggcgagatccttctctcgccaggcgagatccgcctcccgcctatccagggacacatccttctccttgaggttctccttagccagggcaatgttgctggccttgtcctctagctcccgctcctatttttggatcctctccacagccgtggtctgctggatccgctgctcttccaggatttcgttcatggcattcagcttggcccggagctctgtgacgaccgcctccctctagctcaaggcctcctccctcttggccaacctcttctccttctggctcgcctccagct

SEQ ID NO: 6336 - DNA, 454 bp, Zea Mays
ggacgacgaagctcctccatgagcgcgttgacagctgcactgcattcacgaatagccattatgtataaggacaccattacttggtgcgatggctgcgatcgtcgtcaagaaggaaaaagggagtggtcgagaagcgaggggaatgacgagcatgattatagtagtatctacgtcggaacttgcatgggactcagtcgcacaaagagattggcgtgattgcttcgagaatcgtgcgtttgaaatcctagctaggagaggaggagagaagcaaacggagaaagtggatttactatcatatatatggccgcatatatagcacttgcatacagataaatgcgttacatgtatgttcgagcgaggagcatgcattatttgcacgagttggcacctgctgtgtttgacttatcacctgtccttttcacccggtttctgttttatttgttatatgaaagtg

SEQ ID NO: 6337 - DNA, 509 bp, Zea Mays
ctattacagaggaaggcaggggccctagcgcaaaataaaccaagacacagaatcctgcagacaggactatgggttgattcttaactttcgcgggggttctttagcaaaaaggccatcacgaaggggtatctagggtttctggccatccgaccacacatgtgcggcccagattagatcgaatctcgactacatacctagttgcgcccacaaccattggatcccagatccatggcgcacggcgcacgatgcccttcactccctctcggccgcacgatttcctttcaacacgccagatccaaaacgacgaaggggtacccggattctaatcatgaccacacgtccgagaatcaatggtcgacacgatatcagagccgggacctaatctaaccctccgacgcggaatcaacggtcagcgggctatcttgcaccttctgcccaggcatcggcggacacgccatggcctctcccccgcccctcgccgcggcgattaaccggctgctacggtctct

SEQ ID NO: 6338 - DNA, 779 bp, Zea Mays
attaacttggacttcatatgaattttctatgaattaaactagtttctgcaattaattttatactcaaaatcattttccttaatcctttattcctttttactgacttctagactgcgcacaggatttaaacaaaagccaggggcctcgagataagaatccccacacacagagcacaacaaatatggacggcgggttattttctgataaatgcagggtctcttacgctggccgtccgatcgaaattctacgacctagattagatctacaatacatcgaaccagtacgcgctaggcatcatccgatccaaatccgacggtgtcgatctcgtccgtgtaccgatccgttcgatctagaatcgagcgcacagatttaatgaatcccgattcattcctcgcccgtccgatcggaatcaaacgacccacactactctgacctaacccagtggatgccctctaatctaaaccgcagattgcgccatcgacggctcagtacgagccggtctccccagaccgccactggcggtgccacccatcgaatcatggcggcgacattgccggagcagtgccaataccattcttgtgcgctaaccttaacagaaactagagctacacaatgcggagtcgaaagcggatcgatgggtagggtatgtaccaacgattgtgtggcttagggctcggaccacgggaagaggcggtctgctgtggttcctgctcgctggtgagcaattcccgcggtggtggtccgttttatgcgagcacgagtaacacacgccgctcaga

SEQ ID NO: 6339 - DNA, 2141 bp, Zea Mays
gggaagtaaaaggtaggtagcccgaggctgtgtgacgtttcctttagaaacctccattgctggctccccatcctcttcctgcttcatggtttcacctgctgccttctccttcctcgattgccgcagctgctatgggaataccatctttctacaaatgggtcgtcagcaagtacccaagcatcatctcccctgtgaaggacgaaccagaggagtgccctgatggcatcatctacgacaacctctacctcgacatgaattgcatcatccattgctgcttccacccacaggaccagctaacgcatgcagacatagatgtatccacacacctcaatccatgcgaatctggacggtataaatgtatgtgttgactgactgacacaccgttgcaggtgcgccctccgacgacggccaatgaggtgttcgagtccatgttcgagtacatggaccgcttgttccgcatcgtcaggccaacaagtctgctgtacttggcagtaggttcgtgcatagattgttacacatcaaactgaactgaattccgtgtttggtttgaggaacaaattctcacctctcactttttttatttggtttgtgaaatggaatgaaatgagttgatccatcatcatttcatttcttatatactaataattagtaactaataatatgaggaatgagtttattctattaccgcggtgtacattaacaaccagcaacaagtgttaaggatgatgtttgttaccttcagttatttgagcaacttagttacacatgcatgcacttccctatctgttccatctgcagacggcgttgctccttttgccaaaatgaaccgaatacgaaggggacgtttccactccgccatggaaagacttgctgtaatgacaaatatcagattctctcgtcaatgaaataattgcatatgatttttttctacattgacagtgtgatgtctgaaacagccgaaaaatgcgtccatgcttcgatttgcaggaggaaccaccgcgagagatttccgaagtttctgaccccaatgtcatcagcccaggtactgagttcatggagaaggtatcagaagccctcgagtactacatccgtgccagatttaacagtgacccctggtggagagacatcatggtttgctcctgtgctttactaaatgcaatttatgttcttctctctctctctcttcttaaagggaagttcatgttcatttcagcttcaaccattagacatacatgctgaatctaactgcagggtctataaagtattgacaaacattgacttgctgaatctaccaggtggatgttgctgacaagtttaacatatctgttctgaaggtaatactctctgatgcgagtgttcctggagaaggagagcacaagatcatgtctttcatccgtgcgcaatgcagcatggaaggctatgatcccaacactcgacactgcttgtttgggcatgtagggaacatatatatatatatattaatcggttttcttgatgatctcatcatttctaataatgttgtgtatcactgatccagttttcatcatgcctagctatctgtactggggattaactgtgaagaatcattgcaggatgcggatctgataatgcttgctttggcatctcacgaagtctacttctctattctgcgtgaggtctgttaatccctcgtcaatgttaatgtcatgcttaaacatattgcatcacatgcttgataatggtatgcaccgctcctctgtctatactactaacttggccaggatttgtgtaaagttttacctgtcagagtaactccagcactttataatggtatgcaccgctcctctgtttaacttcaacaggatgtgctctaccaaaatcaggaagaaacggaagggaatccgaagaaatcatttctggtcctgctcacctcccaactccagataatgccactcatttcctcattttgatacactaacagtgccatcttaatttccagtttttgaacatgtgggttctgagagagtacttggagattgaattcaagatactggacccagtctgcgagactgatattgagaggctaatagatgacttcatctttatttgtttccttatgggaaacgatttcatcccacatattccgtcacttaagacgcaag

SEQ ID NO: 6340 - DNA, 716 bp, Zea Mays
ctccccaccaccagccagccaccccagcgccggcgacctcgttccgtgtcggcatggtgcaggcgatctagtttcttgtaggcgggctcaacctcgttgtcctgcagcagctgcacgccatgtgaagttgtctatctgcaacttgtcgttgggaccttagcatgtgcttcttatttggactagctagagtatggttgtgttgaagtttaaccttttgaactgtccacatcccttctctgctacactaaattgaataccagcattacaacctattcttgttgtggcatgtgatgaatcagatcctctatatccttgtttgcagcaaactatctatttggaatacacagttttatcagctcgacgctttgtatcatgctttcttatactgaacccaacctgaccagcatatgtgttatacatgtcataagcattcttttcagagtcaaaagacatcccaatttgaggaacgatcagagttggttcagcatcatctaccacctattaaaatgcgttcagaataaaagttctattacaatacaaaagaattgttatgcatagttctattacctctgtatcttcaggtattgatatgtcattagcctgatcttttgcactagtagtcatcgaagttgctttacgtgtctgctcttcctgaacaagtattatattttttgcgtagaccataaatgaccaaactacaggtgaaacagatgtga

SEQ ID NO: 6341 - DNA, 352 bp, Zea Mays
ctcgtaatgtacgtgttgcgttggccatagatgggttcaatccctatggaatgagtgctgcctcgtacacatgttggcccgtgtttgttatcccaatcaaccccccctggtgtgtgctttcaaaggcagaatatattcgtgtcgttgataattcccggacacccggggaataaaatgggcgtgtacatggagcctttgatcgatgaattggtatgtgtctgggaggaaggggtatggacgtatgaccgagctacgaagacaaactttagaatgcatgtttggtaccagtactccatgcatgacttaccgacgtatgggctattctgcgcctggtgtgttcacggtaagttcc

SEQ ID NO: 6342 - DNA, 563 bp, Zea Mays
gatggatggaggtccatgtgcgtaagaaatgcgaggatgacagccgtacgtccaggacaccgcattagcataatcaaaggcgcctcagcacaccgtagccgccgtgtgctctgaaggtcacgacgagggtcggccggcctatccttcgtgcagctagggaaaccatgctacaccgtacctcctcctgccccacaggggttcatgcaaattgcacactagtactactactccagaatccagatagcgcagccacttgttgcgaatctgtgctaaccactccagatagatgtaaacgcgcgcagacatgaatcgccatcgacccaccccacacacaggacagagcaactggggcgggcatccatcctgcttgcccaactgcttaataatcggagccacttgtggtctcaagttgcagatcgcgcgcgaggtagttttgagcacatatccatccactaatggcaggtgcttggttgcatcagggggcaagaccaattaagacgcatgatagtaggcagtagctactagtatgatacggtgcttaataatcatgacgacagctgcaa

SEQ ID NO: 6343 - DNA, 335 bp, Zea Mays
cttcaataggtctgtaacatttggtacccacctccggtgaactcactgaccacaaccaccatgcctccatgaaggagcagagacaaggctggtgcaaccatgaaggagcagagatttaaaatcaaaagatgcctcgagtcgcttggctttggtggtagatagatgaggcatctaaagagattcatcgcataagaagggaataaaatcaatagatgcgggactaattaaggattccagaacacaaggactctctacaggaggaaacttatgctagctttgtctatgatagcacatccccactctcaagtgatatgcaagtagccccatggctggct

SEQ ID NO: 6344 - DNA, 1026 bp, Zea Mays
tctgggtcaaatggcacagggccatgggggcatgcacatagcatcaagcaatgctttggaatcacctcgatttgtttaacgctcgccgccgcttcttgcttgtgttgtgagcaaagcctggggcaccgcattgggtagaaaacttgcatatggctcgttgaatgttcggttgaccgatggcacgcaactgcagtgtgacgcgggctagtaatttgtgcgccttggctagctgaaaactaatcacaactgttcatgtttactctctcattcgttcgtatcttaatcacgggcgccgacatttcaggtgcttgaaatcgcaagattttaggccacgttcagttaatggtagttgggccgctctctttcagagagtcgaattagtcgtgggatgagattatttacggtcgctgttaacgtgtgtacccctgcatcggtgtaagcggggcttgggccatcatcgaggagtgcagagagatcgacaaacagcgacggcgtcctccggggtaggatgcgatgcaaagtaaggagcagtagccagtagcatggcagacgaagacgtacgccaaggcccacctcatccccgtcggccggacgccaccaccagcgccgtgtagccgtgtaggacaagtcattcggcggcgagctctgctccacctcttctatataccacggctgctactctcagcagcaactgcaactgcaacagatcaatgcaggaccacgggctggacgttgggcctgggctccagttgtaactgacgtttcgtgggccgaagttggcctttgtgcacgtgggctatctaactggccgccaaacatccttgccagcccacatagtctcctagtccgctcgtctaatttcttatatttttttaaaatttctagatgtcttatttttatttttatctatagagggcaaccaggtaacatgtctcgacgttataagcagtggcggacccagaaactgaagacaacctaggcaagattatcaagtgctaataaccatagctatgtttatataaaaga

SEQ ID NO: 6345 - DNA, 594 bp, Zea Mays
ataataaacccggagattttagtctgtctggctttgcttgctgacaaatactacaagtctgcacaaaacgatgaatagcttgcttcatgcccttccaatagaatagttgtttgattcttctgtaggtaactggagctcccgaatgtccacccaaagctgaatcgtggagggctgatatgaccttattttgcagctgcacattagtgcccaaccaaatacgacctttatatcggataattccatcctttaaggtgaaatccgagttagctatttgtgaagtcaccgccagttgactcaacagctgttgagctgaatcatcttgttcatagccttgcacaacctcctgtatacagattggtgtgcagtgagacacatgaaacaattgtccctgggtatgaggatatcgtgagagagcatctgcagcagtgttctctgatcctttcttatagatgattctatattgtaaaccagctaacttgtaaatcaagaggtaacaatttggcattcaagaacgtgtgcgaagagccagaatcaattaacaccaacaattcctgattctgcaacattccctgcatccgaaatgtgctaggacta

SEQ ID NO: 6346 - DNA, 668 bp, Zea Mays
ggggataggggggggcagaaaggacccagatacaatgcactccttatggaggccagaagcaggcatacacaaaactatccataagaatcaaatctaaaaaactatagccctaggagctaggaagcttggtcggccaagaaggaaagacctttggcaccagccatctgccatttctccctttcctcaccagcagcctgaaggagatacaaggggtcctgccatcaaacatcgccttgttcctatgattccagatcatccaggcccctaaggcaataagagaatccaatcctttctttcctagactgaggacctgagccgaagatctctcccaccagccaaagaaggaagcctctgcttgctaaggggataagctgtgcagcccaaactttctcaagaggttgtaccaaaacactctggagaacacacaggagaccagcagatgatcgatgttttcaggttcttggtcacatagggggcacctaaccgggtggttcatgtctctttttgccagcctatcagcagtccagcatttgttatgagccaccagccacaggaaaaatggcaattgggtggcatccaagatttccatatccttttatgatggtgaaaggagcatgaaccctggaagagaccaacataagcagttttagccgagtaaataccatctg

SEQ ID NO: 6347 - DNA, 341 bp, Zea Mays
gatttgaccaagcgaggataaggctagctttttggtagtggggcggactagtggctgctgcggcctgcggtgcaatataccatcaggtgttttatagtcgtcaagcccacgcactgcgtggcgcgaccaagcaacgcatcaccagtattttactgcgatacaccggggcagttggctatagactatagtgattcgatcactaatggtgatgccaactggttggattttggtggactcagcacgcctgcctgagacagacatgcgactttgcgagtagagactggtaccccgtcgcgatcatgcgccgctcgatcggcactgcgaaaactgcacggcggctt

SEQ ID NO: 6348 - DNA, 311 bp, Zea Mays
attccccctttgctcacgctcactagactctcgctgtgtagccgtgtcgcctctgccgtcgatccgaggccccgctgtgttctcaccgtcgctcaagcgctctagagccgtctctcaaggtaacccacctccccatgcccctaatttccctttccttgccttgttgctcgcgcaatcgctcgccaaagtaggttagtgccgccgccgggccgctctgccacagaccagtaccctccagtgcctctacaccagtgttgtgcccacgaccgagtccgccatgccatcccaaacccgcatgagccctttccagc

SEQ ID NO: 6349 - DNA, 480 bp, Zea Mays
tggattttgagttagtttgactaggcaattagacatccatctactagcattgttattgggacttcatgattttttgtggaaaaaattctcgtgtcgagtggattttcatttaaacaaactgatcttgaagagtggatatgctatcatacctgatacctgtttgtctgagttgttgaggtgctgatattacgactattgaaggctaatcagtgtttgagaggctgccacttaggtgttgcttggcctcccctactgacctttttgagcgtgctcctatacttttttcttgctacaacttcctttcatgctagttagccacctaagtggagatgaggcactaggcagcagccaatcactcaccgagttttgaatcgaatgccttctatgacacatatgctaatttatttatgatttatgaatgtagcataacataaacaaatcctttagttctaaataaaaatttgatttcaagtatgttcc

SEQ ID NO: 6350 - DNA, 458 bp, Zea Mays
ggaagaatcgccgccgtggtggatttcggcagaggtaggagacgtgacctggtccgtcgatctgtggcgaacgaataggattagatcaacgataccggttcggctaaatgataggcgccgctggatcgtgatcgtgtgcacatgatgagtggacgacattttaaaccaggatcgtagatttcccctctgaacggttcagattagtgcggcacgtatcccttcgcctcattcggtctgcgccgttgatctcgatcgaacggtgtaagacagatctggggtgcatagaatatccgtcgttgatctcagattcaacgtatagatttacttaccgattcgtttaaattttgatctaatccagaccctcggcgttggatctagcggccaggaaccgtgcataccccttcgaccgcgacaattttgcacataagaccctctgttttaggaaaactaacccgccg

SEQ ID NO: 6351 - DNA, 301 bp, Zea Mays
gaacctgagagcttccttgcaaactgggcatgggaacttaccgtgaacacaccaggcgcagaataacccatacgtcggtaagtcatgcatggagtacttgtaccaaacatgcattttgaagtttgtcttcgtagctcggtcatacgtccataccccttcctcctaggcacgtaccaattcatcgatcaaaggctccatgtacacgcccattttattccccggatgtccaggaattatcaacgacacgaatatatcctacctttgaaagcacacaccaggggggagattgattgggataaca

SEQ ID NO: 6352 - DNA, 663 bp, Zea Mays
cgacggactgccttatgtgcctccaaaagcgcccctaccgtcccacgcaaaaaacgtatcttggtgcagcaccagagcaggaggagttagagtgagcaacagtcaatccacaaaaacgtttataaggcacgttccatgtctctcaatagccggtatggcactaattaaacaaaccccataaacagcgcaggtgtcctagcgatttctgcggcccaacattcgtgtggcccagcgattggtgtggcccagcgtccctcgcacaatgatttctggtttacctaatgcagcccagcttccctatgcgaacgacgcctctcatcctcttcggcaacctctacctctgcgacggtgccgcacgcacgagctccactcccgtgacctcctcccccacgacctcaaccgctccgctagctctgccacttccgcacgctccctgtgcacgacctcaacctcgcccgattcagcgcacacgagggagaggaacccaaggctcgcacacgtcgaaaaccactgactcaccgccgtcttgcaattcgcaactgccgccgcccatgaccgaaacccctcgccccaactcgtctctcctctcgatgtgtcggagctcacccctgtgtgcccccaataagccaccgcgcgcccctcagctcggctgcagcgcctgct

SEQ ID NO: 6353 - DNA, 517 bp, Zea Mays
cgagcgcgcggcggaatgatctctttcagcgttgtgcagcttccactagtaataatcgccgatgcaatgaaaatgcgcaaatgatctgtcaagtcgcgagtcaacgaccattcttttgtgcagggcatgcagccgaccgggcgccacctgaagcactagctcgacgaaagatagatactctgtgccggccagaataatggaattgaagtgtggaggcccatggacatggacatgtaggatggatcgtctgtgcacatgtgacatgtctcctcaaccggagtatgcatgcgtaggtagcagtaggccactaccccattcgatgatgaagctagatgcctgcgatcatcatccctatgatctctacgcgaatccggaacagggatcggagcaatgtctttgccgcagtgtgtgtgggtacaattcatgtgtgatgtggtaggggtggagcgcaatcgtgcgtcgctatttggtcgatcggtcggtcgatccttggtgcatcctggacgaatgctacgct

SEQ ID NO: 6354 - DNA, 551 bp, Zea Mays
gactaagctgagtggtccagcagaatcgcagcaattgaaggcccctggctgctgctgtgattctcggccaccgaacaaattggttgtgcagatacaccatgacacatttaggacaaaagaacgaagaagtgctagacattgcaacagactaaggcccccgcagagcgtgccagaccgcatgtcttaaacctgcgccgcaggcccctgtggcggaatgattccgcagaggtccatcagcgattgcagcaccaaggacgacagtggacccttgaagaggttgatgcaggtctccagcgcggcacttgcagtagcctgatcagacggctggccttccttaggcagcaagcccaggcgctttagcaggacctggcgtgcgcgttcctggatgttcccacgcggccatgcgatcgccgccagccgcatgctcttgcgggtcgccctggcagcttgcttcttctttgtcttcaggtttggtggcgcttgatggagctcctggagcagtggtggtgcaacagggcaggtgtggttgctgatgaaggacgccacagtgg

SEQ ID NO: 6355 - DNA, 546 bp, Zea Mays
tacaaatgaagctagaagagttcatccgactgaagcaagggggagattcggtgatgtagtatctcaataaattcaatcatctctcccagtacgccattgaccaagtggatacagacctgaaaaagaagaattgtattatgagggtactaaatgacagactccagcgtaagatggcaacgtgtctagacctcacatacagcagggttgtcagtacagcactggcagttgaagccaaaaatgcggggcatggaaagtcaaagggatatgcgggtgaaagatcgactcgaggaccagaaaagagaacaaggttggtaatccgacctttcaatccaaaccgttcttcgtgtcgcccaccttcatatccattcaaacaacctgtatttattcgtcccacccctgcccccgctctgaccaatcagccgagtgccccaggtactcgtttccttgcccttcccagttcttctagtggttgcttcaattgtggaaagtccgagcatttcatcaaggactgcccatatccgaagcaaaacaaatccaactttcagc

SEQ ID NO: 6356 - DNA, 978 bp, Zea Mays
gagccatgtgcatgcaggagcgggaggacttctctaatggcccaggcatgaaccttatccgaggcactccagggtgacatgattaacacctttgaacaccagataatactatcttaaatgctacgaccaaagcgtcatgcgagggccataatggtaaactggactctcgcctatttatatactatgctcaacatgtaccgaggaaagggagtgtttctttcatccaaaagaagagttgtcaaaacatatattctactaactattccaaagtacaaattaaactaaccacgtcatccaagtaaaggtacggtccaggtaaatatgtactagctcttttcttgtctgcgaacaaagtaagaaaccctttctctaataatcaccttaaaaggttcgatttcaatgtcactccaggataaaataaattatgtatggctacggctacgggtgatcagcaagagcaaggagaatcaagaattactctgacaatgtctgatgaaagcagacaatgatgaccactactaaccgagaatccgagagaccgatatgaatgtgcatgaagcatcacgcacatgagtggacgagtcccagcctcccagcataattgaggtacctgaggcctggcccatgaaactggtcgggcctacaaaatgctatgaccaataaacccatcaggtatcagccacatgatgctgatgaacaaccgtaatatatggcccacaagaaatggctaacctgatgaatagtcaatgatctctagtgtctattatttgccttttcctctgtacctgctagtggttctagatgccagctttttgtacgcgcgcagtacatttctggagggacagatgtaaacatgagcagatgctggaccagtcgaggctctgtaggatctaggatatgtcaggttgtaccaaactatgcatagctaagctggcaaagatgatcaggtgacgagtattttcactttattggtacttc

SEQ ID NO: 6357 - DNA, 636 bp, Zea Mays
gtggcttatcatatgatcccttgtcgtcacaatatagtatatactaaccagtgattgtgttggctggatattgttgattcatgagtttggaatttgtttttgtatctagaacttgcggaatatctatactggttgttgccacaaccaatatatctgtcaaaccattactgcagatgttatgtatggccaagcctatgttaggcgcagcagggccaaggctgcctaagggggcgcgccaggtggggcccaatgcccattagctaatagatcagctctatctagatagttatacttatccaaagctagtagatagacttgagatagctctatatatagatctgtaaacacttgaataaatgcaagcagaataccaatttattctggcttcccagaggaagccagagtctcctgggatcttctccctgcgcgcgacccagccagggtcacgacggcgccccagcgccgccacccttctcgctcccaatccccaccctacaacctacgcaatctgcccggtaggatccgtcattctaccagcagacctccagcttcgttagtccagctgaaatatggctatgatgcctatgaattagcataagtgcattgttttggggcaccatcatgctattattgttt

SEQ ID NO: 6358 - DNA, 956 bp, Zea Mays
cttggctgacagtcagttctgatgaactttggagtcgatttaagcttgatcgagtgagcaaatgaccaaggttcctataattgaattggagctggtatataggagattaactatgtaacagacggataagggagttgccacataaaaatttgagaacaaagcattgcaagttgctctatcaggcgctctgatgaatgctttcgatggtacagttactgaacaagatcaggttcagtgtatctcaccgccggtgaattggtgacgcgatcctcgccggtgcagcgattcgtgcgctctggcgtgcggataatggtcgccggtgaaaagatcttgcgcagggatgaagtcggagcactattacgcccagtcgtcatacccacttgcgctgcgacgtggccaaacggtcctcgtcgtggagatcaccattcaccatgattgcgccatgccgtaatcaattcaccacgtcatcgcaagctgcaaggactcagcagtgaccgtcgtagagagttagccagtgagtgccacgttagcgaccttcgatgactcttcccccttctcaccgcgtgtgcttccctgtccaaattcaacctcctcgcgtcagtcttctataaatttgatgcccgagtctgctctgctaggttgttacaaagccagagcaccagccctcgcctccgatcgtccatcgtagcgccctaatttcgttttccctccaaatccactctccgcgccaccgtgagtcacctcgtcgtggtcagccgtctacagatccgctctcgccctcctggtttgtgtttcagcactctagcatgcttgtgatactcgtcgaccccgccaattaaactataccgcacctagtcatcgggaacacctcgattttccctcgggtcttgccgtcgtcgtgagcagaagaactccgggccggactcatgcaattgaggaatggattaggatcgaca

SEQ ID NO: 6359 - DNA, 608 bp, Zea Mays
agaacaacaatgaggaagccaatgatgagtaggaggacaacttcgttgggatatggcctatcactgagcattacacttcaatgtttgagacgggacacttcccaaacctactataggatgttctgcatacgctaggaacctacgtctgatctctatatgacacaaggtgagtgtctgagcctccccgggcttgctactacatcactcgcgtgatatcagggtgatggatgcaggggataggggttttaggacaccatcagccgatgagtctctgacgccactatctaccttacgttgcttcggtcaacaatgttgcaagaagagctctgtggtctcttagccacacttatcggcagtagctgcatgacatgaggtacatacatcttcctctacatcttcgtggagaaagccagaccactgttgttctaggtgaagctagagaagatcacctccacacccttgtaggtgtggtggcaggttataacactgacctagacaacgctgccctggatctctcgagggtacatggagaacttgaagaagcacattccaggttgtagccctcgaagcttagctcagaggaaggaatccacctgaagcccaactcc

SEQ ID NO: 6360 - DNA, 890 bp, Zea Mays
gcgcgtgcagcaaaggccatcaaactatggcgcaagaccaaagtgggagacacgagattacaacttgcaatttccaaagaattaatcctctgatttgaaattgctcaagaggagtgtgtgctcacccaagaggaactggatctcctgaaggcactcaaagtcagagccttgggacttgctgtaattgaaaaatcgaggatccgtcaaagggctcgcctcactcgcattaggttgggcgacgcaaacactaagttcttccacctctctgctagctccagagcgcgtaagaacttcatccattgtctgccgcccccaatgggaaacttagtggtagcccatgaggaaaaagaaaagaccattcatgaacactttaaatctcacctagggacagccccggagagagggatcaccctcaactagccggctctagctttagcgcagcatgacctctcatcgctagaagcgtcgttctccctcgaagaaataaaggaaacaatcttctcaatgccgagtgacaaagcaccaggcccggatggttttacaggtttattcttcaaagtatgctgggatatcatcaaggaggacgttcttgaggcttttcaccaacttcatagcatgaatggggcggattttaaattactcaactctgccaacatcgtgcttatccctaagaagacggatgctttgacagtgggtaactactgccccatcagtttgatacacaacatagcaaaaatcttctccaaactgcttgctaaccggctggccccgctcctcaacactctaatctccaaatcacaaagtgccttcatccataaaagatgtatacaagacaacttcctttatgtgcataacgtagttagaagactacataagcagaaaaatccgac

SEQ ID NO: 6361 - DNA, 675 bp, Zea Mays
cgatgatccaatggattctagctcaattggatgggtcagagagtatcaggagcatccaaggatactgaaacaaggaaccagaggacatgaacggacctgagacacgttggccacggtgaggtcacaaggtgcgttgcttcagaccaatttgggggaaatccaaaattggcgagctctggtgagcaattagaggctcggcttggtgggttgggtgcttgactaccttacggccccgacggtgtgctcaattaatagaatttgggggcggcggccagtgaatttggagttggcgcggtggcggatggagaaggaagaggtcactggtggcgcaattgtggcgttcaccggtgcagtggttcagagagggtaagctcaagtgtgccacggttactaccgcgtagtaaagagtcacgacatggcataattgagatcgccggagtgtccacgatgacaccggcagtccggccacgtcgcaacggctacaggcacggtgataagcttcccctgcgaccctatcggcctccccgtgagatctttcacctccccgtgaatatccatggcgtgcccagcacgaatcccggcgatcggcacaaatccggatgcacggatcatcggcagtgaggggcgatgtatcagagatattccagttactgtaccatgagaactccaattcag

SEQ ID NO: 6362 - DNA, 1316 bp, Zea Mays
tgagccgcaacaagcatcatccacacataaactgtgtgtgcgaccagagcaaatgcctcatcgttttctattcccgactgctggatctaccccttggcgacaagctgacaatctgggccttgtgcttgacgatgatgcctgctcattacgctttagtttgtaaacccacttcatgtcaattgggtgatggcttggaggatggtcgacatgagcccacgtcttgttctcctcaattgatgtcatctcctctgtggctctgtcgtcaccttgagtcagcgggcattgccttgagcctccacgaacatgttcggttcatcatcatcggtggtaaggagcaagtcctcatccaccatgaactcgttctgccaagccaagaatttccaccgacttgagcacattttctagcgtcctgaaccggagaggcgacttaacgtcgtggttggcgtcgaggtctcgagtagtgttaggtggtcgatgggaacaaacatcgtcgttgctttctggcctagcagctctcttagatctggtcgacgtcgttgttcgatagtagtttgcacaccatgtcaccctctgacatttccctaagcccctagaacccgaggtgtctgaacctggcgtgccattgctagggcacattcaagcttcaggcaacgacgcatgcaatctgagtgatgtcaatgttgagggcgtccacgactcatgctcgacaatgttcaattgccgctcgagtagtcgagcttccactgccagagcggtggagccatgacacaacatgcaccgccaactcatccttggtcaagttcgagaaggattttgatcgccatcacgatatgcgagtaccttggaggagtggcctataggaatttgcgcatgatatttgaatcttggtacctagtgtcgaggacctccagttgatttactacgtcagtgatgcgcatgctgaagtcgttggcatcttaccgttgttgaacctatgcgagtcgaacttgcgttgtagcgtgttcgccttcacttggcgcattcggtccatggtgaggtgcattttttgagtgcgactagcaatcttagcggttgccttgctcgcgatcaccccttgcatcttcggaggtacaccaactagtcaccaagggtgatggcttctagagcattgcgattgtcagtgtagttgacggtgctgatgttcactgccatccacatgccatgaatagtagttggtcttggtcaacaacgagtactgcctactgtcgccactctctcatgacccggtagatcaccgggttgtagtcgtcattgctagagccactcctcatctcctg

SEQ ID NO: 6363 - DNA, 670 bp, Zea Mays
atcgtggtgcagtgcaccttgccaccggtgacccccgcgcctggattcgcaccggcgatgcgatttgtgcccggtggtgcccggataacacatcggggtgaaaagatcttcaccatggatgagaccaggtgctggccgccgtacccacttgcctcacgactggtccagatagccttgccggagttggccacctgccatgcgatggccacgtgccttgaagctttaccatgtcgcagtaagccgctttaggaagctggttcgtcgccggtaatcttgccatggttaaagccatgcatctcttgcgccagtgacctcccctctctttgacctccagcgcgccatctcaaaattagccgccaccgccgatgaaacctataaattgtcgtcccagtgaactccgctaggtaattgcgcatccaacgcaccagcccttgcctcgaattatccaccagagcctcccaatttcccacttcccccaaatcagtcagagcaccgccacgtgacatctcgccgtggccagacgtctgcaggttagctcatgctcttcggtgtgatgttctagcctccctcatgtcccctgttgctcacagaaccattcgattgaactagaccgcctcgaatcacctagaacatgttgagttatctccggtttccatcgccaccatggaca

SEQ ID NO: 6364 - DNA, 624 bp, Zea Mays
gtcgaatcattcccggcaacaccctcgggggctgggtaatcgctggcgccatccttggggactgggttctctacaacagccacctctaaggctgaaagattcttagttacctgcatgggaatgaagcaacctagaccagcttgttgactctgaagaccgcactccaaggtcgatgaggctcgagacgctgctcgggataactctaaccccacatccgaaatgtcagtgcaaacgtccatcataccaccatctgctggctcggatagcagatctttaggaaccatatcctcgagagcctaatcaaaatttgctatggacaactcttgcagaccaacgagtgcagacaaggctagagaaggaatatcactactccccccactgaccaggtagcgccgactgtttttccgaattaaggggatttcgtcctcctcttcctcaacctcatcaacaatacgaacaacacacccattggggtcagcgctggccggattacacccattgggatcagcatcatcaaggtcacacccattggggtcagcgtcagcagggtcacacccattgggatcagctccagtaacaagtcagacgatgccgggggagaggcgtggaccgacgacccttcgg

SEQ ID NO: 6365 - DNA, 328 bp, Zea Mays
ctaccacgtatccagggaggcggtaagctcagggacttcaccaacgaatctggacccccatgggtgggtcctggacccccatgtacgcaatctagaccccttggaaggtccaggacctccgtgtatacaaaccggactcccgatgagggacccctccccccgtatggagtctaggtcgccaacaagggctcctgatgctctggggcagaacatggcacatgccctactctagacccaggtaggggtccggtgacgcctcgtggtcgctaggcgcttagtgcaaaccttcccatggaagcaaggtctcaacccgcattaaatgcaaggc

SEQ ID NO: 6366 - DNA, 329 bp, Zea Mays
ggaaattcctgacttgacctttgtagtctcttaggaaagtgaggagttgaaagagactcttgtgctcacgtcaacaacgggacataggaacaacttcatgatatgcttgaaccttgggataaatcttatgcttttgtgtgcttatagcttgtgattgtattatttgttgtggtggcttgatttttattatgtgtgggttctagaccaagcaaaatgtatgaaattcactagtactactacaacacatatgtggtggactcaatttaatacttaaggatttcactttataattagttagttcgttgctatctccgagattctaaatttta

SEQ ID NO: 6367 - DNA, 464 bp, Zea Mays
tgcggggtctctttagcaaagtgcacccgcgaaggggtatccacggatctcagccgcccgatcagatctccatggccgagatcaaatcacttaactgagccactagtgagcacgcgatggccgctggatttgaatcgcacggcctgcaataccccacgcgatgatcgaatatctaccactggatctcttaccaacggttaggatcacaagcaccgaagggttatcctagctttaatcgcagccacacatccgagatggacggccccgagggcatcttcccccccggccacgcgcgacggcggcgccgcccactgctgcaatggttccatgccggcgcgccgtgattcggtgccccgacacccactttcccccatcgagcccgctaaaacgaaattcacgcataagtgacctcgatagagtacgccatacctagactcggtgcgcgcagactcttgctcacgacg

SEQ ID NO: 6368 - DNA, 364 bp, Zea Mays
ccacaatcataccatagactataagcagctgtcgatttcacctctagaagatgtaaatgtaagttctaacttctgcagcactaatgcggattagcgtaatttgctatcatatcacatctctgaaactttctgaatgaaatcgctataccttttatgcttgaccaaacacagtgtgttaatttacaaacggaaatgtttaccgctgctgctgcaataaataaataaataatcgatggagcagctagtaaaacactggttgtggttgtggttgatgatgtttgtagcaagcagctcattcagtcttgtcgacatcatgcttcaattggtctgaagtccaaagtttccccgctgatcctgaataaac

SEQ ID NO: 6369 - DNA, 784 bp, Zea Mays
gcactaaatacagagaaccaccggggcagaaccagaaatttttcccagactcagggagcgcctgggatggactgcgggtttattcctgaaatccccaggatctcttacgaaaatatgccagggcgaaagggtatcgtctaaatctggtcgttgggtcttgcgcggatggtgcggattagatcgaactgccagcgaagcggtacgcgttcctggccacaggatccaagatctactgtcacaggttcatcgcatcccaattccacctagtcgtccgaccgtgaaccgaccgccgagataaactccgcgaaggggtacgtgctcattctaatctccaccctcgctcacggatccgacggctgacataggctcccatccctattcccctcaacggctcaaagggtcactggagaagacgcaggccacggcggcgccatttgtcaacaaccgcgatcacccgctctatcgcagtaatctccaatctaccggttgcaacatgtaacactgaaccgaccaaaacggggaagccacaaatcaccgaggatggcgcgcacaggagtccggtccacagtgaacagagactcggcacggccattgaattccgacgagcgattccccggtagtacgcccttccagatgccgatagcacccacccgcgtgcacggggcacccttgcgatggccccgaccccttctgaggcctcgagcgacggcgagggcaaggatccacggcggcgaactctcgcgaccctttcactggtggcgacggaaagaagaggggcaaggag

SEQ ID NO: 6370 - DNA, 424 bp, Zea Mays
tcactagtggtcataagccagataaataaggactatgaatgctcgactggttccatgggcaagtactatacatccatccgaaaattagaagataagtttgaaggggtggaattccatcacgtggaaagagaccacaacacagcagcagacacgttgtcgaagctgggatccagtcaggcccaggtcccacctagaatcttcatccaggaagtatcacgcccaagtattccctcagatcagacagaagaatgcaacaccttgagccaaccagaattggaccctaatgactggagagagcctatcatcaggtacataaagaatgaagaagaaccggatgataaggctgcagcagaacgcatcgtaagacagtcggcccactacaccctcatagggggcgcactgtacagaaggggtgcgacaggag

SEQ ID NO: 6371 - DNA, 593 bp, Zea Mays
gtgatgtttcctttttggaatacctggcaattcatcgactgacagtgcattacgtattcgagaatatgttattagttgttcttggggagaccattatatttttatgccagaaaacaaaatctggttcttctgttttgtagtttcactttcgtttgtactgatctggcgacaaggaattccatagtactcacaacaacaacatgttctaagatcatttgtctgttggtgtgcatccttttgtgtctgttcattagttgtttcatttctagtgacgtttcgacttgccaacacttgctggtatgaggaggtgagttgagatgttttctgtattatcagagcttgtgcatgtaatagcttttctaagtcaactatccagggtgaggttgtggttggtgtcatatggttatcggtagtctgttcaggtgctataaattctgctaaatcaacttgttggagtctagctaccacttgagatgttgcttgcagaaactgagcatgcgccttcttgaactgttccatttgatccttagctggaggagttgtcaacacaatgtattctttgcacttagtgacatcacttgcagttgacattc

SEQ ID NO: 6372 - DNA, 408 bp, Zea Mays
agcggtaggaggcgacgacagagaagtggatgagactgtgggagaggggtctcgaagcgtcatgacaccgattccgcgccggaccgcgactttgcagtaaggaagcgtgaaacatttttaggcatcggatcgtgatcacacggctggagaaaaaagacgacgtggatatcgtagatgcttagctttgcgtccgcctttaatatagtagaatctgagctactgacgctagatcctaggaaagaatcctgaaaagctaggctacactattaatatgatttgggaggagagctagtttctgtcgttgagcgtggactcgagggggtttcacggctcctcgctctcgagcgtttgttggtcaaggttgtttagtgtttgcagtctttggtgagtttcttttctttatcttcg

SEQ ID NO: 6373 - DNA, 568 bp, Zea Mays
tggaatcatttcctctttgtgatctgggcagtccgatgacgaaatccatgcctatttcttcccacttccattcgggtattgggaggggttgaagcaggcctgcaggcttctgatgttcgacctttgttcgttggcaggtgtcacatcgggccacatactgtgctatttcccttttcatccctttccaccaatatctggtcttaaggtctaagtacatcttggtggtccctgggtggatagagtaagctgagttgtgggcttcatcgagcagggtttctcgtgtttctcccactggcacgcacaggcgatccttgaaccagagggctccttgattatctgtcctgaggtccggaagttgctcctttcgtgttctttccataagtttggttgtttctgcgtccaggcgttgggccttgcatatgagatcttctagatttggcttgacttccaggccaccgttgtctcccagacatgcatttagctgagctgattctttcttccaatcttccagaaagtttgctcccttaaccccgaagggttttctgctgagggcgtctgctaccacgtt

SEQ ID NO: 6374 - DNA, 508 bp, Zea Mays
ggaaaatggcgccgcgacggttctgggtggaattgggaggtgagattggggctacacggccgtaaggaactatagtttcactgtgcactaccaattttgggagaggtggagtggattccacgaatttgtacttcaactgagctcacaggtggagatgtgaatacctcgccgtggtccatggcgctatttatagccacggcggtccggctaacgatcaacgaccgcggaaggctttgctcacgcatggcaaccacatatagaagaggtagagtaagggaggagcaaggcatggatgacaccgcggtggaattgaccgagccacggcggccacaggtgaataactccggacatgcccggctgaactcgcgagatggtgccacgttcgaagctatcctcccccagatcgattcccccactggaatttttgcctagtgaatctagggtttaaagttttcccaatctagggttaagttttcctagattggtgccacgttttcccttatttagc

SEQ ID NO: 6375 - DNA, 349 bp, Zea Mays
gtgtaccgcctatccctgctgctgtgtgtgatgttgttgactcctccctggtacttgccccccccgcctgggatgcaggcttgatgtgtcgaggttggataccagcgtatctgaaagggttgtcaacaactcccgggaggcagcctcggccgggatctggacctgtacacagcttcagctagggagcgttagtactacacccatagggtcccctgtctgacattagccatcctttgatacatgcttgggactcgcagggtttagtatgggtggccaagttgtgtgtccagacccccttggatcgcggctctagatactaggactcccgtcgcagggtggtggagtgtgc

SEQ ID NO: 6376 - DNA, 504 bp, Zea Mays
ttaacgaaagatacatcaaaggatctgaaaaccacactcctctatctgatttcttgtcataaacctgcgatatcattccttcttccctcatctgaccggagaagagccaccaggacagagttgtcaatttctaaaatcactttttccatgctaagcatctgggccagcaccacgccatcacgagcatccaaagcttcgctggttagcgcatcagggatgtgttcatataactgtgctgatgccaccaaaacctctccctgcgagttcctcatcaccacacccacagcccctttgcccgtctcagcaacaaaagcagcatccgagttaattttcacccaaccttccaatggcgctttccatttaacccgacagcgctgagaggcttgcgaccctggcaattttaaacgaaccagatcctctagcattttcgccacatgactcattgcagcatatggattccaacggtcacgcccaaaccttctagcattccttccagatcataag

SEQ ID NO: 6377 - DNA, 334 bp, Zea Mays
taaaaagcataaccaaggatagagttaaggcaagactcgcaaagtggcgaagtggagaaaataatcaagggtaagatatgtatggttccaacggaagggttgaagtaaaaatcatttactgaggaaagtgacaagaaattaacaagatcaccaaggatgtgcaaaataaaaatgaccgctcatgaaccgttaaggaacaggggtggtcaaggtcatgtaagctgaaatgttttgaacagtcattgaggtatgaagataagcataaaaaatatgagtatgcaagatttcaagaagatgagcatacaaataccaagagccaagaaattgctgaaag

SEQ ID NO: 6378 - DNA, 455 bp, Zea Mays
taccatcagattagaatggcagaggaggatgagtttaaaactgcgtttaagactcatcatggacattaccaatttcgagtcatgccttttggtctcaccaatgcccccgcaacgtttcagtgtgccatgaatactgttttggatccttttctcagaaaatttgttatggttttcctggatgacatattgatttacagtccaactttggaggaacattacaaacatctcagattggttctgtccaaactcagggaacataagtttttcttgaagcttaagaagtgtgcttttgtgaaaagagagctgcagtatctagggcatgtgatatccagagaaggagtggcaacagaccctgcaaaaacagcagctatgctggcttggcctataccacagaatataactgagttgagagggtttctgggacttacaggatactatagaaagtttgtgagtgg

SEQ ID NO: 6379 - DNA, 413 bp, Zea Mays
gtcataatttcatgaggccatgaagattttatgacgatagtgtttttgttgtcacataagggtacgaagattcgtcatatattgtcaggcgccagaagccggtagatggttttacttttatgacgcttagatgtgcctttatgtgatgatttggtggcatcactttatgttttttccaaaaaaggatcgtacccctttctgttgaccgcatacactttcccatctcccgcccaagatgaccaaaattcctgaagaagacgtattgagctgaattgatttgatgctgagaggcaatatttcaaatgctggtgctcccttattgtattctgtctagaatcttcctccacagagccccttttccgagtttgtttccaaccctcctgttcaagatggcaatccaggctatagagcac

SEQ ID NO: 6380 - DNA, 528 bp, Zea Mays
cttattgcaccctgtgttcgtccaatttcaccttcaccggtgcttggccgcggcgatccgccgtgctcgcgtggtggccgaccgatttagcccggtctaattcatcggagtagttccctatgtcacccctgtctctgctgaagccagccaaggccttagcgcgccttaagtccccttcccgtgtccggaatcgctcgccggagtttctctgacccgcccgagactctcaccgccgttctcccctctctgcccgtgcattcatggcctcttcctcgccattgagttcgccgtggcaccctcttcccctctgcccaactccggcgaccccggagccaccctagctcgcgcctgcctcaactccggcgacctcaccgccgcggagaggagcggcgccgcctgcagccgtctgttttcccggtctgatcccctccgtccgattcagatcgaacgccccggaccgcgggataccgcttcgcgcatgcgcgcctgacgctctggcccgcctgtcagcgccacccgcagccgctc

SEQ ID NO: 6381 - DNA, 640 bp, Zea Mays
gccagaaatgattgtgcataagactcaaaaattggcagttgcacatctaagcaactaaatatcaaagcaaaatgttgcagaataaacatttcacattgcgattattcaatgatggataggatcaatgcaaaatacttcataagtgtagctactcgttggttctaagaaaataagtaccctagcgaacaaccaaatagataacaacagttcaagagaattgtgttagcatacatctaaacatcactatggccatggatgggagcgttgtgattgcagacatagtgcaaatttgagaaatgtaaaggaaaaataataagtggagcatgaacatgcttcatattcaacacataagaatgatgagaatctgagaagcgttgcatgtaaaagaagacaagtcagtattgttaagtagaaccacatcaaaaggcaaacacaaaatgttctaataatcaatggtttatgcaagtagcaacaaatgcatttctatctagcatattaataaatacaaatgcatggaatatttgctggatggataaacataataaaaagcatgtgtttgagcaggatcaacatgtcagaaaagtgtcttttcttgtgctaaattttgagagcatgagcaaagagatatgaatataacagg

SEQ ID NO: 6382 - DNA, 574 bp, Zea Mays
acagcaaccaaaaaaataaatagacgctgggaagtcatgcaccgaccacaaatatgcgactcgaaggttgaatttcggccttttgaaaacatcatatgctttaactcctttccaaagctccttcaactcttcagtcaagagttgtaacatgacattgagtttctttccaggatggtccaggccaggtatgatcaagcaaagaaacataaattcatacttcatacaaagagaaagtggaaagttgtatgaaatagcaaagacatgccaacatgagtatgattatgccatttcaccagaaggtgtgaagccatcgtgagcccgattcgaacatttctcagtttagcggcaaagtttggatcaaacatgtcaagagccttttaagcatccccatctcaagggtgtaccattagctcaacattctcatggacaccttatttatgccatggcatgtgcatagcagttttttggatagaaacaacatttttacttgaggagttagtggtaagtaacgaagcttcttatgtgtaacatctatcatcaccttatcacactcgtcatttacatcttcgatgaa

SEQ ID NO: 6383 - DNA, 1139 bp, Zea Mays
tgttaagaagaatttagagataattaaatctaaagttggactgtcaggctgttaaggtctgaattttcagacagacagtgcaatcactacgactttgggcataaattcaaccttgatccagtgctcaaccgagtttaatccctatagtcgatttgtagctggtatgtagcactacaactttgctgcagagatctggatgtgttgccacagaaatttggaagaaatctggccctaaactatggctgtcaggcttactgatggagcactcgcgatggtacagtaccctgaatcagatcagaccgccagcgcagccgcttcatcgccgacgaccgctcctcgccatgattcgtgccaccgttgttgcgattcacgtcgccggtgaccagataaggccgtcggtaaaagccatgcgctggacgccactccggtgacccccccaccgtacttcccatctgccttgcggctggaaccgataagaacgccagtgaaccgccgtcgctcggtcttgcgccacgtgtccgggcgctttaccacgtcgcggatagttacgctaggagcgtccggtgatcgccggagatacagccacggtagaagccacctagcgcttgcgccagtgccttcttcttcctctggccgccgcgcatctcgcccgattcaccagccaccgccgttgagccatataaattgaagcctccaccagccccacaaggtcatcagctacccagcctccgagaatcgttagcaatcgttcgccagagctcgcgaattttgaattcgccccaaatcagttctccgccaccccgaaatccacctcaccgcggccagccccatttcggtcagttcatcctcccctctccctcgtttaagctttctcatatgtctacgatgcttgccgacctgcgcaattgcgctaggagccctctggtcgccgggaacacgactgtctagccgcactgctcacggtcaccgtggccacaacaaacatattggtcattagtgaaattaggttgggggaaaggtttgggatgggtccaattccgtgtctgttgctagggaccctagtcattgccccagtcggccggtacagttgctcaccggagcgcggccgcgttcaccgtcgtcgtggacttcaccccgcg

SEQ ID NO: 6384 - DNA, 378 bp, Zea Mays
gttcatggatattaagtgggaggtggaggaaggggaattgctgaaggattgcctggaagtgggagctaaggacttaaagggtttgcttgtcattgccaaagacctcttcgctggtgtttcaaggacttctacgcagcatagcgagctctgaggtttggtgactttaagttgccttttctgatcgtttcaggaactcacgcatgcttgtgtaatttagtttactttagaaacctgatgttgatccgtacagaaactaaacccttgtgatatcactgttgtgtctgctactaatgggctttgaattttgagctgtgcataattttgctaatctgaattcatttgtgatcatggcactaccaataactttggtcctttttt

SEQ ID NO: 6385 - DNA, 289 bp, Zea Mays
tcgcgatggacatcatgatatcgtacgctttcggggcagctaggggcccttccatttttgaagcggacaaggtgtgtcgaactcgtgttggcgcctctgacagtacgtccctttcgtgggtagatgtttctggtccgtcgacccgaaggcgtggtggtgttcgacgcacggagtttttggtctagttgatcctgtgtcggggagggagttgcgccttagtgctagcgaactcggtgatgtagattttgggccccgtcaggttttggtggggtccattcggggtgttttg

SEQ ID NO: 6386 - DNA, 314 bp, Zea Mays
gaggaggcgtggccttgggagcagaggaggaagaagccctagcaaacagatgatgggttaagacttgtcggcatgatgattaggctcgtgaaaaaagggactacacttacttgggaccctggactttctagtgaccctggaagcaaggcgatcaccgctcctgctgctgttgctgttgctgctggtggtgctcttgggagtgatcacccccggatggtggtggtggcggtggaatcgggggactgacgcgcctctgcgcgtcgtgggcctgggagcttgcctcctcggtcccatctgcagcctattggcgcttc

SEQ ID NO: 6387 - DNA, 646 bp, Zea Mays
gtggaaatgggaagaaattggcatggatttcattgttggactaccccgcactcctgtagggtatgactctatttgggtgattgtggacagactgacaaaagtggctcacttcatacctatgaggactaattacacgggagccaagttagcagaattgtatatgactcggatagtttgtctacatggggtgcctaagaagattgtgtctgaccaaggatcacagtttacttctcggttttggaagaagttgcatgagtgcatggacacacagttgaatttcagttgggcctaccgtcctcaagctgatgggcagaccgagaggactaaccaagtgctggaggatatgttaagagcttgtgctcttaaacatggtggtagttgggataagagcttaccgtatgtggagttctcttataataatagttaccaggtcagtctgaagatgtcaccatttgaggctttatatggcaggaagtgtaggactcctctatattgggatcagactagagaaagacagttctttgggcctgaacttattcaagaggcagaagaacaagtccgtataattcgggagaatttgagggtagctcaaaccaggcaaaagagctacgctgataatagaagaagactgctagagtttaaggag

SEQ ID NO: 6388 - DNA, 672 bp, Zea Mays
ctggcctcgggcgagacaaaactgcgtctcccgcccagagctggcctcgggtgagacggaatagcatctcccgtctgaggttggcctcgggcgagacgaaacagcgtctcccgtccgaggttggcctcgaccgagacggaacagtgtttctatgctcgtaaggacccgggggatatctatctcccacatgcccagactacttgccttcgggtttgacgcatccgctctcgcactgcttctacttcgtgcaacacaaccatatcgtcagcatcgtcgtctcattcccacatgcttctagtctgacaatcacatgttacatcgacacctatcctgccattctacacaccgcaaccatcactaagacattctttgttggtcctcggacgttgatgtatagttggggtcatccaacttgtaaatctggtattagcaacggcgacgtgttttttcgtctccgatgtgttgttgggtttggcaaacccaacccacacctctgttcaggcaacttgactacatcgacacgctcgttcctacctcgattgcatcattgccttttgtcaacaacagccctaactacgtggaccttggcatcgccccgcccccccttccatggtgactacctcgacgtgtcttcatcatcaccatggcgcctcttgtgtgcttgcaactcca

SEQ ID NO: 6389 - DNA, 473 bp, Zea Mays
cagcccccctcaccgccggtgatctcacgctcggatttgcgccggcgtcgcgattcacgctcggttgaacatggataacgatccttggtgaaaaatcgggcgctggggatgagcttggaacactgttccgccctggccaccgtacacacttgcctcacgaccggtcctgatcacctcgccgaagttggccgcctgccgctcgcgttccacgtgcccaagtgctctacctgtttgttcatcaccggtggtcacgccatggtgcgggccacgaatcatttgcaccagtaaccttcttcctctccgaccgccagcgcgccatgctaaattcaagagccaccgctctcaggtcctataaattgagcatgctatcagctcctctaggtagtcgcgcacccaacacaccagcccgtgcctcagatcgtccaccagagcgctccagtttgggatttcccccaaatcagtcaaaactccgc

SEQ ID NO: 6390 - DNA, 328 bp, Zea Mays
cccaactggaggttggttagtgctcgatctgggaagatttcatgacaagcttaaccctcgttgcccatgagggctaccaagcacctcgtcgtcaccgctgccttcctcctcgctgtcgatgtcgctgccatccctttgctcgatggtggtggggcgtcctgtccatgctcctcccagcaggtggccaggtgctggacctcagagtgatagcgtgggagcagaggcttccaccgtgacgaccaatgatcctcctatacgagcatggtggctacatcacctacggtgcgacagcgtgccgtgctcccaccgcggtaccactgtactggct

SEQ ID NO: 6391 - DNA, 856 bp, Zea Mays
atttttaaacgattagttgatagcacctatcgacatcgtcatgatttttgttgtatggcggattgatgccttgtcgtcgtagtcttggggaatttttggaaatgtgctggtgctttactgatggggttgaatgtacttgtgatgtattagaataactgcgtgtcgtacgagtatccgaaaatggtgaaagttggtatatgttggtaattagaaaatagtcacgacgttagccaatagctaagcttatgccgaaatttaaaatatgggcaatttgagttgaaattatgcttatctaggcgtgtggattaataataataatgattggaagaacagtcgttcaaattggccagtccaattaagaatggttttgcgtgtgaggtgaggtggtgacatgccaaagtagtcatcgtttctctatgtttataagtggagtcaatacccattaggcgttcattaaatttcacgtcgcacatagtgtatggttgtattagtgacaaggaggtgtaggttttactcaattagaagtttggttgatatggctaggaaatttgtttcggcttgggtaatgaagtggtgacgtgaccaagtagttccccccgttatgagtcgggtctagatgtgttatgccttcgccgtgatacccatcgcatatgctaatttgatgtatatgaaaaatgaaatagacacattatatgatttagtggtgctggtattgtgatctaagtatattatatatgtgtgataaatgttgggcttgaggattgtctttcgggcaaggaaggtgtaatagacttatatgtgtagaatgattaagctagtaatacaaaatgacatggataaaaattagtgagtctac

SEQ ID NO: 6392 - DNA, 514 bp, Zea Mays
ccaagttccacctagggttttcgtccaagaaatacagcaaccgagtgtcgccacaaatcagatggaggaatgccatgttctgagtcaggcagaggcagatcccaaagactggagagagccaatcatcagatacataaaagacgagtaagaacctgataacaaggccgtgacagagcgcatcgcgagacagtcggcccactataccattatagggggcctgctgcatagaagaggggcaggaggagtcctcatgaagtgcattcattcggctaccgggaaaaagttgttagatgagattcatgccgggcaatgtggcgtacatcacggactctggttggaaaagctttcaggtatgggttttactggccgacagcgaagaacgatgcatccgagttagtctagaagtgtgaggcatgccaattcttatcaaagcagcagcatgtgcctgcacaacagttgcagactattcctatgacttggtcgtttacattttgggggctggacatgattgggc

SEQ ID NO: 6393 - DNA, 730 bp, Zea Mays
agcttataatggaacgatgggaagactttgatccaccacagcgcttgggatgttgagctgcaatttgaattgacaattatttgacaacaactaaaatacattttttcttgcttctgctcttgcagtctttgtaaattcaggtgtcagtgttggattcaaattacttttaaaaaaatagaggttagcattccactagaatatatggtcacatgtggctacttatttcctgcattcaaaatgtagtcacatgagtagtggtgaactgatgatgccatatgtggctacttatttcttgcattgaaaatgtggagctaaagtgtgtatgttttgttacacaaacgttggtgttgttgtgctccttttgctgaagcactgccttttacggttagcgacactcaatgttcgatcacttgtacaaaacaagatatgtattttcttttgagcaattcttttaaaatatatggggcaatgaagagcttcatattgtgttgaacctcagtctataatatttagttgcaagtgagagttttatacttacgacatgctacattttgttatccttatagttggttagcctattgtagaaggtggttgaacttgtactttgagaccaaatatatattgcatacttgatattatactattatttgagcttgtcttattgtactcttatctgttcttatgaaggttagaggaatgtgtttggggtgagtaatttttttgtgttgtt

SEQ ID NO: 6394 - DNA, 635 bp, Zea Mays
tctcataaacagattacccacccgactacttaacaatttatcccctcttgagcgcctcttcaaaatccaacccaactattccctcctcaaaattttcggttgtgcctgttggcctcacctacgaccatacaacaaacaaaaactttcatttcgttcaaaaccttgtgtttttataggttacagcacatcacacaaaggctacaagtgcttagatcttgacaccggccgtgtgtatatttcccgcgatgtcatctttgatgaagccatctttccctttgctcaactttcatccaacgttgcacattcatccacgggcgacttcagttttaatttgaacactaaccttttgcttgatttgcttcctactcgttctgttgatgcatcacatcatggcgtagaaaatcctaccggtacaacgacggagtacgcgccgcatctgtcatcactggctaatgatccggtgcccacggaaactattgcgctgcctgatccggtgccacctggagctgttaatgtctcggtacctcacgcggctgtacctgaaggcgacgctagcatgcatgcagcctcgtcgcctccatctattttggctgatcctgcacccgactcaagtgctgctgctccagcaatacaac

SEQ ID NO: 6395 - DNA, 398 bp, Zea Mays
ccgccctctccatcttctcccaaatcgtttgcgcacggtgaaagcacagcttcttacggccgagtagcctcaatccccaaccccaatttcaaccagagccaccgcgacgccgttttcccccaaattggtccgccgcatcgcaaagaacagcccgcccgtggctgggccactctggtgagttcctatccaattaaagtgttgtttccatgcctctgcgtgcttgcgaagctcatggtgacgtacgttcgctctaatcgaccatggtttggcgggaacgtgtgctcccaagctcggtgtctgccgtgcatgtggacaggccattctcagtgcgttcgggtcaaattaatgtgtgttccggggccatcttaggtcagtgaagcctccccgatggttagtcc

SEQ ID NO: 6396 - DNA, 630 bp, Zea Mays
tttctatataccattttaggattcttttggtggccaaaaaagatgctgccggcctgctgcgcttgcgagcgagagttcagttcggtaggccagtcaaaaagtggtagtcgtactagagcagtagtagtagactggtagtgctgctgctgaatgctgatgcaaaattcggcagcggtgaattggtgcctggggtcggtcaggtcaggtggcagatttcagccatggtttgttggaaaggaaggaaatcaatcatcctcttggttcacgtgatctcacaccctctgcggaccagtcagtttatcacgagtggtatgtgcagtcagctcactggatggatcatgtgaaatccgtgacagcttccgcagatctggaaactcgaacggaacggaacggaacgggaaggcgtaactaggggctgctgtagcagcctcttggtaacagtgctactacagctcaggtgtccgtcccttcctcgctgcttcagtgacagctagtacgttttagtaagacagcgaaccaaactgtggcaaactttattactgtcattgcttgccctcgtcaacgttaagcatcgcccttacgtttagtaccacgtgctctctcagatttccgaaacacagccatcgaagt

SEQ ID NO: 6397 - DNA, 630 bp, Zea Mays
tgtcaggtcaggaaatggacgattgcagattaccgaacactactgcctgttggggaaaaaaaatggtgctcttgcatcggacgcaatggcaagttggcagtatcttatgcctttggcaattctcttgtggtccatagcggagtgctcactgcatctaaaatggtaaaagtgaatgggtgctgtggtgtgtggcatccaggcgaccttaatattctcctgtaattcgtccctttaacgaagaagcctgtcttgagagactgcaaagtgcatttggacagttgagttgccatctctcttccattattcggaccacttgtttcttcccgtctcctggaaatctctgaactgcatggatccatccatctcatcaagtggcacacttacttctcttcgcctatctgagaattaataactcttcgacacccttcaaaacctgtttgttgttccttgtacctgagtttctctacctgctgtttatgtccacccaacactcttttcttatgggagatcattagtatcgttaaatatatattttttcccccaagggccccatggtctcccctagatgagacacccttgcacttttatccttattatagtatgtgataacatattgccctctacgcactc

SEQ ID NO: 6398 - DNA, 339 bp, Zea Mays
gaaaggaatcggtatatgattccgaccgtaggactgaagacatgtggctcaaattagatcaccccacaagccaaaccggtaagtcaccacaatcattgtatgatttcaattctacgaggtcacgatctaatccagagcgttggttatggatccaacgccatccaactagagtgcctaagccccagcccctatctgattgctaccgttgatcaccggatcaatggtggatggagtctcgtcttccatacggctggcaacggcggcggcactgcccagcacggcagcgccatggccgatgaaagtgagatttccgattccctgcccaagctttgatgcaaa

SEQ ID NO: 6399 - DNA, 666 bp, Zea Mays
gtttgagtctcaggaagtcccccattctgtcttgcggtcttccaccattcggccattgattttccagatttcgagtgaggacctcgatgagtcgggtctgattggctagaacttgggctaggtctaagggtaggggtggaggtgcggggaggtgggtttcactttcttctctaacgacttccccttcagctcttcggggaaaacctgctccaatccctgaggcggtaggcgtggttttatccgaagccatctgccagggaagagggtcactagcatgcatatgcaaattgttttcaaccaagttattttattcattacaccatcacattacaagcataaggttactacatgtgggactacacgagagcgttcttcgaggtactagcgagtttcttgtctaaggtgtccccaaatgccttgagaagatcatcgaggctggctagggatacatcttcttcgtcggaccagtcatctattatggggggaggtagggctagaggggccttcttcttcttcttctcggtctagcatccctggttagtggtcttcttctggatcttctttttgggggcgagtgcctttagcttcttgtcaaagtctatcttcaaggtccgataggcctcacgggtgttggcctcctcgccttccactatgctgagactctcc

SEQ ID NO: 6400 - DNA, 685 bp, Zea Mays
atttataccacacacaccttacacccactctggaccgtgaacccgagtattggcgcggcgttggcgacgtggacgagtcggacgctgggctttctcttgtgcaggttgagtcatctcctcttcagctgtatgcggcacatctggcatgggagcagggctcacattccccatcccttgaagtcctgtttgaccctaagcaggtgcaccaggataacactgctggagcgcttccttgtcttcccaggtagctaaatcgcgaggcagaccggcccattccaccagtacctgttgtacaaggcgagttcccttggtgatgccccgagtttgctggatgttggcagggaactggattctggtagcgacgaaggcaaggaagtagaagcagtgcccttgaaccctttagctagcttcagctgagaaacatgcacaatagggtgaatacgactggaagcaggtaagtccaggcgataagctaccttgccaacacgggccaacacacggtagggaccaaaatatttaaaactgagcttgtgatgggcgcggggcagcacagaagattgcacatatggttggagtttcatgtagacccagtcatcaatagcaaaggagcgttcagacctgtgtttgtccgcttggcgctgcatgcgagcctgagcacgcaagaggtgctgatggatgaggtcct

SEQ ID NO: 6401 - DNA, 573 bp, Zea Mays
ggatacattacctattatacaaatacactacctattatacaatagtacaacctattatacaatacactacttctacttctactacaccattattcctgcttcccattgcttttggcggcctcgtcgtcgggtgtgggagaccattcgtcgaccagcctcatagaaggagggggctgaaaaaaggtctaactcaccaccaagcgcgtgtcccgcaacatgcaagggtccggcttccgactcatcaggattcgtaggctcactgggatgcagttgcgaatataatacatgaacctcttcatgtaaggtattgcaatatgtctgcagttcttcaacggtcaagttgagctcggctactcgagcttgagctttttgctccttgtcccatgcaagcgaatgggattgaacaacccagtcaagtgccaaatcccggtccacgagctgatctcgcagatggcggacatctcttctcaactcatttatgcggtcgccatctacgacccagatagtcgtcctgcggcggagttccgcttggagccgacttacttcagcttcaagatcccctataggatcatt

SEQ ID NO: 6402 - DNA, 764 bp, Zea Mays
cttctctagcaagttagctttcagttgctgacccacagctatccaggttttgtgaccaccagatacaattcttctatttaggatcgcttccaccatgatttccactccaccatcataccctccttgatctcccctttgcattccctatcactagtttgggttactcatctccctcatgacccttgttttaatatcttccttataaaatgtgcttcaacacctgttagcatctcacccgggttgccttaaggccctttgatatgccttaggagtgttcagtggcatggttgcaagaaagaatgtcacacaccccctcatcattctaggtgtgctgcaatttggtttatcattcattttcctctactcgtccctagaggttgccatgaaagcgttttcccgcccgctaccagttctagcccttggagaaatagtaaatgacaattcaaccacctaaataacttctatgcatggggccatggtaacatgtatgtcctgaggactaggaccaaactaggcagccttgctcaaaaaattgtagtaagcttcagagtcactatacttgaatagccttaaccttgccacttgttctacctgcatgctctttgctatggctccaatgataggtcttatgtccaacagtccaatgcacatggtaggtgtggggagcatttatgcttgtcaactcccgagaccatgctcttacctccatgtagttttctcaccgaccaagcctccgctccgtcaaaaaaccaaccagcttctgc

SEQ ID NO: 6403 - DNA, 699 bp, Zea Mays
cgacagcgacgacctccgccaccaccttccgcgctaacgacgtcgccatcacctcgcgtcgagccagacgctcaggtcttcatcgtgctcttcaccggcgacgagaacccaccaacaggtatgccctaatgccgaccctttggctccccctaaaccgaggtccctgaactaaatcgaggtcccttatacaaaccctgttttcaccctcgcaccttccgccgccgctccccctgctcgcctcgctgctgcggtgttgcctcgccacctttatcgtggccgaagggacgggatgcagcagccgcagcctgcaggcgcccgctctttcttggatctgctgcgttctgttgatggcggggcgggtgagaggtttctcgggttagttatttagaaccagtgccagcatcgaccatcgtccctaggctgcgttcggttttgtgatggacgcttcatcaggggaagtttgtggtgtgtgaaagtttactctatctatcaatcaaatcttgctggagcgagggttcctggtactagctatatctattttgatttttgcttttattctgttgaactgctactgattgtggcccgtggatggttcgcttgccagatgtgctgactgcccccctgtttgatacttcgattcactactgtactctactgtgtttttcagatgaatgtaccctacttgcttcctacttcgtc

SEQ ID NO: 6404 - DNA, 484 bp, Zea Mays
aattgaggtgcaaaccagtgcacgatgtggaccgcccgatctacgatcaacgacatagattagatctggcctcttcacaatgggtaggcaatgtgaagcctcagatccagatccgacggtggcgattttaaagaggtgagacgggctctggtctacccgatggcgatcgaacgcgccagatcgccccgaccgaaccggcactcaaaccctaatcccagccgcccccagggaaaccaacggccaacggccttcttctcccaccgcacaccagggcacgacggcgctctcgcgcgaaggcggtgccaccgctggcaaccatgggatcaacacccaagcgtaccaaactatctatcgatacgtgctaaatgcaactaaggacataattaactcgatgagggtctcttaccaatggatcgcacggcgtaggagcacagaccacgatggagggcggctccgcggtaacgaaaagctccggtgagcaatt

SEQ ID NO: 6405 - DNA, 579 bp, Zea Mays
taattttctaatagggttcatgtcaaaacagtgacactaaatgatagagaatattattacaaaattttagaaattggaatggttcaatttggagttaaaatgaattagatatgaattttccaagttctagcaattgtttttgcattaaaaatacatttactaattaatttattcattttaaacaggttctggactgggcatcaattctcagaaagctcaagggtctctgcgcaagataacctagactcagggaacagtggccaatggactgcgggttgtttcagtggaaacaggaggtctcttttgtgaatttaccacggtgaaggggtatcgtccaccgtgggccacacgatcaagtatcagtggccaagattagagcagcgcgattatgaatcggtatgaagccggaaccctccgatcccgatcctacggtctagattcagcgccatcctatccctatcgtgagccgctcgatcaagatctgacgatcggcattaaacacgagaaggctattcccttgattcatcagtaaccgttagatgtagatccaacggcgcaaacatgattaccctgagatct

SEQ ID NO: 6406 - DNA, 506 bp, Zea Mays
tgcgtttgcatatttgcaagtaccagaaattcagatcgccgtagctacacaaagtaggccacatcccacatgcacgcatgcaaaagagtactagctcgctttgcagagggaggggtaactggaactggaactggacgaggacgaacatgtgcgtggcggtatgcagtgtgctgcggtgaggcccacgtacttgtataatttggctgtgacgatgatgcatgcatgtgttgcttgctatgctgcctactagctgtcgtctgtgggagcagctggactgcatcttttgccgtatgggcgcttgaccggatagggccaaacaggatatgcgcgccaaccgtcgggtcaacccattcctgtttcctgccacggcgaggctgttaggttcactgtttggaatcccaaggcagcgcagcgcagctactgctgtattcttttcggttcggttcggttcgatgcatattgttctcgtacgttctttactgaataatacgtaatgcatgggcggc

SEQ ID NO: 6407 - DNA, 563 bp, Zea Mays
cttgggtatggtagtatgatatgttttagatgagtttgtgagttgtatggtttgatttggtgaccttattttgtggtatgctatttaggtttggtttgctaagttatggttagtttgccttaggaggaagccagattacctcggggaagcattcacaaccttgatttggtctccctatagctgcatttggagtttagggttcatggggagaggggaatagaaagaacaataacaaacaagaagacaatacgaacggaggaagaagagggtcggtgtgtggcctttagcccgtagactccgcgttgggttggatagctggcatccaccaatgtctgaggattgactttaactgatcatatgacattgaggttcatggggtccaaagtgtcaaaatggctactacgacttgtactgatgggggtcaatgttgcttgatagcgtaccgatcctcggatctcaacgtagtatcctaattaaaacatcgaactttagatctagttttagagttttttatgttaaaattctatttgtaaaaaaaggtttaaaattgagaagaaggaaaa

SEQ ID NO: 6408 - DNA, 554 bp, Zea Mays
cgacggtctacatcccgtttgaacctgatttaatcctacccgcagatatccaatccaatggttaacgcttcatcttcttccccccggaacccagtagtggtggtggcagtgttccctcccggtggagttgtgccagagtagaacgagccagtgcctaggtatcccaatgcggtcgcggctagagctagaggcagctgaggatacggtgaaacagagaggagattactcacccaaagcaaacactggaatatcccagccacggagcagtgtggtccacggcggcgtccttttcctccaccggcgaacgctcacgagattctcccccactctctctctctctgcatggtgcatctagatggccgaggggaagagtcgtgtggcctcccatttataccctgaggtctgaggttgttcatccaatccctgttgcaccgatcccagcggcgacgggtgttttgcggagttttattgagtcggttgcgcgaattgcgcaagcccgttgcaaggcgccgggatgaaaggtaccagcgcacaggggcggcggatgtagcctg

SEQ ID NO: 6409 - DNA, 499 bp, Zea Mays
gttacaaaagaatgagatgctccagaatcaaataaactaatgcaggtatggagttaataaggaacataccataaaccacattagcgtcctctagaactaattctgcgtcacatggttcactctgcctttactttggttctgctgatttttaccttgcacattgccataggcaggcgtattctggtcaaacctttgactggtgttcttctagggagtttgtggattgtgttttgggtagttattggcatagtggtcaatttcttcgcacttgaagcatccattgggttggactggggtaattggattgttgtttctagccggtgtgttcacagcgcttccttggcgattctgcgagtaatcactagatctctgaccttgttgattagtcctttgattttgtgattggttgcttctttggctttgttgtcctgaacgttgcatctgataattattatttgcactctgatttccagagcgatactgagaaccgtgggagttg

SEQ ID NO: 6410 - DNA, 885 bp, Zea Mays
accttaacaacagataatactgctctcatacgaagaaatcatcaggagtagagaggatacaataggtctctacaatatcttcatatttctatcacaaattaccaacaccaacaacttagtggtcaagaattatggatctttcggtgccaagggccagtgacaaattaatgcccaatttcgcttcaagctctatggcgatgtgggatttcatggctattttctactcttcttacttctggtagatcagagatagattacggtaagcatgtcaaagagtagaatccagtgtagttcggctacataaaccccaggtatgtgtccattcaggactgacctttaccattagcttacagtgtataccaaacttgttaaaggactatcctgagtcaattcagtgactataagtatttacatttccgagagatgtatgcgacacaagcatagaggtcctcgatagaacgagtaaagtggttcgacgggaacacactatggttttcaccctaacatagtgaaaaatttctcagaataacctctcggtatactcgcaacttcgtgttgctagcggttacatgtccttttatctcatagtttgcttcatgtcatccagcgacaaagagagcaatgtgctaacatctggttgagcaatgtatgactgagattctagcatttattcatctgataaggtcttattgcttactaataaaatctcaatttgtgatattttctgcgccaaaaaggctttcatgcattatattatataccttcgagttacttcgagtaaaactttatgcatgaggagagagcagagaattaacttatctgtgtttcattgtatttcgaattaatttcccagatttaatatagttgttatggccacttgacgat

SEQ ID NO: 6411 - DNA, 307 bp, Zea Mays
tcgaagcctttgaacttctcctcgagcttgcgtacctcaccgtagtatgcacacatcttcgagtcgcgccgctccatcgccttgatgactttgtcgacaaccactttggagtcgccccttcctaggaggcgtcgtgcccctacctcagccatgattcggagcccattgacgagggcctcacattcggtgatgttattggtggcatcgaagtggaggcgaatggcataacagagcttgtgtccttgaggtgatgtgaggacaacacccgcgctgcttccggtctttagataggaaccatcaaaataca

SEQ ID NO: 6412 - DNA, 740 bp, Zea Mays
gcgttgtcatagaaaaaggaaaacgacaaagctggttttgtgattggagcttccgctcgttactccgttgagtccgttgtttgttcgtcccgccttgttcggttcctagtacgctttctgtcctgaactttaccaatgataaatgagtggaagggaaaggaaaacaggaaaaatctggagaggggagaccaaggtaaggtcgaggctctctccctcgcttactgtatttgtggcaaagagcattgttgacaacacactttaattataactgttaggggttttacatagaaggcgaggatccgcttcagctggtcatctgctataggctcttttgccataggcattacatccggtgtttcctctagtcctaccatgtgtggtgtcccatcctgcttggactattgacgaagctatggtggccagacagtcctcgttccccctgtcaccaagggagctactcatcatctctcctagaggcgctactcgtcatcgctcctagagggatccaaatatgagtctgattccatgaagagagagtcatagatgaggtccccatcgccaccagccatctccacaaactccaggtcgtctatcctggggaggtggccgtgggacacgagggcagcgattattgtcggggcatggcgcagtcgaggtggaaaggcgctgaagccgccatggtagggcatcgtctctgcgtcacacaacatagagagctctacgtaagatgtaaagaaaac

SEQ ID NO: 6413 - DNA, 384 bp, Zea Mays
ctttggtggtgtgctagttgagggggtggtgggagttgtagtctttctgggtggtgaggtagggactggtaattttattgatattgtggtagggttggtatctttcttgatatgactggtggagggggtggagggggtagttatgatttcttgccttcggttgctgatcttggtgaccctcacattctttcggcctccatcctatcattggtttccttggtggcgcggcagtccctagttgaatgatcaacatcctcgccgtggaagacaaggtaaggtctgtgagtggggccacggctatgccccttgcctcttggtgctctaccatcctccttgattgttgattgtgatcatagttgcgtgggcgtaacaccctgaattttt

SEQ ID NO: 6414 - DNA, 587 bp, Zea Mays
cttattgtcgacacagttagtaagattaagatccattgttacttgctaatttacatctgcttaaacatatcatgcataagagcaagtttcggtgctaatgcagctaaaatgaacatatcataagagcaaatttcgatgctaatgcagcttaaataaacacaccataagagcaagtttaagtttgcttctatctaagccaacgggatggagatacacaattttatttagctgttccatgaacattgtgacatctggccatcatgagcaggtgaatttgcagtggcaaacgcccatgggcttttggaaacttcacatgttgaataaagtcaaaaggacagccattggtaactatggaagcatgtgaaacctgttaatactacagcctaacaaacagtagcacagttctgtacagaacagtttgtgtttattttcttgccatttaattccaatgtatttaggcaatgccaagtacagtcatgcatgcaggttactgcaaaggggtatgaaacattgtcatactgatgaccacagtaaacgtatcccctgttttactcagaggggttgtgattttatacggaaactctgac

SEQ ID NO: 6415 - DNA, 522 bp, Zea Mays
cgccaggatgcttgggcccaggtataatgagacataggaacacaaactcgtatttcatgcaaagaataggtggaaggttgtacggcatggcaatgataggccaacacgagtatgacgtagcggtcatattgaaagacgtgaaaccatcagttgccaagctgatacaaatatttcttgcatcgatggcgaactctgaatcaaagttgtcaagagccttccatgcatcaccatctaacgggtgcaccattaacccatgttgtctctctgtatgatctttgtgccacctcatgtgcatagcaatcttcctcgagataaataaatgtttcactctaggagtgagaggcatgtaccaaagttgtttatgtgcaaccttggttaccaccttctccccatctatatttacaatctccacgtacctcgacttgccacattttaagcacttgtcctctctgtcatgttccctccaaaagagcatgcaactgtcctatcaaacatcaatcttctcatgctccatgccgagat

SEQ ID NO: 6416 - DNA, 354 bp, Zea Mays
gtcccatccccggcgctgtgcgccattaccgccgccactgtgcacctcactggcaccaactcgctttagccgctcccctcccccgggcgcctataaaaaggcctccccgagctccacctctccacgcactagcctcggccactctcccaccccctcccttgagctcaatcgagctagcgccgccgcctcccttcgctccggtgagctctcctcctcccctctctagtagcctagggtcaaattaagttagctcactaacttcaccacatcaccacagacacaaaacaccgcatcccaccccctatcacacccaaggcctcagcgacctcaccgccgtgatagccccaccatctc

SEQ ID NO: 6417 - DNA, 612 bp, Zea Mays
gttagaggtaaacagagtggttttgccggaggtgctaacctcagccatcattgcttgattatatagaaagatgagatgagtcacattgattacataacagctcattagagcttagctaatcagataggagccttggcagccgcacacacctgttgagctgctcaaggtctttaatgactataattaactagcacaagtaactaggagagtgcttaggaaacaggacttaataacaacatgcgacactttcgatgtgggtttcggtgccgttctccaccagggggccggttctctgaccttctttagttggcgcttcgccacctgtcatcacaagctagcgtcatacgagcatgaagtcataggcttggttcaggctaagcggcattgacaaccctacctctagggtcgtcgcttcctcgttcgcaccagccactacaacctcaagtttctcttggaccagcaactatcgactgttccctagtactagtggatcatcaagctattcagcttcggtttttgtggtcaagtatcgtctcggtcgcctcaacttggtggcagatgccctctcatgccgcgacaccggcactagggactttgcaagctgcacccctc

SEQ ID NO: 6418 - DNA, 572 bp, Zea Mays
agtgccgaggcgcaggctgaagctaatactaggtggatgaaagataaaactgcaacaattgaggctggaaccaaggcgaacccatagtgccagttgagacgaagcttgccacagccgagcaaggggccgaagaagtacctccaaatactgatatagcttttgagagaaatatggctaaagaagctgaatcccttgctcccgaagcaccttccaaatatcttgattatatcattcgacatgcttcgggaaaaagattatctgaggaagaaatttttgaagctaaacactatgcctgagaactgaagtacccgaaaggagccctagtgtttaatggtacggatgaagatgacttcttgtattgcctcccagacaacaaagaattatccgtctgccgggagatagccagaagtatgggtttcccgaagctcgaagttggcctctgtgccatggcaaaggacgatcttgcggatagccttgcaacaatagtctgaaggtacaaaaattgtgaattttgaagtttatgaattttgaattagtcttttgttcttatgttaatccattcattcttttgt

SEQ ID NO: 6419 - DNA, 600 bp, Zea Mays
gaagaaaccacatctttacttttttaacacaccttttttcattaaactttactggagaatattgtatttatgccaatcatatatgcctgagtcacaaacacaggagcaaacttgcctgcttagaggactgtgactcatgatcaacgagcattgcagccaaccttcgtcgaccactgttatctgcatgagctgccactgcagcatatgatatccctttacatagcctgagctgcgacagaaagaacatgtaatgatgtaaaataaggagacataattgcagtagatgtgcgttaccaggtactaatatcaagtataagcctggtgtgacttcggcaaacacaaaccttatcaagcagaccatcaagaaggactgtatctggaagagttgttgatgctgttatcttctcacatgcccaatgcattatcacaacctcctatgaaaggtttaaggtataaatggaaataatattgctttaccaagtaatttatcgtaaaccagtgaacattccaccctactttacaatatcgagttggattaagtgaaccgatttttctgaaagtaaccttgttgtacatatgacaagtaacttagaacaaaaa

SEQ ID NO: 6420 - DNA, 1180 bp, Zea Mays
atgggacggcgggttgatacttaagtcttctagggtctcttctgaaaaatctccacagcgaaagggtatccatgaattctggccgttggatccaactctaagggccacgattagatccacataagtccgaaccggtacgcgttaacagccgcaagatcggagatcgacggctacaaattaatggaacacgatctgtttggatccgcaggataccgatccgacggcacagatccaatcgcctaaagcggtacgcttagctaatctgggccgtccaattgcggaatcaacgctccgaggtgcttcttccccacccgatgaggccacagtggagggaagccctgcggcggcgcggtcccgaggcccagacctcgccggagcggccaaaccccgttctagcgccccgttactcgagcgattaggtgctacgcgaagccaaaggaagggtgaacttgattgtggtttcggtaccttgaattgagatggcaatgtcccctaatcacgcaccgcagcggcaccacggcgttacatgacgaccgacgagcaatcaagcgtgattccgccaccatcgcgcgcgcaaacccccaggggaggcccgacgagcatcccatgtcctgtggtacgccccacggtgccgccatagctgcaggggccctcctctccatctcgcgacaagggccatcggtggtgggcatggacagcagcggccgcgggtctgggtttcggcagccgataagggaagggcgcaggggaaacacgacgcgtgatttgtatagcacgggggaaaggagtccgcgcgcgagtaggccgaggtttccggcgagattggtgcgctccaattcgatcggtcgtggtgaagaaccctggatttccggtgagttctgttaaatcggcgccaggaaattcgccatctgttagcgctagaaacgaaggagagatagggcgagagaatcgcgaggtttcggtaatctcggacatggaatccgcagcgtttgctgcatcggttgtgggagaagatgaagctgctcgcgtaggggtgtagctgccatgcgggtcccacctggaagtgccccaacaggaaaagaaaaggaagaggagcagagtgggctggcgcggtggaaacgtagtattgggccaaggcgcgcaagaattcggcccaaggtgagtatttcttttttttttt

SEQ ID NO: 6421 - DNA, 1135 bp, Zea Mays
ccacacttctctctccaatttagcactgattgtaacatcttctcagaagatgacatgatcgacttagggggttgtagtctagccttagattgttatcttccataatatgttatgtcagtgatccaatggacttcatggaaataccatttcattgtgttgtgtgctgacaccgtcatgttttttttgctattcttcaccaaggatgtgacatcatgcttattcgttattgattcaaagcccatatgcaattgttactcgttgtgcaattaatactgttagaatattaattgttgcctatatgtgtattagagctttatatatattgggaccaatccattttctgcatgagattgggttgaacctattggcgcctagggtttccctagtcacttacctctaggactatatatgtactcccgtacacataaatagatgtatctaattctacagcaataccttctctaacatggtatcacgaatctaatctcgcttctgctcctcccatggctgctgcctctctagggcagccaccctttggggccaccgccacccttgtttcgcgtcaccatagcaacacacaaacatctcctcccacctcctgcactcatggtagggatctcatcgactgtcgaggtgtacgcccgcgctgaggtcacgaccttcgcaagaggatcgacgacatgcttgccgctattcagactgtggaaaaggaggctgccaacacacgtgctcgcatctaggcagccacccttctcaaacgagaaggctgtcgtcgccgccctcgagtaggaggtcaccatcgttcaatagggtttgggcctacaacaccacatggccgttgacccccaccttagggcacccccataggatgaccttgttgtagcctatgaggctgctatcgtcaacctccttgtccaggccccatcgaccacatattgtctagccctctgttagacatcgattcatgctgggatcgaatggactacgttgtcatctccgtgatcttcagcaccatctcccccaatatatgtcggatggccagggagcaatggcacggcacaccacctctggctcactctcgagaaccagtttcttatgaattgtgacctgcatcctctaactcaacgccaccttc

SEQ ID NO: 6422 - DNA, 552 bp, Zea Mays
ggcgtgtgtgccacggttcggcctactggtgcgtgttcgtgtaccacggttcggtggcagaacacactggtggcagaacatgtcagaggcatggcagaacacactggtggcagaacatagctagatggcagaacatgtcagaggcagactattattacagtcttaataagtagtagagatgagggactaaaccaatttccctcaatgggtggctaaaagggactaaactcgaatttttcctccattggccttatgctccctacctcacgtccgctctccattctgctgccaaccttccagcgtcgccgtttgagccgttccatcttccctgcatgttccttcgcccgaactccaccacgaacccctcgtccgaactccaccatgcgtcccttcgctcgaactgccaaggactgaccagcttccctgtgcacatcctcctccacgcactggtttccgccgaacgtcggtagatgaagaacaacagcaacctccgggacttattgtcccaagttggatcttcctcctcgagtagctaggaaaccccttggccac

SEQ ID NO: 6423 - DNA, 439 bp, Zea Mays
agaagatgcaaaatgatgatcaaggtaccaatgatgccgacaaccagttggtgcaggaagaccagaaggctgagcaccccccttcccctttcattatcactccggccccctcttgggagagcatagttaatgttaagggaggagtcaacctaccagagtaatataatcttagttttgctcttttattgacttcgtcttttcttcatatataataagtgggtgattcctaaacatactcccgtgctgcagggaagatgctagagatcccaaattttggtccagaatctgtgtgcacaatatggccaagctttctagggaggcaaccacattccgccgcatcttggaatgtttgtttcggtactttggtaacaatagttcatggttatcagaaaatggacttgctttgtgtgtcttgttggacatgcaacttttagtagaa

SEQ ID NO: 6424 - DNA, 354 bp, Zea Mays
ggctatctgacatggaagtgaacctctgaaatagattgaagatgtgcatccttggctatgcggtaatttaaagggcacggaacaggcaaaactcacgcatgctttggcttaaattcggagatgccaacactaaatttttccaccggaaagctggctccaggaggcgaaaaaatttcattcaacggttgtggaccggtaatgggtgggtcttctctcacaatgaaaaagcacaagagctacaaaatttcttccataatgctttaaagcggccaacccctagatctatcgaccttaactgggacaatatctctgaccagcagtttgatctatcaagccttgatgcaccgttcttcg

SEQ ID NO: 6425 - DNA, 711 bp, Zea Mays
ggatcgtcgccgccgttaagattcgcgctcactggtaaccggatagcgcttcggggcaaaagatcttcgcctggggataactccggcagctggccgccgtaccccccatgccttacggtcggcgcagatcagttcatcggcaatggctgcccgttggtcgcctgccacgtgctaaagcgttagaccacgtcgctgtaagtcgcgtctcacatgcacggtgatcgccggagggagcaccacggtgaaaaccactaaacgcttgcgccagtgctcctctcctcctccgaccgccgggcgtctcgcccaaattcatcagtcgtcgcttaacaatcctataaagtgatggtcagggctgttgcgccatgtaatcacgaagccaacgcaccagctattgcttcaaatcactcaccagagaccacgaattccttacttcccccaaaccggttcatcccaccgcaagaacaccctcgtcgtggctagcgcaattcaggttagttcttaccctcttctccctcgtttaagcagtctcatgcgtctgtgatgctcactgacccacccaatcgaattagaccaccaccaatcgtcgggaacgcgttgttctttggatcatccgcgcggtcaccatggccagggacattagggtggccattcatgcaattgacttaggggaaacgctgattggggcgtgaattcggtttcggccgaagtagg

SEQ ID NO: 6426 - DNA, 572 bp, Zea Mays
cggaccgccacaccactctcatcgagggtcggcaggcgggccaggaccgctgaccgcaacccaggattgtcatagagcggcgaaatcccctggggaagcatcaaggattcagggataaaagcctcgccggtgacccccctcactaaaatttccaactcctcccaagtcagatcggtcccaggcccacagtggatcctaccaatgtcgctggggccggtaaaccagcaactcagacgtggcctcccctgcagcggcatgactcggcgcttcaagaaatccctaagtacgtgcattgaggtcaagcctccaaccgccagttccctaatcctgtccaagatgggcccgaactccggcacgaggcatggtttcaccctccattgtttccgctcgaggctgggcccgtcactcggaagagcaaggaggtcgctggcctcagcgctggcgatcacccagtcacttcgccagttctcccaccacgcaccgccaagggaggcaatgtaggtcactgtcgggtctgaccttgactggaagtagtaggccccaaggtgatccttgcccttcctagatctcac

SEQ ID NO: 6427 - DNA, 787 bp, Zea Mays
gaagatcgtgtcagaccgagattcacagtttacttctcggttttggaagaagttgcacgagtgcttggacacatagttaaatttcagttcagcctaccatcctcaaactgatgggcagaccgagagaaccaaccaagtattggaggatatgttaagagcttgtgctcttaaacatggtggcagttgggataagagcttaccatatgcggagttctcctacaataatatctagcaggccagtttgaagatgtcactgtttgaggctctatatggcagaaaatgcaggactccactgtattgggatcaaactggtgaacgacagttctttgggcctgaaattatataagaggcagaagaacaagtacaaatgataagggagaatttaagaactgcacaatccaggcagaaaagctatgctgatacccgaaggagactactagagtttaaggaatgtgatcatgtgtatttgaaggtgtcaccgatccggggtatgcgaagatttaaagttaaagggaagttgtcccctcgctttattggacccttcttgatcctgaagtgagtaggagaagttgcatatcaactagaactacccgatcatcttgcggatgtacatgatgtcttctatgtatctcaattaaagaaatgtcttagggtacccgaagagcagctacccatggaggatcttagtgtacaagatgatctgacttatactgagtatcctatcaagattcttgatacactgactcgtgtcacaaggagcaaagtgattaaaatgtgcaaagtacaa

SEQ ID NO: 6428 - DNA, 813 bp, Zea Mays
cttcctgtggtgcttctggaggtattctgatgggctggaatgcctccatcttcaccgggcaggtccttagctcctcaaacttccaaatcactcttggtttcacgtcgatgcacaatgctaatcaatggaatctcactacgatttatggaccgtgcaaagggcaggagaaacaaaattttattgactggctatacaaccttcagatcgcagatgatcaagattggatgatagtaggcgacttcaacatgtactgttcaacagaaaatagaaacagggagggtggtaatatgacagatgtgttcacattcaatgaaattattagttcggtaggcctgcaggaaattcccctcaaaggaaaaaattacacttggtccaatatgcaagaagatcctctccttgaacgaatagactggtgctttacttcaattcactggattagtgctttcccgaacactttgatgcttctgctctcaagaccaacttctgatcacacaccgtgcagaattcagattggcacttctattccaaaggcccaaattttccgttttgaaaaccattggatccaacaacctggattctctgagttggttcagcaggtctggaacattaaccaaagagctaacaatatcgcctcaagaattgcagctaaattcaagcttttgcgacaagtgctaaaacactggggaaaaagtctatctacgattaatgacaccataatctcctgcaacaatgttctccttgtattggatagattagaagagatcagacccctatatacacaagagttcaacttcagaaatattttgaagaagc

SEQ ID NO: 6429 - DNA, 579 bp, Zea Mays
ggcaggaaatgcaggactcccctgtattgggatcagactggagaaagatagttctttggacccgaacttattcaagaggcaaaggagctacacagataatagaagaagaccactggaatttgaggaaggtgatcatgtgtacctcaagatgtcaccacttcgtggaatgaggagatttaaagttcagggcaaattgtcccctcgctttattggaccctttagagtttttaggcaagttggagagatggcctatcaactcgagctacttgataatctattagatgtacataatgtattccatgtgtctcaacttaagaagtgcctccgtgtccctgaggaacatttaccaatggaagagcttaatgtttagggaaatttgacttacacggagtatcctatcaagattcttgacactttgactcgagttgcaagaaaaatggtgataaagatgtgcaaagtgcaatggagacatcatagagaagatgaagcaacatgggaaagagaagaagagctttgtatagattttcccatcttttccctagttctttctaaaatctcgaggacgagattcttgttaag

SEQ ID NO: 6430 - DNA, 554 bp, Zea Mays
aagaaattggagctctctggtggctaatcggaggcagtaacggatgctttggcttcgtgatgacttaacggagctaggggtgtgctcaatttatagtatcccagagcggtggctcccaatttggtcatggcgtgctggcggccggagagagggaagagcactggcgcaatagctgcgtgtctttcaccgtggcaggcttaccggcgacgagctagcaatataaagcggcttactgcgacatggtgaagcttcaaggcacgtggcacccgatcagcaggcggccaactctggtgagcttatctgagccggtcgtaaagcaagggggtacgatggcccgcctctagcgtcatccgtggcgaagatctttttaccctgaagcgttatccgggcaccagtgtgcacgaatcacctcgccggcgtgaatccaggcgcggggtcgccggcggcaaggtgtactgcaccagggatcttcttcagtttactgtactattagaacaccattcagatcatctgacagagaggtttgcagcgcccagatgtccaacttttttgtg

SEQ ID NO: 6431 - DNA, 366 bp, Zea Mays
gggcgacaaggacattggttaagcgaaaaggatcgggaaggactgcggcacctactgaggtgacgggtagggcagatccgtttccaacaacgatggaagaaggaagggaggggtgggaggaggtggaagacaagatacctacgtccggggtggtgtggtaggaggcaccggagtcagccacccagtcagaccgaggtgggtggggtcagcgtcatcgtggaaaaggagctggcgaaagactgcgtgtcccacccattggtccaggtcccccacacgggctgagccggaggccccaggagagggaggagcccctgctgagaccggaggggagccgaggacgcagccggtgggggagcgacaaagaag

SEQ ID NO: 6432 - DNA, 293 bp, Zea Mays
tttggttgactcattaagagtagatgttgtctgtttgcaagaaacaaagttggttaattgcgatcgtcgcacagttttgtcaatgttaggcgctgattttgacaataacttcatttgtctcccctcggttggggccagtggtggggtgctgattacttggagaggaaaattgggaagaatcgttgcctctcgcgtggactcctttagtgtttcagtaaaattcaaccctgctgatggcgtggcttggtggctcacctgcgtgtatggtccgcagggtcatgacagaaaaattg

SEQ ID NO: 6433 - DNA, 851 bp, Zea Mays
gtggccgccgtcggccacatcacgcgatgtcgcgggatagtccttggagtgctgttcggcgtgttcaccggagcactccgcacgtcctcagcacttacacgggcgacgccggtggccggagttgggttgattcctcgccgaagtcatgggtcgccgcaacttcgccctgtccgtgggggattccgccgcctcaagccccagttcaagctcttcttcgccgcccgcatctccggactgcctccgatggagctcgtcgccggggtatctgcaaccggtggttgacttgctcatcagggattcctcatctgcaataggccgatccgccaaattgcggcatcatgcggtctgcgtacttcggtgcccaattgatggtgtgtgacccatctagctactctctattcttcgcataccttggacttgtggtttgagcgttcggattctaggacgtcgaactggaatcgttgactatggcgccgccgtggtcggtgtataccgccaccgcaaatcggggccgtgctgccattgctaggtgcgttaggagcatggggcgagtatgtccgttggatacgcaatcgacggatgagattagagctaggcataacagttcgcgtgatcgaggtgtagccgtcggattgatatctgaggatacggggggggggagagttgttaagcgtaggatcttgatctgatggctagttttgcgtaccagttcgtagggctcagatttaatctgagcgcttgaactaggatccaacggctgaaatccatccatacctcttcgtcgttgcctttttgctaaagagcccttctaaaaattagaaaacaacccgcgacccactgctgtgtaaaag

SEQ ID NO: 6434 - DNA, 840 bp, Zea Mays
ctgtcagtgttggtttttctctacttttgggcatcatagtttttgttcaagacgtttttagccctgggttgttataccaaagtgatagagcttggtttggatagtaattttggttaagtaagtctggtctattgttaaggggaatttaaaatcaaagggcttaaacagtgaggaggggaatgggagcagcaggcctgatttggttgaattcagagtttcagttggtaaataaagaagatccttttccctgcaagtgttactttaaatatgtggatggagataagagtaaaatgcgtggccaagggagatgcctctccccactgaaatatctaagttttggactgtctgggaacagtgggtccttatctgctctcctctatgtctgaatttctgggcagagtggatatttgtggtgtgcctgtgaaccagcccaagttcgatgctttggtgctgcttgcatgttggcgtggggcttggaagcttagccacgtgtttgagccatgttgtgctggcgccatcaaagtcttctctactgtgaaccggccgagctcaatcactttgcactacccttttatctagtcgctgcagggccagggcagtgaagtctcttctcgttcttgagttctagcgagagtgcatcgtgtgagtgttgtggttcatgttcacgtcggtgtttactctccccggccatcaggttcgatctgctcttgttcatcgcatgtcaatctccttttttggtgactgagctcatcagtttctcatctcactgtggtcgggtcgtctcgaggagttgctcacctgtgtcacttgtgttcggtaatctccttaagccagtgaagc

SEQ ID NO: 6435 - DNA, 453 bp, Zea Mays
aaggacattcagggtgtggaaaatatgtaatctagaataaagattttcagtaattaccattggaaatgaccctaggcttcgtctggccatgcaccaccccacttccttgctcggacatgcatgcattcccatttgttgccacggtaccaccttggcatggattcctacattgtactgatggaaacacaagtttaattgggctacatgctatcgtcgtcgtgcaagatacatctctacatggttagtaattaccaatgttggtgttctctgcagtcatatgtggctgtgtccaatcgtccccttccccagcgtcaccgatagtatcatgttctgttgcataagctgttgggtgtacaaccacagaggtatatgttgggtcctctatggtgagagacaccggattcaaagtgtcagcttgtagtgctctacgtttccttatgtactctaacttcc

SEQ ID NO: 6436 - DNA, 1363 bp, Zea Mays
cgcccaccgcggatgcggatcgggtatgaactttgccatccgcgtcgcttttttccggtcaacttgatgacgctagtggtcagcttgatgtctgtatgcgtgcatcatctaatgcttctctttccacctttttctgggtttcttggatctcgtcgttcgatcttgcgtcaaatgactcaaataacgcttccttttagtccctaataaaaaaaatctttggtggattagcagctattatgtgtccgttcccttgtgtggttaacattagctgttttcagtgctttccagtattgctaaatattactacatgcctttcattgacaaactgacagcatcagatagaatgcaagagtgggttatggagcatctccctccttccatatatattccacaatgtacatcatcatcggtccttctatcagaaacagttcgatactcatagtctaccgctaagcactctgtagttcgattgtagtttggtagtgtgctgttaagtcttggttgtaagttgcatttttttttttaaaaaaatcttcttctccacctacttttgttgaattttcagagcgagcaagtaaatgcagccataaaagctgaatccttgttttgtgatagtattgtctgtacgacccttgcaattgagtattttctggtactcgtttgacttatgttgtactggatatatggttgatctgtaggttgccactgtacagtgctgttcctattccggctttttgttgcgtgggtgatgcaccatgattttctgttgagcagtaaaaactaaatataattattttgtggcagtggtatagaaaattctggagtaggcctcattcggtttgaaatgctttagtgtagttcgcagatggaagcatagccccgaattccagttatattagaacatcactgattgattatttagagtgtccaaattgataagctaagagaaacacaaagaatattaaaactagtgctgcatggacatctaatatggcccaaagatgagctggctgataagtttggcacacttgcatgtatgactgtcatctgtgtggtggactgagcttcaatgtggacatgtacatggaattagaattttatactaaatgattgtgagtttatttccttttaatgattatgacattttccatcctaaggcctaagggcatactcgtgcctttgtctcttgtatgctttattttctttgtttgtggtttctcctaatatggcttctggtaggaaccaccgaactacatcgtgttcttgagtatttagcatgcttgtagccttgtacttgatgtctctgtttagttatttattcacaaaacgtggagaaatcttgcatgtattagcaacagcaaag

SEQ ID NO: 6437 - DNA, 437 bp, Zea Mays
gaaaaaacagaatattgctattttctctcggaattaaggaagaactcttccgtcctcctgcttccgatctacttcttctatctccacatttcctatatatgaaaggcagtagaaaacgtcgatgcagatagtatccacgtcatcttttattttcctgatcgtcggatcacaaatgaatggttcagcttctcctacaccaactagcctcttcattcacacgacaaatcacgaagcttccagacgaagccaaaacctctcagctcccagggcgatgtcgtccaagctaaaaagttcggccaccgcgacggcggcgacacttttttgctgccgagtcacacgacgccatgggcaccatcccctccgccactcccctcaggcctcaaccagcgccactgtattggttcagtctgccgccagaagcggatgtagcgtcatcc

SEQ ID NO: 6438 - DNA, 662 bp, Zea Mays
aaaattatatcgaaccaaaataagataaccattcattcatctttcattgctcgtataggtttttctgggttacaacatattaggggatccaccctacaacatagttcaagagttggtgccaaaagctaagcttacgtggtcttcccatcctcctaacatgtttaatttttacccatctaaccctaagtagcagaggcagcactggccgcaggtgaagaggggcactccggagtaagccgtgtccaaactggaagctggctcaatctcctcgggatcctcctcctcctcctcgttgtttcggtctgcctccattgcttggttcatgtcctggtggtgcatttctagatgagcgttggccaagctcctcttgcacatcatggagttgattttctaggacttcaatggtgttgtcccggatttccacctgctgctccaactcttgggtgcggttgctcatttgctcaatctggagatccttctccaccaattctgaggacagatcgaccatgaagacctccctatcatcaagggtagtctttgcagtctaagcgagcccagtgaggtgtgtcatagggtcgctttgcagggcctgcaggcggtacaatgcactcatgcattggacagtgatccacccaacttgtacgggatgcatggcccacaca

SEQ ID NO: 6439 - DNA, 466 bp, Zea Mays
ctatatcctgctaacaaagcaatcagcttaagtcggtgacaacttaagtcggtgcgacatgctcacgcttactcgacttggggtgaccactataccccgctaacggagcaatcgacttaagtcggcgatgacttaagtcggtgcgacatgctcacgcttactcgacctggggtgaccactataccctgctaacgaagcaatcggcttaagtcggcgatgacttaagttggtgcgacatgctcacgcttactcgacctggggtgaccactataccctgctaatggagcaatcggcttaagtcggtgatgacttaagtcggtgcgacatgctcacgcctactcgacctggggtgacaactataccctgctaacggagcaatcagcttcagtcagcaatgacttaatacgatgcaatatgctcatgactacttatctttggatgaccactatgccctaccaaccaggcg

SEQ ID NO: 6440 - DNA, 849 bp, Zea Mays
caggtttatttgacaaaagccaaggagtctcttatgcaaagtgtcggccgaaggggtatgggtcactatgatccgtctgatccttcacctacgaccttgattagattaccacttaaaacaaaactgtaagcaataacaatcataggatgacagattagtggtccaaaatttgtccacgacacacgctggtcccagccctcggatcttggatcaatggcgtggatcaagatccaaccggtattcacctgatctaatctcgtccgctcttttgcaatccaacggcctcagaccaccctccaccccatgacacgggggcgtggtggcgcctagagtcagcggcgacgctcgtggctggagaagatgatgttgtgccaagagcctcaaatcccaatctgaatggtgctatgcgtagaagagaccaaaacggactagttaggagtgttcttagcaaggtgggcgacacagggatgtgtggctttgtccatgcgtggcagcatggcggacaccgacgtcggtgagaaattcacacctcccagaccaccaatggtgcccagagaagcgacaagcacccccgtggaaactctgcgaaactcccggacccgattccattgcttttatgacgatggtgtagagctctatttatgtgcgaccgcggcctaaccctccctctgctcgacgacatctctccctcacacattggcattcacgcccggcactgctggttgctatggatgggtggccaggggaggtgaccttatagcgcagagacgcggggagagcccgcgcggttggtcaatcggcgagatctccgcacgcggccacgacgaggttgttacgaatggctcagag

SEQ ID NO: 6441 - DNA, 289 bp, Zea Mays
tatggctgtttgtgagccacaagattagatttggatggcccagatcgatcccgagcccataacccgtgcagaccgcacgattgaagattaatggcccgtgatgtaccccccgccagagactccatccaagcgttcgatccgcacggacggacaggattcaattacgccacggggtcaatcctggctgcccgatccaaccgatggtccagattcacttactcgaagcggtacacatactgtcttaatcgtgaccgttggttacgatccaacgaccgacgctgaccactcc

SEQ ID NO: 6442 - DNA, 343 bp, Zea Mays
ggcaggttgtgccgtgtggcaaaggcgctgtcgtggctgtccatcgtcgtcgctgggtgccagcctgggaatggcgaaggcagggagtttggggagaagatgggtttgcgccgtttaatcgtggcttgaatggcgagcttggagctgttcgctgccgcgtctatggtgctcggccacggcgggttagctggagaaagtaatgagagaagagggagagaaccggtgtggttgaaggcgacacctgggacgttgattttatgattaacgaccacgattagaactactgacccctttggccagattaaatcctgggcgtggggatcagatctggcggtcggaatcg

SEQ ID NO: 6443 - DNA, 416 bp, Zea Mays
agccacgacagagctgttcacggtggcgcggcggactaatttgggggaaaatggcgtcacggcgtgcttggttgaaattgagggcggagcttggggctatacggcggcaagggactctagttttaccgtgctcaaccaatttgggaggagggggcagaggcagtgcgaatttaggcatcaataaactcactgtgtgtgcgaagttcataccccgccgtggaccaccgtgctatttatagccacggcgacccggcagacgatctccggccccggatagctttgctagcgcatgtttaccacgtcggtagaagacacagtgagggagatcgcggcatgggtgacaccgcggcaaagtcactgggtcacggtggccgctggtgaggtctccggctggactcgggaaatggtgccacgta

SEQ ID NO: 6444 - DNA, 500 bp, Zea Mays
cgccagcatcaccctcgggggctaggtttcctgcaacagccacctctgaggccgaaggatcctcagtcacctccatgggagtcgggcaatcctaaccaacttcttgacaccgaagactgccttccaaagtcgacgatgcgcgagataccgcccgggatacctctaatcccacgcctggattgtcaaagcaaacatccatcatatcaccagcagtcggttccaacagcatatcttcaggaatgacatcctcaagggcttgatcaaaatctgttatggataattcttgaaggctaacaagagcagacagagctggagaaggaatatcactatcccccctactacctctataacgccggctattcttacgaattagcgggacttcttcttcctattcttcgtcatcgtcaaaaattcgaacgatagatggtgcacgatcacacccattagggtcaacttcaacaaggttacacccattggggtcagtttcaacaggatcacac

SEQ ID NO: 6445 - DNA, 336 bp, Zea Mays
actatagtgacgcgtgcctggatcgatggttgggcacgtttataagtacgacatgacacgattactaatagtgcctacctaatagtatcatgtttaatatagtgtcgtgtttgctagccagtgatgacgtgatgaccttacgacaccgcatgtttggccacttgtattggcaatcgatcagagaattctttacatctactaccactacactccctctctatataaattggttgggtggacgcgtgtggccgagctcgtgcgagctagggccgctggaaacaggatgccatctacgtatctgcgcatgcaacaagagaagccaattttagcttgcgc

SEQ ID NO: 6446 - DNA, 394 bp, Zea Mays
aaattttcttattgtgaatgcttcatttgcaggtcataattatggttcctcctcaatggctactaggtgcagtagggattcatatgatgacagtgttaacaactgcacacaagttactgcttcgaaggtacagaaatgttttgctatgccatctagcatttcttatgtcttggaagcaccattgaatcatcgataattcaccttctctaatgcattttctattacgcctgttcaggatgtttcttctagggaagcttcaaatgtcttcacatggttaggagcatgttattgcccacaacgtctgaagcagattgtttttcacatttaacccttctcgatctctgcatggttcaaactaatataatgatgtagcatatcttggtgaatccccgag

SEQ ID NO: 6447 - DNA, 523 bp, Zea Mays
acggaggtggtctgcccatgagccgcggcggaggtacgtcggcgtgtggcgctcaccgaactacagcgagcgaaatcgagccaggaagcacgcatatcgacgcgaggtttaaagcgagctgactaggtatcttaccggggatagctccgacggcagattggctggccccgcgcgggttggcacggcggcgaaggttctccacatggcaacaatggcggcaggatttcggaggcggcagtggtcgtgcggtttcggatggcttggtgggggccacggggcaccgagcgcaggcttttatagggtcaacttccccaaacggccgagcgaacttcgtggaggtcgttgcggcaaggaccgtcgactccgcgcgactttcacggggaagaagacgacaccgcacaggagagtctgacgagtgggcccaagtaatcggtgagagaagggaggggaaaagagggctgcaccgagcggtccctggcgtcagcggcatggccaaggcacgcgcagtgtgcgatggggcggc

SEQ ID NO: 6448 - DNA, 378 bp, Zea Mays
ggagaaaaggtaccagtggaagatggcgctgccgcaacgacgaagatgggagcggtcagccatggagtgggatgtgcagaggcggaggtgagataaccagagcagaagatgttgaacggcttcttctccatcccatttcccttcgtttgcctactcccttccaccgcatacggataggccctcaaggtgattttcttctcctccccataccaaatcctaggtcctgaagcatctacaggggaacgatagtacgatcagctgggcaaggtcataggtcacgtctagcttcgacggattagatgaggaagccgcagcagaccttggcctgaacatgatgtctgatccgaagctcgcgcttaggaatgaaaaactaaagca

SEQ ID NO: 6449 - DNA, 328 bp, Zea Mays
aggaagaccccgctcggacaccctcgggggctgggtcacggtttgcgctgcccacttgagccggatcatctccggcagtaccctcgagggctgggcagtggcttgcacttcccacccgagccgagtcatccccggcaacatcctcgggggctgggcaagtgtcaacaccatccttggggaccaagttctctgcagtagccgcctctaaggttgatggaccctcagttacttccatgggaccaagatgatccaagtcagcctcctgaccctcaagaccgcgttctaaggtcgatgaggcacgagatgacctcaacccagcatcgagcac

SEQ ID NO: 6450 - DNA, 373 bp, Zea Mays
tattgcaggagagtagagaaagcctggatgcataaaagcaaaaatagggcacgcaacgcggtggcgtgcgacagtgcagtacatatggggttttcccgggcccggcgccacttccaaaacgttggcatgctctgtcatcacccgactgttatttctaaaacgcgggcacgccatgtcatcacccgaccgttatttctaaaacgcgggcgtgccacatcatcactcggccattatttccaaaatggccgactcggtccattttaactcagcggttatttctaaaaacgctgatgttaccagacttcacccggccattgtttccaaagcggccggcgtggcccgttatcactcggctgttacctctaaaacgccg

SEQ ID NO: 6451 - DNA, 424 bp, Zea Mays
tactccgatatctggatgaagggcggtcgtgagatggccgatgaagctataaagaagagtgaaaaagaatctcacgatgcactagtggaggcaaaggaggctgaagaagctgctaaacgcgcattgattataggtatccccttttttagaaaactttttgtctcattgtttgtttatagcttcgaaaattcatcattatgctttttattacagccggtctttcgccaccaccggagccatacaatcctgagacggatccaataatgaaagaggctttagatgtaatgaagattgctaacgaagttgttgatgaagttgtcgacaaacttttacatgaagccgccgagaggatactgaaggaatactaaattcttatgtactaggaaatgtaatatttgcatatggatcaaacatcaaatattta

SEQ ID NO: 6452 - DNA, 500 bp, Zea Mays
atcacctaagtcattacctcagtgaaagccacgacagcttgcgccagtgaactccctccctcatcgggcgccagcgcttcccttccaaatttagagccaccgctcaaagcctctataaattgatgccccagcctgttccgctaggttgttacacgcccagtgcaccagccctcgcctccaattagccaccgtagcgccccaatttgcgttttccccaaattcggttctccgcgccgccgtgaaccaccctgtcgtggaccgccgtctccaggtttgttcatgtcctccttaccctcgtttctgcacccttgcatgctaaggatgcttatcggcccaaccaattgaactagaccacgctagatcaccgggaacacctcgggttgtcctcggtttttgctgtcgtcgtggacagagggattttcagctagaattgtgcatatgattgagggattagggtcaccaggggtagaatttggtgtcgactaaataagaagcttagc

SEQ ID NO: 6453 - DNA, 304 bp, Zea Mays
tggggcactggtggttgccaccaggacctgccggttgttgagcttttgctgtcttctattctcctgcgacccgtgtcctctgaagatgacgttgacctccccgtcaacgcgtgggaatgctccaccccctcccccttcctgttgctgaggctgtctgggctcgccaggccctcctcgtggtgggggaggtggtagaggctggaatggtcggccattcccgacggaatgcttgaagtctttgcagttccgcaaggtgtggcgcatgtccttgtggtacgggcactaggcgtcgaggatgtcgtcc

SEQ ID NO: 6454 - DNA, 1296 bp, Zea Mays
ccagaaactagacttggtatgaagcagcaagttaaaatctaatataaactgaaccactgagtgcaagcggaaaccagatagcattggttgcccacataacacttactgcttgctatccttgttgatttgcagcttgcaagacacacacatgcttgtaatggcaatgaagcatacgtccttccttccgtacctgctcctcctcacaaccttggcatcctgcgatgatcaatttctgttatctggcttcacccaatccagcttaaaccttgatggttctgccatcgtcacaaatgatggcctccttgatctgaccaatagcactgcaattaccaacggtcacgcattctaccccagccctttgcacttccgcaaatcacctgatggtaaagttgaatccttctcagtcaatgttgttttcagcatcttcatcacatacccagacttgagtgctgacggcatggccttcttcatcgcacctaccaagaatttctctgatgcacgggcaggcaagtactttggcttgctcaacgaaaacaacaatggaaacacaagaaaccacatcttcatggtcgagcttgatacctacaaaaatgctgaggtacaagatatcaacgacaaccacgttggaatcaacatcaacggtgtattctccttcaaatccaatacatctggcttctatgaagatagtggtgccttccgggagctgacactgaatggaaacaagggaacacaactgtggatcgactatgacaagagtactatgcagatcaatgtgaccctggctccgatcaacgtgcacaaaccatccaggccactgctgtctacaacctatgatctctcaactgtaatctccacctcaacttcatacattggattcgcatccggagcttctcccgtgaactcccgtcattatgtgatgggctggagctttggcatgaataaaccagccccaccccttgacgtctccaagcttcccaagttgcctttccatggccccaaggcccagtccaagctcttggcaattgtcctgccgatagccactgcaacgttgatcctctccataggcactattgtcactctggttgtccgaaggcggctgaagtatgctgaggtgcgtgaggattgggagggtgagtttggtccacatcggttttcatacaaggatttgtaccatgctacaggggggtttaagaataagcacctgcttggagaaggagggtttgggaaagtatacaaaggagtccttccattatctaatgtagaggttgctgtgaagaggatgtctcatgagtcaag

SEQ ID NO: 6455 - DNA, 563 bp, Zea Mays
gttgtatgggatggaaaagataggccaacatgagtaggacacaatagtcatattgaaaggagtgaaaccattagttgccaagttgatacaaacatttcttgcatcgctagcgaactctagatcaaagttatcaagaaactttcaagcatcaccatctgataggtgcatcattaacccatcttgtatgcccgtacgatctttgtgccacctcatgtgcatagcggtcttcctcgagacaaacaaatgtttcactctaggagtgagaggcatgtactgaagttgtttttgtgcaacctttgtcaccaccttctccccatcttcatttacaagctccacgtacctcgacttgccacattttaagcacttctcttcactaccatgttccttccaaaagagcatgtcgttttcctagcaaacatcaatcttctcatactccataccaagacctccaagtaatttcttgcattagtacatgactttgggaatcttgtgacccataggaagaacctatctaatcaaatccactagatccttataacaattgattgagaatgcaaacttgg

SEQ ID NO: 6456 - DNA, 705 bp, Zea Mays
cgagatcaaaccctcaacaattttaaccagaccaataaaactgcgcttcggtttatttgacaacggtttggagaaatgagaagagtaaaaccctaatccatccgccgccatcccaacaataggcatgctaggtttgttttgcttggggagaacgcaccgagcggtattatgcgtttccttgcgacagatctcacaccacaaagaattgaagcactccctagcatgatggccatccataccgcatttttgacagaaaaccctatgcaccatttcattctctaacttcagaatgggaggaggaggggttttaagaataactgactggccgccatcgccggaagacgagatagggatatcatctttgttctcaggctttccagaccccggcttcaagcgccagctaaggctccgattttttccccaggattgggattcctgaggcgcatctttcggcccccaacgatcccagttaaggttacggttcttcggatccatccggagcggagccgccgagagacccgagaggggccactcctcggcgatcgctggcggacgaaacggagaggaaaaccaaccaccgcagaaactagaacgcgacgaacacgggagagactagagccgagagagacgcgacgcgaaatgggcgaaagaatgtgaaccaacgaagtcggatggaaaccctagccgcttacctgaagacaatcg

SEQ ID NO: 6457 - DNA, 716 bp, Zea Mays
gggatcagcttcagcaaattcagaaactggcacttcctcagcaacaggagcagaaggaccggcaccttgatccaagctacacactcgacgaagacgtctcttcttctttttctccccctcagcaggaaaagaggcttgatcaactcggtgagaacgttttggacgaacattaacaggcttctgagcatccaaggctttgtcagcttcagggatgggcaccaccaccaatgtttcagcaggagcagcatcagaagaatccccagccaacatatccagcatggcacctatctctgcatcactaggatccaaaggcacctcgaaatgaacctgtcgttcatcgtcaggaatttcttcaagcgaagcaaccaaagcactaacttcttcggcagagggtcgcactctaaagcccaaaccgccatcaccagcaggaggatttgacacaaaatgagtgaaggccttagaaggaggcaggttccaggccgaatacgcaacaggggcgcctacattcgatactttgcctctgagtatcatttcaagtcggctcaccaaatccacagcaggaatttttctgttggtaacccgggttgagtcagtcaggcctcggtacagataggccgggtgcgccctgtccttcagcggctgaatattcttgaagacaaagtcagcaaccacagcctctgcagtcaaacctctctccttcaacaatccaacttcag

SEQ ID NO: 6458 - DNA, 766 bp, Zea Mays
aataaatcggtgagagacgacacagttgagtgcttaaacctggtcgttgtaggtcatagaggcctgaagaccgagtctatcaagccaagtccatgtcgaacctgctaaatacaaaggaggttctgaattataaactatcgcgatccgctcccctacacgacacgcaagtcggtagtcctctagccagagaccggggttcgatttcccagtgtactttgcgatggcggggcctgtagtgtcgcggtgcgggcgcctgcaggatatggcgatcaaaagcctatggccttggcggctgggggcttaggcttcgatcctcgttggcccctgtggtgctggctgtatcaatggtcgtcgtttggccccttccatacctccccgcccctccctaggttaggcatgctccacgctccctcacttgtttttaggttccaatggggtgggacctgctccaagcctgcttcagacttgagcagtcgtcttgcagaggcgtcgttagttattggcactgtcgtagcgctctgtcagccctaggctcccgatgccatggtgcggggccttcggctcacagtcgcatggcgaggtggagcgggttttaggtttccatgtaggtctcccgttcattctagcccattctagaatactccagtggttgcaatgttccaacgtgtacgagggagccatggcggtctagccttgccgtaggtaggatggtgtggggtgcggactgcttcgacacgcgtttgccaaattactcgtcgtggcttcc

SEQ ID NO: 6459 - DNA, 1212 bp, Zea Mays
ggccgtggaattcatacaagacataatattcaggttcgggataccgaacaatatcataactgacctaggatccaacttcacaagttcagagttcttcgatttctgcgagcaaaaaagcattcagatcaagtatgcttcagtagcacacccaagagccaacgggcaggttgaacgagctaacgggatgatattggaagcactcaggaaaaaggtcttcgataagaatgaaaagttcgtaggaaagtggataagggaattgccctacatcgtttggagcctaagaacccaacctagccgagctctgcatggaaacactcctttcttcatggtctatgggtcagaggcggtattacccgctgatctcaagtttggggcgcgaggttgatcttcgaaagcatagcagaagccgaagctactaggctggaggacattgatgtactcgaagaagaacggctgaatgcagtaattcaatcagcacgataccagcagactctaagacgctatcacgacaaggccgtgcgacaacgatccttttcagtgggagatctcgtcctctgccgaattctaacgggggagggacgacacaagttgtcgccctcatgggaaggaccattcatagtagcagaagtcactcgaccgggatcatatcgtctcactcaaatggacggcacggaaattggaaactcctggaatatagaacacctcaggaagttttacccctagctgtatttaaaaagctatcgggacgataatgtactctgtaaaaggggaaatatgtcatcaataaaaaagggcttcaagaatactcagtttgttcatgattgaccggcattcttatttaactcggggtgaccactatgccctgctaaaggagcaatcggcttaagtcggcaacgacttaagacggtgcaacatgctcgcgcttacttaactcggggcgaccactatgccctgctaacggagcaatcggcttaagtcggcaacgacttaagacggtgcaacatgcttgcgcttacttaattcggggtgaccactatgccctgctaacggagcaatcggcttaagtcggcaacgactaaagacggtgcaacatgctcgcgcttacttaactcggggtgaccactatgccctgctaacggagcaatcggcttaagtcggcagcgacttaagacggtgcaacatgctcgcgcttacttaattcggggtgaccac

SEQ ID NO: 6460 - DNA, 414 bp, Zea Mays
ggatggccacgattctacagcgttgaaggggggactccgattaaatcggagccacacattttccgatcaaaggtcagcacactctcttccctcccaagctctggtcatggcggcgctgcccaccgcggcgtacgctacatcgccgattggtgattccgcccaacgatgggaccgacccgagtttgacaagctctacacgagacccagcatatggcggactcaatccgaaaccctgaacagcctgataggataagccctaacccctttccatggcgtggcgcggcgccacggctctaatggcgcgctggtggcaattccaggtccacagacagcccaaatcctaccccgcgaaaccctatgcgtcgaggatcagcaaggaaaacgatgaaggagcccttacgtgttatagcggcg

SEQ ID NO: 6461 - DNA, 411 bp, Zea Mays
gcgccgtgtaaagaacctatagctaccttcaatactgagaacttcgagagaggcgacgggtgccgggagcggcgcccaactcatccccatatcagttgtcttatagttggtatttagagctggatcttccccacgattatttcaccagatcgaagacaggggcgatggcgccgtcgaggactgaggactcaatggcgcagctcctcgccaagattgaggaaggcaacagggagacccacaggagtatggaaacaatgcaagcttctatggtaaacatggaagcgacggtaaaaggggtgatgaaggaacacggcgagttccagagatggcagccggaagtggagaagaaggtgtgggagatgaatgaagccctaaaagtcatccaagtcgccatcgagaagcaatcgaaga

SEQ ID NO: 6462 - DNA, 472 bp, Zea Mays
ccaccagcagtacaaagggccttggtcccacacaagaccatgcctaggaacgtcctgacgtctttggctcggtcagccacgtcctctcctctagcatggcatattccgttgtccacctcacccactcgggtgtggacgcggatcactcgacggagagagagaaatgctcctgggcctagcaagacctaggaagcgccaccagtgaacatcccaaccatttcgccttagaagggatgagagggggacacaccactgtatcaaactccttcttggacatcctcttcatctagggaagagtgaaggcagcgcccatttctgatgacgagcccaccgtgctaggggaggagctcctccagcgtgatgcatgtcgacgctggaacaagcatcgcaatgtgcagtgtcaccatgaagctggagaacgtgatccaactcaacctgtctcctgggatgaagcttctgaaacagggaaacc

SEQ ID NO: 6463 - DNA, 685 bp, Zea Mays
tcattacgaccatcaagatctagtttactaagcatcttcaccgatgcagactgggcgggatgcattgatgatcggcgttcaattggaggctatgccattttctttgggccaaaccttatctcatggaatgctcgcaagcaaccaactgtatcacgatcttctacagaggccgagtataaggctttagcaaatggtgcagctgaagcaacgtggatacaatcattgctgaaggaattgcatgttatgcagtcaagaccgcctgttttgtggtgtgaaaatttgggtgctacatacttgagttctaatcctgtgttccatgctcgtaccaagcatatagaagtggatttccattttgttcgagagaaggttgcattaggaaatctggatgttcgacatattgcttcaggagatcagattgcagatatcttcaccaagcgagctactaaacaaatgttgcagcgactaagacccactctcaaccttgtggctaccggttaagattgcggggggctgttagcgtgtatcaagatatgtaacaacatcctagtttatagctatatcagtttagattagcatgtaaacacatagtctgttacgggggcttatccctgaaattatgctgagcttatcctgtaaatcgtacctataagtaatcaagtcatgccaccagaatgaggtgagcagc

SEQ ID NO: 6464 - DNA, 497 bp, Zea Mays
ctcagagcggaatcgaggcagaggcagcttgggtaggcaatggcaggctctggagacttcggtggtggactcggcatggtcgaagaggcaccggaggcacctgaccacgggcggcagtggtgtagttgcaacggtggccacgggcaaagggctgggagcacaggagggagtgtgcgggcatggatcgatagtaggggctcgagcagcacatagaagagaaaggggaaagatcgagctccaaatcgcctcgcatccaaggaatcgtcactctggctgaccttccatccatggtgcgtgagaaaggaaagaaattcacctcggtaggaaaggaggagggcaccgaatcacacggaaaaggaaagggcagatcacctgcctgctccaattggtaatgaaacgatgggagcagccgtggtgagggcggcacagcgcgacgtcgatcgaagcacgcgcgatagggtggggaagaagcactgggcaactgacaggtggggctc

SEQ ID NO: 6465 - DNA, 760 bp, Zea Mays
gctttattaaggctggtgtagtcgaagcacatctgaagcttcccattcgtcttggggacgatgactgggttggccagccacactgggtgatgaacatcttcgatgaagccggcgtatagcagcttccggacctcctttcggatgaagtccttccgctcaacggactgtctccgaggcttctgactcaccagtctggcgtcagggttgaccttcagatggtgctcgatcacctccctggggatcccaggcatctgcgacggctcccatgcgaacacgtcggcatttgcctggaggaaggcgacgagcgcgagttcctatttttcctccagatcacccgcaattcgagtggtctggggggaatccgcgtagagccggatggccttgacggggatgtcgtctgctccagatggccgcacctttggcaccttggtaccggaggtcgaggggttcctccctgcgtcgtccgggcgagcaatttccgccgctagggcgtgcagcttctccacaaccgcaagcgtagcgacgcggtcgccccgcacagtgaggaccctggctggggacggcatcttgaggaccaaatacccgtaatgggcaatggccatgaaccggtacagggccagcctgccaatgatggcattgaatgggaggttaacctccgcaacgtcgaactggacgttctctgtgcggaaattttcctctgtcccgaatgtaaccgggagtgtgatgctcccaaggggatacaccggttgggcacccactc

SEQ ID NO: 6466 - DNA, 607 bp, Zea Mays
ctataagactgaagttgaaaaccagttagacaagaaaattaaaaggctgcggtctgatagaggaggtgaatacctttccaacctttttgacgagtactgcaaagagtgtggaatcattcttgaaaccaccgcttcatattcacctcagtcaaatggggtagctgaaaggaacaaccaaacagtgtgtgacttagctaatgctttgttgcaaagttcagggatgcctgatatctggtggggcgaggcagtactcatggtgtgctatgtcctaaacagggtgccgcctcgcaaccgtgaggccacgccctatgaaggatttaaaggaaggaagccagatctttcgcatctttggacttggggctgccttgtgaaggtgaatgtcccgttgcccaagaagagaaagttaggccctaagaccgtagattgtttcttcctgggttatgcacataacagtgcagcttatatatttctagtggtccattccgagacaagcgaagttgttataaatgtaataatggagtctcgggatgtgacattctttgagagcattttccctatgcgggataaggaagtagtagccctagatggtccatctcagacatattct

SEQ ID NO: 6467 - DNA, 808 bp, Zea Mays
ctgggccacagctcccgcgcagcgttgacgcgcaaccgtccctgctcccttggcgtcctccgtccagtcagccgcgacctcctctggccggctagcagcctccgtccatgcgtgaaattattggatgaggaaaaccgttctcctgcatgcatgcgattagtggaagacgaaaccgtcactagtgggctccactgcatgccgtgggaaacctccagcacacatgcgtggaaaatgcccccttccaaacatggccacgtgttagtcatccattagcccttcccttgtgcaagatcttctgtggcaagattctctaccgcactatgtgcggccaaatcctcagccagtcaatttgcgccacctcgcgtagtttgttaaacctccatatcctttgcattaaacgtctattttagcccattccaattgtgttaactttataataatgtccatattagtaatattatcttatcgtgtcacaagttttaattacttaattagtggtttattcaatatttatgaccttctaattaagactagtttatagtttatctcgcgcttttataaataaatgttaacttgattattaatacttgtgtattataaactcatggtggtttagcgagtatcgcgtatcgcgtgcgttgctcgcgcggatcgcgcgagctgttcgcacgcgtgtcgcgtgtcaattgcacgtggtcacgtgcgctcattgttgtcgtgtcgtatgttatagctaaatatttaattattggtttgttcgagggttaataaaataacaatttaattagagcgagtttgtagatttaac

SEQ ID NO: 6468 - DNA, 817 bp, Zea Mays
tgatgtggatgtggatactgatatatctgatgaagacgaaggtgacgacgatgaactgaaagaaagcataaatggttcagaggatgaagctttagaccagaatgaagacagcgaagaggaagacaagtcaaaaggcagtggctctaaagcgcagaagaggaagttaaatgattatattggacagctaagttctgctgatgcaagccttcgagttctgaagaggttagcaactgccaagaaggctgaagttccatctgatgaaactggtaaaattctatccgatgaagatttcaaacgcatcaaagaactcaaggtatgtggattttggatggcttatagatctacagtaaattttttttaaagctaattttggcaaaataaatttgctcatattctgatcttagatggatcattgatgtcctaaccgaatatatttgtgtttcaggcaaagaaagaggcgaagctggctttggctcagcatggactaatcaagggtggcgacacaaggtctgtaacctttaagatgccatcatctgaccagctcagcaggaagcgtgtcgatccacttgagcttgaggtgctctccttgtacctttgtcgcgcactcacgcactcacacagtgacacacatgcaatgcacacgcttgacactgaataaatttcgtgaggcaggctcacgtcaggagaaagatgtccaaggaagaaaggttagcgatggtgaaagctggaagagaggatagaggtccttacatggcaagggcggccgtgaaacagaaaaaggtaagcttcctggctgttggcgtgtacgttttgtggt

SEQ ID NO: 6469 - DNA, 430 bp, Zea Mays
cttcatcacacataattatggttacacacatacagcgagggcatcacacattacatcggctcaaccttcgggatgatacccatctccctatagtggaacaacatcatcctcaattcctcactcgcaaacagacttcgcagctccccctcacccacactcgccccagctggcaaggacaacaattcccgtttgccagtcccatccacacgaagacgaccaccctccatctaaccacgatgacgcctttcacctcgcaacaactcacccactctccgtttcgccaccgctctttgccgcctacgcccagcactcgcacccggatgatcctcagcacccatcacacgcggaggagtctccgccgcagccacattcaacgctgcaaaataatccaagtcctcttccgaagactcctctgtccacacaatcgaac

SEQ ID NO: 6470 - DNA, 514 bp, Zea Mays
ctcactctgcgcctcatcttgattcccatctagtccttttttattgttaggcgacctctttttcttggagtccaacctacagttttggcacttctctttttattcttgttctcggccgctctgcttctgtttgggttctgagggcatgttgtgctatagtgccccctaacatggcaggtttggcactctcttatgccctgacccccactgtatgtgttgtatggattagcaggttccacactatttttagcacatttagccccactgcagacttcctacccttcgtgcgcgacattggcggttcagtcaatgttagatcagcgaggcagtttgcagaacctggattgaggcccgattctggtggtggtgtaggaccagtgggcatcacaacaggttccatattgttgtcagaactttgttgtgttggtgcaatgggaccaatattccgccgtccatctgcatcttgctgcaactcagtatttgttgcttcatccggaccaatctccgctgttcg

SEQ ID NO: 6471 - DNA, 478 bp, Zea Mays
tggcagactgaacaacttctaatggagccattagctgaaataaccacgattggatgacccatcctctgcaccgaaagaccagcacgcaacacaaaattctcctaaacaaacaaataactagagtcagagtcaaaaagagcatgggcaacaaacgaatcaactaagacgtacatgtcaccacgtctccctgctctttgccatccgtagagggtagcgcataagctctagaaacatccgcggaagaggaagcccccggagtgaaattaacagaagaaccccacagagtcgtaggatgaggcagacgtgaagctccaaactgggatggtataggagttgttgatgcaggagtaggcgcggccaggtactgagggaaacctggcataggcatgaactaaggagtccctggcatatagaactgctgctgagggggtggtacagaaaattgctgctcagcgcatgacatcatgttgacagtgcc

SEQ ID NO: 6472 - DNA, 963 bp, Zea Mays
cagcatttgaccctccctctcaccctgtgggctctgccgttcggtgtctgcccatacccactcttgccatcaaacccgcaatccaccacccatccatctcaatgacgagtcagccagtccaatgcagcagctgcacaaccggccctttaaaatgctctgtccctggtctcgacgaatggtaccgcctctccatcatggaccggttccttgtgccaccaacggccgagtcaccgtcagtcgctcacagtcacagacatgagtaacttggaatcctcatctttgtggtcgtgcacgaactgactgacactaccaacctttcgctcgcgcttaagcacttgctagagataaagcaagaggggttgctgttaaccaagctcgcggggattaaaggaagccggcggaaatggccggtgtggtgtggggtgcaaggactcggtggctgcaagcaacatgggacttgtgagctaccgcccaagaccaccaccctttttccttcggggcctcctcttccctctttccttgggtggggcctctcgcgccactcccgctcgtcatcctcgccgctttattcttttttcaaatcattagtgtgctgccgctctgctctgttctcctctcatcggcatataattctctctctccttttgttttctccaagccagcagcacctcatctcctcctccaagaaccttttttttgtttttctgatcatctcactttccttgccagctcccacttagaatctacttgtcgccctccgctcgatgcgtccagccaaatattttgtgaacaatgtgggaggaaaagaaaacatcccctgtcaattggtgcttagcatcaccctcatcccgtgcggtactctcggtgcccgccacacgcgtcggtctctgccatcgccagggcgccacgccaggcacacggttcagctccagcaaggctcgctcgatttggtttggctgacgg

SEQ ID NO: 6473 - DNA, 495 bp, Zea Mays
cggaggagcgccccgcccccacgtgggctccacgagtcaacccgggaagcgtgtgccacgtcaccgaaacgctcgcgcgtcgagatgacccaaccgcccacttcctccactccccacctccgcctctgcttcgcgacacggcggcgctatccatgcaccgtccgcccatcacatcggcgtaactcccaccgattgctgctgctgttggcggtcccgagccggccgcggagttcttgccgtctgcctcctctatagtacctcatctctgctccggattcaaaagctcctattcttccaccgtttgcctcctcccgcgtcttaattgcggtcactgtccagccgtcgatctcccccccctcttcctttcctcgttcgcttcttgcgattttcgtcactcgcatgtgaaacctctccctccctccctctcccgcctccgtgtttctgtcacaaggatcgggtggggcggaacctcgaaaccgcgtttcgtgtacagcc

SEQ ID NO: 6474 - DNA, 593 bp, Zea Mays
tctgattcacccattcaattcgaactatttgaattttaaaaaatcccaaaaaatcaaaacaaaatttgatttttttccatataaatagaacatggttcttcccttctttcacccgcattcacctccagttctcaagtgcctccaacgttcacatagttctatctccgtttagggtttagggtcttcctagctttctttttatatgtattggaggtggagtcccaacttcgatagtttcatgtacttgctaaaacgagcaatctccccaacatcttgagtcccatatgggtgtcggacaagttgttttgatggcctttctcctgttcaccattggcaagaggaagtccctactcgaccttatggcctaacgactcaacccctctttccttacccatgtcctcctgctccatttgttcactgaccaaatgttgatcccctctcggtactaatgagcctccaaccgatgaagctcctcctcatagcaccaatgaattagcatctaccaaagcttgccctccccatcctttcacttatccaccatgaccaccaccaccacgcccacggtggtggcgcccctggtccccgtcctcccc

SEQ ID NO: 6475 - DNA, 711 bp, Zea Mays
cacgtggttgcgctgtcaggtggatccaaacactcgagtagcaggtgagagctcaggtgcacaacgaaacaaactgcgggtaactgtagcttctcgttatgcacgtctcatcccgctacaggatgggggtatttataggcctgttcgagggtaggtggtcaaagtacgactctacccctggctaccaactatattcgagggatatctcgtataacagagtaattacagttctgcccatacagtaatccgcgcacaccagacaacacatccacacgctacactgatggatgggcccttggcgatgtcttctggtgcaccatgggagtacaggattgacctgtagcctccgccccgagagctttcgcgtcaacgccccctggtcacgactcgctaggtgagtcttctagtcaatgtggaggcgcaggtctcggctatcgacgacttgttgtgattgcccgtcggatcgaagacccctccacttatgatcctgtgtatggttagtacaaaacaaaaagtatggtcttcaccctatgatcgaggtcgtgttcgtttttcggctactcggccatcctgaggactccgtatgacgtagtccctccgtggcattctatcaggtaggatggctgcttcgcgcatggatctacgaaagctgttaggatagaaatagatcttcgttcgattagttgatgggtgttcggccttcgcccaaca

SEQ ID NO: 6476 - DNA, 525 bp, Zea Mays
tcgctgggatccaaggagggcactcatgaactagccagtgccgggcgacatggctggatcgaccggttgctcgccgtgggacaaatcccgccgtggtgcgtagttgcgatggtctgtgccataactacaggtaagaagctacctgattggtccgctatcgtatctagttcgcgtgggaccgagtagttgtgagcttggagttctagctcgacgggagggcctgcgccggcgatggtccaccggcggatgcctgtgcgccgccgctctggtgaccgggtgtggaaggagcgctctgcgacgttggatctagatgtagggccaggattagatccagaggatggtgaccaattggccgttagatcggtatcgtggggactagatcacgcgtagactaaagctaacttaggggatcgtgggccgtcgatctcggatcgtgcggcccgggttgaataccgtttcacctaagatctgatctaatccatgcgctcggctgttgatccaacggctgagaatggctgatacccc

SEQ ID NO: 6477 - DNA, 687 bp, Zea Mays
ccgtctcctgttctgcctagatcttctctctctcgtgtgatttccaggtagctatcacttcatttaagattctatcggctgctctctcgcatgcttagcttttcactctatcgtgcagccgccaggtcaggatggtgcggatgaagaatgtctcatcgtcagggggaggagacgatgaggaccctcctcgccccttcaggtaggtcaaggggaagacagtttaccttgagcagtaggagggcaggaagaagtgatgtttggacagagccgctcgggtagcacttgcagtggtagcagcattagagcaggctgaacagggaggatatatgcagatctcctcagatcagatagcctatcgggttcgtcgcctcgcatctcggcctcgctccactactccctccacaccttccaccactgtctctactccacctcccacttcactagctcctgtcgctctagagccatccaccacttccgctgtacccaccacctccaccactccaacttccactgctcccctcccgctcccatttcctctccgcccattccaccacctcgcttcagggagcgtgacgatactgaggtgcgaccactggctattgatccgcgtctgctcgaccttcagtgtgctactacagcccaggtacgtcagttccgacatgtacccgtggagtcttggttgccagc

SEQ ID NO: 6478 - DNA, 553 bp, Zea Mays
atggtgctctcgtcttgctggcatcgtccgcgttatactgatcctgtggggaaatcttctctaagttgcccacttgtgtttttgataatctgaccagctgaccagggcaccggctcggcttcaatgaggtagacttgatctgcacctgtacctcccgtttccctttgcctgttgctgttagggattcgactagctcaatgagaaaaagtcttgtcctcgcgtgtgttcctactgaattagctgactacgtctttggtgaaaagtcaatttttagttggtcggtaatggcccaggggaaagatcctagctttataaacttgtagatgcatgtcatgcggccattccatttgatttgctgacgaacagctctcaacgataggatacactactgttcagttagccataggttgtttcactacaggtattttgtaacaagtcattccttgatactcatcattttgtatatttcccttgtagtgaatattcttgtagtatactcctgcaattatgtattctttattttcttgtagtaacctgtgctgaaaactgaggt

SEQ ID NO: 6479 - DNA, 314 bp, Zea Mays
ccttaacaattaatttagaatgtacattttagatcaagtttagtctggtaatattcttgtttgagtgaagcacttacgcctaggatctatcttattcgttccataacagcacttttaccagcaaaaagtttgtccaacagaccaacactatctttgcattcgatgacctatccaagattgtttctactgagttgctctacttaggcatgtaaacccagtaacttaaagggaacacctgtttcttgttcgagattctccgttgtttttcgacagttcaagcactgagattaacatctgatatagactgagacaga

SEQ ID NO: 6480 - DNA, 372 bp, Zea Mays
gcgaggtggagtcagaaggagaggtcgggctaatcgagaggaagccactcgagtggatttcgcgcctgacccaggactaacccgctgtaagtgagtgaccaaattaactatgcttggcaccgagccatagtgggcgagtcggtcctccttccactcatgacctacgagtccctaggcctacggcccactcatgacctatcgagcctaggtatgagtgtactcaccgtctacaggacccgcaacacgacgaaccgcaccgagacctaggctatggagaccaggggacggtaatggcacaacgatgataatgatggtgtcggagctgttcaccgcccacacatccaattttaaataacatggccagagaagcct

SEQ ID NO: 6481 - DNA, 1093 bp, Zea Mays
cgaatgcttagccctacgcgtaggtcttctgcattgctgaccagacatagggtgtttcgtagatggctacctgacacatgacttcttgagtcatggacgtcataaggaagcgaaggacttgctactgaagcgcgaatatcagatgcatcaaagatgatgtcgtcgatcatctttccattctgcttgaaggagatctcgtcgggcgctatagccgtgtcatctaggtagccttgtagctgcacacctctaaggatgggcagaacttgtgctttccagagcgcgaagttggtcttattgagctttacaatgacgcttttccctaggagaggtatcggtagtgcagagctggatgacaccatgggaacttgtcgctggtaaggttgatgttgacttgttcttgattaaaagttggctaatagattgaggaggtggctttgttaccatgaaagaaacacaacaccaagatattaaattgcttgccttgacctctatggtgtacctatgtatagcatattctaacatctaatctggcagggtgatgtatgtatggtttctgtaacaacactgcttgtatcaacaggttgtacccttagttttctattacgtagtttttgctggctctttagcaccgacaccaatagtcatagctgagtttttttcacattaatagtggtgactttcgaccttgaatgcctgagaaagaaaagaaacaaacaaacttttaaatcatgtgaacagttaacttgtagaatatgcaagttgtgtaggagctaggactgttgagtacactgatttcttgtgagtagtgtctattactgataataccatcaacaattggtagtgattggttccactataagtgtcttagtctatactcacagtttggtaacagtttttctgtataaaatacagttgttatggtggctaattttggcgcaccaacgtctattttgtaatgtaattttaactcctcgtgcactcaacatattttggtagaactgtaccaacatctaagactgtcttcagtggaccgtgtaaaatagaggacgcggaactgtatatgacattgtttgcagagtgaagtttaaaatag

SEQ ID NO: 6482 - DNA, 789 bp, Zea Mays
aacgacgtctaggaaggcgagtggagggacagagaggtgggtcgtcggagggggtgttcgcggtggcgcagagaactgatttgggggaaatccaaattcgggcgctacggtggaagattggaggcgagaagcggtgtgctgggcgcgtaacaagtaggtggaacaggggtggaggtccaatttatagactccggctgagcttatcacgaattttggaatgggatcgagttcaccgtggccaggatatttttacggtggccagctcaccgtggcgcgttagagggaaatggttccgggatgataaccggttgcttgccacgatctttatgacgcggaggatagatcgctgcgtgtcacaatcggggaaacggtgagctccgatgatgcaacacgactaaccgcggcgggtaaggggaagacacgatggccgtactgaccagtgattgggttcacccctccccggatctttcaccccttcccggtgttatctatttctcacgcggcacgaatctcctaggcgagcatgaattgtggtggaagatcaccggcatcaggttcatggcactggagatctttttagctactgtaccatggcgatcttcttcagtccatctgtttgagcaacttgcagggcctcattctctaattttcgtgtgacagcccactaacctgcctgtatcaaagttgttgtccaatgtaccagctataactttgttactgttagaacttgctctcctaggcaaattgatccaacgggaaagcaaaaagagtatttgcaaagtttgttgt

SEQ ID NO: 6483 - DNA, 613 bp, Zea Mays
gtaggaattccacgaaccagttgccaacattgaccagcagccggatggagatggagatggaaatggaaatagatgacgtgtatagttgttcaaaaaacccgaggcccgttagcccggcacgagtacatgcgtatctgggctcagcccgacctggttagcatgccgtgcccgatagtgttttgagcccgttgggctagctcggacaaggcccattaaaaattgggcttcaacatcggcccggtccaacgagaggccattacaaagtccatcctagtaggctcctagctccaagcggcctatcccacatttccgtcatccgttactttcccaagccaagccaaccctagctgtcatcagtcacttttcagtcgcctctccactctcccgtctccactcgcggtctcgcctctgcctctcggactctccggcatcggcgaacggcgattcggcgtctccatccgccgcactggtgctccgccgtctgctataagtgccaaacgtcgatccggatcctccgtcgacctgtgctcctctattgtactcctccttctcggttctcgccgacgcattggtgctctgacctccgacagtccgactcttcctctcctccctg

SEQ ID NO: 6484 - DNA, 516 bp, Zea Mays
gagggttccgggcatagaagagatcccagagcctgagggcgaattggttgtgtttgaggcatttttcattgccggccttcgtctcccggcgcatcgtttcgtggcggaggttttgtggaggttcgacgtgtaggtccaccagttgacacctaatgtcgtggttgccctggcgaagtatatttgggtggttgcttcgtacggcggtctgccgtctgcggaggtctttgccaagaactattgtctgcactggcaaaagaggaaaataggaaataaggttgcacaatttggatcgtgcaccttcacgctgaggactagaaatacttcggcataagtcgtggaaatagtcccttgtgctcggaacaagtggggcaacttgtgggacttttggttttatgtctctggtggggaagtcgaagatctccctgggctccctgcagccattatgtgctctcactgctatgtggcgttcccactgttcgagttggcggaggatgatgaggacaaaggggcccttcg

SEQ ID NO: 6485 - DNA, 664 bp, Zea Mays
cgagagggacggctgatctgtatgcgaagggagcacgatctggacaggatgcatggccgcgacgcgacaaggacagcgccggagcggcagcgctcatttctgtgagcctcgctcggtcgatcatgtcgggaagaagacagcgtacgtgccagcaggtcaggattgggtcgagcctcattcgttccccccaaacgccacgccggcccctgggcggcggtgcagtgcaccggccggtgcgaatggccgtgtcgtgcagtgttcagtttagatcgatgcatgcatgcaaggcatataatgcatggttccctgaactcgtcatcgtggcttcgcgtgaatagctcgtacaccaccgatttgggacggaagtttggatgatctggcggtctctcaggtacggtcagctgcctgcgacgacataccgtgagtgaaatgcacagcggcgcgcggatcagccgccagtcgctagagtgatacaagcaggccaccggtcgacgacgcgcggaacggcagaggcatgcagcagacaggcggcaggaacaggaacgtggttatccgcatcgtctaatcctaaaccatagtatgccttgactttatacgagcacctgtttagttacccgcatattttagatgtaggctgaataaggtcatgtttggttcctttagt

SEQ ID NO: 6486 - DNA, 374 bp, Zea Mays
ccaaccccggttgtcttataaatacccccgtcctgtagctggaggaacacgcttgacaagacatttgtgctcctagccatatgttttgtcgtgctactcacttgccacctatcatgttcttgagtgcttgaggtccactatttctagccccaacatttggcgcccatcgtgctcccttcgaagaacatcccacgatggctcccaagaaagtaaacaccagggccaactccttcccagatgaggccgcgaaggcagccctcgacgccaagaaagggaaagtcaccttcgcggacaacatcccacccccacagtcgagaacaccaccaacgggtttgaggcaggaaacaacaagctacctcggaccaaagatccac

SEQ ID NO: 6487 - DNA, 764 bp, Zea Mays
gctatggtcactgcatggatttggcagctcaacagtatcttgttactgtctcaggaaatgacggttagctcctatatgcacagctcctcttaaatgtatttctgcaataattactatgatgtcacacttatttctagaaggccattttatttgaccagtaacactcttttaacttcctttttccataatgtgtatccttgtattctgctaacaagataagtagaaaacagagctacaatattgtctgctttaggacaatccagttgagaattacagccgggttaacaagatttttaatgtggattctcaaccagtatgttgctgctcacatttccaactttgaaaatgcacttcaattactattgtttacttaatgtttctttatccaagttcatatttgggatttttcaggacagacaaacctaatattaatgaatgaatgtaatggactacatgacttctgccatgcagatcaagaggtagcatcagctgccacatttgatccatctattttttttcatttgtccggaattaatttatatttggagatggtattgatttatgtttttatcgtcttatagcatagcctaatattttcttgccagatgtacttatccttttcagtgtacgtgcaaaaccttttggaagtgcaagtctatgcaatgtctaactcttaacatccaaaattggtggtactaataaagaaaattatggagatgttagtgatatgaattctgattcgtattacagaagctttggaagag

SEQ ID NO: 6488 - DNA, 451 bp, Zea Mays
aagaaatccctcatacagttcaccaatgtctcctctacgtgtaccacatctcggatccatgtttagggctaggattcgtggcatggtgtggcctggccatggccaccgccgtgagcgctggacaccggtgtcccttgtgtctgggcgaggaagagcatatgcgcgccgtcggatttgagtgagcggtggagattagactgaggcttaccccttcggtgtttaaatcctgacccttgttgtcggatccagcggataggagagcgtgccagttagagttagatttaatctaatcctatccatgtgcatccgatcggacggctcggagcgttcgataccccttcgccatgtacatttcttaaagagcccctcaggtcttagggatttaacccgctgtctagttcaatagttctctgtgtcttaggcaatttgcgcaaagacccctgcgcttaac

SEQ ID NO: 6489 - DNA, 579 bp, Zea Mays
ccggaattcgtcgccggacttcggtttctgccgtgcgtcgtgggaagcttggttcgtctcttcgaatcgcagtgagtagcatcctacgcaatgccctatcgttacctctttgtgctgctgcgttcagattagagtttaggatcggtaatcaccggtggcgcgtgctccggccatgccaccgccgtgcgtaggtctgtcgccgccgtgggtgggaaaggagacgcgcgggccacgtcgtccgttgatcggacgaggaacgactctgattaggctgaggatgccaagtaggggggatagatctgggtcgtccgatttggatcggtcgggcaaggaatggatccggattctttaaatccggggcattggtgttcgatccaacagctggattctcgtacagattcactaatattgagatctaatctggcacatcaaaattggatccgatggtcgggacagccccgtacccctccggccctataaaattgcgtaagagaccctgtattttagggaaaacaactcgcggtccacaaggactgttcactaagtccgagaaagcttgcgcagagacccctgcccttc

SEQ ID NO: 6490 - DNA, 495 bp, Zea Mays
gttgtgtgctcagaacttagttatctctcttatttatagttgcggttctttgtgctatggaacacctgccttgttacagccccgatgatgttggtgggacccttttgtcaaaatgtgttcctgcatatgcccttcacctctttattgctcttcttttcctggttgtgtctatgtttggttctttttcgtttatatattctgagattgattttgtgtcctttgcttcctctcatagaaccttaccacatactggtgctgccttagtttaacttcccttgcttacctacgatttgggaatatttgcttttgatgtcggcgtcagctgaatgtaggcttttgctgctgtataattgtgctttgtctcttttttgccctccttttgttggttctatccgtgttttcttttttacgtgtatgtgttcttattgtttatgtatttacttgttcttattatttacaattgttgcttcaggaatttgcaacgtgcttcccttt

SEQ ID NO: 6491 - DNA, 420 bp, Zea Mays
cctcgggtcgtggcccaagtggccatacgcctgggtcggcccttgctggtcagtcagggaggatgaaatcctcgccggtgaggaagaaatgtcgctgtcagcctcacgtcgtagtctggattggtcgaccacctcatgaaccagtgagaacaccccttccctgtcattgctatactctccttggtgtgttgggggcctcagattaggaaacgttgcacggattacctggttcggctcataagcgatggcgccgccgtggactgggtacaacgctgccgtggggaagaagtccaaggatcgctggatccttgagtgggattgtggtgtgatgaggtgatcggctgttggatcggccacagacgctcctgatttgacggtggataaccctccgggtatttgaatcaaggccgtcgattgcca

SEQ ID NO: 6492 - DNA, 539 bp, Zea Mays
aagaaaaatatactgaattattacatgccaaaagtacaccacctttattacattatgccaaactagtactaattatacatactcattagtacaactcaacttccttatttaatttacataaggacactacttatactacactactctaattatcttcgtccttggccgctctcgctccactgccagcttcgggagaacgttcatctgcgaggttcatggaaggaggggctccaaaaagatccaactccccatcagtttctccactagctactctagatgtttcggttcccatggctacaacctctggtggcacattcggatgcagccgatcgtataacacgtgcacttcctcatgcagagtgttacagtatgcttgcagattctccagagctacgcttagtttcgctacacaggctaaagcatttgcctcacaatcccaggcgaaagagcgtgaatttatgccctagtcgatagttgtgtctcgttccacgatttcctgctgcaagctattaacctcgctgatagccttgcaatgcggc

SEQ ID NO: 6493 - DNA, 317 bp, Zea Mays
ttgaagccaaccatcatcagctctcgtgatgtgtcactcacattcgctggtgaccgggccaatggcagcaaatccccttgccacgctcgccatcgcggtgttcttgatctgccttcttctccccacttcgtcttcttcgtcatcgatttgtgtcgcgaggacgcaggaccacgtgagaacggcgttccacttccagcccgccaagaactggcagaacggtaactttcaaatatccttagcttggtatgaactattagtccaggcacagatcgatttcagtgaaccctctcttaatacgcatgtggaacctctcctct

SEQ ID NO: 6494 - DNA, 509 bp, Zea Mays
ccagtttgtcctctccacgccaagcctatcaacccaatgtggcggcctgcctgggagttacaccggcgggtgggacccgcattgtggtctctcgcgcgtatctcctttggatcccggcgccgactgcgtcgacccactggccagtattttacgcgctgagcttctctggtaaataggacgctgtcgcgcgggcccctcgtgcggtcccttgggtatcgtttgctccacagaatctcacagcctatggcgtgtgggccatcattgccaggcacatcttcgtctccacagctcgcatgcaccagggtcggaccccaatggtgtcgcatagccgttcttgcccagccgagatttccgggttgataacaaccctttccgccgcatatggtgccaattatcagcgcgtgggcccctcacgccaggtatctcttctccactgagatcggaactacatccctggttatgtgccgccctgctcgcgatctcctagacacggactcgctgccgcggtc

SEQ ID NO: 6495 - DNA, 477 bp, Zea Mays
gaacaatctaacacgcactctctgcttcaccggaatagtgacaggggtggaaaaaggagcggcggggcttactggctgtggtagagctccggcgaggaggttggtaaggtcgaggaggttccgacgaacatgtcgatagtcggatggtggtttgtggtggtcggagtcgcttggtccacggacgcaggcggggatagtcggcggcgacttcgattcctgatcaacggcggcggttgtgttcgattccaccggtgaggaagcttctcgggagaacaagggtccggctgacgtaaggaattcggtggaggtgcacttgtgggggccgacaacattcaccggcgcatgagtgcggtccggtgaccaatggcactactcctgtggggtgtacagacgaattgggcttgccgaggaggttcactggggtttaaggaagctcctggtgttggttgctcggtggtttgaaggttgtgccggtcg

SEQ ID NO: 6496 - DNA, 639 bp, Zea Mays
tacgacaccggtgacgacggcaaaccccacacccgcggtgccgccatcgccggaatcctcccacacttgacctcgcgcctatacttcgatccgaacagggattcacatagaggagataagggtagactagggagatggatactcaccggctacccacgaggccacgacacgacgacggcttccaagtctagcgtacgacggcggcttccaagtccagcgtgaaatcgcggggaccctaaggtttccatcgcacatcgaaggcactcacgcgttcgaagtgcaccagcgatccctcctgaccggatttctaaggttgtagcagtggcatggccgatccaaggtgtgacggccaacttcatctttctttgtgttctagctccacgcgtggggggtcttggccagatcctacctcttcgatgccttggacaaggggcagcgaactcgtttatatgctcactaccccacgaaggtcggtctgttggagtcggtttgccagctgtggaatccccgagatgtgcgacaatggtttgttgtggcccgtggcgctcgatcggggttgttacggggtccgcgcggggaagacacccctggaattcggggcccacgcgatagtgactagacgtgatcgcgtgaacgtgg

SEQ ID NO: 6497 - DNA, 350 bp, Zea Mays
cgaagtgccaaagcgtcatgcggaagctaaggaaaaaacaaccgaagaaccaaaattaaaggagccgacagggcaaccaaaaaccctaagcctgccacgagagctggagttgccgaaggtgtccaaattcctacgataactccaaagagaaggagaatggccagcgtactagacactgtcatagaatcgacaaaagtacaaactcctgcctctacaaaagcacctggtgaagttgagaagaactcgaaggaaactgctgaagctataacaactcgagttgaggctgaagctaggccctcagttcccacagaacccgagaaggtcaaatctcctgcccccgaagcttctgc

SEQ ID NO: 6498 - DNA, 456 bp, Zea Mays
gtgaggtgtccccccatgtaaggtggaggtgacacatgcatggtgaggtgtcactcatccatagctcctaggtgcctatataaggatgtgccccctcttgccatgacataccatcccactcccatccacacacattcaagggcaaggtagaagaaaagtagtgttgaagtataggagcccttgcttaatcatacgtgtccatggtgtaagtatattgttgtgctgtaaaatttctatttgcttagtgcaaaagttgtgatccatatgaaggagtgctctgcctcccgggatcacaagacatcatctgtaggagtgctctgcctcctagaagccagcttcatctgtaggagtgctctgcctcccagaagcaaatatggctggctctgccacgtaccatgcactaagtaattagagattaaatatgaactattgtaatgtattgatgtatgttatttt

SEQ ID NO: 6499 - DNA, 1197 bp, Zea Mays
ggcgggttgaattctatatcactcggggtctcttatgcaaaagatctaggttgaatgggtatggagaaattcgggccgcacgatctgatccggacggctcggattacaacatggttataaccgaaccggtacgcagcgtggggcatcagattaagatcctacggctagggtgttatgaagatgtgatctaatcccggtcatcgaactaccatcctacggctcagatccgtttgatgaaggggtatgctgattctaatccggaccgcccacgcagagatcaacgtcccgaaacaatcagctgcacaatttaatccccaccgttggatgaggatccaacgccaagaacgtcatctgccaccccaagcgcttggacacggcgaagcataccccgcgcggcgggcttcacgccgacgagcagcgcatccagggttacagagcccaaatcctagaatagattggcacaaaacgtagaggggcagctagcggagttatacggtggacacttaccggcgattgaagaggtcgcgagcctgcccacggaggagagcggatccgcggtggagatcgaaccacggcgagcaattccagacgccccaaggccacacagttcaaattgaaggcgcggacagcttcacgggtccccggcgaacgcccccacccacacgcgcggacccgtgcgcgagcacagaggagaatcaccggcggcggctgttggcgagatggtctgcgcggcgcgttgccgtgcatgatcgggggaggatgatggctcgactagggaaccagagaggcgaggcaagaggtcgtggcgggttttatgccccccgcaggcggagtccacctccccccaagcacacggcagaaaggatgaggatctgggcgagcttttcgccatttctgttgaaactaaccccgaggagacggcgcggatgtcgcaacagaccgggtcgaagaccaccctgaccgtgggccccacacggcagagattctccccgggataatcgacttcgggtgcgcgggactggagctcagccatggactcgatctacccgcacgatcccgagcgacccgtgtggagtgaagaagaccgatccgacaggatggtcccacgatgcagtgacactgcgaggacaggccggaggactaggtactggcgagtgggcccggttcccagtgcccaaacatgtaggcgcggctaca

SEQ ID NO: 6500 - DNA, 2228 bp, Zea Mays
actgaaggccagaagaatggcagaaggtttgatactagttgtgcttcaaaaaatcgcaaccaccttaggaggagctgcattgagtgtaattaagtcaaaattagggaaaggagccaacattttacttgaagcagagaacagcatgaaagaaattgagagtgagttcgaaataatgcaagcatacataagtcaagcagacccgtacagtgaaagtaacaaaattctgaaaccatggttgaagaatgtaagaaaaatagcttctgaagtcgaggacatcattgatgaatatgcctttctacttggaaaactggacaacgcaggatacttggcgaagaagttccaccattcgagatacatcactgcatggagtgacatttcttctcagttgaagcaagtgcaagcacgcctacaaaatttgacagttctgaaagacagatatggcatcacagtagttggacctggtggtggatcatcaagccataataacagtcgtaagaattacctgtctgaatcttcctacctgaatgatgatggtgatggtgtaatggtaggcaacgaagatgaagtaaagaagttgacagaatgcatagatggtgctggtgcagatcgtgcagttatctccatctggggaatgggcggttcaggaaaaacaatccttgcaaggggcatctatagaaaacgagaagttagaaagaacttccagtgctgtgcctggataacagtatcactgaattatcaagtcgaagaccttttgaacaagctcataaaggaactccacatccaagatgtgcctgatgcaactgacagtacacatttggttgctaggatccagaatcatctcaaggacaagaggtaccttgttgttttggatgacatgtggaacagggagtcttggttattctttgatcgagtatttgtcaagaatctttatggaagtagagtcatcgttaccactcgaacagaagctgttgcgtcaatagctgagctgaaccatactataagaattggccttctttcacagggggagtcatggaagctcttcggcagaaaggcattctcaaagataggcaaggaagaaccgacctgccctcagggccttgttcaatgggcaaacaaaatcctcgagagatgccaaggtctgccacttgctattgtagccatagggagccttctgtcatacagagaaatggaggaacaagagtggagactcttctacaatcaacttaattggcaactgacaaataacccagaactcaacttcgtatcgagcgtcctaaagctaagcttgaatgatcttccaagccacttgaggaattgcttcctgtactgtggcttgttccccaaagactatcaaatacgtcggaagtgtctaatcagactgtgggtagctgaaggttttgtggaagaccggggaacagagattacactggaagaagtggccgaggagtacctcaaggaactcacacggcgttcactgtttcaagtgatggaaaggaatgaattttcacggccaagaagattccaggtgcacgatcttgttagagagatgacactggccatatcaagaaatgagaggtttggtcatgtaagtgaccagccagatgtaacagacattggcgatgtaggaaaacgtgtatcagtgcacagtgggggccaaatctatcagccaggtccgtcttcgcagcatctgcgttcatttttgttgtttgacaaacacgtgccgctttcatggatcagcatcgcttcatcggacttcaaactgttaagagtcctgtgcctcaggtactccctccttgaggacattccagatgccatgacttgtttgttcaatctgcaccatctagactgctctcgtactaaagtaaggaaggtaccaagatcagtggcaaggctgaagaaactagagacattgcatctcaggttcgcccgtgtgagggagttgccgtctgaaataacaatgctcacaaacctccgccacttgtctgtgagtgacgacttgtatggcacatcaatttgtggtactatccgcagtctcaagcacctgcaaactcttcgagaggtgaaagtcaacaaagatttggctaaaagtcttggttacctgacacaactaagaagcttaggaattactggagtcatacaaagccacaatgcagatctttgggcttctatcaggaagatgactgtccttaacaaactagccgtcgcaactcctggcgagagtaacgaag

SEQ ID NO: 6501 - DNA, 403 bp, Zea Mays
tttacatcctcggtccaatctcgcccctctatcccacgatcgacggtcccaattgatccagccgaatcgctacacagtgtttgatcacagccgttcattttagaccaacgaccaccacgctgtccactacttcccaacgccgacccggtgaaacaccgctcttgggtacagcggcgccatggccagtgcgagccgagatacgattccaatgtccaaacttagattagatgaacgctacgcgtagaggagagcaaggcgaattgatctaagggtaacacccagatgtatgcagcccagtgcccagaccacggtgaggagcgggcggcggcaacctcgaacgccggcgacgaattcccattggaccgcatgatcccgagcctgaatctcccaccgcacatctacc

SEQ ID NO: 6502 - DNA, 314 bp, Zea Mays
caacccctgagggtgccgagcttggctactccttggctgcttccatggacgttcatgtcggatcatctctaattccatctgaggaaccagtggtgaccagtcctccaactgctcttatcggtccggtcactttagaggtcagtgacccggatggtgggaataagctgcctgatgccagagttgaagtctctctcagtgttgccttgggcgtgagctcttatcctcctttggggcttgagtctgatctcaatattacttctgcctatactccaccatcagatagcacaccgatgcctccggctctgggatttccc

SEQ ID NO: 6503 - DNA, 479 bp, Zea Mays
tgcaatccaagcatgctcattcatcctctcttcttgtgaggactggggacaaagtcaatctgactagagtgttggcctgctataggtcactaaataggattctctcttcccaaagaaagtgttgccgatcaacaggttaaaagctacagtactgcaaaatccaagactttctctcccttctgattcctactaccatacccaaaacctccatgaaccgtctcaaaatctgcacttgttgtacctacatgcccattgagatcttctatgaaaggcttcacaataataggtataggtctaaccatgccatctaaggcttcccaggtctcttagcactcccattgtggcctacctgggaaggcatacgcgctaattacgttcaagaccaaatcaccgacaacaagcttaactaagataaccttatctccttgacttctcacatccaccacatcggttttgagactcttatcagtcaaaattcc

SEQ ID NO: 6504 - DNA, 414 bp, Zea Mays
ggaccaccgtggtccagggcgccgccgtgttctacttgaaccagagaagaagactcggtgttggccgttgattacgtgatgggcgtccaggattagagctgggaaggaaggttctgtagccgttggatggtcatcgtgcatcgatgattcgagcgcgattatcggttggtgcagtcgatcccgaccaatggatcgagatcggatgggctgcaccagagcgagcgtaaccagatacggatcgtagatcttgaatccgacggtagtaaacgcgtaccggttcgtgggggtttagcatggctcgatctaatcgcagccgtccgcgcttgatcggatggctgtgatccgacgatacctcttcgctggttcattttgcatatgagcccctgaactacttaggaattaacccgccatcca

SEQ ID NO: 6505 - DNA, 369 bp, Zea Mays
tatgtctatctatggtaccatttatgcatacaactacattatctatgcttttgatttgttccaagtctgactatgctttttagatgtacatatcatcgcaccatatttccatcccttttgcaactgttataactagccatggcaccatttatgcatccaactgttataacattagaaatccgtgcaactacactatatccattggaattacgtgcttttgtcagtaattggcttgatggatttgaatttctgatccccaagtataatggcaaatgcttaaatagttattggaaaatgggaaatctttctgctagaaatgtatagggacttttttgcgctcacagccagatgcttaaatagttattggaa

SEQ ID NO: 6506 - DNA, 333 bp, Zea Mays
ggggaatgcatcgataggtgtctacatgaaaagtgtatttgttttatgcatgtgatcggtgattgtgatagccgatgcgaatgaggagtatgattaatcctgttggagtcactggtgcggttgatgtcttgtgcgtagtatggggacacatatgtgcgtgtgtgccgtggtgtattatggtagtggtggtgtaagatatttgtttgaggtgtgcgggtatatgccgtaatatggttatactcgcgacggggaaagatgtatgtattgtgtaacacgacgtttaggttgctgttgtataatcatgtgaaggacgcgcatgatggtcatgtgact

SEQ ID NO: 6507 - DNA, 454 bp, Zea Mays
gtcgcgtgggtgcgcggcggacggtggggcgtgcggccgttgcggggcgggagataaggagcggaggcagtctacactgcctccttaatagttagtagagattatgcatgtcatgtcataatcgtaccctgtcctcctctggaatatagatgatgaaatggaccggatcagacgtaccggcccaacgctggtcctgtaaatcgtgcctaagcctgacctgacccgatggtgaatagggtagtgccagctcgacaatatatctgtgctgggcttaggctgtgattcaggcacgtcgtgtcggcctggcacggcccgattaaacggcaagcacgaccggcccattcacggtaccctcgcgcaccctagaccttgtgtcctcgtgcccacacacatgacctagacccgtcccctcccctaccctcgtctccctcgcggcctcgccccatcgcctgtt

SEQ ID NO: 6508 - DNA, 293 bp, Zea Mays
cggggtcgtggagcgtgccaatgggaaaatcttcacagctgtcaagaagatgctcctcgatgaaaaaaggcagatggaccgatttgttaccggaggcagtatgggcgctaaacacaactgagtgcagggcgaccgggttcactcctttccgccttctatacggatcggaggcaatgaccccgcaagaaataaagcatgggtccccgcgtacagttccgtcagccgtccctgacgtggacgagccaacctcaaaagatctcattgacggagaccgggtcttcgccctacaggcc

SEQ ID NO: 6509 - DNA, 403 bp, Zea Mays
tgaaaattttcgaaaaggtgttatatatttgtgaacggaggtaatatatatctatgtatatctaagtgcatgtcaaatggagtagggtaggttacaagccggataggctgatgtgtgtagaaccatgcgagtgttagacctcttttgaatcagaataatgcattgtaggatttttttatggtcctaaaagttttctgccatctcatctgtgactatgagagaagccattttggttcgtttagtttgtcttggctgcctgtatgccacaccgtggcatctttcttctcagctgtgttggattatgttttctatgttctcaaatgcttcttctgattcacaaatatactatcttaggctctctttgtgtatataagattgtgtatataagattactccctatccc

SEQ ID NO: 6510 - DNA, 286 bp, Zea Mays
atatgatggaatatgcaaaacagcagcacagcaggaagtgaaagaacattatcttttgaagatgtgaattaaaggaatatgcatatttcaaatcgaagggttgtacacttactctgtggatcgtccagctgtagagaaaagatcagcccagtgtcgaccatcagttttcctagcaacactgactacaacatccatatattcaggaaagttccgtagcaggtcacaagttttctcaagaagagaattcttgggagaatcaactttttgtgaagcctgattttttgaa

SEQ ID NO: 6511 - DNA, 725 bp, Zea Mays
atctatagctaactaaatcagtgttctagttcagaaacctgattacctggtaaacctaccagattagaaacaggagagactgcccatgctgctttcatgtccaatttctaaatgattcggcaaaaactgttttgcaaaaactggcacactgctaggacaactgagaatcaggcaaaaccaatagcaggcgaacataaaaccatatttacagtttttttaaacttgcatggacaaagaagagaacgcacaccacaaagcgcacatgagatccacaacacagcaagcagcctacctttaaacgttgcacacgggaagagcaacacaagccttgcatgcctgcgccatcgccagggccgcagcggagcaacactacaacggtgcataggtagcacttgataagcagatctacaagtgtagtagcaagcgtttggtgcacaaatcagagttgagaaagaacggtacaataccttgcgcttgaagggggcgagtggatggtttccaggagggaaaatcaaccaccctggtaggtaggttgtagagctaggagggagggaagaggaaacccacggtccaagggcttatccgtggggcagcagctagaggacgacatgggtacacagcggccaaagtacaacgcactactgcggcagagggatggcgaggggcgtccaccgcgcgccccggccgatgggcagcatcacgtggcggagacctgcacaggcgct

SEQ ID NO: 6512 - DNA, 374 bp, Zea Mays
gagcagctgaacccgagttcgctacgagagtttagcatggaggaagaagagtctggccaaccgggcccacacggaagcgactccatgcgatagaaaagaatggggctggcgagcgggacccacaccacagtggcatatggcgtgcgggtgagaagacagcaagcgacgcacggtaatgggccatatgggccagaagagataaagtggagctgggctgggggagtgatttcagcccagaccgcgcaggaatccctttttttcttttctctatttcaaatctaatttaaattcaatcacctattttgaactcccaatttccaaatgctaaaattaatactagtgtaactataacttctactgtttatcatttattc

SEQ ID NO: 6513 - DNA, 494 bp, Zea Mays
gacctaggggagctgtggagcgaagagggcaagggatcgtggggggaggcgagtcggcgcggggcccacgttacttatactacggtgcccgcaccggctagcggcgaaaacatcggcggtggtttagctcggactccatttttctcgcgaggaggaagaacgcgcagttcacatacggtgtatgaccgcgcggacccacacctcagtggtgtttgagacgagcgcgcacgcaagagacagacgagcggggccaagctgtcggcgcaaggaatccagtagggccgaggggaggaagcgaagaagtgggccaaaagtggtgcgactagcccaattaggttaggattgctttcttattttttttaaatttaatttttatttttcctattctatttccaattgaattcacttttgaatctgagtttgaatttttctattcaaaccaaaatgcaccatcaaaatccagcatgatgcaatattcattatatatatatatt

SEQ ID NO: 6514 - DNA, 903 bp, Zea Mays
ggcgatatgatcccggccgagtgacttctgctactatgaatggtccttcccatagaggtgacaatttatgccgtccctcccccgttagaattcggcggaggacgagatctcccactgcaaagaaccgatgtcgtatggccttatcatgatagcgcctcagagtttgctggtatcgtgctgattgaatcaccacatttagtcgctcttcttcgagtacgtcaacatcttctagcctagtagcttcagcttctgctatgttatcaaagattaaccttggtgccccgaacttgagatcggccggtagcactgcctccgaaccataaaccataaagaagggggtatttccatgcagagctcgactgggttgagttctcaggctccaaactacatatggcaactctctgatccattttcctgcgaacttttcattcttgtcgaagactttctttctgagtgcttctaatatcatcccgttggctctttctacctacccgttggctcttgggtgcgccaccgaggcatatttgatctgaatgctcttttgctcgcagaaatcgaagaattccgagctggtgaagttggatcctagatcagttatgatgctattcggtatcccgaacctgaatattatatcctgtatgaattccactgccttagctgaagttaaagaagcaatggtcttgaattctatccatttagtgaatttgttgatagccaccagtacatgagtgtatcctccttgggctttcttgaaaggtccaatcatatctaatcctcagcacgcgaacggccaagttatgggtatagtctgcagctgctgtgccggtagatgctggtgttttgacaagtactggcaggcttcgcacctctgtactaactcggctgcatcactcttcgctgttg

SEQ ID NO: 6515 - DNA, 673 bp, Zea Mays
aagtgcaagtgtcgtcctgcaagcaacacgaacatgatggagcttgtgtgtctcccctagagttgtagatggccagcaccgaattgcagacccctgtggctacatgcatccaggtgaggaaagagagttctagcagatagggccacacagttggctctccaaactcatgctcaccacatgtcgggtgaatgacccccggtcactgggacccgttagtcagagagcgcgctgaggaaagagcctctgatcgctgaggtccgttagtcagctgggagaggcgaatatgtcaaccctgaaagagcccgccctcggttgaaccctgtggcaccgagcccggggtcgggcatggcggaacctgacaggggaggccagacgtgtcggaagggaaccactcgagtgggtcccgcgctcagccctagactgactctccaaaaatagtcgaacacatttaaccacgcctggcaccgagccacagcacgatgcccgtccgcttcccactcatgacctacgagcacctcgggcgcatagcactcatgacctacgagcccctcagactgcggcacattaatggcccgcgcacccctcggcctacggcgcaattatggcctaccagactaggcctgagtgcgcagacctcccgcagggcactaaactacgggttgcgtcgatccct

SEQ ID NO: 6516 - DNA, 831 bp, Zea Mays
gttgaagtattcccaaggggctgcgtcggtatagctccttttcttctcctatcagcacaaaggtctttgctcggcgggtgaggcgctaggcctcggtcttccctagagggagttctccccgaaggagatactccaggtaaggtgccctccagtccgaagctagagcggctcggttttcatcgccatcgatttgcatagcctcgggcccgccggccgggggtgcttcttcatggggggcgagctcggacgcctccttgggcattaccgagggtttgaagatgtccttagcgaagacgttcgaggggaccgtggtccgccccgaggcgattttcgctagttcatcagctacctcgttgtactggcgtgcgacgtggttgagctccagtccgaaaaacttatcttagaggtgtctaacttcctcgcagtaagcctccatcctcgcgtcaagacagctcgagtttttcatcacctggtcattttaagtcgggaatcccatcggacgtctaggcgtctgactcctagatcgatggtgatgcgcaaaccattgaccaaggcttcatactcggtgacattgttggatgcagcgaagcggagacacacgacgtatcgcagatgtacgccgaggggtgagataaaaagcaatccagcacctaccccagttttcatcagcgatccgtcaaagtacatggtccataactcagcttggatcggagccgttggtaaatgggtatcggtccattcggccagaaagtaagctagggcatgggatttgaagaccttcttgggggcgaacgagagagtttctcccatgagttcgatgacccacttggc

SEQ ID NO: 6517 - DNA, 316 bp, Zea Mays
ttcaaatctaccacctcatttggaggcatgcgataagacattcttgagatgggagcagtactaggctttaattcaatcacaaactccacatctgtttctggaggcaatctgggtagatcctcaggaaacacattcggaaacctgcatactacaagaatatcttgcaattcatgtaccatcgcttcaaaaactcttacggttgttttggacggagcaggtacatgaatgaactatctaacttctccacggtcattgttcaactagacagtgtgctgactggcattgatgactgcttcattttgggctaactaattca

SEQ ID NO: 6518 - DNA, 483 bp, Zea Mays
gtgatatctcaaccgtgagggccagaagggagaataatgttcctcttcccgaagctgacgtagtggtggttttcagaagcttcatgaaagttgggctttgattccctctggacaaaatgttggtcaaagttctgaaaacctttgaaatttaccttcatcaacttactcccgaagctatcgaccatgaggagccaaggactggaaccagatgcaagatgcttttgcaacattcatgagttatcttatgagacgaaggctatcggaaaggagtggtatcacaacaactttggttgttacatcttcgtgcctcgatctgaggcaagctacccagtgcctacgttttagaagaggtggtcgggctcctggatgcaggaatggttttacgtaaagaatgacctaagtcagagggaggatgtgatagggattagccctatatggtctcgcttcgggattaggaggccagccactgcacttgggaatgat

SEQ ID NO: 6519 - DNA, 471 bp, Zea Mays
gggaaacaagagtcttaaaaagttgctattacatataacgaaaaacactcaaacacaatccaaaaaagagaagacattacactacacatggatgcccaactgcagctcgtctcaacgctatttcttgtttggccagatgaaagaccacttgtgtcgatgcttgcttgccctaaaaaatatgccgattccgctcgttccaaatattccaggtgaagtacataagcaaacccgaaacagtgagttgatcttctttcgatttgttttggagcacagcaacccaccacgaatcgaagctctgaatatctgagctgggcggcatgatcagattattggtccatgacctgactaactcccacacttccaaagcaatgggcacttgaggcaaaggtgaatcgcagtctccggctcttgatcgcaaaggatatctgtacaactagattcgcgtcccaaacatatttagatacaaactgg

SEQ ID NO: 6520 - DNA, 768 bp, Zea Mays
ctcggccgggatcatatcgtctcactcagatggacggcacggaaatcgggaactcatggaatatagaacatctcaggaagttttatccctagttgtatttcaaaagctatcgggacgacaatgtactctgtaaaatgggaaatatatcatcaataaaaaggcttcaagaatactcagtttgttcatgatcgacctgcattcttacttaactcgggtgaccactatgccctgctaaacggagcaatcggcttaagtcggcaacgacttaagacggtgcaacatgctcgcgcttacttaactcggggtgaccactatgccctgctaaacggagcaatcggcttaaatcggcaatgacttaagacggtgcaacatgctcgcgcttacttaactcagggcgaccactatgccctgctaaatggagcaatcggcttaagtcggcaacgacttaagacgatgcaacatgctcgcgcttacttaactcagggcgaccactatgccctgctaaacggagcaatcggcttaagttggcaacgacttaagacggtgcaacatgctcgcgcttacttaactcggggtgaccactatgccctactaaacggagcaatcggcttaagtcggcaacgacttaagacggtgcaacatgctcgcgcttacttaactcggggtgaccactatgccctgctaaacggagcaatcgacttaagtcggcaacgacttaagacggtgcaacatgctcgcgcttacttaactcggggtgaccactatgcc

SEQ ID NO: 6521 - DNA, 463 bp, Zea Mays
gcaaattagctggccagacagaagtaggaaaaagtagaggtctgaggagacgcgggctgctggagccccggtcctggatccacccctgcatggcaccctctgcgagctcctctccggccatcttccttcctctgctcctgctcgttcagggagccctggtgaccgtgcccctcacaatggacgccatccgagctccaacatggtcgagctcccttattccctgccatggacgtgcccctcccttgtagcttctcctcccttggctgtggccctcctcccgtgttgcccagcttggcctcgctggactacagcgctgttctccgagccagggaccatgccctcggatgcttcccggtcggcacaactccctcccaaggtcggggcccccttccccagcactcttcttcatttgcgcagaaatggtggcgagcccttttcctcctcctctgcgctctggtcttgc

SEQ ID NO: 6522 - DNA, 446 bp, Zea Mays
cgagggtttctccttggtaggctctgaaggcccagcttcggcgctagcctggctcattgtagcttcggcttcaatcagttttgtttcggtttcaatttgcactttcgaagccttggcaatttaacctggagtagagcttgaagtttttatcgtctccagcacatctagtacactggccatcctttttctcttgggggtcgctgctagacctttttgtgccttcagcaccgccactcctgtcgaagggcttagaacttctaatgttttcgtcccttcgattcttggttcctcaattttgtcagtcttcggcattgcagccggctcttcaatcctctacgtaggagcaggtcctcttactttaatagctgaagaagtttcaccgccaaattcaggcactatggccgattcaatgtagcgcggtcggtgggtaaggaccttcaactttt

SEQ ID NO: 6523 - DNA, 650 bp, Zea Mays
tgaaagccttctgacatgctttggcatcattttcaatcgccactgtcggcctttgaaggctgaagcgagatcagatggggcattggataatcacctttatgtcctccctttcaatcatattattcttaacataaaaccattcctccatccaggacctgggccaccttttctgaaatgttggaaccaggtagcttgcattagaacgagcaatgaatccataacaaccgaagttgttgtgatactgctctttgccagtggccttcgtctcgtacaacagttcgtgcatattgcaaaaacactttgcgctcggttctagcacttggcttcccacagcccaaacaaacaaacccattctgattatagcttcgagagtaatttgatgaagaaagatctgaaatatcttcaacacttcaaccaaaaatttgctcaatgggaaccgaagacccgccttcataaagcttctgtagacaacaacctcattttcttttggggcaggggcggtgctgtcccctccaaccctcacaatagacatgtcatgaaagtatcttcccttcatggcatcaatttgactttgtttaatggtcgactttccgaagatggtatggcttggccgccagggccggtcttcagaatcttcatcccactttcca

SEQ ID NO: 6524 - DNA, 962 bp, Zea Mays
cgtttttgtggactaaggagtcttcagatgaggatttagattattttgcttcgttggatgtggccacggcagagtccttgcagcagcctgaagtgcgtgaagtgtctgctcccccggctagggcgatgaccgaagagcaccgccggcgaaaggtggtgtcgaagcacaatgttcgcgagatgtcgcgaagtgggaggcgtcgacggatgtggatggaacgatcccgtcttcagctagatcggggtggccaatgagatttgctgtccttgacgttcgggacgtgtattggggagggggatctgcggaatctttttgagggcgaggagttgaagatgttgttgtttaatttttgtgagggaggccttatttcgaaggctgagccgatgttgcatgtttgctgccctcgctctcgtgttgtggtggtgagtgaaaacgctgcccttccccggctcgcaatagagagggagggcaacaagatgtgatttgtattgtttgtgcaatgtggctggcggcccttcgctgtgtgtatgtaaattatgattgcattgcttgttgtgaaatgggatggggacctcgctttccatgatgttggacgcttatgacgcgtacctggttgcatccttaggtggtttttgttcgaccgtgtcagatagcagagactttgcacctttaaggtgatcgtaatagacttaggcggctttaagatgttgcacatttatgcctgtccagctacacccttagacggcttttgctcggatgtcttatagtgaagacttcgtatcgtgcacttgttgtgcatatccggctgcacccttaggcggcttttgctcggatttgtcttatagtggagacttcgtatcgcgcacttgttgtgcatatccggctgcacccttaggcagcttttgctcagatttgtcttatagtaaagacttcatatcgcgcacttgttgtgcatatccggc

SEQ ID NO: 6525 - DNA, 425 bp, Zea Mays
ttaatgcagccggtcacctatgacgggtcgatcttgggctaggcgtaggatctacttgagtggttttccttccgtgcacccggcccctgtctggttccgccaagctcgaccctgggcttggtgttgtgaggttcgttcggagtcagatgccaccagggtagacgttatttatctcctccggctgaccagcgggctctagttgccaatggccctttgtcaatgcgctcgctgaacgatgagccccagggaccgggatctcatccccggcaagagctcttcttcaatggtctttattttgtccatcatcggcggggcatgttcatccttgtcctatttcttgtgtccacaacctctattttcatatctacatcctcctcctttgtatctatactgactatccatcgatgcttcttcttacaccgaag

SEQ ID NO: 6526 - DNA, 389 bp, Zea Mays
cttttgttcccccgatgatgggccccatcacgacgacctccagggcagcagccgccactaacacgtcgcccactatgcccatgttgtaggactccttcatggcgttccagcatcaggtgtaggactcccagacattgatcatcaaccacctgacggcgttgattgcccagttgggggcgatcgagatccagctcgcatcggcctcgactgtgatcgatccatcatcgtcgtcccatgtcttcctctctgctgcacaagattacctctacggccttcctagcaatggaggcatccccaccgccccgctgtggtgccctccttgcccctggcacttcatctgccacccttgcccttatgtccatgacctcctaggccaccatcgccccatc

SEQ ID NO: 6527 - DNA, 882 bp, Zea Mays
tttctgaattctgaaagatggtgttgttatttttaatgattctgcacaaagacattctgtttgtacaatgttaccataacaatccttgaacttgactcttgctcttggtatgagcaggatatgccttcgtttccaattttctttgactttcctttgccagtgatacttatctacttgttctattgaaggaagcaaaggtctttgggggtttacacaaattaattaatccttttagttagaaggataaaacttctttgttttaaaccatagagtcagttcaagcctcatttttcctttgcacgaaatatgattctgaagggatatatagatgtgcatgttgctaaaaaggtggaaggtaacataaaataacagtatgcttgctgattggagagaagggattcattttgttcacagaataattgtttggcttctataattcctctggtgtcttaaactaggttaatgtattgtattgttgtagggttataggaggctgagtcactgtgagagcaactccatcatggccccaacttgagccctcatagctaaatataggtgcccagaccaaaaacacaactccagcatggcccttactagagccctcaaatttgggtggccacccaaatcctccctctagcactcaaacgatggttcaaggcttgaagccaacaccttctcaacccgccccatcatcctcgttgaaggcctcttcgatctcctcgtcggccaactcaacgcccggcgcaacggcaatgaggtaggcgatagctggcgtggaggagtggcacgacgcgagttgatgaagagaggagcggcacgggtgggtgggggacgtggaggagctgtgtggctcctggagtcgcctggtacccgtcgcgatgg

SEQ ID NO: 6528 - DNA, 640 bp, Zea Mays
cggtgactccctatacaccctcgccctctttcccttcctactcggccacaccttccacccccgtcgcaaccatcatgcacgctatcattgccgtcgtccactggagggggaaggtccccgccatcgacgctatcatctgatggatgcgcgatctacatcatcttcccactcattgggtctccaatcagagtcgtggtgaatgtggacggcagaggctggaagagggtgtctgcttctcctcgtggcatcatctgtagagctagaggtgaaggcatcatcgatctgctcgatggtgcacacgaggtggatgcggtagcgttgccatgggggaaggagacacacaatgacagcaaggcaaaggcaaaacagagggaatgcgaaggtagaaccctcttaatgtaagtagaggtttactcttttctctgattcgatgcttaatctaattagagagtctagccaatcgcatgtcgacatgtcctccattggcctgcatctagcaaagacatcaacaaactattccacaatctcctccatcgtgtcacaactcttcgtgacatctcagctcctcaccatctcctccattgtgtctattcctctctcctacactgctcatgaatttctcctatacttctcataaata

SEQ ID NO: 6529 - DNA, 562 bp, Zea Mays
ccctacatgatccagcggttgctacaggtgcggaacagtgaactaactccacgaaagaagcagcggcagcagcagcctgcagcgacagctatgaaaaaaaaatacagccggtcagtaacgaattgaagaaactaagggccctaaacgatcgcgaaatgttgtggcctgtggctcgaatccaagaccacgatctctatctcttcggggagcagagcagatacatgtgccttgtagtgttgtgtacacgcacatgcacaagtcgtcgccgacggcgcctcaacacgccaacagcggcgaaccggcccgtgatggttttaatggaaaagcgtgtagtagtgcccttcttctccatccatcttccatctgccactttatcaacccgtcatcaattcatcagctgcatgcaccatcgcagtaaactctccactccatcctgtcatccatccacccacccacccagacccagctgcaccctctcgctcctttattgcgccaccgccggccatggctgcctgcccaccgtcctcccccaccacatggccagtccagcgcacagatatag

SEQ ID NO: 6530 - DNA, 580 bp, Zea Mays
caggcccgcacattttttctttctcacggtattgcactgcgcatgtcgtgcccatatacttctcaacaaaatggaaaagcagaacgttcccttcgcaccataaacaacattctgcgctccctattatttcaggcgagtctccctccggcctactgggttgaagcgcttcacaccgcaacatatcttgtgaaccgactccccactaaaaaccctcgccttctccacaccatacacctctctctactccaccaaaccttcctatgatcatcttcgagtttttgggtgtgcttgttatcccaacatgtcagccacagcacctcacaaactctctccccgctcatccctatgcgtctttctagggtattcatcagaccataaaggatatcgctgtctcgagctccagtccaatcgcatcattatttctagacatgtcgtttttgatgaatctttctttcccttctccgacatgtctaccacaccccatggctccttctgtcctggattttttaaccgatgaatctgatcttaccactctagttcctggaactcgtattgtgcatgcaggtaccactactccaac

SEQ ID NO: 6531 - DNA, 410 bp, Zea Mays
gaaaagttactctaccttgccactaaatctatggatggaggcattaaaacgaccattcatatcctcaatagagtaccaagtaagtcggtgcccaaaacactatatgagttctggttctggacatgaagagtgcccttagaaaaccacttacatgtgtggaagagtactgctaaggctaaagtgtttaacccaaacattggcaaactagtaaaatcacctggtaaatgagtcacgatgcgttcatagaggatgaaatgatgaggggtagcatggtaactcaagaaattgatctcgaggaaaagcatgtatgtgtgcccactgatgattcaagaaccaatttttgaactacatgctcttgttgcccaaacagtgcaagacactgtagtgacaacatctgttgtcagttctct

SEQ ID NO: 6532 - DNA, 531 bp, Zea Mays
ggttataggaatagtttgcagatgctgggcgggcaagtattgttgcttcgataggaactggcatgctttgcatttctgaaccaaatctgtcgcatccttctttgttgttggctaatagaaaccagacctaaaggcttttcctaccaatgttttttatgctgcatgtatgccacattgccctgcgtggatttcatccagtagctgccttcctatagccgagtgaatacatttcatgaggactcctcctgcacctcttctatatagtagaccccctatgatggtataatgggccgactgccttgcgatgcattctgccgcggccttatcatccagttcttcctcgttttcgatgtacctaataattggctccctccagtcgttgggatctgtttgtgcttggtctatagtgttgcattcttcagcatgccatgcagtgacgctaggttgttgtacttcttggacgaaaatcccaagtggaacctgggcccgactggaccccaattttgacaatgtgtctgctgctgcattgcg

SEQ ID NO: 6533 - DNA, 603 bp, Zea Mays
taccatttctgataaaggatagcatcatgataagaggttagctcaaaaaatggtagcaacaaaatccaaaggagagttcggtttggtgactgacaaaagtgatgacttcgtctaagaatcagcttaggtgaagaattagcataagaagctagctcaataggagatgtctcatcagatgaaggtgaatccttacaggaagatggctcaaaaatagaagctttcacaatagaagagggcagctcatcaaaggaagatggcgtaccagaagaatctacaacccacgaatgtagacatgtgtcacccaaagcttcctagtgtagttagaaatcaaggaaggagctcatcagaggaagatggcgtaccagaagaatctacaacccacgaatgtagacatgtgtcaccagaagcttcctagtgtagttagaaatcaaggaatgagactctaaaaaagacaccaagggaggtaccactgaagaaggcataactgaagtaggtaaggatcctgataagggtgtgaggtaggtacattagtagtaggagcacctaggaagaatataatagaaaggggatcaaccaaggatgttggtgaagaatcaaaagaag

SEQ ID NO: 6534 - DNA, 468 bp, Zea Mays
tcatctcattcaaaggaaatcttaatcctgctttaaagaagcttttgaacactacaacctcattcttttccggcttcggagtaatttcctcttcgccaaaacgaatcagctccttttttgcttcactgaagtagcccagcttcaccattttgggaagatcagcttcaaagatggtggactttccaaactccaagtgactaggtttacttggcatcccgcagctgtactcatctttggaaccaacttcttcaacatcagcttgtgttgcttcggcagcaggtgtgtcctctgatgaaaccagcccagaacgcctcattgcttcggagatcggaatagtttcagcggcttcggtctcatctccatcacgctcaaccctagcagtggagcgtactctggccatttgaatttaaacttcttgagaatcctttggaaattaataaccttctttccgaagctcttctcgtgacg

SEQ ID NO: 6535 - DNA, 352 bp, Zea Mays
tgacttacctatcttggaggaggaagtttgggcaacaattaagtctcttcctaatgatcgtgcccctgaaccggatggctatataggaagattttataaagtatgttggaacgttattagagctgatttcatggcagtcattcttactctgtgtgggaaaccctaacccctgagtggggttgagagttgtattaatagacttggtagttgggccaggcccattacagtagggacgagagggtaaatacacaggagacaacaaaaaccccaacaggtactctaacacccccgcagtcgcaactctatcctgtacagatgttgagactggaccgaaagtctaggaatacactcg

SEQ ID NO: 6536 - DNA, 524 bp, Zea Mays
tctggttcccagctcacagcgcggtggttgcaacagaatcagagattccagggtggtgggtctcaatggcgagcgcttcaggcctttatgagctggccccgtgaccgtcttccccaccctcgcgacttgattaggagagcatcaacgcggtgagggagttggggaagaactcggcattccgccaatcgggttccaccgtcgtggtcaattgcgcgttggcgcagcatcggatccatcgtgcctgggcggagaacttcgtcgtgtctctacgggacttctggttacctctacgggggaggagagaccacatgtgacgtggaatttctcgccaggatcaccgttccaccgcaaaagcaccctacgccgtgagcatcatcgcctgagccatcacatcaggtaaggatacattaatccccttcggattgatccccgcatcgcgtatgactaatcgaatttggggcgtgaagaagtgtggctcgggatggccaacaacggccagggcgccaccgtactgcatacggctc

SEQ ID NO: 6537 - DNA, 610 bp, Zea Mays
gcctccatttcgaaaccagttctgccgtgtttcataatggaaataatctcattgagcccgaggtagtatatgacagtaggaagtatcatgcatgacatgcttgtttgatggcgagtaaatgcaccagctaaccactaggtgctacagcctagaataataccgcacacttaatattttcttacaacagtacagctgtcaagtgtcaagtattaactaaaaaacggcatgcactgaccctcatcttcccatatctgtctattgtacctatgcacttcaagactcctgaatcaccaagaaattgtttggctggccaacagatggtggctagtatgctgtagatccatcatgcatctgcttttccgcaagttgacatgatgtatttctagatttgtttttttcactcgctaatcctttttcaaccatttatttgcatgcgtacatctcttgtggaatggatggcattcattactcagtcattaaaattggtagtgttggacattgcctaaataaaatagaaacaaggggaagagtaaaggaacgtgtgccatgtggaaatggcatgtatccattttggtgttgcagggagtgtttacacttcatttagtgacat

SEQ ID NO: 6538 - DNA, 733 bp, Zea Mays
catgagcggtcatttttattttgcacatccttggtgatcttgttaatttcttgtcactttcctcagtaaaggatttttacttcaacccttccgttggaaccatacatatcttacccttgattattttctccacttcgccactttgcgagtcttgccttaactctatccttggttatgcttttcacgattataatctttacccttgtcacttctatatcttaccttgatgcttatgttatacctatcctttaaaaccttctctcttccatctcaattttatagttttattttacctattttcattggtcatatccacttccttgtcgcttgcgagtttttaactccatcctttgttgtgctcaagttgggtattacctttacctttcttatctctcgatcctaccttggtaattacattatgtccgttctctaaaatctccaatctcatatcccaatttgagagtggtgttttacttacctcacccttggctatatcctcttctttaccgcgtgtaagcttgggcgcaactccattctttgttgtactcataccactggttctccaatgccttcatattttctctcatacctgtaatacccactttgtaataagagtgtagaaagagaaattatattcctttatacatatatgtgtcatctatatttatcatcacatgtgaacacttcatttgaaaacaaataattaataaaaatgtatgccaccaaattatgc

SEQ ID NO: 6539 - DNA, 486 bp, Zea Mays
accagtgggagcacctcctcctcttcctcatcttcccccatttcctccacaacataactagtcaccttcaccacgcctccaccttccatgtcatccaccaaaccagcatccaccacatcatcgttcatgtctagctcagcttagacagacactagttgcatgtccgacgaacgctaaagcttccttttcttcttaacctctagatcggcggttggggcatccggctgaccgtgtcgtagactcgcaaggttatctaccctcttcccactagtactcgactactcgagggcaacacaccctgactcaagtcgcgtcgactcagaggacttctcggccaacatgccaagaacagccttaatctcagagtcactggcatgtcgttgtatcaagatatgggtctatttatcctcctcagggagatcccgatgcgcagcaactatggcttctatctcatccgaagaaagccacactctatggctagaaatg

SEQ ID NO: 6540 - DNA, 715 bp, Zea Mays
ggcgaaagggggtcggttgaataaagcgctgaagatcagaacactaaaatatctaaaaagcaaggacaaagatcaagggcactgtagaatcggatgtgttcgagtgatttggggtaaggatcgaccgcgaggagatagcttcggacgtgtcacgattccatggacctagccagagcctagccgtagataattcaccggcggtcgtcgtggctcggtcatttacgccgccttgtcactcatgcctcgctcttccctcactgtgtctcttctttacgtggtaaccatgcacaaatgatgtaatccgaggccatggatcgctagctggaccaccgggcctataaatagccccgccacccacgacgaggtattcaccagttcaccagtgagctgggttgaagcataaattcatagaatcctctccacctctccccaaattagtggtgcacagtgaaaaagcagtcctttgcgaccgtgtagccccaaccgcacctcctaattccactagaacccgtcgcggcaccattttcccccttctcagtcaccgacgagcgaaaatcctccgcgctccgtggccagccgctcccagttctgctcctgctcttcttaatcgtgttttagcacccatacatgctcgtgatactcatcggctcaaccctctatgctcgaccacactcaattaaccgaaacacatggaattgtattcggtattccccgc

SEQ ID NO: 6541 - DNA, 554 bp, Zea Mays
cgaaagtgaaactacaaaacagaagaaccagattttattttcgggcataaaaagtcaatggtctccccaagaacaactaatagcagatacactatcagacgatgaattgccaggttttccaaaaaggaaacatcacaaggatgcccaactccaaaaagaagcaaatgagtgttacattgatggatggactattacttgaacacagttacagccccgtcgtcgcatcagttccaagaaacaaaaatggaaacatggaaaaagtcaagaaataacttcaagaaagtcttgctatcaatgtggacgtgaaggtcattacttccgtaactgtcctgagaagagttcactaccagatacctccaagataaagctatctcagacatggaatatgaacaaaaatgtatagaaacttctatcaacatagtgaagaacaacaaaaggaataggaaaatgtttggatacatgagtagtccacctcaaccacaagcaaaagccccgaaacacatgaatacccaaacaagaagaatcaagtcaggttcagctatatgggatacaga

SEQ ID NO: 6542 - DNA, 2503 bp, Zea Mays
gcgctggggatcgggatcggtgtcggcgtcggcctgggcctcgcgtccgcgccctgggccggcggcgcctcagcctccgcctccgccagggccgcgggggtcaccgtcgagagggtggagcaggacctccgccgcctcctcgccgacggcgccgacagcaaggtcaccttcgacgagttcccgtactacctcaggtctagtttcctcctccgctccgccctttcttcagacgtcgtcctcccatgcattctgctttctgcaccaacgcacggaaagaagctgctggctgcagcagcgacgcgcacgtcggttcagagttcccgtcatgcgacgagactctgccagagctgcagctgctgctccctcgtcgcctgcttgctctactttgaatctgtctgttgatgcgtctcccgtcccgtcaccttttcttaccctgtgatgtgatgtgcatgctacatgagatgactagaccagctgcgtgttctctgaaccagatagaaaaattagaagaactcgggctaaataaaaagtagtaggaaagaggtgtgtgtgatttccaggctcatggatcagcaacggaactctgctctggtcgctaccgatgaacaaacgatccttgtttccgatttctgcggtcgtaggataaagtgtcatgctccatttgcatgtcggtattggaggacaccaaatcagccatagtattgaaataaaatgcaaattcaattatgttgtttggaggtcactatattggagtttgaaattagatggtataattccacataatacagatgagtgaccctttgaattaggagagagagaatctagttatattccaattccacggaattgattttctgattccaaatctcaatttcatgtgcaagcaaacgacagaatttcatctatatccaaacggggcattagatttttagaggaaaaaacaagcagatctcgcaggtgcctgcctcgtgcaatcaaatggctgcaacgaaaggtggtgacagaaatcgtcctggtcggttctggatgagaatgcatgttctatggtatcagttcacagatgcttaaaaaactaaattggttgtgtctgatctgaccatgtatcaatgacgggatgcactgcatacagtgagttctgtttgtacgctcatcttcttgtccaattccggttcgcagtgagcaaacgcgtgttgtgctgaccagcgctgcgtacgttcacttgaaacaagcagagatttccaagtacaccaggaatcttgctcccgccagtcgtgcaatcctgctgtcaggtcccgcaggtacattgtcatcttccgcttgtattggcactcctctcagccaatttgtttctgcttcactgaactaagactcaatgtcctgtcttgaagagctctaccaacagatgctagccagagctcttgcccactattttcaagcaaagttgctcttgctagatcctactgatttccttataaaggtcagtttggctgaaacagtctcccttcattcacaaatcatgtcgtttgtaaccaaatagtgtccttccttacagatccataacaaatatggcacaggtggcggcacagagaaggtaagaaggcctttgaacattccagctttctgaggtagtgaggttaccttttcttgtgacatgcccatagcgccattcaggtgtagtcattattaatagaaattactggtgcgttcagtttgcttttcattgatatgatgatgtaatacatctgcatattgttgccgaacttgatctttttgctcattcacagattctcatgcctcgattaattgctaacagaagagcactttttttccttcttggcagacatttaaaagatcaatctccgagacgacgcttgaacgtgtgtcgggattgtttggatctctttcaattcttccacaaaaggaacagcccaaaggtgacacctaagcatttaggaaacactgttcagctcatcattgtactgcagtatttggcttggtgctagtagtctacctcaggttttgaactgaatatgtatacaacatcagtgttgacagttctagtagacctctagacgtcatttccttggacaatatgaaacatatgttctggcatgaatgctactctgacttcacaaattccatagctgaaaatggaaccatcccattcctttcgttgttctttgttatctgagaacctgattgtttagctgtagaaaaacatgtacatgtttctcctcctttgacataatttgtacctgccatgtgtcgatttgaaatcctgcttgacttcaagtttgttagctgccatttattctgaatgctaaagaaaagaagagatccttttccagcataaaactgaaattcacttgcatgtatattactgaagaatatagtaactggatgacttttagtttataaatgcagatgcatgtttcttaactcacttggtttttatctcaggaactatacgtagacaaagcagcatgacggatgtcaaattaag

SEQ ID NO: 6543 - DNA, 930 bp, Zea Mays
gttgactctggctccgcgctccgcttctaagcttgttcatgagaatagtgagttggagcatgaggtggatcaaatcgtggattacgagcgtttccatcgagttaacgaactcgtggccccatcgtccaacggatctcggcctcatgttcatggtttggaagatctccacgggaatagattctgggcaatttcgagcgacggcgcggattctgagttagatgtcgatgaggagattcacgtacctgataccctggaaattttgaaggctgccgtccaggggtgttctatgcatgatctgcgggaggcagacgatgatgagcggtgtaagatgggaaaaaattattgatctagttgccgggcacattaggaaaaacccaaaggcccgtggcttgaagccgtgggttggggtcctgcctggtcctcgggtttcgccaaagatgacattgggagatgccttagaaaaggcaaggttcatgcccttgaaacacacttcgtcggcggcgttccggcctgatggtgtagctgaaaggtttaccacctcgccgggcagctcgccggagtcaggggctgggtacatgcatgagaatcacgacgtttgcgcaagatggctacaggattcgaattcaaacagtgtcgagttaacggaacgggaaacacggcagcagagcatgctgcgtgacgggcgcccgaggcctaacagtgcggctagatgcaactatgttctcggccccaggtcacgctttcggcccattcccggtctggtttctttgtttgctagaaccggcacttcacgcactgggccgcgtgcgacgctgttccgtaagccgcacataccaagtaggaaacctatctcctacgctgacgtgctgagggcggcggacatggacggcggccggagttctcagggtggtgctggtggcaggggagcgg

SEQ ID NO: 6544 - DNA, 735 bp, Zea Mays
tgcgcgtcaattaccagaaaggacagagtctctagcgcaaaatatatcgagactcacaacactatactatggattacaggtttatttcctagaaaggcaggggatactttgaatatttccatggtcgaaacggtatgacgccttctcgaccgcgcgatcacgagtggacggtgcggattagatcagtcccaccgtgaaccggtatgctaccatggtcgttggatctaggatcgaggatccggatttaattatctcaagatctagtctctatcgtacgatgtgagatcaacggtctgggtttaatgcagtgaaggggtaccccttacttctaatctgagccgttagtaccaggatcgacggtgtcagcgaccccgttcaacccccgcgcccgctgatgccggcatgaggcggcgccgccctccctcacggcgatgggcccgccgaaatacagcccccgacgttgcagaggtaaaattccaactcctactagttcaacaggaagggaacaacacggtgaacagtgtggttagcggcttaacgaagttgggcgtgcgtgtacaggaggtcctggttgaggcggatccacatcagcgacgtcactccggtgagcaattaagccgccacagatgatgctccaagcacaacccagcaaccgtgagatcccttgaaccccagccaagctccctcgccccttgaaaccgcccgaacatcgatcaatcccggacacgacggcgg

SEQ ID NO: 6545 - DNA, 903 bp, Zea Mays
agataaagttgaccgacttgtggaaaaggtgatcagccttgaacttgccactacttcacagaatgctcagatcgatagaatgaagactgagatagatggccttcacgagcgcctgcatgctttggagcaagacaaggtggctttggttgttgattctagtaacttggctgacgggttgaggaaagttgaagaaatgctgcaagaagtacaacaaatttggaagtccgtacaaaatggtttcgagaacatttgtaaacaaatgactgaagccgcccatgaactaactgaattcgtcgaaacattacatgctcctgagcaagaaagcagtgacttcgtggattcatcgcgagactccaaacacgatacttctctggaagattactcgggactaacaagtctgtctgtgcaaaacgagccatccaaatctttacatgacactacaaatgaaactgataaacatgaagaaaccttagaagatcaagcccaaaaagagctagttccaaaagaatctgaagttgagggtaagattctattagaagactatgcatctgtacttcagagctacaaagatacagagcagaagctttcagaaattgagaagataaataaagattaccatcttgaggcaatgtcagaactgaaggaacttaagagtgccaatgcaacaaaagatgaggagatccactcgcttaggcgcatgctacgttctttgcggaaaaagatgagtgcttctattattgagagtatagagaaggcagaagaaacatccaagataagcagcagtcctactacagaagacatagagattgccaagtcagaagaaacatccaagataagcgccactccaagtacagaagacaaagagattgctgagatagaggaatacattaagcaatggcaaat

SEQ ID NO: 6546 - DNA, 450 bp, Zea Mays
cgctgagcctaacaatagcgttaggagtcagctgatgaagatatatttcaaagttctttaggacttcccctatcatctcgttcagaggaaatcgcagtcctgctctgaagaagctcttgaaaaccacaacttcatccttcttcggctctggggtagtttcttctccggcaaatcgaacaagtttgctttcagcttctccaaaatatcccagtttcatcatcaattgcatgtcatcttcggacacagtagatttctcaaaatccagatgactgggctttgttgggatcaaaatattgtaatcttcttcattctcatcaacattttcttcaacaacagtttgctcagtttcggcatcaggagcaccttcgtcaacaacttcctctgtcacaactagacctgatcgttccattacttcttaaattggtgttgtttcagtggcctcgatttctt

SEQ ID NO: 6547 - DNA, 337 bp, Zea Mays
cggatctccctggaaagggcgcgcgagcgccgccaaaacatcgagggccgcaacctcgatcaagactttgttgcggcaacaccgcagacaccaatgggcacccggtcccaaacgggtgtccccttggccggtgtaggctgtgccgccctcgcagaccatcttcgcgcgacatcatggccgcccaagttccggccgcacctgccggaaaaatacgatgggacatcaaacgcgtcggagttcctgcaggtgtacgtcaccgccatcacagcagcaggtggaaacaccgctgtgatggcaacgtattttcatgtcgccttgtctggacctgcccggactt

SEQ ID NO: 6548 - DNA, 972 bp, Zea Mays
ctcatcgccgtgtgggagatgggatcgaccgtctgcattgttgcagttccagttggtgaccgtggtgttggacctgggcgtttcgggaggagaacctgagaagagagagaatttggcgccgccaggcctcgcggtgatcgcgtggaagtgggggattcagtcgtgggcgcggaggagctcgctgtgccctgccggaccttactggtggggttcgccgggcatcgaccgtgcatgggagcagcgcgagctctctggtgttgctgggaatgcgattcgccgtcgggtgtcatgggagctggagcttgccgctcgtccgcaacgcgttgatgtgcagcatgggtggccggagtagaccaatttctcgccgaagctatggatggtcgcggctccgccttgagtcgtggccaggaggaattactctgcgaatcccggtgagaaccatctccactgctaacccatgttcctaatttcatgtagcatcatttgattaggaaatggagcattcgggtgtgcgggctatcacccgaccatggcgccgccgctgtgcctgttcaccgctgtccgtggatgcaggcacgggttggggtgatgagagagatgcccttggaccattgatcggccagcagacggtttagatttgaactagcatgggccgtcgatcttagggtttgcggtcgggattgaatgtgagattaggactaatttgagccgttcgatcagatcagacgggatcagatcgtgagtgttgcagggttgtagatcctcaatccaatggctgagtttcgcgtaccggtttgggtgggcaagatctaatcctagcccttgttttctaatccagcggcctcgattcaccgataccccttcgttggcttatttgcttaagagcccctggttaatgcctgaactaacccgcggtccagtccaggatttcgctgtgtcttgggaagttttgcaccgagacccctagctttc

SEQ ID NO: 6549 - DNA, 360 bp, Zea Mays
gctacgatggtcactggtgagctattatggctggcaatgacgtggtgaaagggtcacggcgtggtgtgatcaaggcgaacgacgtacacctcgacgacggccgctcggccacgtcgccggcaagtggatgaggcgacatagcgaaacagtgccccaagttcatcctcggcgaagatcttttcaccaggagtcattatctacgcgttactaggcgcgaatcgtggcgctggcgtgaatccgagcgtgggtcaccagcggcgaagtgcagtgaacctgaagatcttttcgtgcactttaccatggcgatcatcatcagttgttctgacagcacgatttgaggagccttattctccattttcc

SEQ ID NO: 6550 - DNA, 834 bp, Zea Mays
gcaccatatggatgtaaaatcagcgttcttaaatggcgacctccaggaggaggtgtatgttgaacagccggttggtttcatcgttgcagggaaggaacatcaggtgctcaagttgaagaaagcgctttatggcctacaccaggcgccgcacgcttggaacgcgaaactggacgacaccctgttgtcgctcggttttcagaggagttcgtcggagcatgcaatctatgtcagacagagaggcgatgctcagttgacaatcggtgtctacgtcgatgatcttgtgatcactggctcaaatactgatgacatcaaggaattcaaaaaagaaatggcagcagcattcaagatgagcgaccttggcttgcttcactactacctcggcattgaagtgaagcagagcgcagagggtatttccttgagtcagggtgcctatgccaggaagattctaaagaagaatggcatggcaacctgtaatccctgccaagtgcccatggaggcacgtttgaagctgagcaagtttagcactgaaccaccggtggacgccacggcatacaggagcgtcgtcgggagcctaaggtacttggttaatacccgtcctgatatagcatttgctgttggctatgttagtcgttttctggaggatccacgtaaggatcacttggctgcggtgaaacatattctgcgctacctggcgggaaccaaaacttgggggctatggtttgagcggaggaagaaagaggaagcaaaactgataggtttcagcgacagtgattttgctggtgatgttgatgctaggaaaagcacaacaggggtaatcttcttcctcaatagcag

SEQ ID NO: 6551 - DNA, 730 bp, Zea Mays
gtcaaattgatctcattccatgggcttcacttcctaaccgtccaccatatcgaaccaatcctgaagaaactaaggagatacaaaggcaagtgcaagaacttcttgataaaggttttgttcgtgaaagtttaagcccttgtgttgttcctgtgattttagtaccaaaaaaagatggatcttggaggatgtgtgttgattggagagctataaataatattaccattcgctatcgccatcctattccacggctatatggaaagggaatagaagtggatgaatccaaggagaaagcaatcaaggattggtcagctccaatgaatgaaagaaccaatatggaagcctccaagcgtgctgcttatataaaaaagatacatgagaagaccaatgaagcaattgagctcaaagcagtgcgcaaggctgcaagtatgaacaagcataggaagaaagtgttatttgcaccgaaggacgtggtttggattcacttgcgcaaagagcatttttctgatcagcgcaaatccaaattgatgccacgaggggatggtccattgtgtattcttgccaagatcaatgataatgcatacaagatagatcttccaccaagctatggcgtgagcaacacgttcaatgttgctgacctcttaccatttacaagtcaagacacttcagagttgaggacgactccttttcaaggagaggaggatgatatgaccacgctaataagcaatacatt

SEQ ID NO: 6552 - DNA, 670 bp, Zea Mays
caccgcgctgtcaccggaatccgccgcgtgggtgtgctcgccagcgcagtcacagctcggggatctcatccctcctcggctggccgactataaattggaccctggcgttgcttcgtcgttgcatcacgcgctcaagcgatcactcaattgaactgaagaacccacgaggtctttcctccctgttcttagctccgccgcaagaatccatccgtggccagtgcaattagagatagctcgcgtcttctacttcctcgtttgagtattctcaggtacccgtgatgcttcccgacctatccaattgaattataccgtcattaatcgctcggaacatgcgattcctttaagattctccgctgtcgccgtgggcagagggttgtagagctccaaattagaaattgagtgaggggaaatactctttaggggtagaatctggtgtaaactaaagattagcgtcagccttcgccccctccggtcggtatagctcgccggatttcagctcccagcgcggatcgccgtcggggacctcacctgtgaaggaatagaacgttaggggtgtttctgcaatctgtcagtgactcgcgtaaacagtgcatgtacccacttgcggttatccaaaaggactgggtctttctgaaaagtccccaccgtgggcgcgggcgcacgcacaatt

SEQ ID NO: 6553 - DNA, 468 bp, Zea Mays
caggcaagtacagcttagttactacttcctttccggatggggacaccaacttaattgttctattttcacaactaacaacggcttggtttctatgcagccaattcatccctaggacgacatctaacccttgagttcccattactactaggctagcggggaagtctatcccccttatttcaatccttagattcggacagatcctatcggactgaacttttcccccaactaaattaactcttaaaggtgggatcattggttctatggggatgttatgtgcttctatccaagatgtagaaacaaaagatgtgtggcaccagtatcaaataatacttttgttgggtaggattcgactggaaacatatctactgccacgtcctgagcatcctggattgcttcggcctctaggtgattcacctttccacgtttgtaggcctgaccacggcctcctagtgcttgctgtggcgttcc

SEQ ID NO: 6554 - DNA, 304 bp, Zea Mays
acattaacaaccttacataacgtcttggaaggtcgaagttgccgatggaagaccaaaaggtagtggcgacggcatgaagacagcatagggcactggagatagatttatggtcaacaggacggtgggacgacggcggtggccgaaatatggtttctgcgatggatttagaaccaacattgatttagggagtcccaacgaggttggtaaatgtacggatgaaattgggttttgtagagagtttgtaaatttaaggacctgctttacataattgttggagaagagttttccccgaaaacttcttaaa

SEQ ID NO: 6555 - DNA, 331 bp, Zea Mays
cgaacatccccaggtctctttcagaggtcgggtcggtggcctgggcatgaatcgaccacgacgacgccattagcttcgaggaggcacacgacggcgcgctgggttgagaggagggcactgtccgtatatatatgcgcgatagaggtccgaggcgactagttcgtaactctgtggaagtcgcgggggagaacaacccaacctgtcgcacggcatcggtgtccgatgaacacggaagtagcgttcggccgcggttgcgaggttgaggaccagcctgacagagaggtccaccagtcaacgaccagatgaacatgctaatgccctggcagcccgg

SEQ ID NO: 6556 - DNA, 674 bp, Zea Mays
ctgtcactactcatgagaagcagggggccgattcgtccataccttgtccaaggaattcaacatcaacaaagtctttcccacctccaaataggggctcgcaacctcacggcaaacaagggaccgaagtggcggaaggaataaactgcgatccctcttgtttcatggaccaacacaagatgatcatagtcggtaaaagtgaggtccaagtcacagtcacatctgcaaccatgacggtggagcgcttcctgcgggatgtccgcggcgaggagcctaagcccctcatcgtgggtttagataccgaatggtttgaaaatgaccgtaagaagatagccctcattcaaatatgcgtcgataagaagtgccttctcttcaaggtgaacattgccggtgacatccccgacaacctcaagagtttcctggcagatgaagaccatgtttttgtcggtgttgcaattgctaatgatctggataggctacgggaaagccaccagatcgagctctccaacaaggtggagttacaggccatggcgccattcataatttcagatagacagtggaacaatgtgccaagcctggcaacactcgcacaagagttgttgggcgtggctattggaggtaaaggtacggacgtacgttacaagcattgggataacaaacagttgacagaaaaccaa

SEQ ID NO: 6557 - DNA, 704 bp, Zea Mays
cacacgattaacggctgcgatctgcaatatctagagatcggcccagatccggtcgatggcagatcaacagttcggatttaaagattcgaaccggtacgctatgccctatcgcgaccatccgaattgtcatctacggcttaaattcgaccatctagcgtctaatcatggacgagtgctgcgagatcgacagtcgggagttcgtcttcaaccggccgcagcacagtcagaggcgcccacccaatccatggcggggcctcaccagagttccggtgctccgaggtcccagtgcctaaaatcgagcctggctaggtgttacgcatggcggagacgatgaagagcacagtggaaggcttcttaccggtgattagtctccaaggattccttcccatggaggagagcggatccgcggtggtgcttgaactacggcgagagattccgacgtcgttggcccacaatcgcactcggaaagaccacgaatggcttccagacgcgtcggtgaaccacccgcgccggttcttgctgttaatgaagtactaccggcgtggattcgctagcggcaacggtggaaagatggggtggcggtgctcggctatggcagcgcggggaaatttgcgactggatgaacaggggatgcgaggcgaggccctaggtttcggatttatagtcctgtggtctcgattcgggaaaaggaggaggtcgccacg

SEQ ID NO: 6558 - DNA, 1118 bp, Zea Mays
aaattttattaagggaagttgctctgttcttaacaaaaatccagagataaagagggtagaaggtgatcggttcagaagagcgttgaagatcgaaccctgacaaatatctaaagaataccaaaagatccatgacactgttgatttggatgaacttggatggatcggtgaggattggatcgcctgggtgtagctcgatacgtggcatcgttccgcgggccgagccacgtgtggccggagttggtcaccggcgaccaccgtgactcgatcaacttttgccgcggtgtcacccgtgcctcgatctacctcactgtacttctcctctacgtggtatccatgcgctagcaaggtgatccgcggccgctgatcgcttgtcggtccgccgtggctttatatagcggcatgaaccacgacgaggcactcaccgcctcaaccgcaagcttgagaagaacccaaaattcgcattgccttctccacctcctcccaaattgatggtgcatggtgaaaccggccgtgtagcctcaatccccaaccccaatttcaaccagagccgccgcaacaccaattctcccctttctctgtcaccgacaagtctaagtcttccgcgctccgtggccagccctctctggtaaggcactgcccgattcaagcattgttttagtaactccgagtacccttagtgctcatcgtagcagccaattggtcaattaggacatgattgactgggaacgtgagctcgacgtccctgcttccgccatgagcgtggatagaacactttcttggtgtgcgagtcgaaattgaaggatgttctcggatcgccttaggtcaggaatgtccattccgtagccattttagacagccaccgccaatcatggctggaacaagtcgcatggtgctcggcggcaagcacgccgtggccaggggtactcgtggggaagaaatagaaatttgagggcatttctgcaatgtgtcagtgacactaagaaatcggccgaggacctctcttctaatttttacacccataaggacttatctgcaaaacctaccgcaccctcgtgcgcgcgcccgtaattctgtgcaggcctgggctggttgggccggtttcggcccaacactgttaa

SEQ ID NO: 6559 - DNA, 449 bp, Zea Mays
ttttgttgacggaatcagagaacagtaactttgatcttgacgatgagagtctaccttcagccgatggagatgagttgtcaaagactgagaagacaaagaggtcgacagtaggtactcgggtatccccctccaaatgcaaggtgaatagagtaaagagggctggttgttggaagtattttaaggtggtcaatgttgcatctagaaaggaacttggagttatggagacaaaagccaagtgcaagttatgttataggtcttatctataccatcaagggggagtactacaacactgaaccgacatctaggcaagtgcacacagtatttgaacaacctggcacgggctaagaaaaaacttgctcaaagtactatcccctttactttcaatggtggagttgttgttgttaatcccactgaatatgatcatgagcacactagacttttgattgcca

SEQ ID NO: 6560 - DNA, 392 bp, Zea Mays
aagggccaacccacaatttctgtggtgacatgaaaatggcctaatagatctctcgggtccattcacacacgcttaaagggccaacccaaacgggctgaaatttctgtggagactcattatcgcacaatcgctgctcactttccaaaaacaaatctacgatgcccatcgccgtacgtccgtaacgcagccgccattacttttcctccaagcaaagcaatacctctccccacagcaatcgctacatgccggccgcacctaactgacacacagactgacagaccccactccacccttccccacatgctagtctctgctattcccacacgcaggtgatttactggctatcacacattaatcactgacataatggccacaatatccaggtggattct

SEQ ID NO: 6561 - DNA, 387 bp, Zea Mays
gacgagagcgatggagttgggcaagaactggcgagaggtgcaggcatggggaagaggtagaggtcgagcagagctgggcacgaatatgggtggcatggggggcggttgacgaggttttcgcgatgtggggcatctcagacgggagggagaggttggggaagagaaaaagtgggcgagggcgccactgacatgcgggcccgatggctgggcggcggctggggcagggatgcccatggctagggtttgggggaggggcacacctgcgccgggtgggctcgctgggccacgcgtggaaatggactggggggagggcacggtgctgggtcacggacgtgggaggcaagctgggccagccgggaggggaggccagtgctaaggtgggctggc

SEQ ID NO: 6562 - DNA, 337 bp, Zea Mays
ggaggttggagaagaacgaaggaactcccaagtcgtgggaagttaattgatggctctatgaaggatcaccaaccggaacaacccgcaatgcatcagtggggaccaagtcagtgtcatcaacagaagtcaaaactctgtcattaggagcgctggcctctaaggcgacttcctgacccgaagcttgagctgctgccatgtaaccagaatgcagaggagaagaccctacgtgaacatcaatggaagtgtgagagggagaaccaactcggacaccctcgggggctgggtcatagctcgcgctacccatccgagccggatcatccccggcaacaccctcggg

SEQ ID NO: 6563 - DNA, 603 bp, Zea Mays
agagaaaatctgccctaaatcctggctgtcagatgactgaagaacaaacgccatggtacagtgcattggggaaacagataagggtctgatcgccgcggcagaaaatctcaccgccgacgacctatccgcgccgcgatttgcgccggggtcgagatgattaggcggcgagcatctccctgcgaagacctctttgctccggataagaccgccgcggtggagggcactaactccggttgccacgcggccatccctccttccggccatgtccggtcaccggcaccgccctcctctgttcggccacgccatcacggatttgactgccttacggccgtggttgaacgtggcaagctctaggggagtgccgtgctcagtgccatcgctgatcgccagctagggccagcaatggttatcaccgtgatcgcggcagtgattcaccgcggctataaattcaccccgtcctcgcccccttttctcaaatcaaccgagctccggccttcgtctccaaattgcgaagctgtagcaaccattcctgtccccgattagtcaccctggccggagaattgccattttcccccaaatcattccgccgcgccacccaaaaca

SEQ ID NO: 6564 - DNA, 717 bp, Zea Mays
gtatagtggtcaccctgagttaagtaagcatgcaggttgacagtaaacaatttgagcgcctttgagaatgaagtctttttattgatgatatatttcccagtttacagaatacaaggccgtcccaatagcttttgaaatatagctaggggtaaaacttcctgagatgttctatattccatgagttcccaatttccgtgtcgtccatttgattaagatgacatgatccaggccgagtgacttctgctactatgaatggcccttcccatagtggcgacaatttgtgtcgtccctcccccgttagaattcggcggaggatgaggtctcccactgcgaaggatcgatgtcgtatggccttgtcatgatagcgcctcagagtttgctgataccgggctgactgaatcaccgtattcaatcgttcttcttctagtatatcaacgtcctccagtctagtagcctcagcttctgctatgttttcaaagattaacctcggtgccccgaacttgagatcaacgggtagcactgcctccgaaccatagaccataaagaaaggaatgtttccatgcagagctctgctaggttgagttctcaggctccagacaacatacgacagctctctgatccacgttcctgtgaacttttcattcttgttgaagacttcctttctgagcgcttccaatatcatcccgttggctctttctacttgcccgttggctcttg

SEQ ID NO: 6565 - DNA, 1013 bp, Zea Mays
ggcgggttaggacaaacaacctatgaatcctattcaaggcaaggcaccatttgctgctgtcaacgaggacgatacgagtatggacgcaagaagcgtacaaggaaaggaaagagcagaattcaatagtcaagacattttcctcattataacatacatgggttcacccaaaatatatggggccatacacggcggcatgatggagctggaagtgaactgggtactggagccgcgattgcgggatggaagctgagacggcagttgtcgatgctaggttccccggtcgaggaaacagtcgtgggggaggggggcacagtgcgcgacgacggtgagctgagatcgctggcaatggcacgtggacgagattggtggcggcggaggcatcgacggtgctggcggaggatccggagggggtggcgaagcgacgacggcacaaaacactggttggctgcggtctcgcgaggacgagagagaaggggaccgatggcttcgcgagaactctagagagaaggggcctggacggcaacacgaggtggatccaactcgtggacgactgtgattattttggcgacgtagaccgtcccagaggttgagaatccccgtagcttttaatactttagatttcagaaaagggaaatgattctgataaaaaaagaaaagggaaaggatttataatgagaattgtggagtgtagtaatataattttttgtgttctgtcttaatagctgtctatatattgatggtgagaattttaagaagtttgagtgtttgaccatcacatattctaaaacaacttacatttggaatttgaggagtgtttgtaaagtgcgaagggggctcttgaaagcttggagtgcaattttgtgctcactagataatgatatcaatatggttgttgtctatattgattattagaagagggaatacaggtgcatatatatagaggagcaaaggggcaagagatctcaggtttatagaaacaataccctgagatctccttgattggtggaaaccta

SEQ ID NO: 6566 - DNA, 344 bp, Zea Mays
ctgcgttcaagcagctgcagatcctaggatcccgactgggaccctctcgcccattcttcagagtgggccctcaaccggtatatccccttgggagcatcgcactcccggttacattcgggactgaggagaacttccgcactgagaacgtctagttcgacgttgcggaggttaacctccctttcaatgccatcattggcaggccggccctgtaccggttcatggccattgcccattacgggtacttggtcctcaagatgccatcccctgctggggtcctcaccgtgtggggcgatcgccccgctgcgcttgtcgctgtcgagaagttgcatgccctggcggcagaa

SEQ ID NO: 6567 - DNA, 519 bp, Zea Mays
cgcgatctgggcgtagcgttggggtagcacacgcaacatcttcttcacgacccgagtgtcttcaatctcctccccggacgtgcgtagatccgccgccagtgcattgatgcgcatcgcgaaatcgtccaccgattcgccgtcactgaaagcgatgttctcaaactccttcaataggcgttgtgcattcgcctccttcacgcgctctgctcccacacgcatgctcttcaccgccgaccatgcttccttcactgtcctcttggacccaagcatttgccacatctccttcggtacagaccgcagcagacagcccatggccaatctgtcctgcgatctcctgacgccgtcacctccaggctcgatcacctcccacacctccatagcttcatagttacactgcatgagcatcgcccactccgagtaatttgagcgggtgagcatcggccacatcagtgaactctcgcgaacaccgctcgccgacgaactgcgctcatttccgctgccggatgtctccactcttcg

SEQ ID NO: 6568 - DNA, 672 bp, Zea Mays
accttcgtaaacaattttgttttcactttatattttgtttgattgtgttgtgtggcatcgtatatttatatatatcgtcaagtggccataacaactataccaaatctgggaaattaagtcaaaatacaataaaacacagataagttaattctctgctctctcctcatgcataaagttttactcgaagtaacccgaaggtatataatatgatgcatgaaagcctttttggcacagaagacatcacaaattgggattctattagtaagcaatatgaccttgccaaatgaataaaggctagaaatttcagtcatatattgctcaaccagttgttgacacattgctctctttgtcgctgaacgacatgaagcaaattctgagataaaaggacatgtaacccctagcaacccggagttgcgagtataggttattctgagataacattcactatgttggtgtgaaaaaccattgtgtgtttccgtcgaaccactttaatcgtcctatacaggatatcatgcttatgttgcatatatctctcagaattgtaaatatttatagtcgctgaattgactcgagatagtcctttgactgctatgatatacttttaagccaaatggtaaaggtcagtcctgaatggacatatacttggagtttatgtagcagaactacattgga

SEQ ID NO: 6569 - DNA, 381 bp, Zea Mays
ggcggtgccaggaagaagctctatggcaaactcaactttccgctcaggtggcatacctggtaaatccttcgggaacacatccggaaacactgacacaaccttgatagtctcaagtggatctgcctccttgctatcaatagccatatgatgacaacctcctttccttggcttaggtgtgactaactcagctaccacttcttctcctagtggggacaccaacttaattttcctcttatcacaactaataattgcttggtacttatctagccaattcatccctaggatgacacttattacctgagtacccattactatgagattagcgggaaacgctatcccccttatttccacacttacattcaagcaaatgctatcagctcg

SEQ ID NO: 6570 - DNA, 506 bp, Zea Mays
gacgacgatgatgaagatgacgatgatgacgaagacgaacaagtcaacaaagaagccaactacgcccagcatgactacttcatggggtttggtcctgtcgtcgaacattacacatcaatgttcgagacggggcagttccccaacctgctgcaagaagtgctgcacacgctaggaacctacgtccgccccttgtacgaaacaaggcgagtgagcgagcctccctgggcttgctaccacatcactcgcatccacgtcagggtgatggatgcagcggataggggattcaggactctgtctgctcatgagtccctgacaccgctatccacctacgctgcttcggtcagcgatgctgccagacggaccctgtggtctcttacccacacctactggcaacagctgcatgacatgaggttcaggcatctccctctgtgtctgagtggaggatgccagaccagcatcgttccaggtggagctggtgaggagcgtctcaacaccctagctggtgt

SEQ ID NO: 6571 - DNA, 415 bp, Zea Mays
gcagctgcttgaggatgaccccatagtcgtgtacctcactgcatacctgctcaccctggatgcacagtatgatttcttggctcggcaccaccgtcagatgattgcccgagtagaagatgcagagaagcgcaaccgtcagctccatgtggatctcaccatagctcaagcccgtgcaactgcattggaaagttgtgaagtcattgcggttgaagccctgaaacaagccaaggatgagcacgtccagaagctgatggaggcctacttggtaacccacaaccaatgtagagccctgcggatccaagagctcgcttcatccaacccagttcaacccatgagagctgaagatccccagattcttaaaggtcacccggtctctaccagaggagaaaagaaggcttgggaactaccggaagga

SEQ ID NO: 6572 - DNA, 500 bp, Zea Mays
gtgaaacaacccgggatgaaatgtttgacagtgttctgctctgtgattgtcgatttaattgtgatgctgctcatattagagaaatcaaggcaaaagaagcaaacaacagttcacagaatgttcggagaaaaggatatggtcaacggcaagtgaaatcacgaggtaagaagaaagaggaggaggttgacctcagggctcatctcatgcagtgtgcacaagcaatagtagtaaacaaccttccatttgccagtgagctactggagaagataaggcgtcacgcttcaccatatggagatggctctcagaggctggcactttacttggcaaatggtcttgaggcacgcttggctgggacagggagccaaatgtataaagaactgatggagaaacaaacaagggccacagacatgttgaaggcctaccgccttttcaatgcagtgtgtcctttcgctagggtagcatactacttctccaaccaaacaattgctgacctatcgaac

SEQ ID NO: 6573 - DNA, 595 bp, Zea Mays
tgtgtctaagtgttttgagtctgataaatctgggagttcaattgtgtggacagaggagtcttcggacgaggacttggattattttgctgcattggatgtggctgcggcggagacttctccacgtgtgatgggtgatgaggatcttccgggtgcgagtattgggcataggcggcgaagggcggtggcgaaacagagagtgagtgagttgtcgcgaagtgataggcgtcatcgtggtgaggtggagggtggtcgtcttcgtgtagacgggactggcaatcgggaattgttggcctcgccggctggggcaagtgtaggtgagggagagctgcgaagtctttttgagggtgatgagttgaggataacactgttcaactacagggagatgggtatcatctctagggttgagccaatgtaatgtgtgatgccctcgctgtatgtatgtaactataatttgtatgataaggttgcgtgccttcgctgatccggccgcgcacgtaggcgacttgtgcacttgatgttgcacatttattgtgttagtccggctgcacccgtaggtgatttttgcacggagggtccggctgcacccttaggcgac

SEQ ID NO: 6574 - DNA, 537 bp, Zea Mays
tttgacattagttaggtttggttcgagattgtagttgtttgattaagtaggggaggggaaccagcgcgaacacccttcgtggcatcgcccgcccgccacgcctgcaaggcctgaagtcacaaggatgcaaggaggaccccgttgtcgccatccttgcaagccgctcgggactttcgactaatggcagcaaggcagagagggaaggaggaaggggcgacgacatgtggctaaggtttggtgctgcctgagccacattgggagacggcatggggattgaaattgtggtttctcactcggcatatgaacacatttatacaggttacatggtagacgaattaagatcgggcacaacaaccagttcaaacaaagcacaaatcattgtaaaggtttagtactcgtttaaacaattatcccatttaaacaaggtctacctacgtgatatatagatatcccccgggtctttacgaggacggaaacattgttccgtctcgctcgaggccaaccttggaagggagacgttgtttcgcctcgctcgag

SEQ ID NO: 6575 - DNA, 424 bp, Zea Mays
gtggtggcgtggtgcaactcgtgccctggtgcttggaatcggagaggagcgtgtgaggggtagaaccgaggtaggaagaagctagggagacagtagggggaggggatgaagcagggatgaaggtggtggtgctatttatggaggagaagctccagagtagggtagccatgttctcttctttgtagcaaaatagtgaacacgtggtgagggctacagtagagactttgggcggcaagttttggcattttctgtttagattcagatcttgggcactatagaagatattttccttgatctatgctctacaaatcatatatagagattgagtcagttcaggcatgggttaaagagttatagacccacgaaaataggtttgtgagtgccttggaaatcaattgaatctaagtgtcaaaataggtcaaac

SEQ ID NO: 6576 - DNA, 331 bp, Zea Mays
cctaagggtgcagccggacaagcacaataagtgcacaatacgaagtctttactaaaagtcaaatccgtgcaaaagtcgcccaagggtgcagccggacaatcatagcaagcacgaagtccccatctcaatcaacaacatcgcatgaacaagcaaagggtcaccggccacattatacaaacaacaatgttgtcacagattacatacacacaacgaagggtcaccaaccacaccgcacaaataagtacaaatcgcactttgtcgcccctccctctttattgcgagccgggggagggcagcgtttttactcactaccgcaagacaagagtgaggg

SEQ ID NO: 6577 - DNA, 337 bp, Zea Mays
ccaaagttggagggagacccaaggcagacggcaacgaggcagtcgcaaaggaaaggagggagctttgctgggctggagtggtcgagtggagtggctcaccgcctgaccgactgagccaggggggcattcgggcgtcccaccccgcgcgggggtgagagagacagagaggagaaaaagcggcgcctcatcacggtcgcccgcctgctcggcctcttcttctccctccccttcctgtctctgcgtcgcgttgcggttgtgcgcacctggtcgttctcggtttcctccccagccggtcctctcgggctccgttttccttccgggccgctcttggcgcctt

SEQ ID NO: 6578 - DNA, 359 bp, Zea Mays
aaaaaaccaattcagagcataagatcagcacaaaagctaaaatcaaagctagttcctccagaaggaggcaaatggctcaacacaactagcaatagctccaaataacatatctagcccacttgaatgagaggaagcccggaagacaaaattctccccctagatagagaaaacaagaaatctcaaaatctttcccccttgttgacaagtgaactcatcaagcatagacagggttagaaagaaacatgcccccttgacaagagaacctcccctgagaaaaaacagaaatgcaacaaagagtatgaatgcatgagcgtcaggagtataccagccagagtgtaaaaaatgctctaagtggtgtt

SEQ ID NO: 6579 - DNA, 364 bp, Zea Mays
caggacagggaaggctcctcgcgctccaacagattgtaccattgctgtgttgcgcccgtcaggtgataggaggctaaccagaccttatcttcttcaaccgtgcgctggccacgaaagtattgttcgcatcgattgagccatcccagtggatcctctttaccgtcgaagagagacatttccaaattggggaatcttggagtatggggcggcggcggcgcatggcagttggtcatggaagtgcgagggggtgtggtggagaaggtgggcagcggtgaaggtgatggcggaaagttgatctggtggataggaacgaaggatgtggtaggggctgcaagggcggtggttggcggcgaggtggttcttg

SEQ ID NO: 6580 - DNA, 613 bp, Zea Mays
aaaaacacaccaaacacacacacacatacacataccagccacacacaacacaccaccaccacaacatacaaagaggctaaaaaacccttccttcctctaacgaggatcaaaaagagagcgcatgttcttggctcctacaaaaaaccacatccgcatctcatctttgaaaccatcctctaaggtagaaaggcaaggctgagctccataaaaatacacctatttatctgcttccaaaggctctaagccccaaggatgaccacactattaaatccctttcttttgcttttaggaatcctagctgaagccttcctccaccattcagcaaaacatgaatctcttctcttaggagccacagtagagagatcgattggagttaatatattatgccaaaactgtcttgtgaaaccgcaatttgatagaatatgttgcacagtttcatcttcttgatcacatagaacacaatttttaggataatcaagacccctttttgagtttatcggttgtccaacacaatttccagtggactgcacagattccatttagtccacattcagttaccaacagttcatgctaacacctagacactgcatatagttgatggacattatactaa

SEQ ID NO: 6581 - DNA, 352 bp, Zea Mays
tgagggggtacctagcgtcagccgtgaagcgcagatggccgtccacgaagctttgcggtccacggcggtctgcagacaacggcgagcaattccggtggggtagaacaagtccaggggccgaggatcccgtggacaccaccgggacgacgccacaaccacacccgatcaggtaccgaggcacgcacactagtgaatctgccggtcaacgacgacggattccacttcgagcatgcgacagcggtggtggcaatacggctcagcagacgtgggtgcgagtgggcgagaagcggggaaacggtcgtgggagcaacgagtttatagtgccagggggaaggaatcgattccggggcac

SEQ ID NO: 6582 - DNA, 631 bp, Zea Mays
caggaagggcacggggatggttccttaccttaggagtgtgctcggggatgcttgacacgatgctaggagctccgggcagacgacgcggtggcgcgcttctccggcgagcttgagcggcggcggctaagcgcgagagaggttgagagtgggtgaaattaggaaggggagggagagcgggtgtaggcggggctcaaaagggagctgggggcgtgggtaggcaacgtggtcggcttcctcggcgtgagtgcgtgtgcgggtcagcagcggttgcggggaagatgagactgacaaggcgggcccacagagtagaggcacgagcacgtgtgaggaggaaatgattcagcgctgatgggctgggcccactgcacagagggagagcgggggcgtgcgcgcgagggtgagcggcaccaataggtcgggcccacctggcagatggagagagagggcaggtgcgtaggctgggctgcttttctattttctttttattctgaatttctagttccttttatttttattttctctattgaattcaaatccaacgaaaccacaaattcaaatttgaatatttcaaacatgtgcatcaaccaaaaacaaagtttaagctcagcatgatgcaacaattcatgtctcc

SEQ ID NO: 6583 - DNA, 833 bp, Zea Mays
gcatttccctaatggtggattgcacgtagaggaaattatcatggatgcttctcttcttgatgaaagcactctgacagttggaaaccatatcatttaggtgggggcgagtctgttggccagtagcttggtgaaaatttagtgatgttgtgaataaggctgatgggcctatagtctgtgattctgagagcctcaaccttctttgggagcaggacaatattaactgaatttaagatctcgaagccttgggagtttagttggtacagacagttgagtgcgactgtcaaatcgttcccgatagtgtcccagcatgccttaaagaaggcacccgtgtagccatcagggcctggcgccttgtcggacggcatggagaagacggtgcgccgaatttcgatataagagaaaggtaattctaggtgttggaggtccctcgtctcgtaacctagcgcctgaatcaatggtcatggttctagttgctgcagtcctaggtgctcactaaagtaatcgtcggccaccttttctttctaatgctgagagaagaccatgccatcctgggactgtaagcattggatgtagtttttccttctacgagcatttgctttcaagtgaaagagcttggtgttggcgtctccacagcgaatgtaggtgagcctagacctctgttgcattctcgatttctcaatgacagccaaccccgtgctacggattttgaggcggcgccttagatccaactcatgggcagtgagagtcctggattcctgcgccaattccagctgtaggattatctctttggctatggccagctgcagtcttgtgtttcctatttttcatctttt

SEQ ID NO: 6584 - DNA, 465 bp, Zea Mays
gtattgttttaatgttttgcaaataggaccctggataggaagctttaccctacatagggattaaaggggtaaaacctaacccaaattgagaaaacctaaatactttagggaaatagttataacatacccccaaaaataaagttgaatcacctttatacccctgaagataatagaaaccctaattggaaccctggaaaaccctaaaacaaaaacctagggacctatgtgcaaaattagtccacttttggactaaagtgcaaaaaccaagtcaaataagtatttgaagtcatttggttcacaaatgtgtggacttgtaggccaaactttggattttggacttaaatgcaaatggacctcaattaggttctattctaagtgtgaatttcactgatattggctcaactttggagccttgtatctttcagaatatagggatttttaccctaggtcaccacatcaaagttg

SEQ ID NO: 6585 - DNA, 602 bp, Zea Mays
aaaagggtgaggagttccattgtctccaaatgactcctcttccatactacctgaatttcctagctgtcatccgcacggatgctttcttggcgaggttgccttttaaattcgcgtagttgttgctccgactgaggaaccgcctttgggaattctcactctccaccatcatcttcctgaggcattttttatttgtgacaccatccgaaagattgttcattgtttgcaccataggaacttgtgcaatttggttgtgaacatcaccccctgcgcctccatggtactgtatatgtgcctctgttcatctcctttgcttccatgattttcgtctttccttcaagatggtgcatcacttctctcactctggtaagtaaatggaacattcttacgcccctctccactgattgacacccacttcctatcgcccatgaatttgctagaaacccaccttagagatttatcaaatggcgccagctcgtccttaacgaatttcatagaacaacttttctgagtgtgtccgatcagaccgcacatataacaaaaatccgataagtattcatagcaaatcggacaccacttctcctttccatctgcttccaactgca

SEQ ID NO: 6586 - DNA, 719 bp, Zea Mays
cgctggccttcctcgagccggccagtgcgagggagaagcgcctagaagcgattggagtactcctcgaccgtctccgtgcggcggcactcgaagagctcgaacagtggggcggactgaagcaccggcccgaagcgctggttcaggagtttcctgaagcgcccccatggcgacgtgccctcgtcctcctggagttggatgaaccatagttgggccacatcctccaggttgtacgacgccatccacaccttctcctctggcatggtgcgttgttggcgaaaatacgactcgtaccgatcgattgatgaaaatcagtgggtcggacttgccgtcgaagcgcgggaagtccatcttctggaaccgcggggggcgatccgtgtggtgtggcccatcgtggtggatactggagtcggttgacgagtcgaccttctccttcatgcccaccatgtcggtctgcatctttgacatggcggtggtcagggactagagcattgtcatcacctcggccatggtgtgttgatcgccatcgcccatggttgacggtgcggacgttgccgtggacgacgaggaaggagatggaggcggcggttggaatggtggtgaggctgcgatgaaagattgggtggaggtggtgggagaggatcgacgagactgagataccaggttgtcaagggcagtgagcccgagggtagggggacctcggctacgtagatcgtaaccgc

SEQ ID NO: 6587 - DNA, 815 bp, Zea Mays
gttgtcaagcacacatgggttcaatttggtgataaaaggtctgttaagagacaagcggtgggaggatgccatcggcttgcttgaggttatggttgatataccttctgccggtactgcgactaagtgtgaagagcttgatatcatgacagaatgtgttgctcaatgcaatcttgtcactattgtgtcctctgattttcatcctgaattcatcagtctgtttgtcaaaaaatttggtggctctgtggcagtatcaagcaagagagtattgtttctcagttggggctacatggaggagtatgaggttctgattccatttcagttccttcaggttcgtgagagccaagtaaatgatgtttgccaggacatgggtgtgggagataagtgcttggctgccattcatgactttggcgatgttcagggtgtagatgaagcaaaggaggagcttgttgagatagtgagatgtctgcatggttcactgaactccaagaagcttggagcaaaattgcacaggggtgtcctgcttgttggccctccaggaactggaaacactcttctagcatgggcagttgcaggagaggctggaattccatttttctatgtttctgctagtaagtttgttgaagcttttgttggaagaggtgttgcccgtgtcagggaattgttcaaggaagccaaagaagctgctccatccatcatttttattgatgaacttgatgttgtgggtggaaatagaggtagaagttttaacgatgtgagggaccaaactctaaaccagctaattgcagaaatggatggttttgactcggacatgaaag

SEQ ID NO: 6588 - DNA, 413 bp, Zea Mays
ctaaaagacagatcatacccagcttatatgtatcgaggcctcgctgattcaacccgggttaccaacagaaggatttggtgagccggctcgagatgatacttagaggcaaggtgtcgaacatcggcgctcctgttgcatactcagcctggaatctgcctccttccaaggcctttaccagttttgtgtcaaatcctcctgctggtgatagcagtttgggacttagagtgtgaccctctcccgaagaggttagtgctttggttgcctcacttggcaaaatccctgacgacgagaggcaggttcatttcgaggtacctttgaatcccagtgatgcagagataagtgtcatgctagatatgttgtctaaagattcctctgatgcagctcctgctgaaacactggctgtagcacccatc

SEQ ID NO: 6589 - DNA, 456 bp, Zea Mays
gtctatagggcccacaacatgacgagcatcgccaagacctaggctatggaggccaagggttggtgtggcatagagacgataacgatgatgtcgaagctcttcgccacccatgtcgtcatccataaagagcgcaaccaggaagcccagacgactgaggcacctgcggataaccatgactttaccagggtagaacaccccattttaccacggcatcgtagatccttccttgatcggtagtcgacccccaccttggccaataaaaagggagaggtcggccagaagacacatgaagacatagaaaaacacccatatacgaccacactagaagacccagaggactacagaggccgaagccatggagcgaaccaccatgaagcccaaggcttagcagagagcaccagattcatagtccttaggtctaaccacgcataagagacctaggaggtcctccctctc

SEQ ID NO: 6590 - DNA, 404 bp, Zea Mays
agggccacaccccatacctgatgaattcctcaaccaaatcgtgtccgctactcaagtaggcaacataccgaagggccccctcgtcctcgtcatcttctgccatctcaaattgagggaacaccacataacaatgtgagcaaagaatggccggaggcaggccagggaggtcttcaacatcaccaggagaaacatagaaccaataatctcaccagttgccccacttgttcctggcgcaggggactatctctacgacctccgccgaagtctttccagtcctcggcttgaaggtgcacgaccaaaattgagcaatcttacttcctatcctcctcttctgccaatgcaggcaataattcttggcaaagacctccacagacgactgcccgtcgtaagaagcaacctcccac

SEQ ID NO: 6591 - DNA, 656 bp, Zea Mays
agtctaacactctggatggtccgatgtggaacgcagactgtccggtgttaaattcggatggactggtatgaaatgcggatggttcgggatactcgaatggtgcgtgtgtaaccagacggtttgagcgtgtcagttaagccttgcaaagagtatagggatcctggcatgattttgggttgtccaccgtaaaggatggggccatcgaccagaggcgtggatagtccgagctcaggcccggacgatctggccgtgggcaggacagtaggtttattccaaattgatggaggaggttgtggttgtctggtgtatgagttcatcggcatataccataaaatggctgggtttgtaaatgcccatttgtagctgataaattatgtgtgacatccttagcatcaatctcgtgcaatggaaaattagaaacggagaatttttcatatgcgtgtgtcaattttctaaaggactcttccatacccccatgtattgttttaattgatcccgctgctcatctatataatgactaagtgattagatgttcacgggtttacttacattaggagcacgtgtagcaggtacaagagatgtcatcttgtactttccttgttggatgatcctttgatgtcagtgcacctttaagtgtactagatatttttcctttg

SEQ ID NO: 6592 - DNA, 413 bp, Zea Mays
tcaggatgtgaccttaactgatcaggaagatagacatacatggaagctagaatcagatggggcatactcctcaaaatcagcttacagggcgttctttgagggttctactacctttgaaccatggaagagaatctggaacatgggccccaaacaaatgcaagatgtttatgtggctggctgtcagaaatagatgttggacttctgatcggtttgctagaaggggcctacctcatccaaacagatgtcccctctgtgatcaagaggatgagaccatccaacatctgttagcttcttgtgtggttgccagacaagtctggttttctctgttctctactctgaacctctcaacctgggcccccagacaacaagataataattttactgaatggtggagaaaggtttcgagaaaaatc

SEQ ID NO: 6593 - DNA, 596 bp, Zea Mays
agaaagttgtgttgttcaaattgtgaccgataatggttctaattacaagaaagcatgcaagcaacttatagccgagtatccacatattacttggcagccatgtgccgctcacactattaatttaatgttgaagtacatagcacgatgtaatgaggttgatgaactattatatagtgccaagcggatatgtagattcttgtacaagcataataagtaatatttatatcgtgaaattcttgtacaagcataatagttaatatttcaatagttaatctgatgatattctgatttttcagccttcatgctatgatgaaagagaagataggtggagagcttgttagatggaatgccacaaggtttggcacactttttttgttcctacagagtttttgggacagacaagacaagttccaagcttggatggtgtctagcgattggaaaaataatgattggagagatgagaaagaccacaaattcacctacggttgtttgatagataggatatggtgggagaagattgaaatggtgctgaaaactgtgacaccactctattatgtgcttcgatttgttgaccaacagaaaaatggaaccatttc

SEQ ID NO: 6594 - DNA, 390 bp, Zea Mays
gacaggtaggccctaacaaactagtatcaaatatatatactacatgaagtagtaaaggctacgacggaaagagatcttctcatcgcccgtcgttctgattttctgaccaggcgtgtcttccaccccttttgcgagcttgtgcctgctgcaaagtacacctggtatgttgacgtatgtaggggtcagtcctactgacgtgtggtggatttaatgcggtggacgtgatagtgctgcccgagccaacgactgctgatgatggtgccacccatgcgcatggcacaaagacacaactgcctgcctcagttaccgatgcgggcggtcattcgtgcatgcaatgtctgacaaaagcctgcacatgccctatgtgaggtagggcacgcctccgccgct

SEQ ID NO: 6595 - DNA, 312 bp, Zea Mays
gcatgagtgtgtggccttcatgtcacctcccggtgaactaatgtgtaatatcttcttaagaggatacttaggtatattgtgtttttccacaaatgactcagttataaaggaatgcgatgctccagagtcaaataaaactgatgcaggtatggagttaacaagaaacataccatacactatgtcggcatcctcaggcactgattctgcagtgacgtgattgacccttcctctgctctggttctgcggtgtcttgttctgagcagatccacgagtgggggtgttctggtcattcctctgattattgcctttctg

SEQ ID NO: 6596 - DNA, 591 bp, Zea Mays
gcacactgagtggaccgcgggttataatacgtaaacagagaggtttatatgcaaaacttgcgcagtccaaaggtgtgggtggatctcggccgtcagatcggacatgggtgttccagattagatctggagtggatcgaaacggtacacgtcgaccaccgcacgatcaaatctctacgctctagattcaatactctagcgtcacttgtcatctatccgatctaaatcggacgactcacaacccccaaacccgaatcggtatacaagttctaatcgtagccgttcctgcccaatacaacgatgcacgcagatccgcccgaccctggcccttgccgacgatgagggcgccccgcacggcggcgcgccatggtcggaatttcccccgctagcctacagtgcatgattacccgccgcgctagatgctaaccgaagctgaggccacgatgaattctggaagggagtacttactcgcgattgagttgatgacggggcagaccacagagcgaagcggctccgctgcgttacgcacgaacgacgagggttttccggtgacctgagtcccttcgagccaatggatcacgatgttcaccttcc

SEQ ID NO: 6597 - DNA, 1069 bp, Zea Mays
taccgacttaaactgactgctccgttggtagggtttagtggtcaccctgagtcaagtaagcgtgagcatgtcacaccgccttaagtcattgtcgacttaagccgattgctccgttaatagggcatagtggtcaccctaggttaagtaagcgtgagcatgtcacaccgccttaagtcattgccgacttaagtcgattgcttcgttaatagggcatagtggtcaccctaggttaagtaagcgtgagcatgtcacaccgccttaagtcattgccgacttaagccgattgctccgttaataaggcatagtggtcaccctaggttaagtaagcgtgagcatgtcacaccgccttaagtcattgctgacttaagccgattgctccgtttgtagggtatagtggtcaccctgagtcgagtaagtatgcagattgacaataaacaattcgagtgcctttgagaatgaagtcattttattgatggtgtatctccctattatagaatacaatgccgtcccaatagcttttgaaatctagctaggggtaaaacttcctgagatgctctatattccatgagttccctatttctgtgccatccatttgagtaagacgatatgatccaggccgagtgacttctgctactatgtatggcccttcccatagtggcgacaatttgtgtcgtccctcccccgttagaattcggcggaggacaagatctcccactgcgaaggatcgatgtcgtatggccttatcatgatagcgcctcagagtctgttggtatcttgctgactgaattactgtattcaactgttcttcttctagtatatcaatatcctccagtctagtagcttcagctttagctatgttttcgaagatcaatcttggtgccccaaacttgagatcagcaggtagcactgcctccgaaccataaaccatgaagaagggagtgtttccatgcaaagctcggctgggttgagttcttaggctccagaccacatacggcaactctccgatccactttcctgcgaacttttcattcttatcgatgactttctttctgagtgcttccaatatcat

SEQ ID NO: 6598 - DNA, 781 bp, Zea Mays
gattagtattgggctcggagccctgaagtcctgaggcagttcgtttgaaccctatcgagggtcgaaccttcgaacctctgaacaatattcttccttgccttttttttcctccaggagtgacacgccgaggcagaagacaactttttccgattcgttgctccctttccgaggggattgcccgaggtagaagacgcttctttccagtttgattgccgagaggataaaggtacttcattggaaggctcgagggctactgtcggggacaataattagggacatttgaattatcccctaacaaacacacacagagaaataaggactaaacttccgaggggtgacagccaagccacctgtaaaaaccgagacatctccccgagagtctcctgcctcgagtagggctccacctcacccgaggtcaccgtcgctcagcctgtctcgcctgagccagcctcagacagataagacaagggtgcccaaaaataggcatgggacatgtacatttaatgtgtgtgccaacccacgttgtggcagcgagcacaatgacggacaatacagcgatcacgtccggtgcaacagcatgattacgtctacacaacagtgcgcgcacgccgcctgacaccctccgatggtacgcctaatacgacaagccgagcggacttgccttcgggcgcaatttcttcgcctcgcccgaagtaagatccagcccgcgagcacaacctctctgcctcgcccgaccccaggtccagccttcaggtaatttcttcgcctcgcccgacgtcaa

SEQ ID NO: 6599 - DNA, 287 bp, Zea Mays
gggtggtagatttaggtggagtgattttgacaaactttggggaggctagatgtttctctaaagaactcaacccactgcactcaccaaccttaacaaaaggagcgttactcacagccttagcaacaatgcctaacattgatctgccagcttccctcttgatctaactgatcatcatgcccaacttgggctcacttctagacacccatcttaagactgatcgaaggtatgtgtttttctccttgatcctaatcttgtcatgtctgcaaaactcaagagcaaactacaaa

SEQ ID NO: 6600 - DNA, 389 bp, Zea Mays
gtggggtattatcgacgttttgtacgccactttgggatcattgccaagcctcttaccacactgctcaagaaaggagtgttgttcatctggactccgacacatgaatcatctttttaagcgttgaagcaagcattggtgtcgacaccggtattggccctgcccaatttctcaattccattctgtttggagacagatgctagtggcctgggtgtaggtgtggttcttatgcaggctagacatcctattgcctaccttagcaaagccttgggacccaaattgcagggattgtctacatatgaataagagtttttggccattttggtagcagtggatcattggcgccattatttgtagttaaaggaatttcacatctatactgatcatcgaag

SEQ ID NO: 6601 - DNA, 1879 bp, Zea Mays
gacgttcgatcttgtccttgacagacggagtataacgatatggctggatgaataccggttgagacccttgaatgagcgggatagaatggtcacaagaacgagacggtggcaagccctgaggagcctcaaacaaaggctgaaactgctgtaggacagttgcaatgtggggatcaactggcagctctgaagagtcagtgtccactgagttcacaagatacaccacatgaaacagttcctaagtgggtggatgctgaaatttgccctggagcactatggagcggccattgtaaggcagagacagccatttctctgtccaatgaatcttcatgggactgaactattccaaccagtccataccgagtatcacatcatatgttaacagggaaaaactcaaaaatctgtgaagaatgtgtagccttgaactgaccagccagcatttctgaacacttgtgtacaaggaaccttgcctccattggctacgtgtgaaccgtgacaggttgaggaagtaatgtagcccctgtcatcttagctgctaaggtggaactaacaaacgagtgggaactacccgaatcaattagcatcaccacaagctgaccctgacactgtccagacaactgtaaggtgtggcaagagggattaccagagacatctgagagagacaaggacaacaattctccagaagcagtgtactccgcatcatcagatggtgtttctgacggttcctccatcaactcccagacctcttccaacacatgaagctgtactgttggagcacaacgatggcctggagcccacttctcagcacacttgtcacaaagtccgcgagcccgacgatacgctttaagagatgccaacttatcattagcctgccgaggacgaggaacattggtcagcttgggctgatcagcagctgaactgtcagcttggggaggacgaggtagaggcagtggtgagtgcaaattcctgatagctggcgtggaccgtgacggctccgagacctcctgcaattgggcaagagcacaagcagtatcgaggtttggtggacgctgtattaaaactgcagattttttatgatccttcaacccatctgtgaagcgcatggtataaaagagaggatcggtctgggactcataggctaacaactgatccactaatctagtgaattgctctatgtatgcagcaatagatgtggactgtctaatgcgaaaaagttgtcgaatgaggtactcgtgttggtccttaccaaacctctctagcaacaccctactgaactcagaccatgtgcagaaacagaggcgtgcaccaatggattgccaccatcgagcagctgggcctgtgaaatgcattgtggaaatctgaatccacatggctggatcaacatgatatagatcgaagtagtcttcgctacgaccgatccagaggcagtgattgtcaccatcgaacggaggaaatgagacttttggctatggtccgaactctgccgagtggtctcctaccggattgtggggagatccaagaaggtgagtgaattgtggggaattgaactgtggcgtaccattgtgcaggaagtgggtggatgcgtaaacgcgtccaaaaccagcctcccagcgatgagagtcgatgtcgtgcccttctgggccgtcggtcctgaattcggtagatgggtgcgtggaaaccgacctgaactcgccgaggatgccatgttgaaggtgtgctggcaccggcggtggaggatccttagtttgagacagtttggcgacggtcgtctggatcgattcgatgccgaccttgacatccgccaccgaggattcaatgctggtgcgccacgagtcgaaggccgcggatgccgactccagcaccgcaacccgcgaagctgttg

SEQ ID NO: 6602 - DNA, 964 bp, Zea Mays
tagggttgcctggttgtctcgtatttaccgtagcggacgacacagggctgcgagggccctaggcgccatcatcttggctataccgactcctgacctccatatcctagggctcgacacggtccatcatgtagcgccctgctagaggtttgcgcattcatgcctagtacgaaaggtcatgagtgcacctaggccgagggcgcaagggccgttaatgcgccgcagtctgggggactcgtaggtcatgagtgccatgcgacccgagaggtttgtaggtcatgagtgggaagaggaccggcgctcgcgccgtggctcagtgccaggcgtggttaaatgcggtcggctatttatggcgagttggtctagggccgagtgcgggatccactcaagtggttcccttcaccacacctgacctcccttgtcaggttctgccacgccagacgctaggctctgttctgcagggttcgaccgggggcgggttattttagggttgacgcatccgcctctcctaactaaataacgggccccaacgactaggggctctttcttcagtgcactctctgaatagcgggtccaagggaccggggatcatttcctcgatagtagcacccgagggagagtatctcccttcgggggttgatgatgggtcagacggtgtcctattcccttttgttgcttgtcattataagattcgtaaggcccaataccgacttttaggaaccaaccgggcgctataagtaagggattgcactgtgtttacccccaatcgataccagtcattgttctgcgctatctaaaatcggtatttactcgggagggtttcattacctccaacccctcggggtcctatcgactggccatggatcacggtaaacatcctgctctggattgctcacaccaaggtcgatccaagcgccgcccagcgcaggaaaggtgggtggtgtctagttatttgcttaactttcgc

SEQ ID NO: 6603 - DNA, 396 bp, Zea Mays
cctacctctaggccatcgagcacaccaggctcaagggctcataggaggaggaggacgacaatgatgatgaggatgacgatgatgatgatgtggagggcggcgacgaagacgacaaggaggagggcggcagcgatgatgatggtgacaacgacggtgatgacaaaggcaatggcggtggcagcgacgatgacgaggtcacctctacgacaccgttgaagcgctaccgcctcaagtaggcattgtctagtagtagtgtagtcataggttagtgttagtgaagtaggagtgtttgcaataattgttcataaaaacccacttttgtatcacctgatgaaatggaacatcttttcttattttctaaattgtgttcttctattcattgttgatttttcgctt

SEQ ID NO: 6604 - DNA, 522 bp, Zea Mays
cgcgggcatcgggtctgagagcagagaagggggcacgcgctagagatggcgttcagcgcgccgagctgcaggaggaggaagccgcgtagcatcagcttttatgcacaggaggaggggaaagtccgagtgaatgttgttggttcacgacgagaaatccgggtggagtttggttgaggcgcccgtggaagtcgcacatttggttggagattgtcacgggggagaagataacactgttagctgggacccaccgtcagagccatggccacgttgggagcaagggggagtgaggatggattgcgggccccacatggcagcggttgaaggaatgtgggttagtgcgcacccggttgtccacactgaatgggtgcctgatacgcatagtgtggctgacgttagggccccaccggtccagggagtgcgcacgctaggggagatgggccgcacatggagaacgaggtgtgggccgacgcggaggaatcctgggccgaggagaaaattggcccaagcgcaggtatttctttt

SEQ ID NO: 6605 - DNA, 788 bp, Zea Mays
ttaattcggaaagcttcagggaaagttctataagttttcggaacctctgcgtaattacttttgcacttcaataggactgcaggttgttttaacacaactgcaggggctattttgtaagatagctatggtgaaggggtacgcagagatcttggccgttggatcaaaaccaaacggaccggattacatctagctgtacaccgacccgcctcgatagaagccctcggatttggatcccacgaccagaaacgcctcgttggtcaccaatttgagtggtctatcggccatccaacagccaccgtctaagatgagcggatcagcgaagtcttccctaggatctcagatcgacgctcgacagtgatccggatgcaacacccctttccttctaatctggatcactcgctagggatcagacggctggaaatctccctcctattccagctggccaaacacggcggcccgactgcaagacccggcagcgccatggtcggtaccgtgtgtcccccgccacactcgaccaaactagaggagcccagtcccaacgtaatgctacgctcacggtaaaactagtcgtgtgaggcatacctggagtagaggagtggccgatgcgattcctggcacggcgcggcacaatggtgattcttccccgccggtgagaaattgacgccaatccggtggaagcctccccgccagaggtcgatgccccactactttactccaggcgcccccactggtgcaacaccaaggagcagaacgccgacgaagacgcaaatcctgccgcgagcccagac

SEQ ID NO: 6606 - DNA, 334 bp, Zea Mays
cacttatgtcggactgtccggagccacaccaaggttgtcatgtggctgattggctcaaaggtgatgtctggcgtagctggacatcacgggtataacctcggactgtccgatcccttcatggaccatccaacacctacgccggacaatatggagccagacatgtggctcacaggtgatgcccgacgtaacatggacagtctaggtatgatcctaggtcgtctggtccattcgtgtaccatccgaccacccagactggactgtccgagaatgtatatgcagaatagggtgttgcccacaacccatagtttttgcacccatcacagtagcactactc

SEQ ID NO: 6607 - DNA, 466 bp, Zea Mays
ccttgggcgtcgttgcggcgtgctccttggctctaacctccatgagctctcggtctgtctgccatgtctcttcgtctcgactgaccctccccttttatagtccaaggtggggtcgattaccggtagcttctcaaggaagtagctactgtgttgtggtaaaacaagatggtctacctcggtaaagccatgcttgtcagcatgagtcttagtcgtctatgcttctctggttgtgctctttaagactggcggcatgggcggcagagagctctgacaccatcattaccatctctatgccacgccgacccctggcctccatagcctaggtctcagcatggttcgtcgcgttgcgggtcctgtagatggccagtgcactcagacctaggttccataggtcatgagtggaaggaccgactctcccactgtggctcgatgcgaggcgcggttaatgcggtcaatcacataccgt

SEQ ID NO: 6608 - DNA, 618 bp, Zea Mays
ctgcagatcctcaatgaagttttctgagcttcatgttttaatcaccacatcatcgacataggcttctacccgcttgccccagtgatcggctaagcatgtttgaatggctctctggtaagtcgctccagcgttcttgaggccaaacgacatggaggtatagcagaaagctccaaacggggtaatgaatgcaattttttcctcgtcttcttttgccaggctgatttgatggtatccagagtagcaatccaggaatgacaacatagagcatccggcggtcgaatctaccacctgatctattctaggaagtccgaagggatccttcggacagtgtttgttgagatctgtatagtcgacgcacatgcgccaatccactttattcttttttagtacaagaatgggatttgctaaccactctggatgtagtacttctctaatgaaaccagccgcgactaatcgagctagctcggcacgaatagcttctctcttatcgggcgtgaaacgacgcaatttttgtcggatcagcctcgcctggggatagatcttcagtttgtgctaagccagttctctcaggactcccaacatatccgcaggctaccatgggaatacgtcttggttatc

SEQ ID NO: 6609 - DNA, 502 bp, Zea Mays
ataattcaatgactgcactttggcccttggcagactggagaccaaacaatttgaccgtagaaccgttgtaaggaatcatcaaccacttgtctgcccaattcaccatcataggactgaatttttcaagccaatccatgcccacaattaagtcatatttctgcagtggtaagacccgcagactagaagtgaagtcacaccctgatagcgaccaaactgcattggtgagttcgtgagtacactgcagttgagccacatttgctacttgcaccgtcaagggtcgttgcagaggagtaaggccatggacatgagctgccacttgagcacttaaaaaggagtgggaactccctgaatccattaagactaatagctccataccctgaatttgaccgatgaactgaactgtttttgggggtagcgactagcgacaccctccactgctgcctgggataaacagattgcattcagttattcagaaaagctctcttcgagacccgcccgccgc

SEQ ID NO: 6610 - DNA, 493 bp, Zea Mays
gaggtaacccggatagtttctcatgcttcgttgaccttggagggcggtctagcttacaaggacacgctggcccttgacattgctggtcagagtcacccgattcctttgggtacgaccgagggtgcttcagctttgggaggtgacgctaaggacgacctagcccccgagggttgtgctgagggcgacctagccctcgagggtagtgctgaagacggccaagcccccaatgatgctaggccaggctcctctacagccgcttctatggacgttcacattggatcgccactagttcaatctgaggaatccatggtgacgaatttacttgttgctcttgttggtccggtcaccttagagaccagtgacacggatgctaggaatccactgcctgttgatggagctgaggtctccctgagtgatgctttcaacattgtccctgttgatgccccatcaacaggcagtgcatcaatgcttccagctttaggtcttcctttat

SEQ ID NO: 6611 - DNA, 577 bp, Zea Mays
gaaaaagggcacaacaaaggggtatgagtcgatcccggccgtcggatcaaaggtggacgacacggattaaattgggttcctcctgaaccggaacatgatacaacacgttggatcagagttcaacggcatggattttaaacattagagatcttcttatactcgtttgatttggatcggatgacacagattcatctgcgcaaaacgcttccctccatctaatccaagccaatcatcgccagatcaatggtactggtttctctccctctcccgtcactcctgctcgcaccggcgaaggttccacacggcggcaccattgccgagggtcacccccacgagccccccctgcatccaaactcgacacccatggtgctacaggaagagtgcaacccgacgatcagggttaagggaatcgtgtcgcggatcgctcactcatatgcaccaaccacggcgcatggcggaagcactgggatgccctagtccgataagcaattatgctcccccgcataacccaaactcgactttcgatggctactaagtgctaccataaccaatttgagtaggtggggaagaatcttac

SEQ ID NO: 6612 - DNA, 450 bp, Zea Mays
aatggacgagtcaagagcacaacagccaaagaagcttgccaagcttcgttttcacactagatgcagtggatacaaacaaagggacaaacaaggtgcacgccttggcatcttgcacagcaaagcctggattgcatgcagtggcatccatcacgcacaccatatgccatggcgcgtgagtctgccgcccttgcatctggacgctccaaaaccccagcctgatgcacacaatctgtcccatgtgcatgcaccactcgtaacctagccttatttctgctctgtcccatctgctagctgcactagaatctagtgatcttccatggtacatctaaatctaaatgcaaccttttgcagctgccatttctactctcatgtcgtcactgctccaacatgatcaaagaggacatgttagcccttatatagggcgcgcgagggtggtgtgtgaggttcctg

SEQ ID NO: 6613 - DNA, 966 bp, Zea Mays
ggcttatgtgcaaaattagtccacttttgggactaaagtgcaaaaaccaagtcaaataagtatcttgagtcatttgggtcactcatatgtgaatttgcaagctaaaccctatgttttgggtctatttgcaaaaatcacttcttatgtcccaaatggcttaagtctgaattgcagagattttgctcaacttttgagccttgtagctttcaaaatatagggtttttgccctagggcaccacatcaatgttgcaaagcaaacaaaggagaacaattttgctgaagagggcaagccatgttcttgtgagaaatttgaagataatcatgctcaaagtctggctgtcagactgataaaggactgaaatcaggctaacagtgaactaccatcaacttcaagcccaatttcaagtatgattcaatggcttttagtggcaacaccatatggcaacattgtagatggtacattactctacaattttgctacagagcttgacatggattatcattaggaattgagagaaaattgggctccaaacttgactgtcaggctgtctgaatgtaactctccatggtacagtgctatcaggaggatcagatcgccagcgcagctgtcctcaccgccggtgacctgccgccgggattcgtgccgtcgtcgccacgattggtgctcggatggagtggatagcgctcggggtcctagaaatatcaccgttgtggataactccggtcactaaacaagtccgaccaccgtaccaagttgccacagccgctacggatgacttcgccggtgaaccgccatcgctcggccttgcgccgcgtgtccgggcgctttaccacgtcgcggatagtcacgctaaggtcgtccggtgatcgccggtgagaccgccacggtagaagccacctagcgctcgcgccagtgcctatttctttcccggccgccgcgcgtaatcgctcgattcaccggccacc

SEQ ID NO: 6614 - DNA, 933 bp, Zea Mays
tgattttgcagagtagctaccattcgaagataagctgaaaatatgtctatcctcagtgttaggctgcagcacaaaatttgcgagaatattccagaggtgtagataatctacaatggcaccaactgtaagagctcctttgatgtctgcaatccatcgtctgttcaatagggcctgctgcacagttcttctgttaataattctttttggaataatgctgaataatcttggagcaatatcagatacccttttgccatggatccatttatctatccagaacatggtgttggtcccattccccacctcagagatcaacaccttggagaagaaggaacgggccatgctaggaacttgaatggacaggctagaccaagggcgtcttgggtcagttttttgcaaccaaagccatcgcatgcggagggcccagcagagctcaggaaggctagcaatacctagacctccaagctgcaacggacgacatacttttccccaagccaccaagcaatgccctcctttcacctcttttcttcctcgccagagaaaaccttttcgtattttatcaattgcttcaatggcccagtgagggagatcgattgccattgccatatagaccgtcatgctagtgaggacatgctgcactaaaattcttctccctgctctactcatcagatcggccttccagcttggtaggcggtctgcaattttgtccacaaactgctgagcctgattcctggataacttgtgtaaagacaaggggagacccagatatctgcaaggaaaggttgcaatctcacaaggcagccagctccggagttcctcaatagtctcctcggggcatttgatagggtacacatttgatttctgtggattatagcaaaggcctgacgcatcgccaaaaagctggaggatgtcaagagaagttgaaatatctgtagc

SEQ ID NO: 6615 - DNA, 508 bp, Zea Mays
aaaatcaagcttcaagttgctctgtcaggacaactgaagatgaatgccattgtacagtgatctgaacaggatcagatcgacagcacaatccctcgccgtcgatgatctttacgctgtgattcacgttgccatcgtgattcgtgttcactggagaggggataactacggtgaggtaaagatcttggcatgggatcagcttgagctcggttgcggctaagcccgccgtacccccttgctcatcggtcgatcgggataagagctcgcagccgttggttgatcactgccatgcgccgtgtgtccaggctctttaccacgtcgcgtttagtcacgcttggggatccggtgatcgccggaggaagcaccacggtgaaaaccattatgcacttgcgccagtgctcctccccttctacgaacgccatgcgtcatcgctcaaattcccggccaccgctcttgcctagtataaattaaagccaccgtgagctccgtaggatcattacgtatccagcca

SEQ ID NO: 6616 - DNA, 394 bp, Zea Mays
cctcctacgggattcgcggggagttgttgccagggcagttggccgatgccaagctcgggcgaggtggagtcttctctcgaggttgaggtcgtgggcgaggcggagttctctctcgagggtgaggcgatgcccagacgtacgcacgtcccatctggagttgtttgaatacaatagccgatgtgggggagcagtggccgttattcccggacgtgcatcatcatagttagtgaaagtggatgggaccgtgatcccatcactccctgtttatctgcagcgtcatgtggggtaggtatcggaattgtcgcattaaatgtgcatgtctccacggttcccgtgacctttgaccaaggctgggctcagggctgtcctcttgtccgagacgagctcggacgag

SEQ ID NO: 6617 - DNA, 622 bp, Zea Mays
ggtcgaggcacaagatcccaggtgttatttgccaagagagctaagaactcttgctgcatggcagcatgccaatttgagtcggcaatagcaacccagcaacttcgaggaattggagagagcgttgtggcttcaaatagagctagaaaccgtagaccccacttagcacgagtcaccatccctcagggtcggccttggtgacgggaacagcactagcacggacggatggtgatggtgaggaagaagtggtcgacgtagtggagccgggcgcagtggagtcgggtgcggtgaagccgggtggtgacgacgaagaagcagggacgatcggtggtgcaatagcaggggctgaaccatgatcacgacatgagtagacgtgcccgcgaaaacgacaggggcaaccagaggtgccgtcctggtcggagtctgctgtctgcttgagacagctgaaggtccgccctcatcgattgatgttgtggtagaaccgatggggggggagccaggtggtggtccgaccatagccgacggatgagcagtcggacccgggccagaggatgtgcagggtgcaggcatggtgccagcaacaccaggagttcatgcaacgtttgtagtccccgtagaaacaaat

SEQ ID NO: 6618 - DNA, 310 bp, Zea Mays
gactatgagctggagatacattatgacctaggcaaagctaatgtggttgcagatggtttgagcaggaagagccaagtcagcatgatggtcactcgcccgaggccatataaactagcaaaggaatttgacagactgagtcttggatttctaaatagaacacagggagtgacagttgagctagaacccactctagaacgagatatcaaagatgggcacaaaaatgatgagaagatcaatgagattcggcagccgatcctagacggaaaaggcaaagacgttcgagaagacgtggaaggcgtagcgtggttca

SEQ ID NO: 6619 - DNA, 826 bp, Zea Mays
atttggagttcatatgcattttatacaaattaaacaagttttaacatttatttatgcactaaaaattaatttctgatattaatttctgattttcaatgctctctggattgggcctcaaatttcagaaagcgcaggggctaccacgaaaaatatcctaagactcagactgacactgttgcggactgcgggttctatttcaaaaaaatacagggtctcattaacaaaagtctccgcgaaggggtatcgcggatccagggtcgttggatctaagtcacgtggccgagattaggttgatcaccatccaaaagcgttgagcaatgagatcctctggatcccgcaccaacggtgtggattttaagtgcatacgatctgctttcacccacacgatcctggatcaacggttaaggccaaccggtacgcagagactaatcgggaccgcccatccacgaatcaacggctctggtgccgtcctcaaccccctggctccctctctctctctccagctaatccccacgaccgagcgccattgacaccgcgctcagatccagcagctcgaaccccaatcctttgatcccgatagagctacgtataaagcaggtagtagcaggggcgatgagatgatgctcaccagcgaaccaacgacgaagaattctagccacgagaaggtgcgatccggtgatgagatacggactccaacgagcagttggcggccacctagcaccaagctctatccgcaggagacacgagcagcttccccgcaatcaagcgaagctcgtctgccagtcgcgcgctccgattgctagggatgcgtaggtttcccaccgcg

SEQ ID NO: 6620 - DNA, 482 bp, Zea Mays
aagcaatatgctaccgatgtgacctttcctattgcagcatatgtcataatctgcagacctacgtaatatggattttattctttcttgttgaccctgtatccatgttatgattacttcggaatttactgtgacacactattcctgtctctgctatgcccactggattttctcactcctataagggaaaagttgtgctatgtggtctacggaatgggagtatagcccctgttgatgtacggcaaaaacagcataatcagcctactggagtagcttcatctagcaatgctaggaggacagttcccatgctgcccacaagacatggtgggaagcaaagaaaccaggtatgtaatactagtaaacagcatccattattaccatacatgtttgccccaaaattcctaaaataaaaggattgtcagaggtcagattggtaatgcaggtggcgcaagttctttttagagcaccatgttcacatgatgttc

SEQ ID NO: 6621 - DNA, 501 bp, Zea Mays
gaatccaaccaatatgcacggtctaacccacaccgtccaatggctattcgacggtagaccagtcgtcatcttcatccggcaccaggccacgcacgagcaagaacagccgcgacggccccacgccggcgaccggttgcaacagcaacccggccacccccgacccgccagacaattctataacgtagaaggaagggtcgtgaatccgaggggaaagttcttaccagtgctggcggcgcaccgagctccgcccacgacgcccaacgattccgcggcggcccgaggtcgacggtgagcaattcaaagctgccccggtggttgaatccgctcggcgctctcacgtgtgaaccccaagtactatggcggagctccccgccacgacttctaggctccaacggcgatgagattgaggatgggctgtagcggcgctctacccagatttgcgttcactggtggcgaggaaagagtatgtggtgacaggggcacacgagcacttcggcggcc

SEQ ID NO: 6622 - DNA, 562 bp, Zea Mays
ggggtttgtaggtcatgagtgctctgtggtccgaggggctcataggctatgagtgggaggcggaccgacgcctcagctgtagctcagtgcttggcatagttaatgcagctggtcacttatgatgggtcggtttcgggccagacgagggatccactcgtgtggtatcccttcggaatgcccaaccccatgttagactctgccacgcctgatcccgggcttaatgccgcggggctcgttcgggggcggatgcctctagggtagatgctacctgtctcccctagatgaccgacatgccccagttggcagtggcattccccaggcgtgctcgctgatcgatgggccccagggaccggagatcttatccccgacacataacatcataaagacaactatgtggagaatgttattggggttaatgaggtggatctccaactcatagtaccaaagtgtcccctgtatgaagggtataagtcacctaacatgttaggtgtatcatcggtggcacatcaaaaatctagaggcttaacaatcaggaatggctagtttccaacaaatagtcgac

SEQ ID NO: 6623 - DNA, 329 bp, Zea Mays
gtagatgtatccgaaggacatcaccaagacgacgttctagacacatcatggcaacattaagttttttgtcatggcgttcaggctcatgaacaccccctccaccttccaggcgctgatgaacgacgtgttgtacgcctacctccgatgtttcgtgctggtgttattcgacgacatcctcatctacaatagcacatgggccgagcatttacaacatgttcgattggccttccttaggcagcacaagctgtctgtcaagcaaaccaagagctccttcggtgccccatcgaactcctacctcggtgttggatcctggcaggtggacccaaaca

SEQ ID NO: 6624 - DNA, 585 bp, Zea Mays
gttgatggataagctggatctagacgacatgataatacgcccaggagctggtaaagaactcaagatcacaaaagagacggttcgtcttatattgggattgccaagtgctggaggtggtagggagttcactgattggtatggtgaaattgacgctgcttcaaaattgagacgaaatctcaacatttgtaaagaagagtttgatgttgttaagctacatgacaagctagttattgggaatgatgatgagttatccatcagatattttttctgattttattcaatcgacttctattcccatctgcttcatggggtattacgaacaacgaggtcctaatgacatcaaacatggaccggatggctgagattgattggtgtcaactagtgtatactgatttgtgtgatgctgccagtcgttggcacaagaggaacagaacaaacattactgcaacagtatatggatgttcacacattgttcctgtaagtaactctctgtttaccaagtatatatatgctatccaaatatttgttttgtacttacatacataattatttataacattcatactaaatatccatgattgtttt

SEQ ID NO: 6625 - DNA, 563 bp, Zea Mays
caaatatacaagaagaagaatggatctttgaccagtaacattcaaacaccaaatgttcgcttgactgaatccaatccaggcattgcagccatgaaagcatatatgtttctctggatctgaaacctgaatgcgtgtcatgtagatcagaaatcctgtgggtcagtcaaaatgttgacggccacagggatctgggtcggcagatcgcagattaatccacagtttctttgctgcatgtacaactcaccaaaatgatggcatatattggcttgccggtcttatcaaaatgttcaaagggcatgaatgcatcgatctaaaatggacatgcacaaacagcagcggagcgcccggtatggcgtgatatggctcacgccatatcttagccggcatgtcttcttcttcgatatactccaacttgcagccttgtcgagtcacccgcaaaccgtagtcctgcagcccgcttgtccgtcggcgttctagctctcctctctagcttcgttcgtagcttgcttctctgctcgcaagtcatccgctctgtcacagcacttcaccctctccagtctcca

SEQ ID NO: 6626 - DNA, 453 bp, Zea Mays
tttcatcctcttgatcacaaagggggcacttctcaggatgaatcagccctcttttagcaagcctatctgttgtccagactctattttgtgcaaccagccagatgaagaagcgacattttggcaaggcccaagttttccaaattttcttctgatgagggaaaaccacagatcccaaaaagaaaccttcgtaagcagtctttgctgaatagatgccagtaggagcaatactaaaaacatgtttatccttaacctcaggctgcagctgccaagctgaagtcatattccacaactggagataatctgttaagactcccactgtcagcggacccttaatatcagagatccattttctatctgtaattgcctcataaatagtcctgctattgacaatcctcttgggtataaaattatacaaacttagagcaaggtctttaattctcttaccatttaacc

SEQ ID NO: 6627 - DNA, 359 bp, Zea Mays
gtcgatgatgtggttatcaagatagaaaacttcatcaaagatttgcagttggtcttcaacagcctgaggcgctaccctgaggcactaccggtggaatttgaacctagaaaagtgtgtcttcagagtaccggctgggaagctactcggattcattgtccgccaacgaggaactaaagcaaatctagaaaagatcgaggccatcatgagaatggaagcgccatggtcgcagaaaaaggtgcaaaggcttactggatgcatggtagccctgagcaggttcatatcgaggctaggcgagaaaaagatgccattttacaaattgctcaagaaggtggacaagtttcagtggaccatagaggcac

SEQ ID NO: 6628 - DNA, 609 bp, Zea Mays
attcttcatcagaattgctccaccgccgcggggccatatatcaccgtgggtagggctccttgcacctcgattctgggttaaggggaatcgtctagcatggcggcctcaattgctcgtcgctgctgtgcatccacggtagcaccgctcttcgtcgtggcccggttccggcaccaccttgtcgcacggtatggagccctctgttacttcgccttaattacttgcacgcatagggctatcatgtttgggaaagagttactggtgtgccgagaacgcctccggccggcgagtgcgccgccgcagggaaaatgtgtgtcgtcggatagcagagaggaggaggaagaagcgttgtgagccactgatgtgtgatgggcgatccagatcaactgggcgcactgtctcagctgggcgcgtggtgagccgatcgatcacggttgaacgcctacgattaggcccttacgtatcccttcgccagattggttaccggctgtccgatcagaatcccgtgaccaagattcgacctcagtcattttaaatcaatgtcgtggatcggcgatcttgcggctgagattagaaccaacttaccccttcgttttataaaatctgaaccat

SEQ ID NO: 6629 - DNA, 682 bp, Zea Mays
tcagacagggaaccagcaacattggcctgacttgaggatagttttaagggagattttcccttgatatccttgccagagtcctcatcaccactcttggcctttttagcatatttgccaagagagatctcaccaaacccttgtctatcaaccgaagccctcttgcccagattaacagagtcatcattcaaaccttcatcagtaatgttgtcaattttgaagtaaatgtcatacaaaaaaggtttaacaccaacttcaatgataggagggatcatagcaacactcttcacatgaactttaaacctcacaatttctttagcgtttaaagagttaatatccacttcttccactgccccaatagtggatcccaattcacaaatggcctgataattttgcaactcttctggcacattctcagccacaatccacacagaatgcagtttagatttaggcttagcctgagaactccaagaagagacagagattttggctccagacaatttcattttcaattcggggaaattaatcatttcatccaatctctcttgagaggggaattgcatgagaaaaccagaatggcacttagtagctttccaagtgcggccccaaggaaagtgaaaaccgaaatccttctccagatcctcggcggtgatcaaaccctcaacgattttaaccaagccaataa

SEQ ID NO: 6630 - DNA, 581 bp, Zea Mays
cgattgtgtgagccacgtgccttggtatcttaccacatcgtagtacctcatattactcatatctggtgatcgccggtgagcccgccacggtgaaagccactaatctcttgcgacagtgctcttttctttctccaactgccaccgcgccatctcaaattcatgggccaccgctcagggatcctataaattgagtgcgccatcggctccgctagatagtcaagcacccaatccatcatctcgtgccttcaattgttcaccagagcctccgaattgctcacttcccccaaatcggtccaaagcaccgcgcgaagtgacctcgccatggccagcatgctacaggtccattcatgtcctctggttcctcgtttcagtatccttaggtgctcttgatactccctgacccatccaattaagctaggacccataagatcgccgggaacacttcttgttatccgttgatcgcactgtcaccatgggcagagcgattgaggccttgaatcttgaaattagttgaggggaaatggtggttaggagttaaattaagtgtccgccaagctagagccctagtcgttgccctttcc

SEQ ID NO: 6631 - DNA, 416 bp, Zea Mays
cagctctagtgcaggaaagacacaaagatggaaacctaaaacaataccccatctaatttgtctatgaggtcctcaccaattcaaagtgtagcatgatagagctggaaaaatagcctacatagtcctcaggcatcacacaaattaaggcactacttcgaggcacacaagataagggtacctacagatcgaggcttgagcgatttgttcaacaaccccgaggcctccgccagaatagctaagtgggtagccaaactctctggctacaacatcgccttcgagccaagaacttcaatcaagtcataggtgcttgacgactttatagtcgactggacaaggtctttgacctctagctaccctagcacagtagcaatatgtaccatccactgtgatggcacctggtgccatgtaggggtaag

SEQ ID NO: 6632 - DNA, 391 bp, Zea Mays
agagaaggttcaacgaataattcataatttgaagaaagctcaagctcgttagaagagttacgcagacacacaccggatacccttgtactttccagttggaaattatgtctacctgaaagtttcaccaatgaagggtatatcacgttttggggtaaaagggaagcttgcaccccggtatattggtccttttcctatccttgaaagatatggaccagtggcataccgacttcagttacccgaaaccttgtctgcagtacataatgtgttccacgtgtctcaattgaagaagtgtcttcgggttcccgatcgaaccattgaagtaacggatgttgccctagaaccagacttgacatattccgagcatcctgttcgagtcttggatcaaaaagac

SEQ ID NO: 6633 - DNA, 557 bp, Zea Mays
tattcagtgtcagtccaaaaggggtcaagtttctctctactgctgataaaatagatggagcaccactggtatttcagctgactgcagagatgattgaactagaggagcacggtagttcacatcataaagaaggtggtttgaatcttgtgccaacattagaatctgaaaaattttctgaggtaggctcatcaaaatgctatttattgatccccacgcagtcacccacctgggaattttcagtattttattctttttcctgatttaaaattttgcaggatgaatcaaaactctatcaaaggctcctgaatgttaggatgaagattgctcaagatattggcactgctccgtgagtaaaaatctaaactaccataacaagtttatggatatatgttcttaagctagtttatgctagaatttggagaagttagtgaactgaatttcgttaatcctgcttattacaggtatgctgtatgtggcgatcagacaataagaaactttgcaaagatgagaccttctactggagctagacttgctaatatcgatggtgtcaaccaggt

SEQ ID NO: 6634 - DNA, 515 bp, Zea Mays
tgagcgttcaagtaagagttcagggttcgggcaccatccaagaacgcagaaacctggtttaagtcggctcgactctaagcattcctctcttcagcatcgaagcaccgccgagtcaaggctggaaaggcaaaaaggaaaagagcacagagggtaaaacgagggaagcaacgagcagagaggaaagctatcaacccactaaatggtgtttgaggctttaagatcatctatttgcttttggagcaagaaaggattccactgcagtaatgacaaaacctgatcgggaacaggggcaccgcaagacctcaattgagccaacacagagttcagaacattctgcaaatacaagaattagcaaagcagtctatttatcaacacaagtaaagcaggaaaaggttagctcacctgaaggttagaaaggaacaaaggaaatcccaaagccggaggcattgatgcgccgtcaaatggaggggtactagtagaaacaatattgagagcagactcgagccctaaaggag

SEQ ID NO: 6635 - DNA, 947 bp, Zea Mays
gtcaaaaagaacatgacgggagatgatgattctattggtggtaggatcaagacatcggtatcccttgtggtgagcagaataaccaaggaagatgcagagggcagagcgcggggcaagtttgtggggagcagtggccgacaaattggggtaacacttacagccaaaaacacgcagatgatcgtacgacggggcactgccaaagagagcaaagtgcggagtggaaaactgcagtgtcttggttggcaagatgtttaggaggagagttgcagtgtgcaacgcttcagcccaatatgaaggaggcatgcttgcctgaaatagaagagagcgaataatatcgttagtggtacgaataatccgctcggcgcgaccgttctgcgaggacgtgtagggacatgacatgcgaaagtgaatgccatgtgtgaggaagaaggtgcgcatgctggagttgtcgaactcccggccgttatcactctggatggccttgatgcgtgcgctgaactgggtggacacataggcgaaaaagttagacagggtggaaaacgtgtcagatttaagccttaaaggaaacgtccagaggtgatgagagcagtcatcaagaacaactaagtaatatttgtaaccagagacactaacaataggagaggtccataagtcacaatgaataagatcaaagttgttggacgctcgagacattgaagaattaaaaggaagacgaacatgtcgtcctagctgacatgcatggcacaaagactccaagcttttattacaaccagggatagccgaagtgagtttggagagtgcctcgcgaccagggtggccgaggcgacgatgccacagagaggtagatgtggagctggcaacaagggagtgagccacgggcagcttcagtgggtaaagcggcccggagctattgcacctgatgatcacgttccgcgagagaagatcct

SEQ ID NO: 6636 - DNA, 753 bp, Zea Mays
cttttagcgaccaatcgtcggtcccaaataagggtcgctaaagatcaaccgtcgtgtagtgttcgttcatcatctgcaacttcatctggagcatatcatgatagctgaataaatttgtcgcaatactcgcttactgacatattgccttgcttcagagatagagattccttcttcttaatcttcatcagtccagcaggaatgtggtaatttcttaactgtgttgtgaattttgcccaagtgatagtatcagcagcatcatgggcagcagtgtaagaatcccaccaattagcagcaggactagtaagacaactagaagcatagagcaccttctcccgatcagagagcattaagtaatattcagcatcttctctactgattttaaccaatcatccgcatgtaatggatctggagagctggcgaaggtaggtggcttgtggctgataaactcctggcgcttgtcccatggtggaactggtggtggaggaggaggcattggtgtttgctgttgtcgcaccattctctcttgtcgtattttctcctgcatctcttgcttctcctggcgcatctcttgacgttcctgccgcatctgcgcttgcatatccgtcatagtattggccatttgttgcagcatctgtgtctgggctgcaaccactagatcagtccgaaccggtggacgatttggaagattcatctcttcttgctgttgtctaacaatcctccggttgtgggggttggcaggtagatcgattatgc

SEQ ID NO: 6637 - DNA, 749 bp, Zea Mays
aacccatttataggcacgaaaaagcttatattcattaacctcggctcagactctcgatacctaggctacatcgtcgcatccctcacactgtcatagaccaccaccgaaagtccaacaccgtcgcaaccctcactcagagtcactccctcagcactaaccttaatccctaaatcaccaattccccattggcgcaaccttctataggcgtcgccgcagcctcctctagacgtcttcctattctccatccccagtcctcagtctctagccattcacaactcggcacggccagaggagattgtccatgcctccacacccaacgtccgccgatcgacgcccagtgcccccctccacgttcgtagcagccagagcccgtccccacctccatgcccgacacccgtcggtcaaagctcgtccacgcccctaggttgtcacctgagaccgaggctagacgtcaaagctcctccatggtccactcctatcgcccagcgccctagcctgagctccaggcgtggacgagggccatagtccatctccaagcagctccaagatcgagctccactaggcctctgtcccacttccgactgtcatggcgccacctccgcagtgacccgaccgccatggggatgaccagagcagctcctcttgctcctacagtctcactagcgacggttctagcactgtcgcccctcttcccaactgttgccaacctcctccgtgttcgtggggccatgttgttgtcaacaatagaa

SEQ ID NO: 6638 - DNA, 595 bp, Zea Mays
atcccatggtacagtagctgaatcagatcccagatgcatccccctcgccgccgatgatcttcacgtcgtgattcacgccgtcgccgcgattcgtgttcgctggtgaggggataaccacgacggagtaaaaatcttggcactggatcagctcgggctcgggcgcggatgaggttcaccgtacccacttgctcgtcatgcggccgggatagatttcaccaccgttgatcgctcaccgttgtgcgccatgtgcttaaacgctagcccatgtcgcgttgaatcatggtatgcatgtccggtgatcgccggagggctgccacggtgaaagccacttatcccgagcgccagtacctcttttcccctccggccgccagcacatcctcgtgaaattggacgccaccgccgttggaggctataaattgccgcccccgttcgctctgttaggtaattgcgcaaccagtgaagcaacccgtgcctcaaatcctcccctaaaactccccaatttgggattttcccccaaatccctcaagaacaccgagcagtttgacctcgccgtggccagcgtgtctcaggtccgctcataccttctgccctcccg

SEQ ID NO: 6639 - DNA, 775 bp, Zea Mays
ccgccgtcctgattcgtgcccggtgaggaacggataacgccggggatggataaatcatacgtggcgccatctcccgagtccagccggagttcttcaccggtggccaccatgaccagtaaattttgccgcggtggcactcatgtcgtgatctccctcactgtgtctcctaccgatgtggtcaacatgcgctcgcgatgctatccgtggccatgaggtgatcacccgaccgccgcggctataaatagccctgtgattcccgacgaggcacgaccatcacacacaccgtgggttgaatcgaagccaaattcacgctgtctctgctccctcctctcaaattgattgtgcgcagtaaaactagaacctcttgcgaccgtgtagccccaagctccgtcctcaattccacccgagcacgccgcgacgccattttcccccaaatccgattgccgcgccaccgagaaccgctcacccgtgaccagcccgctctggtaagacgctgtccaattcaagtattgttttcatggctctgcatgctagtgaagcttaccgtggcacccgtttgctcaattcggccatgatttggcgggaacgcgtgctcatgaactcggtttccgccctgatcatgggcagacggttcccagtggggttcatgtcaaattaatggatgttcctagatcgtcctaggtcggtgaagcctccccgatagttagccttatcagtcgtcgccggccatggccggtacgggccgcgtcagagacgaacggcgagcgcgccgcgg

SEQ ID NO: 6640 - DNA, 311 bp, Zea Mays
atctattccctatcaaggtgattcagacagaatttatggactgttgcctaccattcatgagggtgctctgattcggataaatgctattgactctattgctcaagatatttagaaactacagttgccatcatctcttcagaacttacttgccttgtttctactgcccactgagttacctccctcttgagcttgtgatcacaccatcccactccttccaggtgcaattcctgttagtgtgagaccttacagatttcctcagctttgaaacacaaaattgaaaagcaagtctcagacatgctatccagtggact

SEQ ID NO: 6641 - DNA, 577 bp, Zea Mays
aaataatttgtgatctcttgtagtctttctttgcgtcccatttgttcctacaatgtgtatggccgttgggtccttcaaacctcggttggtcataagctctctcatgatccgaggggcactatacgtgtgactttttcccattcaacatacccatgcgaggcgagccccgagcaaataatcgatgctgagatccatctggggggtcatcccatccttttgctttactctcctctgcctatcccttccacaacaatgaggggaggtgagcccaaccgcacattcctcattggtctagcaatggtgctcggtgagctgcaaacgggtaatccgagtgaggccctaggtcctttcacaggatccaaatgcagggtccgctaggggatcgtcctcatactcttaggcaccgactcatatagttgcagactccgttcgactggactcaatgactcattgcctctcttcacgataaaccatgagtcagacaataccaagactcgaacacaagctggtgacacccttcgcgcttcacgcatcaaggtcctagcctctagtgtccacatcacttgcttgcccctcg

SEQ ID NO: 6642 - DNA, 918 bp, Zea Mays
aataaaaggagactggaaatgatgggatatacccaaagattgttgaatagggaaaacttgacttatgggctctattgcgttttcaactatagcctacacaacttgcttgggatgaaaggctttgttgttgttgtgtgcatttaaagtacatactaggttcatccaagcaacattgaaattttattcctaagtaatatatattgacacgactatacatgcacaaatgtcacgtagagatatcgaaaatgcagagcgcaacatgacatgtagagggttcaaagtggaattttagtttttcagtttgatagttggtacagaatcattagatggacagctaacaggaaaaaagattaattaggggtacaggacctgtgaaagtctaagaggcaaccacaagcaacaaaagtagatccaccaaaaacatatggcagttgagtcacgtcatgcaccaaactatacaactgaaaaggaaaagggaatccagctgctgctcctttgcaaatgacatcttctagtttcgcataaatagatttatgagaactgacaaaggcaacctttgcacaaaaataattgttagcaaaagtctatgagttgtgaaatgtcatgtctgacatgggacgccggagaggagagttttatgcctaccaaaaacaattcttttcatctttgcatgcacatcttttgagatgatcacgaaatttagaaaaagaggttaaagcagtaaaagcactattaatgctgagccctttgtggcaaaacatcccaaaatggacactcatctttttccaattcattcccaaaggtggtcatttttcaaccaactgctcagttggaacgaaaagcagagatgagttgtactagtcctacataactggcacagatcagcatcaaacaggaccttactgctgccgagtcttg

SEQ ID NO: 6643 - DNA, 354 bp, Zea Mays
gaaggttgccgtttcagataagtcctgaagatccaatacgctgaaaatctgaagaacaccaaaagatctacggcactgttgatttggatgaacttggatgaatcggtgaggatttgatcgcctgggagtaactcggtacgtggcatcgttccgtgggctgagccacgcgtggccggagttagtcaccggcgaccaccgtgactcgattaacttttgccgcggtgtcacccatgcctcgatctccctcactgtgtctcttaccgacgtggtaggcatgcgctaacgaagctatccgtggccggagatcgctagccgagccgccgtggctataaatagcaccatgatccacggcgc

SEQ ID NO: 6644 - DNA, 814 bp, Zea Mays
aaagtattgtcccgagtgtgaatcgtctaagttcatggaggtagactctggtgatggacagaagaggcaactcgacatccccttgacaattctacggcgccttccgttcatatcgaggatccagcgtctatacatggcagaggaatccacgaaacaaatgacatgtcacaaaaatggaaaatgatacaatcctgacaagatggtgcacgcatccgatggtgaagcatggaaacactttgatgccattcaccgtgagaaagccgaagaggctcgtaatgtacatgttgcgctggccacagatgggttcaatccctatggaatgagcgctgccccgtgcacatgttggcccgtgtttgttatcccaatcaatctccccctggtgtgtgctttcaaaggcagaatatattcgtgtcgttgataattcccggacacccggggaataaaatgggtgtgtacatggagcctttgatcaatgaattggtacgtgcctgggaggaaggggtatggacgtatgaccgagctacgaagacaaacttcagaatgcatgtttggcaccagtactccatgcatgacttaccggcgtatgggctattctgcgcctagtgtgttcacggtaagttcccatgcccagtttgcaaggaagctcttaggttcatttgattgaaaaagggtggcaaatattcgtccttcgataaacatcgacaatttctccctcctgaccatccattccgcctagacatcaagaactttacgaaaggtgtcgtagtgacggaccgcccacctgcaccgatgactggtgctgaaatttgtcaac

SEQ ID NO: 6645 - DNA, 920 bp, Zea Mays
ctatttccttgtctcactgacgtttgcacttagacccttaggtttctatttcttcactggataagtccctgacgacggcgcgctcacccgccggccatttccttgctggaactggccatgaacggcgacgactgtctgaaccaagcgctggactagcatccctgatcctagacgaccctactacatcccttaattgagctagttcgacccattttctcctgcccacgacgacggcgagacccgaggggaaactgaggtgttcccggtgatctagcgtggtctagttcaattggctaggccgataagcatcactagcatgcgtgggtgctgaaacatagacaaggagagcgagggcggaccaggaggtggctggccacgacgcgacgtctcacggtggcgcaaacaacagttttgggggaagaacgaaattctccagctatggtggctaatcgacggcgagggtgggtgctctggcttcgtaacaatctagcggaacaggttgaggcttcaatttatagaggatggtcgtgaggagggcgaatttggacggggaagcgcgcaccgtgagaagggagaagagtcaccggagtttgctaatgtggcgttcactggtttacggtgtacgacggtcactgccgagtcttcacggcttgcgacgagtggtgagatgacttaaggcgtgtcagaaccgagctagacagtggcacaacggtgatggtcgcgcaaccacgtctccggtgcaagtgggtacggcgacagggcgaaacagtgccccaagttcatcccctgcgcgagatttttcacccttcatagttatctgccctccaccgggcacgaatcgtggcaccggcatgaatccgagcgcgagggtcaccgacggcgaggtgggatgaatctgaagatcttttcgtgcactgtac

SEQ ID NO: 6646 - DNA, 311 bp, Zea Mays
agctgcaattcctctggcacctgagaaggcgcaaacattcccacgacctctcaaaatttcctcaaaagcttcggcttcattgctgatccagtcaattgggccctcaggatcgcctcttacgaagttgtcctcgctggagtatgcgccaacattggcgaagctagtttttatttttcccacacattctatggatttttcataacatttttctcttgaagagcgaagttctacaaccgttttctcccaatagtttttccagtaatcgttggcgtcttggtcagcttcggcgatagcacattttaattttgctt

SEQ ID NO: 6647 - DNA, 348 bp, Zea Mays
taaaactaaactagtgccttaaaccaactcaaccacatgcatgaaatctgacccaaccaataaagtcatgatggattgtataatctatctgtccccacctaacatcaaacaagttgttgaccaacatcatgtagtctatcgcacctatatctatcttaatcatattcccccaactctgataatatacactaacctcaaatcaaggagaccaagactggagaagaaaagatcaacctcgtcaagaaaggagagaagtcaaactcaaccttcagttgcatttccactcaacacggagttctttctcaccataaactttcttaccccaagctattcttgccctaacctacc

SEQ ID NO: 6648 - DNA, 582 bp, Zea Mays
gtctgtataattattaccttttcgtaatgtaatatgatggtgtgtgctggcatgttatatttttttccaaatgtttctttgcctcagatgccatcacggactcgcgcacatgatggtgtggggacttcccgcggtcgggaagatactcctaactcgccaccattactacccactttggccgaggctatcgctgccctggtcaatgctactgcggataatacgtgcttcttacgtgaaatggcgggcaatcagttctaacagcatggcaggagagctcctcctcaaggaccgcgtgaaactacatatttggaattttctgagactcgacccccacttttcataaaagcagaagaacctttagaagccgatgagtgggtaagagttatggaacagaagtttgggttgattcgctgcatagagacgtaattgtttgctgcacaacagctgagagggcctgccagtacttggtgggcaaatttttagcagttcaaccggatggacatcagatcacttgggaggaattcaagatagcattccgggagaattatgttccagagggagtgctccatatgaaacaagaag

SEQ ID NO: 6649 - DNA, 798 bp, Zea Mays
tgcgggaggagggtagtggcgcgagaatggtaaagggtattttattcttcttacaagtcatttgatgagttgtgaacacttttagtcatggaaccaaacatgcagcaactaaactttagttcttggactaaggaaccaaacatgcccttagttggaagtagcaaggtcgaattctttggcttcattatcgaaattataatgatgaaacggtgcttcttgtcatgatggactaaaagaacatactatcctgtatgtatcctagcttctcaaagactaaagaactaagtctagtgtcatttgtctagtatgattcatagttattttcctatgttgatagcttgctctctgaaattcatgaatactcactgctcttgtttttgcatttttctttgcaactggtctctgttctcttggccattctttgtttgccgaggctgaatgagcggcaaatttccagatatggaacacaacgcgacacttgttgctttcccgagctgaattgctgatgaggttcaccacagttagatgcctgatttgagcactttgtctgtgaaattggattaaataaatggagaacagccattggttctactgtttctggtgttctgctatttcttagttcaattctgtggtctgatgaaagagaggagatgttactaatgatttctttggtagaattggatgaacaacacctgtcatgcctccttagtttctgatctgtgggcattctgctcagccagcacaagagttgtgtgcacctgtagagaacaacaacagggacaatgctcatgacacaga

SEQ ID NO: 6650 - DNA, 563 bp, Zea Mays
aacggcggagaggagggggaaagggactcgacgaggctgtgtatagactccaagagcacgggatgcgcggtgtttattaataaacagggtgatgaccaaatcttaacaacttcccctggaatcccaacgaatccaacggatatggcggcaatacaggccactggcagcatgcaagccacccatggcggaagaagagggcccagtcccaggagccccacctgattagccggctgtgaaattggcaacgttggtttctcgcggccggtatacgtataatacttatacggctgtgttaatttgcatgcttatgtcatgctaatgtatggtgacaaaggttatggcaaatctctactattacttaagacattagtgtagacgtccacatttttttggtgcacggttctgccatccgtcgccctctctcctctcttgcgcccccgctctctcgtccgctatcatggaaggagaatcaacacatctagggaaggtccgcgtggttccatggaaggtccgaccctgctctcctctctgctgtctctctcgcccgccatctctgcgccccc

SEQ ID NO: 6651 - DNA, 335 bp, Zea Mays
cagccactaaaagatagagcatacccggcttatctgtatcgaggcctcgctgattcaacccgggttaccaacagaagaattcctgttgtggatttggtgagccgactcgagatgatactcagaggcaaggtgtcgaacatcggcgctcctgttgcatactcagcctggaatctgcctccttccaaggcctttaccagttttgtgtcaaatcctcctgctggtgatagcggtttgggccttagagtgtgaccctctcccgaagaggttagtgctttggttgcctcacttggcgaaatccctgacgacgagaggcttgttcatttcgaggtacattt

SEQ ID NO: 6652 - DNA, 679 bp, Zea Mays
tccgagcgatcgccgcagctcgttggtggcgtgtgccttgttgattcgggcgaagatcaccggattcgcgtgtaattgctcgccggggtcaacttccgctgtggtgcgtggtcgtgattgtctgcgtcataactttaggtaagaagctacccgaatgttccgctctcgtatctagttcgcgtgggaccgattagttgtgagcttggagttcttgctcgacaggagggcgtgcaccggcgatggtccaccttgggttgtcggttgcaccgccgctctggggattgcagggtggaagaaggccctcgggccgttggattcacaaacgacgatcgggattaggcggaacataccccttcgcctatctcgaatccggaccgtggatgattgatcctgcgaccacgattgcgtatcggtccggttaagttgtaggcttgatctggaccctcagattctaatcggacgacacagattgacttgtaccccttcgcgcgtgcgatccgagacgttgatctcggctgcggggatcatgatcatgcactggttcgggtatgtgggtcggtctaatctgggccatcaaaaacagatcgggcgaccgatcttcaccgatacctcttcgttctgattcttttgcatataagcccctcggctttcacagaattgaacccgccgtccactgcgg

SEQ ID NO: 6653 - DNA, 384 bp, Zea Mays
caaggatcggatatgtgttcctgaggttgatagtttttgtgagactattttaaaggaagcccatgacttggattattctattcatcctggtagtaccaagatgtatcaggacttaaagcagaagtgctggtgatatggactggagagagatatggctgcacatgtggttatgtgcgatgtgtgccaaagagttaagaccgatcaccaaagactagctggactattacacccaccaaagatgtccaagtggaagtgggaagagattggcagggacttcattgttggattaccccgcacatctgctgggtatgattctatatgggttattgtggatagactgaccaaagtggctcatttcattccggtcaagactacttataagtg

SEQ ID NO: 6654 - DNA, 455 bp, Zea Mays
aactacgggtctgcctttatagtatgaggcgacctctttaaaaggaactaaataactgaatctggaagtaaactaatgcatatcttttattctggaaataaactaatgcatatctccctacaataaaagcttgcctactaacccgattgctagccacttttttgatcactttccttgcttgcttctgctgctccttttgctggatcctggcgcctttgcctctggtactggcagcctacaaatgcatcagtaacatttctcccctccacaagaaacagctcgtccgcgagcttaaaaagaggatacttctgtgtgaagtcttccaattgttcccaagaggcatctgatgctggtcgacccacccactggactaatagttcccaaactcctctattcagccgagccttgaggaccttgtctggtgtcggaatgactctgccatgcagaattttggg

SEQ ID NO: 6655 - DNA, 481 bp, Zea Mays
agcatttaggtaaagacatcaatattgcaagggttaaaggagataacgaacaagtgtgttagagagaagataaagacgtagaagagccagtggcataagtacaataaagaatggagttacatcaaggcttacatgcggtaaagaagaggatattaccaagggtgagataagtaaaacaccgctctcaaattgggataggagattttggataacagacataacgtaatcaccaaggtatgatcgagagatgggagaggtaaaggctataacaaacaaaagcacaacaaaggatggagttaaaactcgcaagcaacaaggaaggggatatgaccaagggaaaataggtaaaatagaactcaaaaattgagatggaagagagaaggttttagagggtaggtataatataagcatcaaggtaagatatagaggtgacaatggtaaagatgataatcgtgaaaagcataaccaaggatagagttaa

SEQ ID NO: 6656 - DNA, 666 bp, Zea Mays
attaccagtgccgcgcggcggattgctcgtcggcaaaccatccgcgtcgctcggccgccaatcctcatcggcggagcgcggaacttcgaaatcagatgtatgatgggtgggaatgtgtttgcagtgtgcactacatcgtgtaacaaggtttagatcgagctatgaggcaccggaggccaagaatcggtctctccggcggaagctccaccatgtggggtgtgtacgccgccgtcgagcgtactgtaggtagacgatgtaggttggccgttggatcgagcggtgatggatgggattagatccgatctgtactggtttggggataaatctgaaccattgagctcggcatggagggattggattaagttgtcttctcattagatatgggtcgttgagatccaaacccatagctgaatcaatcgtctgcatattcacttccacacattagatcagaaccgttgatcctgccacgggtggttgtgatggcataagagtattccagtttggggatctaatttggcacgttcgtctctgatcgggctatcgagagatcacggtaccccttcgctatggcagattagcataagagaccctgtacttattcgcatttaacctgcagtacacctcgggtttgacctgagtcttagaacttttgcgatgtagcccctg

SEQ ID NO: 6657 - DNA, 411 bp, Zea Mays
gtcgcttccggtgggggcagccgcgttagggtcgacgccgccgacagcagcgacggtggcagggtcggctccctgcgtgggacgccagttggcggcgccgtccatggctttccgccgtagagactcgggcgcctcttttgctctttctgatctggttgctgacttcgatcgatctgcggggcgacaatggagggagcgctggcttcgttcaatcactccccagctcctcgctgaagacgacgaaatcgattgtagcaggggcgaaggagcgaccaagaaggagctagcgacgagcggacgacgacgaaatcgattggagcgagcaaggctcacgcggcacgcctaacgaatcaggatgctgctgaatgagccagcaaatcgcggatcaataaccagcggaacatgtacaac

SEQ ID NO: 6658 - DNA, 667 bp, Zea Mays
gagtttccatgcaaatatgtttattccgcgtggaggaagtcgacaaccgagcttatttaggggcagaaaggcactaatgtgcatccccttgccgctagagtcactagggtctagggatacttccttttgtgtccttaatgtgttgtgatggacccttctgtgaagttgcatcattctacttcacactcataggcgtgttgaatggtcgtccctatggtgatggtccctgctgggctcgacatcatgagcttgaggtatatgtagttgggcatgaccatgattttcgtgtaacacgaccttcccaatatggcgtggtaggacccacataatcctactaattcaaatgtgagggtttccatcctaaaatcgaatggggtgccaaaggtgatgagcatgtcgatctgccccaaaggcgtggccttgtagtggcatgatgccatagaaaggaactccagatggctgaagatgatcactgttgacgcacatggcttcgagggtagaagagtatagaatgttgatctcgctgcctccaaccattagtaccttcgtgagtcgcaccatgccaatgatgggatcaatgataatgggtattgtctaggccgtgggatgtgctcggggtggtcagaatgaacgaatatgatggggtggtcggaccagtcgagaaaat

SEQ ID NO: 6659 - DNA, 365 bp, Zea Mays
cattactagagtttatggacgaagcaggttatggaggggaaatagaaagtgaagcagaaaaggaaaaaggaaaaccccacggtttccctatccccatcaatgttacctcagttattcattattttcctggaggcttcctatgaaagtttggttgggtccaggtggttaagcactagccatttattcaattaaagatggcatatggttaatttgttgcatatcagtttcactaaagtagatggctacaaaattctcaatgcatgccacttatcatcaccttttaattttcttatcgcactactgttactttttccttacgtgcttgatctgcaaggctaactagtaatgtgcaaaactagctttct

SEQ ID NO: 6660 - DNA, 517 bp, Zea Mays
aaaaagtgacccagactcaaactataccgccataggatggcgggttggtttcctaataacccaggggctgaaatgctaaagtgtcgagtgaaggggtatgtttgaatctcggtcgtccgatcaaaagctgagggtcatgattagatgtggcttacgcaaaatcggtacgcagtcagaaccgtgggattcacactgaacggatgagatacccgtgatatccccaagccgtaggatggacgatcaacgacgagccttttaatgctatgaaggggtatcactatcatctgatccgagccgtctacccagagatcaagggcggatagccaatccagtcgaactattaccccaacctaatctcagccgttaacttgggatgaacggccaggaactgttctcccacaacaccggccgacccaggacggcgctgccctgccgcacggtggcccaccataggtgagcaccaggaactaagtacccacccaaatccggccgctacctggtgtaaacgaacgcgggg

SEQ ID NO: 6661 - DNA, 300 bp, Zea Mays
caaatcaatccaggatcattttgacacaaataagatcgtcaactgcaggcttgacaaaaagaaccacatcatctgcgtaaatcgagagactagatttcacgtttctgatggccaggtcatgcagcaatccactttcctcagcatgcttgaataagctactaagcacatccatcacgattatgaaaagcataggagataaggggtcgccttggcgcagcctcctccgatgacgaatataatcccctggagttccattcaatagcacttgtgtggaagaagttgataacaaattgaacacga

SEQ ID NO: 6662 - DNA, 782 bp, Zea Mays
attagaaccaacaagtcgacttgcaaattttattcaagtcatttagtgcactaaaactactacaaccaatcaacgacgcattctccacgatactcacccaaccatttgcgttttaaattagacatcacatgagcactaatacttttcatccgtgaccataaccataagcatttagaatacaacaagcaatttaccgtgattacaagcttaactaaagtcatctaacgagtcggctagctagaacaacgacacaacccgctagatagcatacacgtcggcttgcctattattatcacaattcgagacacaacatatataacaatcgcttaacacaatcaactcctacctaacatgagttggctaataacgtgactatttcccaattaccatcacacaccacctttcgccatttttagataaccggcacgtcacacagctattgtaatacatctcaagtttagtcaacccatcagtggagcactagcgtatttcagaaaatttcctgagactacgacgacaaggcgtcgagcttatcatgcacataaaagcatcacaagcatatttacggaacctattggttaacctggtcgacacactagacatgttcttcgcccttcaaaatttatcgcacaaccaaaatcatcacacttgctaatgacaccaacaatacctactgatatgttattcacatcacgaacacagttacacgccgcatactagtttctaacatgattctcgcataacttgtaattcaactacttactaaccctaaatcacgcacg

SEQ ID NO: 6663 - DNA, 714 bp, Zea Mays
cgacaggcgaaagcgcctgcgctgacgactttgcgcaaaggcccctggcgatttaaacaatctgaaccgagttcgtagcactatttccatgagtcactaacaattacaccgagaccctcgcacttctattccttcacaacgccaggtccacgacgatgaacgacggagcagtagctccagcgagcttgtaccggccaagatacgtaatgatcggtgttcagaagtggttgacacctaatttgacctctaacaatcctttcccctcaaccaattttaaggttctagcccctaatctctttgcacacggtgatcgtgcgatcaacggataacttgacacgttaccggtgatcctatgagttctagctcaatcggccgggtcgaagcatcaagggcacataagggtactgaaacgaggaaacatagggggtgaatggacctatagagcgttggccacggcgagctcactcacacggtgttctttggccgatttgggggaaatcctaaattggagctctctggtgaacatccgagacacgagtgggtgcgctggatgcttgaatacctagcggagctaatggcatgctcaatttattggattcatgagcggtggcggctaatttgaaggagacacgcggcggccggagaaagggaagagcattggcgcaaagaatttgtggagttcaccggtgcaatggctccacaattgtactctta

SEQ ID NO: 6664 - DNA, 584 bp, Zea Mays
gttggatcatctgcctcggtccgacgatactcaatggtcatagtgatctagttgtctcagatatagccatcaagagtgtattataagggtgtatggtctgactaaccatcgtcggaccagtttgaggttctcgaaacctctcaaacctctcagttcaatatttggtcaacatagtctactcctatatgtattcttcctcaggtgtcagccatcacaattggttcttcggcttctctagtccctcggttcaagcctcatcgttcgtccttcatcgctcccgatccatatgcataaatctgcttgacttcaccttcgccatcaccatcgatcatcgtctctatgctccataccggcgtatggtacgccaagacatgttgcacaataccacactttcgccatggttactctccaatctcaaccgacgccgatcaactctttgacaatagctcatcatactttaaatattatggacaaataaactacgtttgcaaaaagaatgcagcccaagcaataatcagggtaatgttacagaactgagaaaattgagggtaatgttacagaactgagaaatttgagcttgtctt

SEQ ID NO: 6665 - DNA, 697 bp, Zea Mays
tttaattcgagttttgggggcgggtctgcggacgctgcacctgactcgaacccacaccattgccaactctagaaagtgactaaggcttctgccaaaagtcacgatatgccgtttgaccaaggccgtgaggcgaaggaaaccataaaaaaaaccaagcaaactagaaaatgcgtgaatcaacgaacacgtaaactaccccataacatcagaagggatttgccaaaaaaaagtttaagaaacgtttgaaatcatttcgaatttatgtctcaagaactcacggttgtcttaaatcttatgcttgttcaaatattgtagacttcaatgtacttaaaggaagcgcaaaattctagtaacaagctgacgtgcccttactaaatttggttggagaaggatccttaatggcctctaggtaagggttgacttttggggcaacacctcacttttgattgaggtagtcttggctctcaaagataagagaatgtcttttgtggcatcttttgcgccaatgaaacaacattcataacatccatagagctccggattctctgaacattcaactgatctttcatcttctcaataaacttcttaaacttcatcgtgtgcatgtgctccatccgcatcatcctcgtcaccatctacttcctctttggcctctttctccactgggtctgcttctttttctttattatctgttcgc

SEQ ID NO: 6666 - DNA, 367 bp, Zea Mays
gctagctgacgtgcatttgctcgctcgagccttaaccgtcgacgagcccccgcgtgtgcctgccttcatgtgttcaccgttgagtgtgaccaacgaaagcccctttggtggtgtgggcctagcgaagtctcctggtgtgctaggtcatgtactcaaacatggttagttttggcttggggttgctcctgtgcagggctgatcgagatctggtttgatctccgtcccaacagtagccccctgaaggaatagttcaacttgttgagccggtctcgaagtcccttcgagaggttggttgaacattgccctcgatcacaagttgagctgctctccagggtgtttgtgaagtgaccgttcgacatgtgatgtt

SEQ ID NO: 6667 - DNA, 359 bp, Zea Mays
caaactccgaaccccaccccatgatcccctctggccggattccgcccgacgctataaagcacgaggattatgactccccaaccagccgaagccgtgtatagcttggtgacgtaggcgcatggatggggggtgcggggagatgtgattgccgctgccgccattgatctgtccatatgcgatcctccagcctcgacaggtggtactggggcagcgaggggtcccaccacacatatatgtggcctcgtcgtgctcgattgagggttggagcgcttctaatttcttgccggaattggtgcttcaccatggaaccgcatgcagccgtgggccgaactttctgcgccgccatcatcggtgagaac

SEQ ID NO: 6668 - DNA, 660 bp, Zea Mays
gcattaccacggtttttatatacttgcatgtgtagaccttgtttaaatagtatagccgttcaaacacgttgcaaacctaataagcatccagaagtcctgagcggtttgtgtggacggtggcattgaagtcatgctcgagtcttagcgactttaggcttcgcaggtgcggtgggtgtcaccaccgccacaacgggtgtatgtgtcggggttcctttcctgctaaatcaaataactacaatcttgaatcgaactgaactaatcgtcccaaatttacaaatcaataacccatgtatcttatctgacaataactctggtatgatgacacctaatagccccatttgctcaggccatcgtcttgattatgttgttgcctgtgcgaacacatcaccgttgtacggtattcaggtctaattggcgtaggtcgactggtgggaccatggcccaccgcgtccttgtcgccaccaccagtcagtccatgcctaaatcctaaacctaatcggctagtccaagtgtctcacaccccaccggatcgttgtcgctagcctcgtccaggccgaggccagttagcacctcgctgatgcatagcactttttccccttgtattttctctatttgtttatggttttcccatttccttccttagagcaacttcaatagtta

SEQ ID NO: 6669 - DNA, 494 bp, Zea Mays
ctgattgctctgttagtagggcatagtggtcaccccgagtttagtaagcgtgagcatgtcgcaccgccttaagtcattgccgacttaagccgattgctccattagtagggtatagtggtaaccccgagttaagtaagtatgccaattgacagcgaacaatttgagtgcctttgaagtctttttattgatgatatatttctcaatttacagaatacatcatcgtcccaatagcttctgggatgtagctaggggtaaaacttcctgaggtgttctatgttccatgagttcccaatttccgtgccgtccatctgagtgagacgatatgatcccggccgagtgacttttgctactatgaatggtccttcccatagaggtgacaatttgtgccatccctcccccgttagaattcggcggaggacgagatctcccactatgaaggatcgatgtcgtatggccttatcatgatagcgcctcaaagtttgctgataccgtgc

SEQ ID NO: 6670 - DNA, 360 bp, Zea Mays
aagaagctgagcatccccaccaccgtgtcccgagttctcaagtacatcccggagctgcagaagcaggtggacaacctggagaggaggaagaaggagctgaccaacgccaactgcaagccgggagttctgaaaaccaccaaggccgtaactcccattgtttctgctacctgcctcaacgacacggagatcatggttcaggtcagcctgcacagcgatgtggccgccacagctctccctctctccaagtgcatcaaggtgctagagaacgaaggccttcatctcgtcagctcatcaacctactcctccgcctttgagaacaagacattctacagcctccatcttcaggtgcatcactgcttc

SEQ ID NO: 6671 - DNA, 693 bp, Zea Mays
cggcgccacagttccccacggcggaagtcaccggagtagtgcaatccggccccagtgaggaattgcgatggcgccaaggactcccacgactagctactcccgtgagcacctgccccgaggatcagcgatgccccaaggtcccctgttgacaccagaacaaccacgcaagaacgtcttccccccatggcggcccgacacgcgtacggtacagctctgataaaaccccaccccgtcgatcacatgagcaaccacaacagatggagaactacagtgggtccttacctcgaggccaaagacacaccggcagcgaacgatttgagtggcaggccaattcctctctctcccttccatctctgcacgccatggctgctggattggcacaggggttcgcggcaacctatatatgcgtcagagggggcgagtccgagctgagagggtcggttgcgggagaaaccaaggtcggcatgtgttgagcgaatcacggtgagtttgttgctcgagcgcgggggtttttgcgcgtgattcgatcgtagcgaagaaagtaactccaacagggcggtcccacacggcagcgtgcaggtccacgaatcgcgtggggttaacaccggacaatgggctccgtgcggcgaagtccacgcgagcgctggtatatgggctaagcacgagatctgccaaacgacctgcaacggccgg

SEQ ID NO: 6672 - DNA, 271 bp, Zea Mays
catttccaccaccatcatcacgtccatgtcgatgtccacctgcaccatgatcatgcattggatgccgcccatcctgatcaaattcatccatctgatgtggagaaggtacgcctccagaatccgaatatagttcagaagaaggttccccaaactggtccatccgctcagccatccgttccaaagtcaaggctaccaccctcttccatatttcatcaatatgccgtgccatgacatcctgatccttcgccacttgctccgccatagatgatga

SEQ ID NO: 6673 - DNA, 392 bp, Zea Mays
cggatgtgggccatggccagtgggtcattgtagcacgtgtacggcttagtcctctactctctttatatcccgttaacatacatagttggcggagcggttcccatccaccctggatgtcaccgaacgttcgcaccactcctaccgcttgcacctcatgtagcacgttgatctacccttgcccttctaccactttctactcccgttggccatgatggttggcggtagcggctcggtcaccatggggtgccatggtcgcgacggtggcgatcgatgccccatttccttatttcgcttcattttcttcttctgcttcatacttgtcatcctcctctgagagagagaccgcctcaaaaaaggaatttgtcagtcgtaggtaggcccgaatttcgaag

SEQ ID NO: 6674 - DNA, 761 bp, Zea Mays
ggaccagggcatcaggtccctcttccccgcatcaacgaccgcgcgaaatcggcggcacagcttgccgcaaattcacccacctcaactgaccggagctcaaccaactccgtgcatgccgacgccgctttcccggggttgttggcctcaacttgtcccttttcctaatccgcccgataaaagccgagtcgcctgctctcttccctcgacctttctgtgctcgcagccaccatagacaccaccgacaaagggagccgccgcgtgggaacccgcatctggggttgctcgggtcataagggttggctggaggggcttcacagagatccagggaggtggtcgtcatcacgaagaaggcattcgtcagcgggtgaacccggaattccttaacggatttcgttcaccgccgcgcgaccacccgcgtcgtggtctaccctcgattcgtcgtccgtgtcggtgagaactctccccttgcgttcgtcgtgccttgcactatatgaatcacactttagattagagtatagggccctcctagacggggtggccgaactccggccatctctcccccgtctaggctggcgacgccaccgtgcttggtcgatgtggggtgcgggcgtgttggtgtcgtccaattcaaataggacgatcgtgattagatgtgaggtacccgttcgggttggagtgatctgggccgttaaatccgatctggatcgccctagtgggatcacgattctttaaaatccgagcctttggattttgatccggtg

SEQ ID NO: 6675 - DNA, 678 bp, Zea Mays
gaaatacccgcgcagccccaattccctctcttcttcgttcttgctccgccgtgaagaacttcctcgtagccagcgttcctctggtcagtaactctcaaattgctccctgttttagttaatccttgatctcctattgcccttagatgtggcaatttagagtttggccgaagctccttaccggaacgcacctatgcgctgtcaaacaccgccgtaaccccccccccccaccgtcgacccgttcttcggggcttgttctacccaaatcaaagaatgttcgtagactctagtgcacccatgaacctttccccagccttaattcgatcgtcctcgccgtcgtttgctcggaatgcgttcaacctcttacccatccgctcggtcaccgtggaccgattgattcgtagtcccaacaataaaattgatttgggggaaatgatccgtaggagttcaattgtgtttctgtcgctcgggagctccagccgtcgcgtcgtccggccggtctagctcgccggagctcagctcccagcacggttcgtcgctgtggactcagactgagaaaggttagaagcacggggatgtttctgcaaactgtcagtgaaacgttaaacagtcgcctggggttcttaacggataaccgaaactgcaagggccctgttgcaaaaactccacggcgggcgcggg

SEQ ID NO: 6676 - DNA, 639 bp, Zea Mays
cgccgcagggaaatccctggttcacgccgtcgggtagtcgtgaggagcagcgcgtgtgcttcgccaccacctgggggatccgcgcgtcgcgctattgggctcagttgcgggcggttctgctgtgaatcgctcgtcggagcagccacgacgtgtctgatccgcgccgcgccgagagcagggcatccgcgccaccgccgttggtaagatttccccagcaatcctgaacataggtccgtgtggtagtgtagcaccggttagaataccgaattagccatgggcgtgctcggaacgggatcgccagcgatccttcgccgtggggcttggctgccgccggtgtctggtgcgtgcgtgaagaagacatgtccaggggcgttgatctgtagtgtgggtcgtccgattctgatcgatcgggtgaaagtcaatttagggtatttaaatctagaacgtccgaatcggatctattggctcagattgcataacggttcgctgggggtagatctaatcggggccgctagcagttgatcggacggcccagatacaaccataccccttcggcgtgtacatttcttaaagaacccttctgtttatagggattcaacccccggtccgtcctggtagatgtctgagtctaaggagttt

SEQ ID NO: 6677 - DNA, 392 bp, Zea Mays
aaaagatggcactggttgttggttttaatagtgaaatgtcatcctaaccatttaactagctatgtccaacatattatgtatttatttctctaaatattgccagttgctctccaatacaaattacatggttgcctcattatatgtttttaaaaaactttttgggggtaaaatcaaactgaaattcggcgatggctcgtccccttgcaatcggtcttctacctttcggtttctcctccttagtgtggctttgcatcaatctatgcagagaattaaagcagatgatgtctcctccgatattgagaatttttttggatgacctgatatgttatgagctaaactttgccagcattttatcctttcctcagttcctctacatgtaatttcagctcgtc

SEQ ID NO: 6678 - DNA, 280 bp, Zea Mays
ttcacctttctttttcttattttgacccccaacattttgcgcccatcctctaaaatgctggcgaagtttcctaattttagcatgccaacgttcaagaggtgtactacctttattttcatttgtccaaatgtccttgatcatttccatgaaaccttcccgtaaaagccaacctaactcgaatttaaaactgggcctaccggctttcatgatttggtcccctatattaaggataagcaaagtgtggtctaaaaattcccttgtgctcgcaagcaaggtagac

SEQ ID NO: 6679 - DNA, 284 bp, Zea Mays
gacacggattgagctaagaactgaacgatcttgcaagctctccaggggcaaacgaatcctgcaaaccacgggtgggctcactacaaagaaaacaaaactagaaggccatacaaaccttgcacctctccggaacactgcgccggagctgggaaggaccaacttgttgccaacgaaggttaaaatagcggtaccactgtgccaccccgcgacaagagaaaaataataataaaaatcgcaattcgtgaaagccaagaaaccgcggggccaacaagaagagaaatttc

SEQ ID NO: 6680 - DNA, 577 bp, Zea Mays
tcgcaagaacagaccagtttctgaagaagcactgtcacgttcttcagatgctcggtcagctggaagcagcaagggctacaactccgaattggatgtctacgtggacgcattaaccacggtggactctgaagcggagacagactcggaacacaggggccatggacaatgtacctttgatcggatggattcagacaatagattctccaatgctcaaaacgccatgacatcgaggaacagcaacttcgacaagaaagataggccagatgttccctcagcaaatagagatatgagtaaccagcatgaagaagccacggtctccacacaaaacaccaaaccagtggttgttggcgaacatgagaggaccagctcgttagaggaactgcttggccaagaaaaacctgcttcttgggatcatgagaggactagctccttggaggaattgctcaccgaagatttcaatgctccagaatctggagcaagagagcaggctactgaagagcagagctgcaatggcagtgccaccggtgctgtatcaaatggcacacaagatattactaagaagaccaaggaagtcaag

SEQ ID NO: 6681 - DNA, 568 bp, Zea Mays
ctgggagattcgtgccacgagaagtgtggataacgtcgggtgtggtgagaatatccagcgcggggtgaatccggtcgctggccggaccggtcgccgtgtcccgtcgtggttagccgcgctggcatcaccgtcgttcgtcattatccggccgggctacgtgcctcgacaccttaccacgtcgcagtgagtcaccgtaaaccactctctactactagttcatcgccggtaaggccagttcatcgctggtaaggccgccacggtagatgccaccaagctctagcgacagtgctctcctcactctccggccgccaccgcgccaattcaaattcatgagccaccgcccctaagtcctataaattgagcacaccgtcgggtccgtaaggtagtcaagtactcaagacaccaagtcgtgcctccaattactcaccagagctcaccaattccggatttcccccaaacctgctttccgccaccgtgaaagaagcctcgccgtggctagctcatcttaggttcgctcataccctctgctcttttgattcaatgtccttgtgtgcccctgatgctcccc

SEQ ID NO: 6682 - DNA, 453 bp, Zea Mays
cctggaacatcgacaacctccgcaaattttttgtttgactcaccagggctgattcgcccttgtaatccgcaaaaacaatcttataccggcccgcactcttttcctcccggggggtgaggtttttaacgaggtggagccatgtaatatatgtgtgaaaaatcccccgcaaaaacatgcgtcgaaaaaagaccgcgacgacggtcttcgacattcgaccaatacgaggtcaccgcgaggctaagcgctagccaccctcgcgtgcgacaaatccgtgcaaaagtgcgacaagtgcgaaaaaacctaagtctaccacgaagactatccgcgcaaaagtcgcctaagggtgcagccggactagcacaacaagtgcgaaaaaaaccgaagtctaccgcgaagactatccacgcagaagtcgcctaagggtgcagccggactagcacaacaagtgcgaaa

SEQ ID NO: 6683 - DNA, 1160 bp, Zea Mays
tagaagacccccgatgcatacttcatcgctcgacagacatcgatggtgctgaagacaacacatgtcacgttcttatcaagtcatcatcacggtggtgggtggtctcgcgactacccctgtggagtctatagccactgctctaggcaagaggtttaaccttgcggcagaagacatgaatttttgttgcatcttggagacagaactctcccttcttgatggtgcaatggtggcccgagtcttcaacgccggcagtcagttatcacctctgtggttaggttgtggctcacccgctggactcgcttcttcaagtcgactgtagttgctctttcatggactgtggaggttgagctcaaagggaccctagctcatgtgtggaggttggaaacgatggcccttattctcggtaatgagtgctcgatcgggggatcaatcctaatgttgctgacttacgtgacactctccggcttcgagcatggtgttcacgtccttagctcattttggaggtggtggaactacttgtcgtggagccatgcgtcactgtggttaaagaatcgctagtggtgcgcacactgtcctactctatcagcatcgtcacctccttgccaccatagtcgtcgtctcatcgagtcgggaaggtcctccatctccgggtggtagtggacgatgacacaggaggtggcggtgccggctcgaacatccaggcggcaactctatttaagaagacaataatggcgaccctgctttggggattggtggctcgcgtgcccctgtgcgctctcatttggggcaccaatgtcagttggccaaggaattattgcatgtgcatggccctcatcccaatcattggtgaccaatgtagatgatgctttgggtggcgtccgacaaaatcgaagcgtccggtccctcgaatcctctgatctggcgaggcacacaagtcccgagattgatcaccctgttgtgtgtgatatgggaatgtccctggacgatcccctctcacttggcggggcgacacgacaataaagatgaaaacagtttgggctcaatgacgttggatgggatcctacctcggccaattgagaggccttccctcctgggccttgaggtgaaccactggacccccaacagctgctagatggcctagcacaaggactgacttcccc

SEQ ID NO: 6684 - DNA, 1511 bp, Zea Mays
gtgaaacacattgtggatatctgacatggattctggcaattcgaggcagtatgctgtgggtcctactctgccaatgataggataggggccaacgaaccgcagagctagcttcccttttacttgaaatcttttgactccgcgcattgaggagaccttgaggtagacgaagtctccttcctcaaatccgagttctctccacctgttgtctccataatttttctgccgattctgagcttcaagtaatcttttgcggatcaggacaactttctcttctgcctctttaacaaaggcaggtccttctagtgtcttttcccctatgttggaccacattagaggggtctggcacttccatccatacaatgcttcgaatggtgacaccttgatactggcctggtagatgttgttatacgagaactctgcatacgacaaactggactcccaatttctgtcaaacgtcaacacacaggctcttaataaatccttgaggaccttgttgaccctttctgtctgaccatctgactgggggtgataggcggtgctgaagtctagcttggtgcccatagcttgctgaaggctcatccaaaattttgaggtgaactgtgttcccctgtctgacactatcttccgtggaataccatggagtctgactatctctttaagatatatccgggcaagggtggtggctcctccgaaggtagttttcactgggatgaagtgggccactttggtaagacggtctattatcacccatatagagtcgttccctttttgggtccggggcagtccggttacaaaatccatgcctatttcttcccacttccattcgggcactagaaggggttgcaataggcctgcaggcttctgatgctcggccttagttcattggcaagtgtcgcaccgggccacatactgtgctatctctttcttcattcctctccactagtatctagttttgaggtctaggtacatcttggtggtccctgggtggatggagtaggctgagttgtgagctttgtcaagcaggacttctcgtgcctccccttttggtacacacagacgatttttgaaccaaaggactccttcctcatatgtcctgaagtccggaagtggttccttgcgagctttttccataagacctgctgtctcagtgtccaggcgttgggccttgcgtatgaggtcttctagcattggcttgacttctaggctgccattgtctcccagacatgcattcagctgagctgattccttcttccaatcttctaagaagttggttccttcttcccgaaaggttttcggctgagggcgtctgctaccacgttggccttcccggggtggtagtggatctcaaggtcataatctttgatcaattctagccatcttcgttgacggaggttgaggtctggttgagtgaagatatacttcagactcttgtgatcggtgaagatgtgacatttgttcccaattaagtagtgcctccatatttttagggcatgcactatggctgctaattc

SEQ ID NO: 6685 - DNA, 652 bp, Zea Mays
cggaaggtgtctgaccgagaggaggaggtgacccggaaggagagaagcttggtcaagaagaaagaacacctagaccaaaaggaggaggccgccacagcgctccatgataagctgaaagcttataatgcagtgctggagaaacagcgagacaagcaggttgcggctgaggcgaagctacagaagctgcagcaggagcttgccgacaaggctagtgacattgctcgcgctgagggaaacctcaaggcgagggaagcttccctggtgaaacgaacaactgacctcacttggcaggaggaggacctcgtcttcagggaggagatgtgggcaaggcggaacaagctgctggatgagcttgagctcgaggcagaggagaaagggaagcgtctggaggggaaagtgcggaggagcaggtccgccagttctaggcagcgcaggcgacgcagacggccccgggctcctaggcggtggaggtgatgaggaagacacttgacgacctccgggcagagcaacgcgccggagctcagcgcatcgccgcctgggctggcgaggcaagcacggcgctagtgccattggggatgagtcccatcccagcattggtgcggccggcgtccatctccgacgcgctcccgatactggattccgctgctgaccg

SEQ ID NO: 6686 - DNA, 273 bp, Zea Mays
accctggagaccgattctagaagtgaaatgatcggtctattgaaagaatatttggattgctttgcttggaattacactgagatgccgggactgagctgagagatcgtagagcatcggctgcccattaagtccggtttcagacctttcaagcagagagctagaacatttcgtccagatctcctcccatgaatcaaggacgaaatccaccagctgctagaagctaattttattagaccttgcagatacgcagagtgggtctccaatattgtgccg

SEQ ID NO: 6687 - DNA, 691 bp, Zea Mays
gtcatcggttcagcatgggtcgagtcagaagattctatagccaacatactgagtacaacatctatttctgcatcatatggactggtcggcatctcaaaatgaatctatctctcatcattgggaagatcacgaagaggagcaaccagggccgcaatatcctcgggagagggtcgcactctaagacccagattaccatcactagcaggagggttggacacgaaattgaaaaatgacctatgagatggcagattccaagcagaataggcaacgggagcaccaacatttgatatcttgcccctcaggatcatgtctagtcggctcaccaaaacgtcaataggagttttcttattggtgacccgcgtagaatcagtaataccgctgaacaagtaagctagatacgccctgtctttcaaaggctgaatattcttgaaaacgaagtcagcaaccacatcttcggcagtcagactcctctccttcagcagacagatctcagcaagcataactctagcctccacctccaaagcagtgggagactcaacccaacttggagtacgtacatctggctgtctccccgaccgaggggggagggacttgcagtgggttttcacaataaaccactcaaggcgccaccctttaatgctatccttgagaggaatgttgaggtattctgtcttcctcccgtggcgcatct

SEQ ID NO: 6688 - DNA, 1128 bp, Zea Mays
ccggtattgacgctacctgatatacaccaaaatttcgtcatcttctgtgatgcttcaaggcaaggtttgggatatgtgcttatgcagaatgagaaagtcatcgcctatgcatcacgcctactcaagccacatgagtagaattatccaacacatgatttggaattagcagccatagtgcacgccctagaaatatggaggcactacctaattggaaacaaatgtcatatcttcacagatcacaagagcctaaagtacattttcacttagccagacctcaatctccgtcagtgaagatggctataattgattaaggattatgacattgagatccactaccaccccgggaaggccaacgtggtagcagacgccctcagccgaaaacctttcggggagaaagcaaccaacttcttggaagactggaagaaagaatcagctcaactaaatgcttgtttgggagacaatggcagcctagaaattaagccaatgctagaagacctcatacgaaaggctcagcgcctggacaccgagacgtcaagtcttacaaaaagagctcgcaaaggacaactcccagacctcaggacaaataaaaaggcccctttggttcaggaaccgtctgtgtgtgccaaagggagaggcacgagaaatcctgctcgatgaagctcacaactcagcctactctatccacccagggaccaccaagatgtacctagacctcaaaaccagatactggtggagaggaatgaaaaaggagataactcagtatgtggcccagtgtgatacttgctagcaaactaaggcagagcatcagaagcctgcaggtctactgcaacccctcccagtgcccaaatggaagtgggaagaaatatgcatggatttcgtaatcggactgcctcggacccaaaaagggaatgattctatctaggttataattgactgtctcaccaaggtagcccacttcttccagtaaaaactaccttcggaggagccacccttgaccggatatatcttaaagaaatagtcagactccatggtattccatggaagatagtgttagaaaggggaacgtagttcacctcaaaattctggatgagtcttcaacaagctttgggcaccaagctagacttcagc

SEQ ID NO: 6689 - DNA, 452 bp, Zea Mays
cccatgttcaaaataatagaggcaaatcatataaggaaatcatctctattttctttatttacacttttgggtattacaggcagcaagaagaaggcaacacaagtgcaccccatctgggggctcggaaggtggaaagacgtgaggaatgcgaggagtgcgaaggcatggctactgcccgggagatcgatccctttttaaaggcggatctccccacttgcgccccaaagcgtcacaggcgaagtctcccccgacgcgctctagggtttccaccctacgacacgggggctaggtcccacatgtcatacaaactgacccgaaacgcgaggagggcgaaccgtcgcacacgaagcatgcaactaccccgcgggtaagcactctctcatcctcgccgaaaccagcggtcgaaagggcggaccgccacgcaagaagcatacaaccgcaccacggttgtg

SEQ ID NO: 6690 - DNA, 290 bp, Zea Mays
ttaactagtcaggaagataagctacaagaggctcatagacatttccttgagatccttggcactagaggcaggaggaacagtgttgttcgttgggaaaatctgggctactcgccttttgagttatccgagttggacaccatgatcaatgatgatgagatcaggaatgcggttatgggcatgcattcagagaaagcgcctagacctgacggttttatagagcttttctacgaggactgttttgaggtgattagagaagacctttccaaagcgatcaatgatttttatcatca

SEQ ID NO: 6691 - DNA, 469 bp, Zea Mays
gcagtaatccaatcagcacgataccagcaaactctaaggcgctatcacgacaaagctgtgcggcagcggttcttttcaataggagacctcgtcctccgttaaattctaacgggggagggacggcacaagttatcacccttatgggaagggcctttgatagtagcagaagtcactcggcccggatcatatcgcctcactcagatggatggcacaaaggttgggaattcctgaaacatagagcacctcagaaagttttacccctagctgtatttcaaaacagttggggcggcaatgtattctttaaagtggaaatatgtcatcaataaagagagatttcaaatatactcggctcgtttacgattgacttgcattcttacttaactcggggtgaccactatgccctacaaatggagcaatcgacttaagtcggcaacgacttaaggcggtgcgacatgctcacgcttactta

SEQ ID NO: 6692 - DNA, 300 bp, Zea Mays
gcagaaaaaagggttgcgtagctcattatggcctatttgaccagtccgacagaaggccagcacatacgcggaagcaggccggcccatcacagtgaggcccacgcgggtacatggttttgtataagctccttaaatcttggagcaatgctaagagcatctctaagacctctccaaaagtcctcctaaatcaagttttatagaaaaacataaaaacatatttccaacagttttttaaagtgttcctaactttttcatagtctaatctggtgctttaagtgatctattgaacaaaggattaaa

SEQ ID NO: 6693 - DNA, 423 bp, Zea Mays
ccaagcgtgctgcatatataaaaaagatacatgagaagaccaaggaagcaattgagctcaaagcagtgcgcaaggctacaagcatgaacaagcataggaagaaagtgttatttgaaccaggcgacttggtttggattcacttccgcaaggagcgttttcctgagcagcacaaatccaaattgatgccacgaggggatggtccatttcgtgttcttgccaagatcaatgataatgcatacaagatagatcttccaccaagttatggcgtgagcaacacgttcaatgttgctgacctcttaccatatacaagtgaagacacttcagagtcgaggacgactccttttcaaggggaggaggatgatatgaccatgccattaagcaacatattacaacccccaaatcaagctacatcaactcaagaac

SEQ ID NO: 6694 - DNA, 513 bp, Zea Mays
acaaactaagatctcttaaatctgtatagtattgctgaggaccgaggaccgaggaccgagatgacgcttcccctcccgcctccttgactccctcctccatcctttcgccttcctgccttggccgacgcccctgcctcctcctctaccagccccacgccggttcttattccaaggctggtggccaccgcactttcctccccggcgtcggtcgctgctcctgtttctcctttctccggtcctggcgggcgtacaaaggcccagcgctggagtgacgagggcggccattcttcggctgctgctctggtgcgtggtgcaacccggcgttccttcaaggaggcgttgctggctgcagagcatcccgctactggtggcgccgccggtgtgactggtggcgatggctggataagagtggaaggtcgccgggctcgacgtggtgctgctgtaatttcgaagcccccgtcaaggccagtcccggtcgacttgcgcgggaagtgtttcaattgcttctcttct

SEQ ID NO: 6695 - DNA, 511 bp, Zea Mays
gagggcgtgaatagacatgtagagagctgggcacgacgagctcacacacggcggggttcttgactaatttggggaaaatcccaaattgggagatgtgggggacgattggaagtgagggctggttcactgggtgcacaattacttagccgagcaggctggggtaccaatttataatgtccaagggcggtggctcctaattttggcatggcgtgctggcggccagagagaaagacggtcactggtggctcaatcgtggcgttcaccggtgcagcggttctgagatggtaagcctaggcgtgccacggttactactgcacagtaaagagccacgacgtggcataattgaggtcgccgaagttccacgacgacaccgatggtccggccacgttgcacgactataggcgcggttgataagcttcaccctgcgaccaaatccgctccccctcaatcttttcaccccccggtactatcctgcccgagtcctacacgaatcgtcgtgatcagcgcgaat

SEQ ID NO: 6696 - DNA, 417 bp, Zea Mays
tccaattcgagattagctcacttggcgacgatcggggcgctggaggaaggtctccgccgtggggattttgcgctgctgcccgaggtttggtcggaggttgaaggcgcgccgtcgaccgtccgatttggtgggcggtcgggatttgataaagggctgggtctgtgcgcgccgttgattttggagtgagcggtagagattagaaattggcataccctttcggcgttttatcatccgaccgtcgaagttgaatcggatggttgcgcgaggttgtagacgtggccgaactctggccctggatctttgatccggtggcggctactgctcagggctccagctgctgctttgggcctaatctggaccgttgatgctcgatccaacggccgagggatcacggtaccctttcgtcgtgcccatttt

SEQ ID NO: 6697 - DNA, 947 bp, Zea Mays
ccgcccatggtcttgtgtaagcgtcattagttgaaaaacgatgtgtcgagcctttgcgtcgtggatcgaggtcaagttaggcattcgccccaacaaggacgaaggagaatccgatgataccctacagtcagatcaagaatagtaaaccgagtcgcttggccaagctcatccaacgattcctcaatcacgggcactagaaaacagacttaactgtgatcgcattcatatgtcgaaagtcaacacaaaattgccgtgaatcatccttttttcttaaccaacatcactgacgaagcgaatggctagtactcggctgaataatgcccgactacagcattacaaaaatctagtgctcaatgccatctttaatagcaggcgggtatcgataagaacaaacatgcacatgagaagccccattcactaatggaatagcatggacatagtctctcgagggaggcagccctgatggtggttcaaataccgtagcaaattcagacagcaaagccaccatcggttctggtcagcaaatgaaggcctttgtaactcacccatagtaacttcaaccacagatcctggaggaaaaactaaagaattcttatacaaaattaacatccacttctgtatcccatggaccttcattgggttgtgcagagccaaccaatccatacccataatcaagtcatatgcagcgatatccaagacttgaaagtctaccatgaacatacaatgttggactaaccaagttcctcccaataactgccgagaacactgaatgcgcccagcattggccacttgcaccaccactagacaaggtattgtagtgaccccatctagaaacaaagcaatctgaggacacaagaaggaatgtgagctcccagaatccactaaaatcaacacctccaaaccttgaatcatgcctttaaatttcatagtctgagcagcattatctc

SEQ ID NO: 6698 - DNA, 282 bp, Zea Mays
tttgagcatgaaaaaatcttgccgtctgctggacgagcataaaattgtcttgtatgaatcgacctttgatgaaagcactttgagctttggaaatcagcccctcaacctattggcaagaaccttagtaaccaatttggggcgaagctgtggatcaaactaattggcctgaagtccttggcaacaagagcatcattatgctttggcagcaggacaatgaaggctatgttaagaaacctgaagtttctgaaatctctcccaaattgttgaaacagcagccataat

SEQ ID NO: 6699 - DNA, 504 bp, Zea Mays
ctggattctacaggggctctttagcgagtatggctcggcgaagtggtatgcggccatctgagccgtccagaatagatcccacgacccagattaaaacatcccaacaacgaaacggtatgcatttctgaccgtgcgatcagagatccacgaccaggagttcaccatgacgcgaggtcgtcctagccctcggatcatcgaccgacgaccaagatttaaaatagtagatcgattcctacgcacccgatcaagatcggatggccccgatcgcatcaatccactcgacactaggacttgatctcgatcgtcaaacacatcctacggcggacgccatcactcaccgcgctatccaatcctgtacgcccatttcctgatctacgccccaaattctatctttccccctccttctttcttcgtcgttcacacagcgtcgctaggcttcctcgcggtggagcgcaggtcgccggcgtacatcgattggctgacacacggtcccatcccgcaatc

SEQ ID NO: 6700 - DNA, 297 bp, Zea Mays
gcatggatgcgggggcgagcttgacatggatgcggcggcgagcttggcatataagtagttcttctacaacagtacaaaaacatcaataccaagtgtcaaaagaattgtacaacaatggttgaggaaagaacaaaagcaacagaattgttgcggggcctctcatgtatttgtgtgtgcccagcagccctagaaggataacgcataattaaagttcatacacacacatgtatatacaaaccgtcattggtttatctaggttcgcatcaatagaaattcagcacagtggtcctaagcaag

SEQ ID NO: 6701 - DNA, 286 bp, Zea Mays
gtaaaccacctcccgcaagtcgcggcgacctcgctgccgccgccccgcagaccccgggaatgacctccaccaagcgcgcagcgcctcgtctgtctcaccctgcttggtcggctcttcctggcagccacccactcgttgtgtttcctctggtgcgtggggccaaattgtcatctcctccgttgcgccgtcgcaacaacctgcgagtctgtcggggtcggctgcgtatgcgcgcgaattccttgcgtctggtacatgcgccaaactaaccctgggcggtctataaaac

SEQ ID NO: 6702 - DNA, 745 bp, Zea Mays
cggtctgagatgatagactgtggaacgccatgtaggcggacgatgtcgacaaagaaagcttgtgcaacggtttgggcgatgtaggggtgcgccaacggaatgaagaggcagtacttgctgaaacggtcaacgacagagaggatgaccgtctttccctgcactcgtggcagcacctcaatgaagtcgatgctaacgtcggcccagacgctggacgggataggcagcggctggagcaggccggccggtctcaagtggtccgacttgtacttctgacatgtggtgcatgccttcacaaattcctgcaccaagcgacgcatgttggggaaatgaaagtcatgtcatagacgatgtagcgtgcggtggacgccttcatggccgtcgtcgtggaccgcggctaggatctcaggaaggagtggtgacgcggctgggatgaagaggcggccctccagtgtaatcatgtcgtcgttgatggaccacggtgtggtacggatgctggcctagatcttgtcatcgatggcgaccagcgctgggtcagttgcctgggcgtgacgaaggcactcgatgaaatcgaacctaggtgctgagatggccagcagctctccctcctcgttgtcgcgacgggagagagcgtcggccacggtgttagtggcgcccgagcggcactccaccgtgaagtcgaatcccaggagcttgccgacccagtggtgttgtgggatcgtggcaaggcgctggtcgaggaggtatt

SEQ ID NO: 6703 - DNA, 539 bp, Zea Mays
gacaaaaagatcaggtgctcaaggtggcggataagtggttcctctcgcacttcagggtagattgccaccagaagaccgtccaagagagggagataaacgccaagtatatgtcagccgtgctgcaacagctccccacgataggtgatgccaggtcagccgatgatattccatctattaaaatttcttttgataatcggattaaaagtatcacagaggatatagagagggtggcacatgcattaggaaaaactcacatgcctaattttttatcacataaattaggcgccgaaacaattgcgccaaacacatcgacaataaatgggtttccctagccatattctggtatgccgatggactcatatccaggacgacctttgccaccatctccgctaaatggtaggtcaactctgagcatggccggaccgtccgccaacgatctcagaccgtccggccctctgacagaccgtccggcaccctacgccggacagtccggaatcacacagagcccaccgcaagggtcacagccgttgcccgacacg

SEQ ID NO: 6704 - DNA, 715 bp, Zea Mays
caggttcctcagatggaaccggtggcgatccgacatgaacatccatggaagcagccgaagaggaaccaagctcggcacccatgggggctgggtcatcctcagcaccacccttaggggctgggttatcctcagcagcaccttcggaagctgaagcaccctcggtcgtacccacagaagctgggtgaccctggcctgcaacgtcaagaaccagtgtgtccccgcgagctagaccaccctccaaggtcaaaaaagcgtgagaaactatctgggttatttcttgcccaacaggattaccagccaaagggatgtcatccgggacctctgtagggacgacagaactttcagtttcaggagtctccaataaaaggtctttaggaataatttcctctagtgcatggtcaatggtagacatcgtcaacccctggagactaactagtctcgataaagcctccattgggacgtcattgctgctatagctgcgactattcttgcgaatcaaagggaaaacttcctcttcctcctcttcatcctcatcaagcacacgaccaccaactctggcaccatcacaatcttcaatgtcatcctcgaggttggcgctcgccgggccaccgtcgagaactgaggcagtaggatcagcacccagttccaagcctgatgaccgccgaagtcttttctttcttttctttccctcggcatgcgtggctagatggctcgt

SEQ ID NO: 6705 - DNA, 721 bp, Zea Mays
agtgtttctgggttcatttaattagcttgactaatgtaatgcttcccctattattatttcagaatgaagatgctgttgtattacttctaaatattttgcagaaggtcttttctcttacacacagagatgatagtaccatttcctcttataattcccatttatatgcttttttcttgacgtcaaccaatttctaattggcagagcagcacgtcacttcagcactatgggcttgtaatcttacagcagttgctcaaacaatccattacaaatagaacatcttgtttcagagccggcttgctaagttttcttcttgattggttttcggtagaggaaagggatgatacagttattgcaatcacagagttaatacaaatacttggtgcacacagtatatgtggcaaggacatcaggaaaatctttgcccttttgcgctgtgagaagattggtgccaaacacaagcacacatctttgcttctgacaagtctcagtcacatgctgaaggaaaaggggccagaagctttctttgagttcagtggccatgattctgtgcgtgttgtcctatttatttagcaatttaaaatgtcatctgttgtgattcatagtttatttccaaagattatgcgcataaaacaaatttgagactgagttcaatggtacttttgtgaccgcctcattggtacgtggcctgaactaggtttaaactagaacaaactaggaggaa

SEQ ID NO: 6706 - DNA, 655 bp, Zea Mays
ggtctagatctaaaacggtggaacacgccccagccccgtacaataccgatcgaacggccacactccttggccgaaccggtactccgcttctaatcgtggccgtccacgcaacgatccacggcgagggctattccccaaccccggtcacggcacccgacggcgccctgtttcccccaccgcagagctcgccggagcacgatagaactatgcagacaagccctaggtcctaatccacagtgcgtgaaacgtaataaaggacctggcgaactcagggaaggaatccgcaccggaaatgatgaagcagtggggtccgaccatggggaatcgtggcccgcagcggagtcgcaacgccggccagcaatcaccagagtctcggtggcaaaactcccgagctatggccacgcactccctccccaggatcagggtaagcaccagggcacgtccgacaaggcgcggcggcgaccaattgtcttcaagcggtgatggaacgacagtctgacattggtggccgccagctaagggtgagattcacggtgacggacccggcgcaggcgattgtgggtgagtggttgcgggaggagagaaggttgtggcccggtccttttatatgcgtgcggcgatgagctctgggtcaacactcacggacgcgaggatc

SEQ ID NO: 6707 - DNA, 594 bp, Zea Mays
cttggctcttgtaattgtaactcctctcgtgtctcagtacagatttaattagactctacgtagcagtctagggtatttgaatctgtcttctggaactaagacctcgtgggtatgttgattagcaaacgcgtgtggccttgcctgcagtacatgccttcaccgtggagatctcggattcgttgaattctccaacgagatatgatagctgcttttgttatgatatttggaagcatggcagctttaattatattctgcgttttctgggattactggatcacgggtcgggacgaagaatgtcgacaacagaaatctgggaaaattccaaacccccacccaatctgggaaatgtcagtctctggctcactgccactcaataccctgatattcagcttggtttgttggccgattggtacacacagaactatttttagtggcatttagccgtactctggtttatgttcgggtttcctgccaagtttgttgatatatcgtgccacttctttttgaatgaaactggtgggttgcctgctctagaggtaggagtcgttggaatccaaatcaaaataaattagtccagtatgagagagagtctag

SEQ ID NO: 6708 - DNA, 520 bp, Zea Mays
gcacggtaagctttagcaacttaccaggactcaagaatggcagctaggaaggggtgtggagggataggatggtgggtcgatggaggggttgttcgcggcggcgcggagaactgatttgggggaaaatccgaattcgggcgctacggtggatgatcagaggcgagaatcggtgtgctgggcgcgtaacaagtaggcggaacagggggtgcctccaatttatatactccggctgagcttatcacgaattttggattgggatcgaggtcaacgcggcctggatatttttacggtggcccgctcaccgtggcgcatgagagggaattggttcagggatgataaccggttgcttgccatgatctttatgacatggaggatagatcgctgtgtgtcacggtcgacgaaacggtgagctccagtgatgccaacactactaaccgcggcgggtaaggggaatacacgatggccggaccgaccagtgattgggttcacccctccccggatcttttcaccccttcccgac

SEQ ID NO: 6709 - DNA, 403 bp, Zea Mays
ggccccaccgggtcgtcgtacacgtatgcgttatctagtcacaagaaaaggaaacagactcgaccccttagtcttgctctatggatagaacttacagagatacttggtcacggggtaaggtgctcctccagtcgtagctagatggttccccttgggtcggtgcactcccgttaccttgaagggtccttcctagctgggggagagttgcagaacccctcttggtatggtatctgccgtggggctaagccccgacccagggttcccatctgtattcgacgcgggagcccttgcctctggcagtgatcacttctgcatatacctgtctgcagctcggacccgtggggggtccggaagggcctccggaggaaaggcgtgctccagctccatagaccggggaacacgg

SEQ ID NO: 6710 - DNA, 996 bp, Zea Mays
aaatagaattgctaacatatctacaacaatattgaataatattggcgataaagggtccccttgacgaaggcccttgaaagtactgaaaaatggacctcgtccatcgttcactttaactctaacatggcctcctgagactattgtttggatccaagcacaccaggaagggaagaaacccttcatacgcaacgcttgctggagaaactcccatttgactttatcataggccttctcaaagtctaatttaagaataaccccatctaattttttcctctgtaattcatgaattgattcatggagaataataaccccttcaagaatatttcgaccaggcataaaggctgtctgagagggactgactattttgtcagccactagacctattctatttgtgagaactttagttatgattttgaacgaaacattaagcaagcaaataggtctataatcctggattttatttgcgttatccttctttggaattagagtaattactccaaaatttaaactgtgaaccggaagggaattttgatgaaagtccacaaacaacgcaaacagatcatccttaataacttcccggaaaacttgataaaactctgctggaaagccatccggtccaggagctttattatgctccatactaaataccacctttttaacttcctctatagtaaactcagcggttagaatttcattctctacatccgagacttgaggaatgtcttggataatagattcattaagtttggtcgatgatatgtctggcttcccaaagaggtttttgtaataccttgttatatggtttttaagttcttcctcatcagttatacaaccacgattctcatcctccaaagaataaatccgctgtcttcgatgcttgccgttggccactaaatggaaatattttgtattatcatccccttcgagaagatgcttgaccttggccctctggaagagacgaacttcttcctctctcaaaatattggcaagcctatc

SEQ ID NO: 6711 - DNA, 1117 bp, Zea Mays
aggagaaggaactccactactttcaccgctggcgatgaactgccgactgtttttccgagtcaaaggagcttcattctcttcctcctcatcttccacagtgacaacacaagcagcacccccattgggatcagcaacagataaggcacctacattgggatcagtagcagtttgggtacacccattggggtcagcgtcagtaggtccagtcgcaggcacttcttcagcggcaggaactaaggtaccaacgtcttcatcaaaactggatactcgtcggaggcgtcttctcttcttcttttgctcatcagcagaaggctcaggctgattggttcggctagggcgcctcgggcgagtactgacaggtttctgaacatccaaagttgtatcaacctctggaaggggcacaactgccaaagtaccagcaggagcagcgtcagaagaatcctcagctagcagatcaagcatggcatttatatctgcatcactagggttcaggggcacctcaaaatggacttgccgttcgtcatcaggaatctccccaagcgaagcaaccaaagcactgacttcttcagcagagggtcgcactctaaggcccaaatttccatcagtcacaggtggatttgacacgaaaagggtgaaggctttgggaggaggcaggttccaggccgagtaagccaccggagcaccaacatttgacaccttacccctgaggatcatttcaagacggcttaccaagtctgcagaaggaattctcctgttggtaacccgagttgagtcagctagcccccgatacagataagctgggtaggccctgtctttcagtggttgaatgttcttgaaaacaaagtcagtgaccacagcttcagcagttagacctctctctttcagcagtccaacttcagctagcaacacacccgcctcagctacctcctcatctgtgggagactcggtccagcttggagtgcgaacgtctggctgtcttcccgaccgggaggggagagaatttccataattgtcaactataaaccactctagacgccaccccttgatactgtccttaaggggaatctcaaggtactcagtcttccgcccgcggcgcatctccaaactggcacctccg

SEQ ID NO: 6712 - DNA, 465 bp, Zea Mays
gaagcctgcaacctgtaacatacgaaattgttgcgattttttttttttttgatctcaggtatcacgatatcgcggcttcgtaaaagtggtatcctgaaggtggcaattggattcctgttattataacaacctatcctttgtagttttggtattgttcttggtttgagtaggcatcaaccgctaacggccttagttctgtcacttgtggacggagcgtgcccttctctctcgttgaagatcttcggtctctgttcttcaaaacggatctggctcccacccttcctggtgtgtactccctcctgtgtgtaggattcttcttccttcgatcctcgctgcccctctcttctttctctcttcagtttagtctggtgttgtttgtaatatgcgctgtcgaacaaccttttattttatgaacctgttgcatatgtgccgataggacattaattcaaagcccagagattgagg

SEQ ID NO: 6713 - DNA, 1046 bp, Zea Mays
aggtcaaggtaacacaaatagcaagggtacagttttttcatcggttattatcatgactttgctaatttagatgttgtaaatatggatgcttgctctcttttattgggacatccttgggagtttgatattggtgctattctatgaatgcaagactcaaacatgatcgaagatcatccacctcggacccctccacgcttggctggtgtggatcgcagcgtcagggagccctcacgcaactccgacagtgtgaaggtcatccacctcaggggctcatcgcctagatgacaaagaccaccaggtgcaactacaatgacatcgaggtttcccctttgatgtggtcacgcttgatggaatacacgaagacctcggatttcgaagtcgacggcactgaaggcgaacggaagacaaaggcaaccggaggacaaagagggcctagtcgccaggtccacatgttaggctccctagatggtagtgttcccagtgcaattaggcattgtccggtactatactataattgcctcgttacataacatattccaggagtgtagtaggtgatcgggggcataaatgtatttagatccacgccctcacagtttccctataaataccctcgtcctatagctagatgggacacccttgacgagatgttttcacactatgtgacatccgttttgttgtgccacctaactcacctgctctcgagtgcttgcatccatgtgtcgagacccctaggcccacatgatagacctaacaacaggtacttaacgcattcctccacactagctctactgaccacaccccactacggtgcccctccacctcaggtgccccctctttagcgtcagtcaccacttccacctcttctttcgctctcgaggacccctgcctcgctgacttggtccccatggggctgtggctgggcttagcagtccctcattgtctcgttcagcaccatggcactgatagcccacccctccatgctagatgaggtggcggactctagtgtctcataccacaccaccactaatgctgacatgttatctcac

SEQ ID NO: 6714 - DNA, 675 bp, Zea Mays
cgcggggagcagcttcaccaatcctcctaacaccggtaataaccctcccatcatgttcactgtcgttctctcatggatctgcgctagaaatcttgtaggggctcactctagggcccggaacaggacgcacgacggcgaagctccaccgtgaggtgggatggcgccgccatgcgagtctgccaagttggggcgataatcgtgcgccatcgaatcattggcggacgacccagattagatgttaggttaccgtttcgcttggtctggtcagaaccgtcgatctgttgataaccgactgagattagatttagggtattttagatctgggtcatcgagttgggatcggatggctcctggcgtgtaccggttcaccgcggctcagatctaatctatagcgtccatttgcgatcgtgcgaccgagattacaggataccccttcgccgtggcaatctttgtaaagagcccctgtacttttccgtaaataacccgccgtccacacaggctgttcacagagtcgtagaaatttttacgcatgggcccctgacctttttagaaatcaaggcctagtcccgagaggattaaaaatggagaaataattatagaaattagtttttaatataaaaacaaaactagaaacttgtaaaatgcatagaaaattcatttctaatccaaattgat

SEQ ID NO: 6715 - DNA, 405 bp, Zea Mays
agcagaaccagatggtctgggatcacttggaatgggtcctaaagcggtagcaggagtagactggaagtaaggtgaatcatcatagtcctcttcctcatctttctgagtaataaacgacacaccatattcctgctggtgccattcattgagatattctagataggcaggaattggaacaagaggaggtcgctatggcatgggatgtcccatggaggctgcaaagcttcgcatgtcatcatgaagttcttgggtctcacgctgttgcatagcctcatcaacagcatgacttctgcacatggaaaaaacctccaccattcccttagccagacacacaaacaaacctcgtcctcgatccctgccctggcctcttcctcgatcgacgcggtccatcggacaagaagcagc

SEQ ID NO: 6716 - DNA, 614 bp, Zea Mays
cagatttctaaaactgaattttcagtgactttggctgtaaattgaggtaccataacttttgttctatatgatttcaaccatgagttgctatacaaaataggtagagttataaatagagaataatttttgttaagggagagtggtctgttgctatgaataattgggagataagggggctgaactgggaggaatggaatggagcagcaacactaataagtttggttcggtgtctggtttagtcactaaagaattgttagttgactgaatttgtctcagtttggacaggcggctgtttgcttgcttgtttcctgtgtgctcggtgtgggtagcaaaaagaggcaaaagtttgagtgcaggttctggtggccaaagctgaatcaagatacgaagaaatggaaagatatcagccccacgattgtgctgacattgcttggttgatttggttagagagttgcctgggactttctggcgcctggtaaagtggagtcgagctgagaagcttcaggtcctggagaggttcaaagtatctgtggtggagtccgtagttgcctggtcactagttgcgttgcctgcccaagctcgatgccttgctgtgcctataaacctgtgtggtg

SEQ ID NO: 6717 - DNA, 847 bp, Zea Mays
gtttattagcagttcgaaatgcaaaactgagctgtcaattgctgaatatctctgtttagctacctttgagacccaaagtggactggatcctcaacattcaactgacattgtgatgatgatgagggctcgttttgacagactgtagtagcaagaaaaatctcatatagaacttgacatctacttctttcattctatggcagaaagtgaaatataagaactttatgtgaagtggggcattagatatgaacttctgtagggttatgaactggtgatcctaagggtagtctcgttacgctgactccaacggagcagccaaatggctaggcaaagaaaaaatagctgccctcgagctactgtagcaccacaaagctcctttcaataggacagttgaacgaggcagccaaaatgacgggcaagagagagaaaagccatactttcactgtaaccaacagtcattttcttcctccgtgtctgacttccagagaccccaaccaaaggtccgaatgactgtcagatttacctggcccctgttggagttagccttagttgtgcgaattgtactagtttcccaaatgatggctcattttagaaatcctacaatttgttgaactaaagaggggtggtgaatatctggatacccttagggccaccaattcacatccctaaacttctggtgaagtaccttagtgcaaaacatgtgagcatgctttcttggttctcgatgtaatgatgatttgattgcatcctttgtatgtacagtacatcttaagtctcaagttaatatagttttgtttccttgctgcacatgctattatgtttctttcatgctgcctggtaagttccaaac

SEQ ID NO: 6718 - DNA, 440 bp, Zea Mays
aatggatggaagtcaaagataagaaggcattcaagtcaaacgtacggggaggagtgcatttgggtggacccctcccttgggcagccaccaaaggaatcgaagatcgcgacatagcccgaggagccgtctccaccatggcgggataggccatgacctactctttccctgcgcatcaccttgcgaacggccctagagagtggtgccgcctgcgccatgccacctaaagcgacgacctccacagtaggcgccaccacgactagggtaggatccgtggctggcccgcccattttggccaggatattagaaccggctgcaacatcgccactgcatgatgggccacccaccaacgctctgacttctgcccctcaggaagccatggaagacgtcgtggagggcgcaccctccgaatcagaagaagaggtgactccctcgcctgactc

SEQ ID NO: 6719 - DNA, 305 bp, Zea Mays
aaaatttttgggtcacaccatctctcaggatggggtatcagttgatcctgaaaaagtacaagaagtgatggattggaaacctcctaccacagtatggcagatccgtagtttactgggattggcagggtattatcgacgatttattccggatttctccaggattgccaagccaatgactgaattgttcaagaaaggagtcaagtatgaatggtgccagaaatgtgaggatgcctttcatacacttaggcaacatttgacaacagcactcgtgctagcttagcctaacaacaccaaatattttgagg

SEQ ID NO: 6720 - DNA, 682 bp, Zea Mays
agcgcatgagcatcatcatgatctatagactgtaaaacatgagttaaacaactacgactgaccttaggaaaagctggccatgcggttgcactgctcggcggcgctggtgaccactgatggggaaaaatcggtgttccttggctatcgatggtggaagggcggaaacaaatggtggcttgggtgcgtaacggagaggcaggactgagcgcaggctcaatttaaaggaagtcaccccaatggtcggcaatttggtcgctgactcatggcggtggcgacaacccgagaagctccacgttagcctcaacggtgtccacaggctagtaacgtggtggatttaccacgaaccctttacgatggttcaatacacgagtccccaaccagctgcgtggacggctggagcgtacggtggcttgctacggcggcggtggatgattcacggtgaggacacgtggtgtccgtggctagagtggtaatttgagcatcaaatttgagccgaagatctttttacccctcattgatccacgtcttggcggcaccaatcgtggcccgagctcgaatcaccgcggcgggacgtttgcggtgagcacactgcacttaggatcttcttcagtgtactgtaccatggcgatgtccattccgagcctgacagagctatttgaggattatttctcttcgattttta

SEQ ID NO: 6721 - DNA, 932 bp, Zea Mays
gtcaatgttccaggagtgctctaagtcttcgccggagggcgttgatagcctgtacgcgctgggggaagccttcgtcttgacgatgaatggaccctcccatttcggctccagcttgccccgtgactctgtccgggtggtcaggacgagtacgaggtctgctttgttgaactctcttgggatgaccgcgttgtcgcaccaggccttggtttgagcttggtatttgttgagggcctacagggcgaggatgcggtcttcgtcgatgaggtctttagacattggttcgtcgacatcggggacctctgatgtgcttgtttggggcgactcatgctttatttcctgcggcgtcatggcctccgatccatataatagatgaaaaggtgtgaatccggttgtctggcattcggtcttgtttagggcccagaccacttcaggtagttggtcagcccatttacccttcttgtcgtcgagaagtcttttcttgatggtggtgaaaatcttgctgttggcgcgctcgacgacgtcgttggattgcgggtggtataccgaggcgaaggcaggcttggtgccgatggagaggcagaaatccctgatgtcctggctgtcaaattgtttgccattgtcgactgtgagctcagacgggactctgaattggcaaacaatgttttgccagaagaacttttgggcggtcttcaacgttattatggatactgccctggcctcgatccacttggtgaagtactcgactgcgacgaaggtgaatctgaggttcccttgagccataggtagtggtccgacaatatccagcccccagcgttgatgtggccaggtgtgggcgatcagcttggtgaactgcgaagggttgcccgagcggggagaatacttctggcatgcttcgcaagacctcgtgactcgattcgtggcacagattatcg

SEQ ID NO: 6722 - DNA, 530 bp, Zea Mays
gttgatgcgcctccgtagaacctcggagtgccgtgggtagggctgtatgccgcattgactcaagcgagtccctgtccgtcgtgtgtgcctcgcccttcgctttgtgtagctctagtctgtcgtaggtttggagccttggtccattgggcaggacatcaccgatgcgggctccaccacttggcgttgaaatgtcgccgccttggtagtcgcgaggaaggagaataggggcggtccgttggatctgtgtggacggctccgattagatgattgcataccccttcgacaagattcgatcctgaccgtcaatcacacgatctgcgtgtgagaatagaccttgggttgttgggctcacatccatggatcgggaatcagacggccagtgtttggtatcgataccatctcgtgtagatctaaccgtggtcgttcgatcggatcgaacgatgtgggggtgttggagggatctcgcccttagaccttgatctgacggttgttatagcatactgattcattacgcccgcaatctaatcctg

SEQ ID NO: 6723 - DNA, 969 bp, Zea Mays
gcaagaagcgacaagaatgaaaccgactagcaccccgtcgagcaattgagcgagccaggtaggccggtcagctcctgccaagcaactgagcgaggcgggcatgccgaccatctccgcgcgagcaactctgcgaggcggacgatccaaccatctcccgccgagcaactaagcgtggcttaaacgtgaagatccacttcggggcagtacgtttgtgggccccagctccacgacccccgtcacgcgtctaacaggcgcacgtttgtacccgattagcgtgaaaaacgaggtagacactattgacccacaccagccacgataagatacgttgcccccaaataccaccctgactgacaccacgacacgctaggggagtttcggagagtctcaaccaatggtacgaggtgtcatcatgtatggccgttaacattccccaaccctgcaacatgggaccaaccgagttccacacagagagcctcaacaacaaagtctctacggtagcccacaaacgggacgtgaaagagcaacccgccatatcgatcgtgcgcttatgcacgtgtaagaaggcgacatcagggaagctacgttagaagaacccatatagataacaggctccgctttactttagaccacccatctctttgtaagccctcttgaactataaaagggcacgactgtatgttaacaaggcaataaagaagaggtaggagcattctctctcattctcacacttgcaccctttgtaacacgttttcaagagcatacaactatcaacactatacaagacgtagagcgcgagcctgaatcagtataaaaacctctcgagtcacttgttttaccactcgaagtgagtctgcactagcctcccccaccaaacacaaattctactgtgtccccggttaccgaaaccacgacaaccctattttacatttttgtcaaaaaatagtgcactcgatgaagtgactattctac

SEQ ID NO: 6724 - DNA, 550 bp, Zea Mays
gctggctgatggaggagggcgccttgggggcaggtgctgaggtattcttggggccattcatcgagttggagtaagcaggtcctgatgccttcaactgggggcagttgttcttgaagtgactagggtctccacagtgccaacaggcatttgctggtggttggttgcttgcaactgagggggcctgaaaggagctctgactctgctgactgaaatgtgacggagtgggtcccactggtctattgaagcttggtcccttgggtggaaacccaaaagatcgagttctctggtgccggtcctgttgctgagctcgaaggacttggaatttcctcttgaggtgacccttttcttcttcctttgccctttccacttgtatgactttgtttgagaggtgtgagaagctgaggaaatcttggctggctaggatggtcttgagttctggtctgagccctttcaagaagcgggccatcttcttagcttctatgctgacgtcatcaggcacgtagcgggctaattctgtgaatttgtgcacgtactcgctgacagatcttcc

SEQ ID NO: 6725 - DNA, 493 bp, Zea Mays
gccaaaacggagtccgcggaatcggtagaaaatcaggctgaacccggaaacgacctgggggaaatcggccggaaattgggctattttcgcggggttgttgggatttgactccgcctggtggctatatagcccgggcctctccccgttgaacaaccagaggagcgctggcgctaggatccatggcggcaaatagagagatgagagaaaatgtcgtggccaataccaccgttcgagccttgggcggtgcggttcgctcgacgccttcgcaataccgcggagcactatgggctggctacgtcacctcttctgcgccggtgaacccctttaacgtgttcaccggaaccatgcctgatcgtggtcgagatcctctgcaccatcaccggtggtatgaatctcgtcccctgttccgccatcgtgttagcttcgagatgtgctatccataccgtaggttagtgtactgtggcgcctgggcacttcacaccggcgatgtccg

SEQ ID NO: 6726 - DNA, 397 bp, Zea Mays
caccagagctagcggcatcactgtcatcgagctcgaccgacgaccgtcgatcggtacccgtcgtcgtcgcggcgtcgtcgacgacggcataataatataataaccaggccagggcagggaagatggtgaagttctccaagcagtttgaggggcagcttgtccccgagtggaagcatgccttcctggactactgcctgctcaaaaaggatctcaagaggatgcagcacgcccggcaccatgctgctgccgaccgtcgccaagcagcaggcctaaccgacacgcaagaaactgccgccggccaccacgcggaacgggcctctctctctctgtcccagtggctcctggacaggctccccgctggcctcttcggctccaatgctcccaacagggatcgtca

SEQ ID NO: 6727 - DNA, 910 bp, Zea Mays
aaaaaatgatgatatgttgggaatattggaacattatagagtatataccatttgttgtctgtgcaaccactacttgttgatggacctataattggctgaaccatgctttagctaaagtctatttaacaaagggagcatacataatacaaaccaccaatttcctgcaaccatatccagaaaaaaacactttaaagttcaaggttaactgtcttaagcaaggatttcatctgatacatgtgttgcattattcacccttttagtgctctttaacatgtgtgcacatgacttaggagttttagctaatttatgttcagctgcatttattgtcacacattttttgtggaaaacttgaacctagacaaaatctgcatcgctgcttaattagttgatttattccctcaggtttctgttcatttcctctgaaatatgttttgggatggacctcggccagaagtgctagcaacaaaagagacaaacaagcaacccttttttgactttggaatttcatgaattaggttcatgaatgaacacgccatgaaatgcatattttccattatccacactgtcatgttcattcgcttgtttagatagaaaggtctacatgttcattcaactggtaatcaacagttttctgcaattattaaaccttgattagtcagtccatggctactcttgtttctgggttttaaagagatgtcaatattgttcgcacaacccaccacacattcttttcgtgttctgggatgcactaggtacacagaaacctaaagtgctttaatgaacaacctcatccctgattgtccctcaactgaaaagaatcatatatggatgaaagtggtcaataacaatattttctatatggaaaacgattcccagtcggttgaaaactcgctagattttttagtttaac

SEQ ID NO: 6728 - DNA, 658 bp, Zea Mays
gcttaattggctaggtcagagagtaccaggagcatatcagagcactgaaacaagtgaatagagggcatgaacggacctgacatgagctagccacggcaaggcctctttcacggtggcggaaaacagatccggggagaaagagaaattggagagttatggtggctaatcggaggtaggagcgggtgctctggcttggtgataacttagcgcaacagaccgtgctgtcattttataggggcgctaagcggtggccagtgaatttggtttggcgtggtggcggccggagagtgagaagagcactgtcgtgagagcttggttgcatctaccgtggcggctctccggcgatcactggatacagatgacctgagctaatgcgacgtggttaaggtcctgaggcatggcgcaatcgcggtgaatgacgcatactccgatgatggccataaggccacgtcgccggcgcaaatgaccgagggacagcgcggccacaatgtcccgaacttatccgcggtgtgatcttttcaccgacgagctcaatccacagacctgaagcacgaattgtggcgatcagcaccgatcacgatgaagggtcaccgttagcgagatactctgaatctgctgatatttgtgtgcactgtaccatcgcgattgttcatcagat

SEQ ID NO: 6729 - DNA, 510 bp, Zea Mays
cggctaagcccgccgtacccacttgctcatcggtcgatcggataagagctcaccgctattgtttgatcactgccgtgcaccgcgtgtctaggctctgtaccacgtcgcaattagttatgttaagggatccggtgatcgccggaggaagcgccacggtgaaagccacccatcccgagcatcagtatccctgtttccctacggctgccagcacaacctcgggaaattagacaccaccgacgatgggaactataaattggcacctccgcccgctccgctaggtaactgcgtagccggtgaagcaattcgcaccttgaatcctcccctagaattcaccaatttcggatttaccaagctgctcaagaacaccgtgtgtcttgacttcgccgtggtccgctcaattcaggtccgattttgccatttatgttcttgtttcggcacccatgcttacccttgatgctcatcgacccgtccaattgaactagaacccccttaatcaccgggaacacattc

SEQ ID NO: 6730 - DNA, 1244 bp, Zea Mays
acaaatcccactgttgacaacaccttgaagggcccaaagaaacggaaggccagcttctggttagcacgatgggcgagcgaagactgaacataaggttaaagccggacatagaccatatcaccaatttgaaaggaacgctcagacctcttcttatcagcctgcaccttcatgcgaagttgggcacgagccaaatgctgtttgactaaatccatcatgactttcttctcctctatccattcctgcagtgagggaatcggacagacagcagaagactctactccaaagtgacgaggagcgtaaccatacaagacctcaaagggagaaaaaccaaggctgagtgccaactggaattataccaaaactcagctaaatagagccaatccacccatttgctggggcaagcattcacaaagcacctcaaatatgtttccatgcactgattcacacgttcagtctgaccgtctgattgtggatgatacgcagaactcatgttgagagaaacccctgccaatgaaaagagtgtattccacaactgactggtgaaaatacgatccctgtcagatataattgacgtaggcaaaccatgcaacttttaaatgttctgcatgaagacatgagcaactgaagctgctgtgaatggatgtcgtaagggaattaagtggctaaacttggaaaatttatccaccaccactaagacacaattcttgccatgagacggaggaaggccttccacaaaatcaaggctcactgttcgccaggcgccgtcgggtatagccaaaggctggagcagtcctgggtacctgctcctgtcgggcttggcttgtaaacaaatagagcatgccgaaacaaagtcttgtacactcttcttgagacctgaccaggaaaatagctgcttgatgcgcctgtaagtgactggaataccagaatgaccaccgagaggagaactatgcatagcagccaaaatggaacgctgaagagaatcattccggccaacccagagtcgacctttaaagcgaaccagaccatcagaaagggaaaaattgggaacaacagtgttgtcaacagccagcttggtgagaatgtctttggattctggatcactcaaatatccatcctgtaacgcctgacaccattgtggagtggatactgaaacagcatacaaggaaaccagtgggtgagctcttctggacaacgcatcggcttgaccattttcaggaccctccttgtacacaatacggttgtcg

SEQ ID NO: 6731 - DNA, 635 bp, Zea Mays
taatctttttcccgaagcgtgtcgaataatataatcaaggacttcggaaggcgcttcgggagtaggagcggcagctttttcaggcaaaatctgttctatagattcttcttccgctgcattttctccaatttccgaggatttctccttggcgggctctgaaggcccagcttccacgctagcctggcttattgtagcttcggcttcggtcagttttgtttcggtttcaacttgcactttcgaagccttagcaattttccctggagtagagcttgaagtttttatcgtctccagcacatctagtacactggccatcctttttctcttggggtcgctgctagacctttttgtgccttcggcaccgccactcctaccgaagggcttagaacttctaatgttttcgtcccttcgattcttggttcctcaattttgtcacccttcggcattgcagccggctcttcaatcctctgcgtaggagcaggtcctcttgcttcaatagctgaagaagtttcaccgccaaattcaggtactatggccggttcaatgtagcgcggtcggtgggtaaggaccttcagctttttcctcttcagtccaggctcgcttgaagcagctgaagcagcatcctttccagaagttgc

SEQ ID NO: 6732 - DNA, 403 bp, Zea Mays
cgcactaatacagggaaaagcaggggtctcggtgaaagaatcactagacacagaccccatccatgtggactgcgggttgattcttaaaactacggggtctctttagacaaatgcacggccgaaggggtaaggtaggttctcggtcgttcgatcaggagcctgcggttcagattagatgagctctataacgaaccggtacgcatctggggtcactggatatgaaatctacgatcacgatttaacatagcgaagggatatccgcgacccgatcacagccatccgtggatcgatcaacgtcccaggtccttctcctagctccagctgcccaggcacagacaccgcgccctccccagtgcactctttctctctcccgttgctccaccgacgtgcacaccgatctcgg

SEQ ID NO: 6733 - DNA, 755 bp, Zea Mays
acggggagtacagggggagaatagtcttaccttggcgacgtgcggacgatggtggagctggagcatctgaagtgacgacggagacaccggaacagcgggttagggatggggacgagtcgtgtcgaatgcgagaagtcacccgaaagcggacttagtgggatgtggtaacttagctgcatacggaagcgcttccactaaatgatttcataggcggttccaatagccagccgcctgtagaaatgatttacacagccggttcctaaagccagccgccagtgttaattcactattttcacagccgattcctaaagccagtcgccagtgttaattcactattttcacagccggttcctaaatccagccgctagtgaaactttttcactaacggttccttaagccagccgccattgtaaacaagaactgctttatttattagaaaggattgttttcatcctagtacaaactacttttcctaccagaataagctatcatgctgcagccgacgacgcttgctgggaggcatctcatcgcattggcttgccccgccatcatcatcgccgtcatcatcgccactgccgtcgctgtcctggtcactgttgtcgtcgtcgttctcgtcatcttcgtcggaggaggagaccatgcccatccaatgtccagatatcgagtcgccattgttgtccaaggactccacatctgatgattctccatcgtacgtccaagaccactcagtgctggtgtcggagtccagctccccg

SEQ ID NO: 6734 - DNA, 691 bp, Zea Mays
gaggaaactgcgaatacccacagctgcggactctgagaaattccatgtgccagtcaacactataagctcccttgttaaagaatttgatgatcgctgtgtaaaatgttgtagcccaactgcctttcctcaagcacaagttggaaatctatcggacctccatcccttatactttaacctgttgcatcagtggattcctttgggagtattgcttgtatcacctagttgtgttaacgagcagaactgtgacatcctcctgcgctacacaagcactgggcaggttctggagtcaaatggagcacgagtaaaaacaaaagatgatgccactaatgatggtttcttaggcagctgcattggtactgctgagagatgggcattgactggagcatatctcatctttggctggcttgacgtagttgaggatatggccccattgatatttgattgcgaagataaatgtcatagttttgtcagccaactcagaaacaagacaggcccatacctgctcaagtgcgtgaagtcattatttaagacgttggaacagccaaatcaagataaagattttgtgattgatcttcataataggttgttaaactgggataagaacgtgcaaggctgtgagatatttggggatgttatccttgaaatgaacaagaagtttaatcttcctttgtagtagtgaccagggattcta

SEQ ID NO: 6735 - DNA, 335 bp, Zea Mays
gaaacacctgtgccgttcgttccttcgtgcgttattggagcttcaatgcgtccgttactcttccccattactccttctcctccatgaacgccattgatggccgattgaagacaccgaccctctctctccccctcttctcgcctataaattggacaccgaactcccttcccttctcctccccgagctccctcttctctcttttcgtgctcgatcctgcgctctcctgcccgaactgctctgcgcacaggctctgtagtcgtgccgctgctgcacaccatcgtcgtcgaacctctgctgctcgcacagcgacgtcggtccctgttgttgtttccccg

SEQ ID NO: 6736 - DNA, 449 bp, Zea Mays
gatttagcagacttacccaaagccttgccccgatactgcttctctgtcccattcaccttcatcatgtgggttgtcgatttgtttctaacaatattagattgtctgattctaagtatcaaactatctgaagcaccagattgtttggtgatagccatctaattgcccgatgtacgtcgtataggagaactctgtcgatggctagttttattttgccccccattacctccgatcttattagtggtccttatagttcctttcttgtctaaagccttctgagtggtcattccttgtgatagatttgttgtgcgaggatcaccgatgactatgttcttacccttgcctttatcagccatctccagccaaattaggaccttcttgccattcatctcaagtgtattgatggggaacgactgtctgtcaatttgcattccttggaaaaccaatcggcc

SEQ ID NO: 6737 - DNA, 1557 bp, Zea Mays
atcaggaaagtagatgctacagatgtagtgtaccttgaactgtagtactgcctcacagagagcacaagattgaacatagcagcttcgccaaccatcatgtaaataaccacaaatcggatgtaccatctgaactcattgatgtaaattcttgtttcaagcagaatcattacaagcatacagcaccaagcaacagactcaatgatcaatgagacaatctgtagaaatacaagtttttaaatggcccaaaagggcaaaaggtacaagaatatgtaagaagtaaaggtcagatcaaattttacataatttcatatcaactaaagaattggtcacttgagttatggatatatactctatcagcattttctgtatataagttaactctagttctactggcaaaatcaaggagaaaattagctccctgccatcataatatttgcactgaaaacatacttgtacgggggcaatagcatatcagcatatggattccgcagaacttgataacaaagccatgtagatcattctcacctcaaatggagcaaggccaggctgcccatccaagttcatgatggaggtaccagtgatgatccgataaagcggctctgctatgcagtacaccacgagcagtccaagcaggtagttgtagtatggtgaacgtaacttgtaccgctgcactgtgtagtccctcgtcgtcctccatatacgatagaagcaaactccaaagagtgcgaggtatgagatgcagactacaagggtgtcagtgccacatggagtgtaggcgccgaacgcattctcaaccacatgcgaccacacaccatccttgaccggctggcagtaccactccagtgggtcgaaccccatctcgctccctccacttaccaaccctgttcttcaatcagttctgatgttctcctgaattcaagaattaaaccaacgaaacaagagaaaatccagataatgagcaatgtcactcaacaccaacctaacaggaaacttatctactagcccaaaaaacaactagagcaaacacttctgtttctaagtactctgatgcagataatttcaccaaatgaagatatacatagaaacagactttccgagggacgccagcatggagattcagttgacgcccacgaacaaaataaactggacccagcttaataagtgggtgcaagtgcggctcaacaaaaaacgaccggcatactgaagaagtgaggatccatcacctcatcaagcaaggatggggatggatagtggaccacagcaacagcacgaagcatacgaatccaaatctaacaaaatggaccgagataacacatccaaccaaggccggaataacttgccagttgcaacccgcaggagaagccaatccacgagcgggtggatctccacgcaactgcaccctatactattctgacgaacgagtagtgctgcagcggcggcggcggaagcggcgccacatgcccactccactagtccactaagacacgccaggcacgaccgcacaaaaaaggcaaaagaggatataaacaacggggctttatcatctcgacagaatcg

SEQ ID NO: 6738 - DNA, 1082 bp, Zea Mays
cgaccccaccaatggtatagcacgtctgaccaaagcacacatggctaggggtagcaggcttttcgtcctatactccacctcgagcgacgccatgggtcttggcaaggaccgcctttggccaaccggaggaccgtcgccacgggcaccacacggtgcagcatgcgtaagaatgtaacattgaatgttgtgagccggctaaggggctgccctcactttggagctatcggatgaactacggcccgacgacaagcaggactctgatgcgagaaaggtgggcacaatcctcaagacgacgggcgacgcaaggagaaaggacaccttggcacagtgaccctttgacacgggaggcatcctgagggaagctaccaaatgctctttgaggatctgtctcggctccaaggcccctgaagaaggttgcccatgatgcctccacaagcacaagcgaggcgtcgtcaggcaggggctggtagaatcttcgcagtcggcatcttcgttaactagcataagcgctcaactcagtactaggccagaagagaaacgaagcgtgagggatgtatgcctgtaacgtcgacctagataaagcatgcttgaagaacccgtctccccttccgcatactaggtagcaggccaacattgcctctagttacgagacactgagttgggagacgagaaaaagaggacgctagctgacgccggaaccatcgagcaaaaagaacaactcgactcacgacaagttttcatcaccctggaccggttctataccccgaccatgcaacagtcgcctagggctatcaaatagaggaaactagggagaggggagatcgctagcctctccaggtcatcttttatgtgtcctttacatcttttttatgagcataatctcactaacgaatctctttctttttcccttgtccatgcaactgacacaggacctcggagaactgaaggggatgaaaagttagccaagccgcccaccagaacaccctacctaaggaaggcaaatgaacaccaggagtgtctaacctgctaaggccttagactccttccatttcttttgggagatcgtaaaacccacgacaaaa

SEQ ID NO: 6739 - DNA, 424 bp, Zea Mays
tttcaacgtggcgcttaaccgcctccccaccgccgccgcctctatgttccacccccatcaccacgccgggcagcagcacgcgcccgtgctgtccaacgcgctcgtcgccgcgttcaagcgcgcgcaggcgcaccagcgccggggctccgtggatggagcacagggacaaccgccacagccggtgctcgccggcaaggtcgacatcgaccagctcatcatctccatcctcgacgaccccagcgtgagccgcgtcatgcgcgaggccggcttctccagctcccaggtcaaggccaacgtcgagaaggccgtctcggcgtcgtcttcaccggagcatcagcagcagaacacgacgataccacccaccagccgcgcccacgcggcgatctctccaggcggagcagcttccggcgacgccatgcgcgtg

SEQ ID NO: 6740 - DNA, 669 bp, Zea Mays
gggtaactgagtaaggtctttataacaaacttgtagctggttctttgaatgacaatattgatgcagtcaagtgagcgagttgttacatgaaacatagaaaacgaagctctccaaattgcactgtcagattgtctgatgaagatcaccatggtacaatgaccataaagatctctagtgccgtgagctcgacgccggtgatctgtcgccacaattcgcgcctgccagggagattcgtgccgcgggaagagtagataacgtcggggcggggtgaaaatatctagtgtggggtgaatccagtcactggccggaccggccgtcgtatcccgcctcggtcagtcacactggcatcacaggagctcaccattctccggccgtgccacatgcttaggaacattaccacatcacagtgaagcatagtagggagtccgcctatcgtcggaggctttgccacggtgaaagccacgatagcactcgcgccagtgacttcccctctccggccgccagcgcgccttcttcaaattggacgccaccgccgataggttctataaattgctgcccagtgagctccgctaggttattacacacctagtgaaccagccctcacctccaatcgttcaccatagctcctcaatttggaattccccccaaatcaggttttccgcgccgtcg

SEQ ID NO: 6741 - DNA, 319 bp, Zea Mays
ctctctctgcatgtgctgcttcgtttagattctgtgatgcattgtttggacaaatcgcgagggaatggcaccgtgcgcttgtggtgtgattatcgatgcgaatagtgatgaggattcagggttcagtttgacattccttcctggaggtttctggatcgcgcggtaggaaatggttgtttggttagttttggtggtgtgattttagcccggatattaagatgtcgtgtgcctttggtattgctaaccgcataaagctggttactttgttatttttgcgactttgggctgttcggttgctcaggaacgtggcctgaaacta

SEQ ID NO: 6742 - DNA, 698 bp, Zea Mays
caacgatggtttataaggaggcgttggtggacggaaggtccactgcctgcggcgctgatgttggtgacggtggttgggtgaaggttgtgggacgtcggtctcgccgtcgaagtccctgcccccctcttcccttgcacccccagacccgttcctgttgatttacgtgggaagtgcttcaactgtttctcaccgtcccaccgtgcggctgactgtggcagtttggtgcggtgcttccattgccgcctgcctgggcatcgggtgcgcgcgtgtccacgtcggaagaagactctgcatcacccagcgaaggtgttggtgtggcgtccagttcccaggaaggtcgtcccggagaaagttcctctctgtgatatggaaggtgtttcgcgggtcggcggtgatggtgatggaatgaagaagatgaagcgcactcgccgtggacagaggcgtcgaaggatggaccgggaggacttgggcgcacctggtcgggtctcatcattggcttcttcttccttgccttcggtggtgcacccccctcgctcgcatatccttaagcattcaaggttgatcgaccaggcggaggaggattttcagcgtgctctgatcgtcaatgttcttggccaagagggttctgactgcgccgctgtgattttggaggcgctcgcctcgaagtatggtcttgaggctgatgcgctccaaatccg

SEQ ID NO: 6743 - DNA, 636 bp, Zea Mays
gcttgttctaggtttgggacaagtgattagaagtaatgtacatacacctcttaccattggcggttgcacatgccattgtattggttgtattgggaggggcttatagccttgtgagatcataccaactatgtttgtggcgtggacaccatcttgtaccagagaaaataaggcccatgacgtttcatccagaaactcaatagtgaagacgacagagagcatctacgagaggccatactagagcattaattttgtgtggagaaggcttgagactatccacggagttatccggccgggagcttagccctcgcgtgggtttatattatatgaggctccaacaaggattgaagagaaacttgtgcgcttcccgacaccttgataaaataataaagtcgtcaacgagagcttgcatctctatcacatttaagtttttgtaattgtattgtgttgacttggttgtgtgctttatcttctttacactcatccacccaaccaataatcacacgcaaaaactctgtagaattatatcgattttttaacgaaaggattgataaaaaaacccagcagagcagtacagaaacgttctttagctgatgggctgtttcgaagcaccctaaccgcagtcaagcattatatgtt

SEQ ID NO: 6744 - DNA, 387 bp, Zea Mays
gctggctgttgtcccgggttcggtggcggccacttcgcctacggcggtgggtggagcgaaggtacttcacaggacccatggtccaaattctgcgccagcggcaagattccgtcggccgtcgccgctagggccgtggcgggctttgtgtcctagcagttgaagcatgtaggtcgtcttagacttcgttggttcgttgctttgatgtggttgcgaatctgatgatttttttcgtggcaggcggtcgccttcgccgaccatgttgcgtccggcgccttgacttcggagttcgctgtcgagaagcaacgactcgagggcaggatcgagcgcctccgagcgtagcatgtggatgctgtttgggacaagtcagctgcggaaaacaagagccac

SEQ ID NO: 6745 - DNA, 622 bp, Zea Mays
cgaaaacatctatccgaagcaatgaacacaaccgtacactacgtgcaatgcgaaattcaatgaacgcataaggtgtattgactcgacttataaatatagaggaaatgaggactaccctggcatgtcaccacctctctacttaagccaagacaatttctaccatcgactaaaagttctaagtattaaacacactattactttccatgcacaaataaacctcaacttaacaccagtgacaccgatggatttttactaaacccatcatgtgcataaccccgtctcgcatacaaccatattgtggcgtgtactcgagacactaccgattaacttaacgcaattaccactacaatgcacttcgatatacacgtccgacatcacagtgcttcgacaaaccccacacttccaatctacttgtcacatccaaccacaccacgtttgataacacacctttctaactaaacatatctcgtcttccaaacacccatcatatgtcacataatttacatttcccacttaatctaacctacaccaacgatgaatacataaatataattaccgtagactgactcatcagtcgactgcggaaatcactaagcatgctttgcactttattaattttttg

SEQ ID NO: 6746 - DNA, 350 bp, Zea Mays
taatcttccaatatctaccatgtcaacccccattcaaattgactcagacggtggtagaattcgagccgatagcatttgcttgaatgtaagtgtggaaataagggggatagcatttcccgctaacctcatagtaatgggtactcagggaatagatgtcatcctagggatgaattggctattgtgataagaggacaatcaagttgatgtccccactaggaagttgttatcagatggctgttaatagcagtgaagcagatccattggaggttatcaaggttgtgtccgagttcccagacgtgttcccaaaggacctaccaggtatgccaccagagcgaaaagttgagtttgct

SEQ ID NO: 6747 - DNA, 569 bp, Zea Mays
gtggaattgattttcctcctaatcgacacactcggtggatatatagacgaccccaccagccacagccagtagagatgaatcctcctaatcctccactaggcggagttgacccactaattgcagctcagatgaggatgatgcaacaaatggcggacactatggcagatatgcatgctcagatgcagcaagaacgccaggagatgcgctaggaaagagaagagatatgccaggaattgcgccaggagcgagaagagatacgctaggagagaagggcgcaatagcagccgcaacagcaaatgcaacaacaacagcaacaacagcaacaagtaccattgcctccacctccaccaccagttccaccccgagataagcatagggagttcatgagtcataagccatctacatttgcaagctctcctaatccattggatgcagatgattggctgaagtccgttgagaagatgttgaatattgcacaatgcactgaccgggagaaggttttatatgcttctggacgtctgacaggtcctgctgctgactggtgggattcatatactgctgcccacgat

SEQ ID NO: 6748 - DNA, 642 bp, Zea Mays
tcagaaaattaagaattagggattgggctaaagttgaagagcgctttgaaaagagccttagcagctggaaagggaaacacctgtctatcggaggatgcttgaccttgattaggtcagtactcagtagcttaccgatgtatatgatgtccttcttccaccttcctaaaggagtccttaggaagctcaactatttccactcaagattcttttggcagggtaatgataacaaaaggaaatatagacttgtcaaatgggatattctatgtcaacctaaggatcaaggggccttggaatcctagagttgaatacgacgaatactgccctccttagtaaatggatatacaaactactcacctctgatggaatatggcaacaacttctccacaataaatatgtaggctcaaaacctttgtctcaggttgagtgcaaacttggggactcccacttctggtgtggcttaatgaaagtaaagccaacctttttttgctatggatcctttctcctaaaagatggatcacatgtaaggttctgggaggatacatggctcgatgggtcctctttaagagatcaatatccaagcttgtataacattgtgagacataaatccataactatagcaaaagtaatgagtgtattccctcc

SEQ ID NO: 6749 - DNA, 637 bp, Zea Mays
gccatggagtcgtcattaatcaacgccgtaccccctacctagcgcgccagctatttgtgtttgtgacccgactgcgcaccacgagataccccacatgatgcttctgggcaggacaacgtcgttgatcgcgactcggtggtatgtgcggaagcaagtcggaacacaagaaagttatataagttcgggcggccggaatgcgtaataccctatgtcctgttggtgctgagtattgagtttgttgatggtgtttgggttacaaatgagtaatggacggcgatgggtgaattccctctatcaatctaatggtggcgagaatgctacgagagggatgatgagatcattctgtagggtacccctttagccttatataagtgaccagagggatatccctttacaagccatgaggtctatctaactctatctgattctactattgtgcgccgactctttcggtggttgttcccctccaaggttggcatcaaacaatccactattcggtcgtatgtagggcacgttatttggaatcttattggcttctatctgatacactcatgtagataacgccttgatgtcgttctctccgaaatccttctggcaaagttattgtaatacccaacttgtaattaataaggaaaag

SEQ ID NO: 6750 - DNA, 757 bp, Zea Mays
aaggtatggcctcttgtgaatgagtgggagatgtcaaaagaaactgctgctggctccagccaaggtggtttggtttatctttgatacaccttttggtatagaagccagtttgacgagccaaatgacgattggctagatgctattgaggcaaccagtgatgagctgatgggatcctacacgaaggcaaaggacgaagctatgatcgttgccttcggcgctcgaggaaaaagaagactaaatagagtttttgatgtaattgggtttcaaaagcaaggaggaaaaagaaaaattgccacttcgacctcttctggcgtgcctaagccaaagagagccaaggtactgacccgtaggtcgaagctataatctttagaacagacagttgtggtgcccatgatagaggaggtgaagtttatggagagtgccgaagctgtccgagccatgccagccaaagctatggaagcaattcctgccaggcgaagctagtgctaatgcgatagaagagctggaaacagagaaaacagcagaagaacagccaaagctgtcgagccctctagtagtggcagagttaccgaagctatcaactactacgagaacgaccccgaggaagaggaggatggctagtgtattggatgttgttcttgaatcgatgcaatcgccaacttttgcctttgtcgaagcatctggtaagaaaactggagatgcaaggaaagttgttattgcaagcgctacttctgctcatgctgaaactggaccttcg

SEQ ID NO: 6751 - DNA, 535 bp, Zea Mays
gccaggaataagctttatggcaaactcaactttccgctcaggtggcatacctggtaagtctttagggaacacatccggaaactctgacacaaccttgatagtctcgagtgggtcggcctccttgctattaagagccatctaatgacaacctcctttccttggctcacgtgagactagctcagtcaccacttctcctagtggggacaccaatttcactgtcctcttatcacagctgataactgtttggtacttatctagccaatttatccctaggataacatctattccctgagtacccattactatgaggttagcggggacctctatcccccttatttccacacttacattcaagcatacactatcggctcgaacttttccaccggctgagtcaatttgagttggtgttgacatggtgattattgaaacattatgcgcttcaacccatgatgcagtaataaatgaatgtgttgatccagtatcaaataacacttctacaatatgggattcgactggaaagatacctactatcatc

SEQ ID NO: 6752 - DNA, 273 bp, Zea Mays
gaattttagaggtgccttatcgattcaatttcttcatttattagcggcaaagggatgattttggctgacattttcagatacttgttacttcacgctgaagatcaggggaaatctctaagcttgttttctagtgtcataattaaagtgtgctctacaaaaatgtttgaatgtattgcctgcattcacactatcgatatgtttcttagctcaagtgttttggagagatacagtttactcataagttaaagagtttcctttgctctatatagtggt

SEQ ID NO: 6753 - DNA, 489 bp, Zea Mays
ccttgaggagttactaggcatgccacccaagcgtaaagtggagtttgccatagagcttatcctaggcaccgccctatttccaagagagcctatcgagtgtccggaccagaattggtggaactcaagaagcagatcgatgagttgttggagaaaggctacatcagacccagtaccttgccttgggccgctctagttttgttcatggagaagaaagatgggacaaagagaatgtgcatcgattatagatctttgaacgaagtcactgttaagaacaagtaccctctgccaataattgaagatctattcgatcagttgagaggagccagtgtgttcttgaagatagatctgaggtcaggttaccatcagctcaagatccagccttcaaatataccgaagacaacatttatcaccaagtatggactatatcagttcactgtcatgtcattcagtttgacgaatgcgccagcttatttcatgtacttgatgaac

SEQ ID NO: 6754 - DNA, 541 bp, Zea Mays
agcttttgtgcggatggttgcgagttagaaaaactaaatattcaccacaatttccaccagttgaaaacaaactttgcatgccattcatgtggcattccccacaactggaattgctagggcatgttgttcgatcgctccccggcgcctccagctaggttatagggcgccagccatcacatatatccactcctatattcatcgctagaagtttctagaagaggtgatgacaaacctgctcatatgttgcctacgatgttgctactgctcttccatgcacaagagtcaaggcgatgacctctaccttggatctgcgccactcatcttgtcgtacagccgacatatatgaacatcctctcctccttactctcctgagcagatttggaaaggtgttggtccctaagaggttacaaattaatgctactacaatttagatggcaagaattttacattaacttgttgcagttttttccctgaggcccttgaccaagtgcacatgatttgattatcgtggcaaccattatgtgccatagctagataggtg

SEQ ID NO: 6755 - DNA, 373 bp, Zea Mays
cagcttcgtgccccgctctgaggccagttatcccgtgctaatgttttggaaaaggtggccatgctcttggatgcaggaatggttttatgtgaagattgacctgagtaagagggaggatgtgaaagggattaatcagtgccctatatggtcttgctttggcattaggaagccactcattgcacttgagaatgacgtgcaagcatgtcagatagctttcaacatagtgtgcacctatatcggcacgagagacttggtccaagagcatattgcttacagtgtgtggccccttgcaagtggatgggaaatgccgaaggaggctaccgctggctccagtcaaaatggcttggtctatctgaagtatacctttcaatac

SEQ ID NO: 6756 - DNA, 406 bp, Zea Mays
cgagaaaccccgagcactgagctcggtggtcgggcgaggcgaacccagaagggaaaccgggcaaaccgagggaggccacttgagtggattctacacatggcccgagactgccctgtcataaataactgaccatattaagcacgtctggtgctgagccatgatggggggagtcgatcctcctactcatgacctacgaacccagaccagaaccccactcatgatctacgtggtcgtagacctacgacccacttatggcctaccgagcctaggccagagtcccctagcaatctacaggaccctcaacacgacgagccatgccgaggcttaggctacgaaggcatggggtcgacgcggtataggaaaagtaatgatgacagctgagtccctcgccacccacacatagccg

SEQ ID NO: 6757 - DNA, 982 bp, Zea Mays
gtaaatccaaaatggcgaggaacatgtccataaagtacttcaaaggtagtccaacccaaagaggaatggaaattggtattgtaccaatactcagccaagggcaaccatgccgaccacttggaaggacaggaatgcacgaagcagcgaagatacgtctccaagcactggttcaccctttccgtctgtctgtccgtctgaggatgatatgatgagctcatctttagtgtagtacccgatagatgaaacaactcttgccaaaaccgacttgtaaacaccttgtcacgattcgacacaatggctgtgggaaggccatgaagcctgtaaactgaatctaagaacagttgggctactttgagtgcagagaatggatgcaacaatggcataaagtgtgcatatttggaaaaatgatccaccaccaccaggattgtatcagcacgattagagcgaggaagaccctccacaaaatccatttcgaccacttgccatgacttttctggtactggaaggggttgcaataaccctgggtacttgcttctatcagacttagcctattggcacatagaacaattggccacaaattctttgactactgatttcattccagcccatgcaaagatttgcttgatcttgcgataagtaacaggaaagcccgaatgccccccaagagggctgtcatgtagtgttgacataatgttcttgtgaatacatggatcattaccaacccataccctgcctttataacgtataatgcccgagtgcaaggtgtagtgggtggaatcagactgattggtagcaagagtagccaaaagagcttgtgctttaacatcttgaacatagctgtcagcaacctgaagtagccattgaggaactgcagtagatagactgaacaaggcgaattcaacaagtggcatgcgagacaaggcatcagctgccccattttccacccctttcttgtacaccaccttatattggagacccaata

SEQ ID NO: 6758 - DNA, 776 bp, Zea Mays
aacaatctaatcaatcaagaatcaaacacaacaatcggacttacatgtgaatgcagtatttgaggcgtatccatctccctggagctaatattggacataggaggtcggaccctttgttctccttcttcccctatgctcatctcgtcgattacaggacctagtagagcaggaggtggtgtgaccagtgagttaccatcaactcctccctctgtctctggatcaagacgaacgccacctcctaccatcgccggcgactctccagagccggccatctccacctccaaatagttatgcaggctttgtggtgttttttccgatgaaaggaaatcacggatactatacaagtaaccgcatccacgttttcagggtatttccattatttccgaaaccgtccccgatattctagcgatgtacatgtaaaactaatatccctaacacaatacttacgcacaatgactcaacattttacgccaaaaggtatatactatttatgcaacttttgtacattaccggttttatgtcatatccttcaacatcttattctacattctatttacctgccgccattacaccccatgcaagatccataaattccgcgcccacgtaacagagtaatcatgtttgcatgtggaaattattccctataattccgcaccacttccaaatgtttactgccttgccattgaaccaaccgcgtaacggcgtcgtctgtcctgcatgccgtctgtctggtatacattaaacacaggcgcgcttgtctcagcggaccagaccac

SEQ ID NO: 6759 - DNA, 767 bp, Zea Mays
aagcattatgtggcgccagaataagatttgtttgttttcttagctgatattatgaatagtattatcataaattgatgtatccaaacacgccctatgacaataggttgtgtattaataggttccttgcacatgtgttgtcaatccagattgatcagtatctacgcctcttgctgtgccccagcccaacactattgtcgtcagatgatcatcgagcgatatgtttgcttgtgttgatgtccctatgaagtactttgaactatcgacatcgaagcctcggagtgcagaggtgtagggcaaagaagtagcaacttgatacacctgccattttggaatgaactcattttttactacttctctgctctcatgctctacttgggattttgggagttagggagttcggacttttttcattggttgtcgtggcttatcgccacgccttcatagtctgtcaagcaccgttactgaaagcaacagttgatagaaagcgcagcatcgtattcagtcaccgacatgcactcgccacacggactaaagaaagaaagagggaacgaacaacaaacatgtgatgtgattatcaggaaggagaaggacatttatttctagatcctggctctcccttcgtgctgccgagatctgcaggagacggtggttcttgtgtcggtcagtcggtttaccatgtgtcgcgtcttgtgatttggtaggtgggatctgacacctccataatgcgggccgatcagtgtgttgaataattagataatttctatatt

SEQ ID NO: 6760 - DNA, 867 bp, Zea Mays
tggaaacttatcggagataatatccccgatccctggggacccatcggttagcaagcacactgataaaaaggcctctggcatctagggcccgatggtcagtcggaggcgatatgtaatgtctaccctagtggcacccacccctagataaaccccataacaccgaggtcggggtcgggcgtggcagaacctgacaggggtcaggcacaccgaagggaaaccactcgagtggatcctgtgcctggcctgagaccgacccatcataagtgactagcaagattaactatgcttaacaatgagccacgacagaagcgacggtccgcctcccactcatgacctacgaacccttcacactacagtgcatttatggcccgtgcacccccgtctgcggcacactcatgacctatcagacctggcctaagtgcatagactggcagggcgcaacatgacaagccgcaccgagccctaggctacgaaggccaggggtcggcatagcccaaatgatggcgctgggtccccacgtttctcgctccatccaccataaagaatacgagatagccaggcgaccctcgggccacgagcacgtgtggcttcaccccaggtggaacgtttggttttacctttgtctgatggctccttcctgaggaatccaccgctagccgacccctttgttggcgtataaaaggaaggggttggccctcaaacgggaggggcagacacacatggatggacattggacgagaaaacacccaaacaaaccaacgcacgggaggaggacacaacgacgagaatccaaaggctaggactccactctgtaacctttagctccacctccacccctataagggacttgtgagtctctccttcctc

SEQ ID NO: 6761 - DNA, 363 bp, Zea Mays
atagctcaactctacaagcgctagccagacatgctcagggacatagcctcgaaccatcgccggaagaattcgttcaatccatatgtggaagtcatgactcttcatccctaagactcgcagagtagatacgttcaccccccctactaaggttagctgcatacccatcagggaacattaacatcttgatccactgtagtacttccttcctctgggccctgctcaggacaaaatcggccttaggccttctccatgtcttaccaccactaggcggcttcatctcttgatttggtctatcacataactctgccagatccactcttgcctttatgttatcctttgacttatcaggaatctccataattg

SEQ ID NO: 6762 - DNA, 514 bp, Zea Mays
gctggatttgcataatggccttgtcattccgaagctcaatctcataggactcataaccatagtcatcagtttttccctcttcttctcgtcagcttttacatagaaccattcatttgtccacccggtcggccactttgtgcggtagccgattaccaaggccttggtgtctttttggtacgcaaagttatagcatccaaagtttttgtgaagggcatctgcccgagccttcgtttgataatgcaactcgtgcacttggtagaaaccttcggcattggcacttatgcccgggctttggagagcccatatgtaaacactcagcctgacaatggcatttggtgtcagctgatgaagatatatctcaaacctcttcaaaacctctcctattatatcatatagaggaaaccgaagccctgccctaaagaagcttttgaaaacaacaacttcatcctccttcggctccggaaccattcctcgctagcaaaatgaataagtttactctcaatttcccaaaaat

SEQ ID NO: 6763 - DNA, 488 bp, Zea Mays
cgcgagggctataggcacttcaaagccattgaatagagcaacgaggacttagacgctggggtattccaggtcgaagacgatgtgttgaagcacgtggctgggacgctttatgataggatgtggggtcctcacggtcaaggcgttgtccgggagagggccgaccgagcgcttgcactgttatgtttgtgcccttagtgagggtgtcttatgtatttgctttgtctgacgcattgttgtgcggtcttcgcaggcgatgagggatgaagaagttgagtacctcgctagcctggagagctccgtggcccgaaaggatgccgaggtggaggtgggagctgaagagcagtcctcgctcatgaaaggtgacgctgaggaccctacagcggcggggacttctgtgcaggtgtaaagactatagtaggagtggtacaatggtgttctattttgtatgatacttaaaatcggctgctatccaggttccagcatctggg

SEQ ID NO: 6764 - DNA, 394 bp, Zea Mays
catgatgacttcctccgtagaagaccaagcaagaacagcaacagcgcaatcattaatctaatccatccatcagttgagaatttctgttgcgacaacctacatgcacacaccatatctataaatgttattgagttattctacatttatgtgggatggacaaatttagtcggataagaacagcagaagaagctgaacttgaatcccacaaaattcaaggagacctaccagaggtgcgcagacaagattgagaatgtaccagaaggcggctaccacaggttgccccttccattttgtaaagcatgcacaataattccttgcgtgttccatgtcctgggcagcacggtttgctctcctttcctcgtgtaaagcacacacgattccttgcatgtcgccg

SEQ ID NO: 6765 - DNA, 443 bp, Zea Mays
cggtaataggggtatacgaagccgatggcgtcaaaaactctgttcagtcttttctttccccgacctccgaaggctgcggatagagcattattttccgccttgtaatatgctccaagcagttcatcacttgtagcttcgatacacttcagccagtcgttgtttggctcatcaaacttctccctgaatctgaaggtatatttcagtcgaaccagtccaccttcgctagagtcggtggtggtctccttcggcatttcccagctgtctacaagcggccataccctgaaggctatatgttcttgaattaaatctcgtgtcccaataaaggagcaaacagtgctgaaggccctctgacacgcttcgactgtctcatcaatttctatcttcggccttcgaaggccgaagcgggaccaaatgcggcgcatgatgacttacttaatgtcttc

SEQ ID NO: 6766 - DNA, 637 bp, Zea Mays
ttgtcctatctgaagccatcttcaattgaactgagaaccagtaatatgacccatcagaagcaaatgttttgatatcaacatgctcctgaagatgaatggcatcttatatattttacaatgcttcaagaagattagcaatagatcaaatgcaagcacaacacattgcataccttgttctcaagctcaaaaagcgatactcctacgctgtactgtgtgcaaccaccaacagccatagatattgcaactcgagctggactgaaattgttatcccttgactcagagcgcataccagcagatcggttcaagtaatcttgtggtgatagcatcacatagtctgtgctacaatcttcaatatcttccagtacttgcatatttctgtgcgacattgttcctcttctgacaagagactttgaagaatatttaagggaaaattttgaagacttagacactctacttagcgagtctggtctgctaagtgagtctgcttctgtgctttctgtggattccccttctactatgcgataacataatggaattgacgagtggttttttatccagtaagggacaaacaatctcagtgtctttggtgcagcatcactagcacctaggtcatgctcaacactaactcgtagtctcc

SEQ ID NO: 6767 - DNA, 388 bp, Zea Mays
cagccatccaatcagattgaatgaaatggtggcgagatcagatcacagattggcagctgccacgttccgtgtcacattattatttactccctcatcagccgcacccatgccatgcatgcgctggaagtgactcagccgtgggcgcgcccgcgtagctgccgggaccggcggtgacaaacacggatctgcgttggtttcgggtgggttaattttgccgtcggatcaagctagctagctagctgagctactgcggaatcatcggcattactcctatctttttttttccacgtcaagtaacgctgaggtcgcccagcagaccaagcttcagacgcaggggccggcccacatcagtcattcacccaacccaggaagccaacacaaggcgccc

SEQ ID NO: 6768 - DNA, 555 bp, Zea Mays
atggcacattagtcaggccaaacggcatgactagaaattcaaagtgaccacaatgtgtacggaaggttgttttgtggatgtcatccgagtgcatcctgacttgatgataaccactccggagatccagctttgtgaacaaacttgcacctcggagttcatcaagtagctcgtccaccaccggaattggaaatttgtccttgattgtttttgcatttaattcatggtaatcaatgcaaaacctccatgttttatctgccttcttgaccaataatacaggtgacgagaatgctgatgtgcactctcgaatgatgccttgtgccaacatctgatcacactgacactcaatctcatctttaagcagttgagggtatcggtagggtcgtacaaccactggttctgtaccagccagcaaccgtatgtgatggtcttggcgacgtgatggtggcagaccctgagggtcctgaaacaaatcagagaaagaggacagcaattcttccatacaatccatgttcttgtccatggatgcaaatcccaacactaagtccccaacccctg

SEQ ID NO: 6769 - DNA, 853 bp, Zea Mays
ttcccacatccattgtccaacaacttgaaggtttgaatgaaaggaatcagaaagtgtttttaacaagtgctctgagttgtgccggtcttggatgcatcgtgattaacagttgtcaccaaataaaagttaggaataaagaagttacctgtagtatgtactcccctttttaaatttaacctgaggagaagaccaagccaatgcaaatacaactgcacatcttccatgtggttcaacccaggtggaagcagaaactgctgcacaaactgtatcgcccagcaaagaaggcatgctaggaccagtattgagattatcttgatcaaaggaaccatcctttaaacaattaaacaatcagatggtatgatatgcaccctcagtcatcaaaatggcaaacatttggttatttcaaaacagttccacagaagatttgccttctatgcatacaataatctcatctaaaacacggaattacatgcagggaaaaacaaagaaaggaaagaagtaaaatcacctgaaccattgtgccccacattcccctagcagtaacagaactttctccagaaagcccaaaaacaggcaatactgtgacatttacattttgattttcacatgccgcaattgcaaatgttacaggaggattattattggctgtcctgcaatgttattaatacagaatcaatgctaggctttaagttacaaaagaatcatgttggaaagtatatgcagaaaacgccatgtattgagccatagtttcttcctttttcaggcagagaatatggatgactttagatcggctataagtacttagtttcaagattggactaatctaaaatatccaaggaagttcgccaaaaga

SEQ ID NO: 6770 - DNA, 688 bp, Zea Mays
accgaccaagggtgacctaggaacattcatcaatttgacatgaacacactgagaatggtctgcccacgtgcacggcagaaaccgtgaccacgagctcatgttcctgcttaatcaggtccgaattgagtaaacgggcgccatagtgagcttcacaagcgtgcagagccacggaaacaacacttgaattggataggaacttaccagagcgggctggccacgggcgggctgttcttggtgactcgtctgaccgaattgggggaaattggtgattccccggctagggtggctaatcaagggtgggagcggatgctacggcttcgcaattcagagatgaaggacagagctcggttgatttgaacggagggggtgggggacacggtgaatttataggtgcaccgagccgctaccatggctatggtgataaccatcgccggtctttgctggcgatcaacgacggcgtcaagcgatatccattcttacgggcttgccacgtccccgtcgcgacagcaacgcagtcacattggtgcggcgtggatgaacggaagggagggcgtcgatgaccggatatggccggaacgaggagtggccgcgtggcagccgaaattattgctctccaccgcggcgatcttacccagatcaaaaagatcttcgcgcggagatgctcgccgatcgaccatcccgaccccgg

SEQ ID NO: 6771 - DNA, 938 bp, Zea Mays
caggcttcgtctcgatgggcactgaaggcccagcttcggcttcggcctaaactttggtatcttcggcaattttcttgggggcagggctcaaggccttcgtagtctctataacagcatctaatacactggccatgctcctcctcttgggagttgtggtaggaattttttgcatctttggcaaatctgcctctgtcggtgggcttagaatttctggcgtttttatcaccttttccacctgtggctcttcagtcttatcatctctagctttggctggcccgactttaggcaccttcagcactacaatcggctcttcagtactctacacaatcggagcagcttccttggcctcggcagctgaagaggtccccgcgccaaatttaggcaccactgtcggttcaatgtaacgcggccggtgggtcagaaccttcatctttttgcccttcaactcagctgctttagccgaagcagcagtctttctctttttctcttgccctcaaagcgggtaatggtgatcagggtatacaaagccaatagcatcaaataccctgttcaatctcttcttgccccgacccccgaaagctgcggacaaagcattatcttcggccttggagtatgccccaagtagctcatcactggtagcttcgatacatttcaactagtcatcgtctggctcatcaaacttctccctaaatatgaaggtatacttgaatcggaccagaccaccctcactagaatcggaggtggtctcctttggcatatcccagctttccacaagtggccataccctgaaggctatatgctcttgaatcaaatccctggtgccaatgaagacacacacagtgctaaaggccttctgacatgcttcaacattgccatcaatttccaacttcggccttcggaggctgaagcgagaccagatgggtcgctgaatgatttct

SEQ ID NO: 6772 - DNA, 332 bp, Zea Mays
ctgcatcgaacatcttgttgattggcaactggcaagtacaaaggcggatcgaaggctagtttcgtctttactccacagccgccaggctgccgatttcatccatgtcgcactgccctccatcattgttctgccatccatgctgtgctaccctccttcgccattgcctcgtcgtccccatatcctaacccaagctctgctttctccagcacatcgcacgcagcaggtatggtgccggtcattgcctggccctcccctctttcttacccttcaaggatgagattgtctaacttgcgtaactctagatattgatggcactgtttgatccatttctc

SEQ ID NO: 6773 - DNA, 556 bp, Zea Mays
aaaagttgttgctcggtgttgattttggggtctaaacggtcctgctagtcttcatcatcatctaggaggggcatccctagcggatgctgctggcgccttgctgctgcttggaagcctacggggacggatgacatgttcttggctaggtctggcaaattgtggcttggtagggataacattttggattgggtggggtcgtttgggtgtctaagctagaggtgtgtactttgtcctctcgctcagtggggtggctaattgcttgtattttgtggagttgcccttgctttgtggcttggtggtggcctttggatcgactggtgggatatcatcaacgaaggcagcattgcttttttagcggcgagggtctcccttgctacgtcatcgtcagttgctgagctggctcgagtggtctttttgggaggcatcgagggattagtcttcgttgcacgaatagtgcgtgccaaatgttgggttcagataagtagacccaagcactcggaggccaaagggaagacagtgcacaacaaaacgtttggtggagaactgtagcgtctcg

SEQ ID NO: 6774 - DNA, 359 bp, Zea Mays
ctcggatacggtgtcgaaaggtcactaacggacgtcagacgataactcgccacatactatcttaggcgaagggatctcagcatcagagtctctatagtgaccaaaatatctggaaagatgtaacagatacaccataccgggtgtatgcctacgcacgccagtaagtgacatgggcccatgacgataggcaaagctacgttgtgcgctaccatgtcgtgggactgacccacgggaaccaccgcgcactactacgaagaagtcaacagcgaaatcgctatagggacccatatgacgaatgagcgagacggtgcgccataccaggggtatggctatgcacggccctacagacaacacgacac

SEQ ID NO: 6775 - DNA, 525 bp, Zea Mays
ggcagctcaaggaccccctcttcttctgcggcgagcaccagctcgttctcggcaaggtcaactggctgctgctgtacagtgacctctacttctccccgtcgttgtacgcggtggccgagttccaggacgagctccggcggctgttcccggccaaggagagcgtgggccacctcctgtcccggtaccttttccacccgaccaaccccgtgtggagtctgaccaccaggtactaccgctcgtacctggctaccgcaaagcggaggatcggtgtgcaggtcaggatgttcagctatggctccatctccgccgacgacatgtacagccagatcctcgcgtgctcccagcaggagcacatactgccggagaccgaagacggtgatgaggacgaggtggtggccgcgacgaggaacggcgacaatgccgatggctccaactccacggccatcttggtggcgtctctgtacgcggactactacgagaggctgaggtcgaggtactacgaccacggggcgaagggcggcgaga

SEQ ID NO: 6776 - DNA, 465 bp, Zea Mays
gaggaaaccaaaggcattaaattcaagaaaactattgggcattcccttcttaggttagattgagaaagcaataatgtgattcttaaggagaggcaaagcagaatagaaacatcagcttgcatcaaccaaacaagggtatgttttatgatgaaaatatgaccataagagctacaagttggctgttaagatcagggactcgagatctttatttttaagtttgaatgcatcttaggtccaataaagagactatctaagcctttaaaggtatgagcttggtcatgtggtaataacggaagaattcaacttcatccatgcttggaaacttggaaggatttcgatggactgataacgatttgggttatggttcactaaatgaggacatggcctagctttgggtttatacaaacaaactacccacattataccagcacacaagcacaaaaacaaacacaagttgcacgagcg

SEQ ID NO: 6777 - DNA, 557 bp, Zea Mays
cttgtctgattagtccagttagttggatactagacagaagagtacatgactgtaatttgggtctcaccccttgcagctgaactatcttaccttgatattcaaactccatccacttctccatccagtgtatggacatggggttaaatttttccagccagtccattcctaacacaatgtcataaccggccagtggtaaaaatttaaaatcagcgcagaaattgatgccattacataaccagggacaatcaggtacccaatattcactccacaaggtattaccatcaaccaccttcacctgaagcggatgtggcagtttctgaaccccttttactacctcaataaagtggttactcatgaaacttcccgagcttccagaatcaaccaacaccaacatctggcatccctgaatataagcccacaatctgatggtcttgttgtgctcaccaccatgtactgctgcttcagaaacagctaacacctcctcctcaacaaccttttctggagaatcatctgtttcctcggacttctcatcttcttcaccatgagacacaacagcc

SEQ ID NO: 6778 - DNA, 1190 bp, Zea Mays
tcggcaagcaacacggacgcatgagaatgcttaaatgagagagcaggcagcatgaactaaccggaattgcgctggccgcggtgaggtcgttttcacggtgttcttgagcagatttaggggaagttcaaaattcgcgctcactggtgatcgactgagagcaatactgggtggtgtggtgcgtgatgatgttgcggagctaacagcgggctcaatttataggcctagtgagcggtggccggaaattcgagcgatgacgcgcggcggtcagaggaggggaagtttactggcgcgcgtgaattcgtgttctatgtcgtggcagtcactccggcgatcaacggggagctaaagcaagtgacggcgatgcggtggagatgcttagacacgcggcgcaaggccgaaaggcggcggtcaccgacgtgcatatcagaatccaccgcgacgagctgtacggtggccggaatattttactagccgtagcttatccacggcgacgtactccgagcgttaaccacttaaccagagcacgtatcgaaacggcggcgacacgaattgcggcggaggtcgtcggcggtgagatgcgcggttgatctgatcttgttcaggcactgtaccatgggattcctcattgagttggcgtgacagatcatctttgagctcaattttctcccaaattcatatggcaacataaccaatgccctgcagcaaagttgtagccctaccaaccatcttcatctttgttatagcctccctagatagattctcactggatcatggtcgaaatggctctcaaacatggttctaggccactgtcagtgtgaaattcagactttaacagcctgacaaccagacattagacctaattatctccaatttcttctcaataactatgcttacactcttaagcaaagttgttctccttttatagagctacaaaattgatgtggtgacttagggcaaaatcccttctgtttgaaagttacaaggtcacaaagatgagcacatcacactgaaattcagacttagtcaaaagagttcaaatgtggctcttttgcaattaagtccaaaactcagggttcaagttgcaaatcttcataattgtgaaccacataacttaaaacaccttactttactagtttttgcactttagtccaaaagtgcactaattttacacttagccccctagggtttag

SEQ ID NO: 6779 - DNA, 318 bp, Zea Mays
ggaactttggaattggcacgctctggtgggcaatcggaggcacgagttgctggattagatgcttgactacctaatggagccaagggtgtgctcaatttatagcatgcttgagcggtggctagtgaattggacggagacgcgcggcggccggagaggaggagggcactagcacacacgattggtggccataaccgtggcaacctcaccgacgatcactggataagttagtatgagtcacgacgatgtggttagagtgccgaggcatgtggcacaagtccgcgaggtgtctaactccaaagagggtagattcaaagcgac

SEQ ID NO: 6780 - DNA, 707 bp, Zea Mays
ctcggcccacctaaccacatctgtgccatccagacaagcgggccaacgctggcatgcgggcctggcttgtctgtccctctcatgagcgctctagctcttccctccgtcccctgcctactgggcccatgcgtcagtcgtcgtatctccaaccctcactgagtcatggaccccagtccactctgctacgttccgtagtgggcaatggccggtgtacccgcctttctacaaagcacacaagatccagctggccatgcaaccgcctcctcgcggctatttgtgtgtgatcgcctcggccacactcgcttcacccaaatttttccaccggtgagcattgtcgtacgaaaatccctaagtatcgtgaggagtgggagggagcctccatgccattcttcgattatgtgctagtttcgtgcctgggctggggttgagatccccatcgcgggtcacactttcggtggtagcagccaggaagaccgggggctgccgtggtgcccgtaatttctcatcgtcgctcggacttggccacatatccacgtggtgcgtgggcagctatcccccgttgcctaatctccggtgaggcatcccccacctgtttcgctttagtcttgtgatcatgtaggggcgctcagggtgagtatcggtgcggcgttgcgcctaggcaggtcaccggtgtgtgtccgccgctaaggctccatgcaccgccgtgg

SEQ ID NO: 6781 - DNA, 363 bp, Zea Mays
atgtcatttactgaaactaagaattctggctgaattacaaccgtcacatgttcatagccaacgttttcgagtagcgacaaagcccctcgtgcgcctacacaggcacaaaagtccccctaccagttagaactacgtccaatgcttcgatttcaccctcaatccattttatcacactcgggatctccactgataaaatttcgctcagccgagaatgcgccaacactagtaaaagcatttttagcttattagagcattgcatagcaatagtgtaacattcttccttctcttgacaaagctcttgaacattcttttgtaccctggaccgcccagtgtcggatatctcatgcttcgattgctcaacgt

SEQ ID NO: 6782 - DNA, 314 bp, Zea Mays
ggtttctgtttttccatcggcaccaagcctgtatttgcctcggtataccacccacagtccaacgacgtcgtcgagcgtgccaatggcaagatttttaccgctatcaagaaaagacttctcgacgataaaaagggcaaatgggccgaccaactacctgaagtggtatgggccctaaacactacagaatgccgggcaaccaggttcacacctttttgcctattgtatggattcgaagtcatgacaccgcaggagataaagcatggatcgcccaggacaaacacatcagcagtccttgatgtcgacgaaccaacttc

SEQ ID NO: 6783 - DNA, 912 bp, Zea Mays
tggaatacgaaatacgatggcaaaaaagaggaagttataatatgtgatatagtgtaaataatttgtgtgacctttaaattgccttgaggttctgattgtcactgcgtttatttaggaatatggagctcaagtcatatcgaccataccaaccgtaccttatatttttgaatacggtgatggaaggtctgcactcactattgtatttgctacctcggttttctggtaggatactaaaactttttaggttatttttatcagcaaggtgcaagttgagaaccctgctgctttggcttcgaatcctggaaagcgtgtagcagcctgttgggagcccacagttattgcaacaatcattattcctagtgagtaagaccctcttcctttctcacctgttctctacaattttttttcaatatttgagcattacaaatagaagtttgttatcatgctcaatcactttttcaggtatgttgggcctgtcattatgctttgttcagaaagaaggggcgaacagctagaatatacatttatcgatgcgtaaacctttcttgcttttaattctcagttttgttaagtgctcatctattctttgctttttattcatatggcttattttgatgcagccaaagggctctgttgaagtaccgattaccattgaaggagataattgtggacttctacaatgagttgaagggcattacgtctggctatgctacttttgactacgaagattcagagtaagccctgttgtgaatgcaataacaaggcatggtctggctaaactttttttttatttctggaatttacaaatgagaaaaatatcatgtttgttatttcacttcctcgtatgctttcgccattattgttattatttatttccaatcctttatattctgaaggtgttaaggctgtccg

SEQ ID NO: 6784 - DNA, 1892 bp, Zea Mays
catgcatgcagggatatttcattacaaaatatgcttatttttctacgtgtccgtgcgtgcatgttctggcaaaaataactaaagagagacggcttatgcgacgacgacgaggagaacgtggtgatcaacggggacgacggggcgatgaggtcgtcgatttccaccaagaggagccgggctgctgcgacccataacgaatctgagcgtgtaagctactagctagatccccattcctgcactcgtcatacgcgtacatgtagataggtgaaataaaacgcatgggctagcattatggtacgccatatatgtcaaacagtcatatattacccatcgcttttagtaatagtaggtggtgttgtattgtaaaccacttaaaattgggcgatatttatttgctccgacaacacacacacacacacacttgaggcttaccgtgtactgtgtgttcggttcacatatctaaactaaccaaataaaccagatatattttgggtaattttggtcatcgtttagtcggataccaacatctgttttggccacctctagtttatatattttaacaacacctattattgctcctcacttttttttagtttgtgaagtgaaatagtttgaaccaccaccgtcacctcttgttccctattagcatactgaaattcagtataataagcatgaggaatataatggatcattaattgcagcaaaattggtaagataactaaactcatgatgatagaccgcctcatcctatagaggggcaggggcacctcaattgagacatcagtttagatttcgaatcgacgattattgcccattttctacaaatttccggtgaaacaaaatgtggattcctcctctttatttggtcgttacaagtgcacatgcaaatgatttttttttttggggggggggggggtactgtagtaatagttagctgaaaacacagaaccacaaactgagttaataataagcttagacgtcatcaaaatggtctctagaactcttcaccctataatccctgttgttatcgtatgtttacgtactcaacaagaggaagcctaagactaagaagcaggtcttccaagagaaaatcttgaaacgtcatcattttcgtatagtacagcgctacatatatatagaatcagattccgatacagatgttttttcttttcttttctttttctttttgcgaaatgattcttataaaaaaagttgattgtacgttgccaatatcatctcttttttttcacagcaacatggagtgacgacgataactagtagctatacccaaacgtgatctagctagctaggaattcgtgttcctttacactgttaccatcatgtggcttttacgtacgataccgtgtgcctcaatcacgatttcgctatgtaggataagttccacgtagccatcacactgttgaaaatggccctcttttttttttgacctagtcatcagaaaggaatcgccaaaggtttcgaagcatcccagcgatcgagacgacaacggctatagctgttgttgactgcggactccaaataagatgcaatactacaccgtactctcttttctctctcttcagagccttttgtttttcctttaattaaattccttaagaactttgtgctgtcggccgagaatgaaaaggacgctccaactctcagcttggcatacggcttttatatgggccctatataggccggaaaccaatgcgccagtatgttttcagttgggccagctttggttcttatatattttcttctatctaattatacatccggttattattctgtgtttcgttgcagaaacgaagggacaggatcaaccagaagatgaaaacgctgcagaagctcgtcccgaactcgaacaaggtgagacgatcgaacgcgac

SEQ ID NO: 6785 - DNA, 651 bp, Zea Mays
ttttgattgaacccaatatcaactttcttgggaggtgtagaaacatgtactaacaaagggttgcacctagagtttgaaggatgagtgatcgattgcaaatcctagaatatcacctcaagcacaagtgagaccaacccaaggacaatacaagagataagacacgagagttaccttgtggctcagctcaccaccaaagcttacctatacccatgttgttaagaaaatcacaaaagctttgggtctcatcgaaccctattatcatctcaagtcaaacaccaaggttgagctaagggttccacagatgttccatgcaatacaaagttcccagagcactccacaaaacttggatgcgttatggatgacctctagccatttaggagcacttgctctaagagtaacaaacaccaaccttgtcaaggacggtgtacccttgactcgccgaaccgcggctacgcagttcgtagccgtcggtcatcttctccagtggggattatgcctcccaaccgcaggcttaacagaggtagaaaggtgagagacaactgattattgcttgccttcaaaggtccggttacaatcaatttataaggccagcggccagagcaaatggagaagctctccttgattataggacctgaccaaatcttagtttcc

SEQ ID NO: 6786 - DNA, 522 bp, Zea Mays
atgacatgggtaggtattggggtggaggtgaccatgctggtgtttgtagtgctaattggacaatgtctcgagccgatttattaggcattacttggtgaaaaggtccaattgcttttgcttgtctcttccgatcaggcgagcgagatcgctttcctggacgatcattgtgaccaaccttcttgttgacatatttggacaacaacttgtcaaaagttgggtcggctttaatcaaccgatcaggtgctttagctaaattttgtttcgatttacctattttgggtcattgaggtttgaaggtacgcagtcgatgttgcctctggtcactatcggaccatctgcccatggtggtcgaactgcccgccggagatccgggtcgtctgcgatacacagaacaggggccctagccttgctgtttgtctatgcatgcccccgatgctagaggacttgatggtgatcttcagtgtctctcccccatctggctttttcaacaatgacttccctaaagagaattttcctgttctc

SEQ ID NO: 6787 - DNA, 1081 bp, Zea Mays
tgtcaggctgagagaagatccatgtcaaggtcctgcaatgccagttgtcatcaaggttttttgttgtgtgatttgtaaaatggttcagttctgtttgtgtcctggaaaagctctgaaaaatagagctgagggaacaatgacgacactgccacttactttggcctatttccttttgttatcgagttacagactgattccaatatatccaacacaaacaataacgctcaaacaaaagcaaaggaggtgaagaaatcttcacacaggtcaacctatgacgacacatcagttaaattggtcatggctggaactggatgttctgacattgccatagctgagcatgtatgaactatatgattgatcacatttttttgcagttcagttgtgtgtttaatttagattcttgttattagccatttttcttctagtgtcaaatttgctattatcatacaggttctcggagaaatggatggtgatgttgatgctgctattgagtacctgatagcggagcgacttgcagtcagtactgatgatgcggaggtagacctttatataaaccatgcatttaacggtgagtgtgccaaactatcttgacttctgaggctctgtgaatgttgtttttctgagtatgatctttgttccagtagcgtttttgctaaaatatggatgttggagcaagaaaattccttggttgtacagagtatggtgagagctctctgtgtatgattcaagggcatttttgttatcactggcatacattcagctgttagttaccatatgaaattcagtgacatacatagtcatctcgaacaatgtactttgctttctgtcttgggtatgcctcactcaccgatgaatttgtggaaaagtataattggtaggtagttcagtttctatatacaagctgttctggtttcatgaatattaattaacagatttactatactttggtcatcatgatgtttatcatttcgaataagcttgagcagatatttgataagcttggttttgttgctgggctatttctgttgtgcccaatggacaatagatttctgattatatggaacttctgtcgatctcagag

SEQ ID NO: 6788 - DNA, 408 bp, Zea Mays
cgattttggtctctactttctcctgcagaggttaatgcaataaagtagaatttatttcaattgatttggacggcattggaaactggccaagacagtttgcatcgcttcttatggaagctaagttatttctcaaattaagatggttaaacaatcttgtttaattaatctcttgatcctacctgcccgctcattttctttatgtcattgtcgtgctaatgtgtgatggagtgctgatgggtgccttcgctctatatcacccctcttcctccccgccggcctctctctccaaaacgagctgaggctacaaagcaagcaacacatcgtgcatagtgcatcaacgacccgttccaatgggcaatggcgcccgccttcggccgctccatctccttcccactcagccaggcgcgc

SEQ ID NO: 6789 - DNA, 640 bp, Zea Mays
gtccgtcacaacttttgggtagagtttgccctttcatttgtaacgaagttatttgctgaatttgttcatttagaccataacgtgacattaagtattaataattcagaatacgatcttaatttaatagtttgggcatgcatgtattttgagctattgcatatatatgccgatcagaataatttaatttgggtgtatgtatgcatggtgccaagcaacattttttattttctcgcagggaaacaggcgacgatggcctgcttccgtatcaaatcagaggaacttgattttttttatttgacaccccatgacacagaatttcaacttccaccgtttaactcaccgttttatacatatgtgcggattacaattgtatttatcatgatgccgacttcaacagcatgaatggaagaacatagctcttccaatatacgaggtcgtgtatgcgcgtggaggttatcaaactcgacggtaaagaagacaaggaacagtgcagcgatataaggggcttttcttaccttgcagtagacctttccgttaggccacaacgacgtatatgtcattgcagtgtgatctctctcaagggtatgcccttgagattgtgtataatccggcgacgcgatcttcctcaagggtatgccct

SEQ ID NO: 6790 - DNA, 578 bp, Zea Mays
gtggcgcgctagagcggaagcgaaaaaaataacctaggctcgtgataccatgaaagtgtagaggaattggagaaatagtagtatatttatccaggggtgatacatgtacatatatatagaaaagggagatttagagacaaaaggaaacatcctatcactaaggaaactgcatgatcggtatgcaatgatcctgcaggatcacctccataccagcccccaatcaatcactaccaaaaccaatactaccatatgtagctggccgacatcacaggacaagcactagccatatatatgtctatacacggaatctgtctaacatatatgatggcgattagacctgctgtattgtatggtgcagaatgttaacctacataaaaagataaaatgttcaacagataactgtcgcggaaatgcatatgttacattggatttgtggtcatacaaaagtgatcgagtttagaatgatgatatacgtgaaaggttagaagtaacaccaattaaaaaaacttgtctaacatagattaagatggtttggatatgtccaacggaggcctccatagaaaattctaagtgtgatg

SEQ ID NO: 6791 - DNA, 426 bp, Zea Mays
attgtcgtggcttttctgtttggccttgctctcttttgctaagccgaggtacagtcaacaaggacttgggcttgaccgcttgactaatgagcaatgagtagtctccctcgctctacacgcatgcatgcaaaaggcagtagcgatcgtgctccttttcctcccaggctccctgcagcagctgcagctctgcagcccatggagaagaaaggtgtcgtcggcagtatttgtgattttactaggaggatctggtggtggtcccgccaggctagctcctgttatgctagctagcgatacaggttagctagctagtaggcaaagtatcgtgacatctgacatcctcagccacagcccacacacaagggggatgaacacaaatatatatataattgtttcaaattacagtaaacttttggttcaaagcgtaaa

SEQ ID NO: 6792 - DNA, 879 bp, Zea Mays
gcaaagtactatgaccaacatgtgagatctccatacctgagtcgttggctgcatgcacctgctcacctccgtgatacttatcatgaatggtcatcttgttcaactctccagtgatgtggtcggtggcacctgaatccatgtaccagttggtgtccaccccgtagttggttgatgcagcagatgcagatttttgtggacgattgtcgttgtagcgctcatcgaatcgattgtagcacttctaggcagggtgccccttgatgccacagatctggcacttgacaccatcctggtactcggggaaaggagttcgagtacctgtgcgaccgcccttggggccacggttgaagcctccacgaccaccattagggcggccaccacttccttgatttggcttgaagttgttgcgattccccttcgcagcaacgttggcggatgactggcttccaccgcttctcatctccaccctctgctcatgactcaccagttggctgtacatttccccaatagagattggctgagtcctattactcacgcccgtgacgatcgagtcatactcagggtcatttagcccggtgaggatgtaggctacaagttgatcgtcttcaattcttttgccgaccgatgccatgtcatcagccaagctcttcattttcatgaagtactcattcatggtggagctcaccttcgtcgtcgttgccagcgccatgcgtgtggagatcagacgcgcacggctttgagaggcgaacatctcttcgatgtgcgcccatgcagatgttgctgtcaccttcatggagacttgagcagcgaagtcccgtccaagattagacaggagataactcaggaccgtctggtcctttgctacccaggatgagtactcta

SEQ ID NO: 6793 - DNA, 362 bp, Zea Mays
ggcagccagatgtctgcacaccaacctagatagaatcttcgactccttcggagataacagaggctagggtactgcttgccaaggtctacttgctgaaggatagaggtatgactgctgaggctgtggttgctgatttcattttcaagaacattcaacccttcaaggatagggcgtaccctgcttatttgtatagtggtgtcaacgattctacccgggtcacgaacaggaaaattcccactgaagatctgatgagccgactggacatgatcctgaggggtagagtttcaaatgctagtgctcctgtggcctattctgcctggaacctgccaccacttaggccattttccgagtttgtgtccaac

SEQ ID NO: 6794 - DNA, 706 bp, Zea Mays
gcaacgtccaaaggtgtaccaactcctatgctgccaacagataagttatcacttgatggaggcgaccccttatttcctaaagatgcaacgagatataggagtgttgtgggctctctctagtatcttcttttgacatgactggatctctctttttctgttaaccgggtctaccaatatatggccgcaccaacctatgcattgggctgctgtgaagtgtattctacgatatttgcacgccacctatgatcttggtttatgcttcatgaagaccggttcttctcttctcagtgcctttttcggatgctgactgggctggtaatctggatgataggcgtagcaatggaggctatgttgtgtttttggtgggaatctagtgtcttggagctctcgaaaacaatctgcagtctactgttccagtactgaatctgaatacaaggcaatcgctgatgccacagctgaacttatatggatacaagttttattacgagaacttggtatacagcaggattgtccacctacactctggtgtgacaatcttggagccaccgacttatcagcgaatcctatttttcatcgccgttctaaacacgttgaggtcgattatcattttgttaggaacgggttgcgtctcatcaattggacattcgaccgatctcgacgaaagatcagcttgctgatgcatttaccaaaccattagctggaccag

SEQ ID NO: 6795 - DNA, 550 bp, Zea Mays
acggattgaatatattaaaagacatgggctatttgttaaaaagacactgccgaaagggtacgggtgcacgtgagccgatcgatcaacgatcgagggcccaaattagatatgaataggtattgcacttcgatcgtaggattcgagaacaacagtctagattgttattacggctagattccatctcacgtgtgcacccacgatccaacgaccatggtctaaataccagaagaggtatcacccttttctaatctccaccgtttgtcgctggatcgatggtaacacgctcttcccttccctctccgttcatcctccgcggcaaacaggactcccacggcagcgccctagccggccaacgtgatatcacaccacgatgaaccaaacctgaccgaaactatgcttcgtggagcgaagaacaatgcgaaactataggagggagtctcacctccctaccggttgaaaaatagccctggccacatgtcgcaatggcaccacggcggccttcaccgtcggtgtgcaattctgcccgccgcatccagtaagggcttgtttg

SEQ ID NO: 6796 - DNA, 756 bp, Zea Mays
cttgaggggaggtgaagaggtttcgtgcactggccaaggcaagagcagacctagacaagtgactacacacgctagaacaggggcagacgcaatgccaccacgtgttcgaccatggtcggcaggccagagctcgcccaacccgcgcgcacgtgcacggtcagtccacccacgcgccttccccgtgtcgatgcctagataagtcgttggtccctcagacatccttaccgtaaccccctcactcttgcctgcgctcggccaccggaaaaccgcttgaaaacagagagctccaccgcccgccaagagccacccgaacccgaccaccgcggaccagcccttctggtccatcctcgcccaaaccaactactcagccagcctccccagagtccatggaagcttcccaagccctcagaccaagtgctaccccaccaaagacgcctgattgccctcgccggatttccttcgcctgttggatacatggcccaggtaagccggtgcaccattattcgattccttgtgcacaccgcctctacatcacctagtgaagctccccgagccatccaatcgaactctaccatcgtgaacaggccaagcctctcaccgccgccgacctcgtccgcccccgctcgtggccagaatgactccgacctccactggccaccatctgactatcgacgtgttcgcctaaacctcctcaaccttaccaaccccctcgacagagctctactcccgccggtaagccccgccactcctttttct

SEQ ID NO: 6797 - DNA, 806 bp, Zea Mays
gtggtgctgggagtccaggcttgggcgccatcacattattgctttccacgatgattgctagacatcgttcgtacgcccgggcaagcgacatggtcgtctccatgtcctttgcatctagcatctcgacgtccattttagcggttgcagtagtccgttggtgtagatattgacttgttgtcactcgttgaggtagccgacgtgtgccacatgcgctagaagcgctctgtttagtcgttaatggtgctcgtcttccttagggaagccaattcttccaaggggttatgcctggttaggggtccaaagtgctcgttgacgcaccaagcaaagtacgccagtctgtcacctcgttgtcctacgagagtctcatgtaccactgttgtgcagtacccgttagatggtaagtgtgtagcatgtttttttggtcgtctggagttcgttggaccttgaagaactgctcacaatggttaagccatggtagtggatctttcttgtcatcgtaggtcgagaaagagagcttgtggggtcatatgttgagggcgttgaaggcgcccggtgttgcccctcccggtgatatttctgattttggctccactatcttagtggcaatctctgctattgtttgtgttccagagccgctgacttgcgatatgaggaatttgcggctagctttctccatcttgtacctagtgcgcatctcgagcttggtggtgaggatctccttgtcatgctctagctctttggcaatgtccctttgcaaatgccccttcttgatggttgagaggttgtttttgacatcaacgatctgc

SEQ ID NO: 6798 - DNA, 537 bp, Zea Mays
cttttctgctctccgctcctgctctctggcgaccctttccacctctgctcaccaccggcaacgtctgcagcgctctggtgatctcctccatgtccaagtgtttctccctctcaattctcctgtaagcctcctcgctgctcctttcctcctctccctctctactctctggtcagtgtggtggcatttcaccctctcttgcaacatttctcaaattcctgtgaaattctatgaagtttgtgcatgattgtgtgccatagtgcctctttgaaccatactgcagttatccctctcctatttggaggtttcaaaccttaaaataaccatttcacctaaaccctaaaaccccgcatgccatgtgctcggtgaaatgcccaaaccagccaaatttgctccaatcgatcccaaatttttcaggcaccttcatgatacctccagtaacatattcgccaattttcacgccgatatgatatcccaggcactagtttctcacaaattcccatttatagtcattgatttctagtcgagtgccacaattcc

SEQ ID NO: 6799 - DNA, 660 bp, Zea Mays
cttccaatctcatccggtaggcaggcctgagcgctacttggctactctctccatcctgtaatatagcatattctagcattcaaattccatcatcaaagtcaaacataagagattctaggagaacaaaataatttcacattaaatagtcaaataaatttggtaggcattatattatctcttgctatttatgaatcaatcaccattaattacatttatgataacgtttagttagaaaataaagtgaagacatatacgttgttcatgctctcttaaataatgcaacatgcagcttacttttcagtacaacagccaatgaggcaactctcgtgctagtccttcaaaatatgggtcattttggcactcatgtataggagaatatagtctgacttgaaacaaatcatagtttgttatagtagcatttataatctgctatatgaagctagttgttaccagcggcaaagcgtactatcaggaagtgaagaaaggccaacatttgaaatgtgaactcgtaattaggctgcagggccaagttatgaataatcgcgagctaccaaagatcaagcaaacagcacacatgtaatattcgcatgcatcaggaccaacacatccttcatcatcattaatatgctgtaattatgaagctaaaaataaacaaggtca

SEQ ID NO: 6800 - DNA, 713 bp, Zea Mays
ggcgggtttatatcctaaaactacaggggcccttatgcgaattagcctggccgaaggggtatcggcaggccagagccgtccgatcacacccgatcggacgagattagaacacggcgcagtaatatgttgcaacccgccctgaccatcagatccaatatcaacggttaagggacggccacgccctggctcgatcaaaaccccacacctgcgatccaacggctaagcttcaattgggcgaaggggtgtctatcttctaatcctggccgcctatacagggatcaacggtgggcatcggatctagtcaagcaatcacctcgacctaaactgagcccttcccagaagatcggacggcaccaggcctatcccctacctcccaactaaccgagtacgccgccgcgcgtcaacgacggcgaattccatcgccggtgaagcaattccccaacgccagtgcattaaacttcaattagaaaggttctactcgttgcggcactgcacgcgaacacgggaaagggactcataccagcaacggcgcatgtgagcgtgtcgtccacggtgcggagcggtcccgcggcggatgaagaactccggcgagcaattcatacgcagtcgatgccctgcagtggaagctggtgcccttcccacactcagacggtcaagacggtcccccctggcaacactccgagctcgatcgacggcgtggccactcaacacac

SEQ ID NO: 6801 - DNA, 544 bp, Zea Mays
gttttttcaggcagaatttgctttatagcctcttttttcgtttcccctccggtttccaaggatttctccttggcgggctctgaaggcccagcttcggcctcggtctggctctttgcagcttcctcttcggatgattttgcctcaatttgcgttttcggagcttcagcaggtttcttcggagtggtacttgaagactttatcgtctctagcacatctaatacattgaccatcttttttatcttcggagtcgccgtgaggtctttttgtgccttcggcactatcattcctgcccaagggcttgtaacttctactatctttgttttcgcggcctctatttctttaatattaccagcctttggtatcatagccggctcttcattcttctgtgtaagagcaggtcctttggcttcagtagtcgtagacgtttcaccaccaaattcgggcactgaggccggtttgatgaagcgtggtcggtgagtaaggaccttcacctttttcctctttggtgcggcctcacttagagcagctaaagcatcaccttttc

SEQ ID NO: 6802 - DNA, 647 bp, Zea Mays
attaatcaccgattaattgataattcttttgttatctaaaatattccacacaagtagttacgtcaactaaattgaacttagaaatataattgtcgcgtttaaacgtaatataggttgttcgtcgtcacatcattatttagccgcggtttgctaattatttaatgtgtcgtgcgtcgtgcagctagtgcgcgcgctcgcgtttgcttgcgcgcagtgcgtcgatgggactccgtctacgttcgcctacccttcgtctacccctagacgactctcgtctacccccgtctaccccccgtctaaccccgtgcgtgtccgtgtcgttcgccatcgctcgcgcgtcgcgtaataaatcgtcgtgtgctgtccgcgcgcgttgtgcgtgctgttcacacgtgtcgtcgtgcgttttacgcacgctaatgattcatctcacctagaatagctcacgctaattaaatgtatatttaagcaacggttattcgaacaacacgctaatcgagactaagtagtaattttactcggcatgtgattattttctattaatatgattaagctgaattaaatattgtaattcatattcgcttagtatacctgtgatatccctcgaccgtagtatcagtcgtctcggttccgttctcgcgtagtcg

SEQ ID NO: 6803 - DNA, 930 bp, Zea Mays
gaaacatgaaggccttggttcagaggcaacagatgtttcagaagaccgtgggtcaaatttgcgtcgctggtttcggagccaactgaagggcaaggatgaaagtagtgaaaatcaaacagattgtctgataaagataaagctatatgcttgtagatatatggatgagatttttgttgcagtttctggatccagagatgtcgcggaagatatgaaatctgaaatggttgcttacttaaacaaatcactttacttggaagttgatgataaaattcatcttgtgccgatcagaaggaacccacgaggcttacagtttgctggttttgtggtcagagtagaaacgaaggaaaatgctaaactgaaagctgtgcataagctgaagcagaagattggtttgtttgcttctcagaagcaagagatttgggacgctatgaatcttagagtaggaaagaagtggttggcatatggattgagaagaataaaagagagtgagatcaagtcgcttggccttagcacccctttgttggatcacattgcacaatttaggaaagagggaatgaagacagatcactggttcaaaacattgctaaaggtatggatgcaggatgtcaatgccaaaaatgagctaaatgaggatgttctcttatcaaaatacattgctgagccagcacttgcacaagaccttagggatgcattctacaactttcagaagcaagctaaggattacatttcatcagagactgctgcaacggaagcattgttgtccgatttgaagagtacctgcactgatggcagtgtcataaaaattcatgcacctcttaactatattcagaagtgccttcatcgctatggtataattaatctagaaggtttccctaggcatgtatcggcccttgtcttgcaagatgatgagttaatagtaagttggtttgc

SEQ ID NO: 6804 - DNA, 1050 bp, Zea Mays
ccatttcgcgatgcacacatatgcgtcgcgattccaaacggtctccccaaggggagctatagacacaaccaacacgggtgccaatcgaagtagtgaattatcttccgcttggcgatgaggaatgtgtagatcatattctggatttgagggtaccgagccttagactcgatcagcatctcgctgacgaagtaaaccaatctctatatcttgagcatgtggacctcgttttccctttctaccatttgtgcagtgctaaccacctaggtggtgctgcaacgtaaaggaggagggtttcgcatgggttaggcgtggccaggatcggtggcgaggttaggaacacctttatctagtcaaggacctcctcggcttctatggtccaagaaaaatgtttgctcttcctaaagagtttgtaaaggggcatgcccttctcttcgagcctcgactaagcgcggtgatgcaccagaccagtcgctacactcctttgaggttctagatggggcccatgcgtcggatggcttcgattatttctttgttagctttgatcccgcgatcgaagaccatgatgcatagaagcttacccttagggagcccaaacgcatttctcggggttgagcttgatccggaaccttcggtggttggcgaatgtctcctctaggttgacgatgaggtcgtcggacttcctggttttcatgacgatgttgtgacgtagacttcaatgtttcatcagacttggtaggtaaagcacttgagcatgcaacactcgtacgttgccctgacgtttatcaaaccaaagggcatggagatatagtagaacgttcttgaaggggtgatgaacatggtggcgtgttggtttctttctttcatggtgatttgatgatagcctgagtaggcctctagaaaagaaaggagctcgcaccctatgttggagtctacgacttgatcgatgtgggggggaggaaggggtcttttggacatgccttattaaggcccatgtagtcaacacacatcctctagttctcgtttttcttcttaattagtacagaattcgca

SEQ ID NO: 6805 - DNA, 436 bp, Zea Mays
ctccgctgccgcctcacctccgggctctagcctccggtagggtcctccaccgctccacctcacgtctccctggtttcccctcacctggtggctgcctggctggtggttcggtcatggatttggttacggtaagcttttggtgttcatcatgttttttctctagtcgacgactccgatgaggttgagacttcttaatcctgtgcttgttcttgtgatctgtgctcgaaccccgaaccctaatctactgtgttgccttcttgctctgtgattgtacctgtgaggagccgatctggtgttccggctttagtaagtgcttaatctggtgcttgttcttgtgatctatgcttgtgatctgtgttcgaaccctaaaccctaatctactctactaccttcttgttctctgattgtagctacccgtgaggggccgatctagtgc

SEQ ID NO: 6806 - DNA, 348 bp, Zea Mays
gggtccgggcacacaacttggcttcccagactaaaacctgcaagtctcgtgcgtgtatcaaaggatggctaatgtcagacgatggtcctatgggtgtactactaacgctccctagccgaagctgtgttcaggtccaggtcccagtcgaggctgtctcttgggggccgctgccaactctgtcaggcatactggtatccagcctcgacacatcgatcctacatcccacgggggctaggtaccaaggaagagtcggtaacaccacacacacaacaggggcgaatagtatacatataagtgctaatactgcttgataaacagtactcaaaagtaccttacaaaaagcaaaag

SEQ ID NO: 6807 - DNA, 288 bp, Zea Mays
ggctggttggccgtctataccaccactgccagggccgctggggcaactgaatatgtgatgactgcatacttgcccatcgtcctcgggcaagatgcactgcaatggttacgacacctaccccgacactgcatcgacgattggagtgacttcagtcggcgttttatcgccaacttccaatccctctccgacaagccggcgcagccatgggacctcaaatccatcaggcgtcgaggggatgagactcttcgatcgtacctcaagaggtttcagaccatgagaaatcgcatt

SEQ ID NO: 6808 - DNA, 2093 bp, Zea Mays
atgaggagcggtggtggagatgttgggatagtaggcacacccgaaaacgcaaaggtgcgagtaggagggggttgtgcttgtgccgaaaaaggcggagggtgtggggtggtgaactgccatggatggaagacaattgaggaggtaggcgatagtgtgtaggacctcaacccagtagcaggcggggaaggaagcttggaataggaacataacatgttggtggtggtacaaatcatgtgctcagcccgaccgttctgtggggaggtgtagggacaggatagtcgcagttgaactttgtgagagaggaggaaggaacgagaggagtggccgaactcatgattgttgtcgccctagacagcatggacaatgtgaccgaattgggtggagacccaagcaaagaagtgcgagagcatggtgaaggtatcgaacttgaaatgcaaagggaaagtccaaagaaaatgagaaaaatcatccagaatcagcaagtaataaaaaatgggtgatgtccacagatcacagtatacaagaccaaaagcctgagaagccctagagtaggagctatggaagggaaggcgaacatcccgacctaaccgacaagcatgacacagactatcaaaattgccccttctgctggagatgacagagctactagagtactagacaacttagacatgatatcagaccttggacgaccgcgacaatgatgccaggtgatggacaaagcagtagtagtcaacgcatgtggggtggacatggcgatggaggaagctggcagccaaagagtgtacattgggccctgagctaacatatcgggtgagaagggtcctagttgccagatccttcacatataaaccaaaggggttaaattccatagaataagagttgtcggtggtgaaccggcaaataaaaagaagattttgatgttaggagcaacaagaatattcttgaggtggaacgatcctggaagaattgagttacctactgaggtaaccggtagggtggaaccattccccacaacgatggaggaagggaaagacaggtgagggggatgggagtgagattacatgacagcgttagaagtggtatggtaagacgccccagagtctgccacccaatccagagcggtgggtggagttagcggcattgtgctgaacgagccgacgagggactactgatcgcagctgccaccctatggggactaagtgggcgaggtgtccctgtgagcggaaggaggggcgagagcgagcctgatgctgagtagggggcgcctgaggtgggggcacgtcatcgtgaggtgtgtttagcagagcctgctgcgaagaacaagtcgaggaggcacccgcaacttggtctggccacatagagatggtgccagtccaagggttgtagatggacagccacatgggacccccactcccaagaggggcactgctgtgagggccaccacccccacagccgcccttgcagtggcggcgaccgccctcagagctggcagcctgatgaggcccccctagagtaggagcgaaggcaggaggccgcggaggaagtcccctagtgagtatgcgccatagagggttggggcaaactcggtgcactcgacgctttaggtgagttccttgagaagtagttcgttgcggacgtcgaggaaggacaggaatggtgtggagcgcttgatgagggccttcaggtattatagtgatggagaggccaccctgggagaagatttggaaggagacattgagatggagggcgtgggcctctcggttattgaggatttgggcctcgagggcaacccaggcctggcgtgcggtccccctgctcgcggacaacgtcctggagcttgacgttgagggtaccaaggagccacgagagaccacgatgtccattcgatgctaggacgagagcggggggaagcggtgttgccgaggacatggtcgtcgagggcgtagtgctgaagagtgagggtgggaaaccaagagtccatggattgggggagcatcgtcccagccggctggtggggcgtcagccgccggagcaaggagggcggcgtcccgtgggtggaggcgtttcgaggggttggcagaacgacatctggc

SEQ ID NO: 6809 - DNA, 716 bp, Zea Mays
aaacgttgaggtggcgctgcgcggttagttggcggccaccggaccatcgcggtggcgatgccgcgcgggtgagctcgccagtgctgttacaccgccataaacctcatccaactccggccatcggcctataaattgagcccgaatcctgcttcttcaccacatcacgcacacaagcacttgagcaatcgactcaatttcaccaaaagaactcacacagcccacaaatccattccaccctgttcttcacgctgtcgtgaaggactcctccgtggccagcactcaccaggttagtacctaccaaattgcttcctgttctagcttgtcttcaaccttctattgctctcggagccggccaattaaactttaacgaagcgtgtactccagaacaccaaatcgtcccatagaacatagctgcgacgccctctccgtcgacccgcttttctactcttgcctagtccaaattcaagtgtgtacaaaacctctggtaaacccgtgaagcttccccaagcttcaattttgtcatccatgtcgtcggttgttcggaacgcgtttacccatccaatcatccgcactgtctccgtggaccggttgattcaaagccccgctggtgaaattgattgacgggaaatgggcaggaggggtccaatctggtgtctgccacacaggagccccagccgttgcgatatccggccgacgtaggctcatgtgagttcggc

SEQ ID NO: 6810 - DNA, 723 bp, Zea Mays
ctagggttacaggtatcaaacaactttattcccacattttttttgttcctatgtttcaccaatcctgcatttcaaaggaagcctaaggttcatttactgttaagtatagggaaaaatgaaattttgagtgggctaaaatagtcatgttctaggcttcctcgtcggatcggtcaagtcctcatcgttccgactttcatctttctcagcctagttttcacatctatctattcgatcccattcattctgaagcagctcgaaccagtatgtcatccttctcctcagcctagttttcacatctatctatttgatcacattcattctgacgcagctcaaaccaatatgccctgatgtctcattctcgacgtcgtccgacaatcgatgccgcccgaccacactccactctcagtgcccccatcttgctcatcatcacgacgtcggtccacccaacaggtctgatctcgcttgtcatgacaatttgactgtctccggcgaatgacgagcttggtaaacccacgagtcatatctctcaaccgaagatgtcacttggccctgcccctttaccagtgccctcacgcttagaggagatccgtattcaacaagatagatctgacttcaattaagtcagcaaaaatttagcgatatatttatttcttttgtttatattgttttctttttgaatctgatcatatattgatgtaaaacttaaattatattcaacactac

SEQ ID NO: 6811 - DNA, 470 bp, Zea Mays
aacttggggatacttctttttagagggtctcagaacttcactgatgaaatagatgggatgctgtactggatatgtgtgtccttcctctgtccgctcgactactaacgcggtgctcaccacatgagtcgtgcaggagatgtacaacaacatatcttctgctggctagtttagcatggcttggcgtggcggctttagcactggcggtgtgatcaagaacttcttcagtgcatcaagggcttcctgagcttctgaggtccactggaacttgtccaccttcttgagcaatttgtagaatggtaggcctttttctcctaaccttgatatgaacctgcttaaagctgccatgcacccagtaagcctttgcactttcttttgtgatcgtggtgcttccatcctcatgatagcctcgattttttccgggttaacttcaattccttggtggctgacaatgaatccgagcaacttcccag

SEQ ID NO: 6812 - DNA, 391 bp, Zea Mays
gcggtagttagggcatggtggagggcgatcgtgacggaggcggtgtggggagggaggtgcggagagctccgcaggagcaggcgatagttgggggaagggtagtgctccgcgtgaaggcgtcaaatagagaaacttcaggtttatttcgtagaactttagggggtatttgtaaatttttaacgagggacgaccgttgaaacggtgctttaagtatagtagagatattttacaaataaaagccgatggaaggagttcgtgtctggctaccgatgggtaatttaagttgtgaccaccaaaatcactttgcaatttagacaatgggttttttcaacaattgttgcatcaattatgattatatggcccaagaactagaaacacaaatatgtatcag

SEQ ID NO: 6813 - DNA, 767 bp, Zea Mays
cacgagaaccagcgtcggaccaacagaattctggttggtcgacacaggcgccgtttatgggttagcacgcggcgtcgagctcgcgttccaaccaagctatccaagtaatgacaaaacgaccacttcaatgagcttcaccaactcccagggacactcaaacactaaatcaaaggtgcagaaccatatcgggttcgccaggccacggggacgcggaggtgagcatgcactacggggtccgacgggagcgatggacgtcgcggtgaactccgatgtaaataggcagtcatgctggagctatacggccgtaagggacaacaagttcaccgtgcactaccaatttggggcgaggaagtgaggacaccgcaaattttggcttctactgaccacaccgaaagacagtgaatatctcacgatggttcacggctcaatttaaagggatggcgacatggctggctacccgcgttcaataaggtacgacgctagtgcatggagaccacgtaacaaggaagcacagtgcggtagaatttgggcgcgggcgacaccgcgacaggagcacacacgccacggtgcacgccggtgagatattctcgccccttccccggcctaatccgcaagatgatgaatcagctcaaagttatcccgccctggccatctctatctccacttcgtttggacgcatccggattccacagcgacgcggatcttttcttcagatatttcccaacgcctctaatctttttcatttaactgaaccgactctatttagc

SEQ ID NO: 6814 - DNA, 724 bp, Zea Mays
aaaccgatgaggcggagtgaccaaccatgtccccgccgagcaaagcttgcgaggcggagctaccaaccaagtatttgtgcccatgaggtggagacctaaacccgtccatcacgacaagacatgtcatcaccatgccacactcgaacgtgcgcacactgcacaagacgagtcccgggggagacatcaacataggagtctcaacagtagttcgcatatcagaaaagataggacaatacaccataccaatcgtatgtatcaggtgcgatgggaggagacgcaaggcgtgcagcgggcgaagccatgccgcgtacaatcgtatcccgagacaggctagcggaacccgccacatactgccactagggctagcaacaggctcgctatagtaaccgacatgagggacattgccatatcagggtatgaccacgcacaagaaagatgacccagttcgttgacccaggcatatagggctctctctctccctatctctcctcagcgaggaaggggtcccattataaggcttctctcttgacatataaaagggagatgtcctttcttcgaacgacatacgagcacaccaattgtatcacactctcaacaatattacgatcagcactacactagactaggacgcaagcctgaactagtataacctaccgtctcagatccaccacttgagtcttggcgacttaccattcgaagtgtgtctatgctagcttcctctccg

SEQ ID NO: 6815 - DNA, 591 bp, Zea Mays
ctatgcatcatatgagaacttatgctcaaaataattaattctactttaatctagatcataacttgttttagaaatcatattagaaatatagacatgttgacttgactagattgattaagcaacaaacacaagttaaataatattcaataaaggtatgtgattggacaaaataatgtttgtcgctgtgtagcatattttattacaaatctaacgcaatttgaatgagttaaatcggagtttaaacgtaggtgatatgtctaaaacaagtttatgggtttacttttatatctaaaaaacattatatacattaattttattgaatttcttgaccaggtggactgcggacaccaatcttcaaaagctcagggaccaactcgtgaaaaataggactggattgcaaggttctttgcactcgcgtggaccgtgggttagtttcaaaggaactgagggtctcttttgtataatacgctagccgaaggggtatccagggttcctggtcgtcggatcacgcgcggacggcacatattagattatgctcacggcgaaccggtatgtaaccaagaccgccggatccaggatcaatggctcggg

SEQ ID NO: 6816 - DNA, 409 bp, Zea Mays
ccccgcaaggtcatcgcccacccagccaccgagaatcgctagcaatcgtgcgtcagtgagctcgaatttcggtttcccccaattcgggtgtccgccaccgtgaaaccaacctcaccgcggccagccccgttccggtcagttcatcctcccctctccctcgtttgagccttctcataactctgtgatgcttgccgaaccaccaatttgcactgattagccttagatcaccgggaacgcacccatctgtctgcaacaccctcggtcgccgtggccagagcaaagtagggtaccattcttcgaattaacttaggggaaacattctctaggtcatgaatttggtttaggccgaagctgagcaccggtcttggcctcctccggccggtctacgtgctcgctggagctcggctgc

SEQ ID NO: 6817 - DNA, 874 bp, Zea Mays
cagggacagctcacgtcgcggctctgttccgcccgcctttcacagatgggtcgcgacgttcaccagcagactttactacagcagcgaagtacttatatgagctcgtcagacggacactcctgccgaggatgggatacagggaggctaccactcatattcagctttggctccttggtgccctggtctcccactcacagtttgacgttgtggacttcctgatctgtgagatcgaggacactgttctggatgggattcgtgctcatcggcagttaccttatgctcactacttatgccacatctttgcgcagctgattcagccacctcgatttcagagcacccttgaggcctcacgccttgtgtttggatcttaccgccctgctcctgagattccagtgccagcttctgcttctgtgactctcaggccgaggatgcagctctacgacagtttgacactcagggtacagcagctgatgatgatgatgatgatgatgattttggggttcctccttcgcctccgcctcctatgcctccccgctcccatgatcatgaggctgggagttctcgtgctgcccctgctcctcctccggctatggaccctgctcttgcggcgattctggccaacctggcagccgagcaggcccggttatctgagacgatgctctcgatgtttcagagcatgcaggacaggcaggatgcacttcagcagcagcttattcaggatagggcagagaatagggcattcatggctctcatgcttcagcattctggtatctcagcacctccggttcagtctgctccgcctcctccgcttcacgctccagtggtgccttcgatcttgtctggaccccctgttggtacctctccgctccggccg

SEQ ID NO: 6818 - DNA, 501 bp, Zea Mays
agtagcacgtgaataacttcgtggggtaaaaagatctcgccgtggatgaacttgggggcactgttgcgctctgtcgcctcgtccacttgccggcgacgtggccaagcggccgtcaccgggatgtacaccattcaccgcgattgcaccacgccttaggacatcttaccacgtcgtcgcgattcgtagtgactgcccagtgaccgccgtagctcattacccagtgaccgccatgacagatcgccacgatgactcacccctctctcggccgccaccgcgatttcttcaaattgggcaccaccgctgatggacattataaatcaacaccccagggagttccactaggtattttcgcatccaacgcaccaacccttgcctcggatcatccaccagagcccctcaatttctcatttcccccaaattggttagaacaccgccgtgagagagctcgtcgtggccagacgtctacgggttagttcgtacccttctgtgtgatgttctagc

SEQ ID NO: 6819 - DNA, 455 bp, Zea Mays
tattagatctgatctcactcttgtgcttgcgacatctttgtagatgccccctgaccataaccttcttgtctttttgggattctttcctcttttgtcattaaattgctaccatctggcgaactctagtcctttggcattgacattcttgtacccctttaatactcttgttttgaatacttgcctctaaatttctactgcctacttagacattttagtttatatgtccatgatcttcctgtcttttgagaccctttcctcttctgttgttaagtcactgtctttcaacaatttcttggctcttggtatttgtatgctcatcttcttgaaatcttgcatactctcatcttttttatgcttatcttcatacccccaatgtctgtttaagacatttcagtttacatgcccttggccacccttgtttctcgacgatccataagtaatcattctattttaca

SEQ ID NO: 6820 - DNA, 574 bp, Zea Mays
tctcaggcgcgtaattgattttttagctcagtgtggtgttctttgtggacctgtcgggaaatgttctatccacctgttgacctgtatgcggtaaatggtcggtctttgttaatgctaagaccggggctcggacctagaactccaaaaaaaatgcaaagtaaacattaaactcatcaaaataatggttgatcacttcaataccttccggaatgatgccgatgcatgaccaatttctttcttgttcctcggatccgcctcaacgatattcagttttaacgaattctcctgcagcttatgatcctacacagttttcacaccatccctgcgagtgagcacctgcaccaggaattatcaagccaccatgagttagcctgcaagaggccttcctgaagtagaaaaatgacgacacctgctaattgctgccccctcgatgagctggcagacgaagtgctatgtgtttaacttcccaccatcagatctatatgcgtggtggttctcgctgcacttccacccctcctgaactcatgtcacagcaggctctggcttccactcctcactgccatgcttctttatt

SEQ ID NO: 6821 - DNA, 1416 bp, Zea Mays
caaaattctgtgaaaaccgaggaaggaagcccttggtgaagatgttagcgtactgagatgtagttggcatgtgaaggacacagatattcccaattgcaactcgttcacaaacaaagtgaagatcgatctccacattttttcgctgatgttggattggattagctaacatgtagacgacgttgttgttgttgttgcaatataccaaggggtgtggagctcagacaggagttggcggagccatgtggctttagcgactgcattggcgacagctcgttacttggcttcgacactagatccagagacagtgtcttgacgcttggacgaccaggacaccaaactatcgcctaggaatatcacataaccgtaagtggacttgcgtgtatcaggacgtcctgtgcagtcagcatcagaacaaagcaccaagtcagactgtgtagaggggtgaatgaacaaaccaaagtgcaatgtgccactgacatagcataggatgcacttgagggcgagaaggtgaggtttctgtgggtcatgcatatgaaggcaaacctgctgaatgacgtaggcaatgtcagaccatgtaaaactgagccactgaagagcaccagccaaattgcgaaaatccgtagaagagactagaggatcatcatcagacaactttgagttgagatcaacatgtgttgagcaagacttgcagtttgtcatgccagtgcactcaagaatctcaatcatatactatcgtggagagagaaaaagactagagcctaagcgttgaaccttcttgccaagaaaatgatgaagaggaccgaggtctttcatgaagaatttccactggagagctgtgatgatgcacctcaataaattaggagaggcggctgtgagaacaatgtcatcaacatagaggagatacaccatatccgtaccatgataatagacaaatagaggagtatctgtctaagcttcagtgaaacccaactgcataaggtgagaagcgaatttgctgaagcagacacgtgtggcctgcattaagtcgtacaatgacaggttgagtcgataaacataatccagatgcgaagaaccctcgaagcctgagggttgggctgcctctacctccacttggcaccgacgtcttgcccaccccgcctccaacgtcctttctagactctcatagtctcgttcaccttgtccattcgttgcccaacttgggcacaataaaaagactctgataggtccccttgtaagaaagcattgttgacgtcgagctgatgtattgatcaggagcacgagagagcaagggatatgactgtccgaactgtagtaggcttaaccaaacttgctgcgtgtacgcatgtcatactgattttccaccagagtaacaacaacaccaggtgggagtgtgctgggaggactaggctcatccac

SEQ ID NO: 6822 - DNA, 408 bp, Zea Mays
ctgcgatggattctcgtccgggtcctgcgcgagcgacatccacggaggccgttggggaagacgacccgagtgccgactggatgggaccacccagcagatacccacccgaggatgtgcgcgagggaggtgggctgccaccggcgaagatctcagccggatcacaacaacccaacgatttctccatcagccggtacacacgcgaggaagacacattctgttgaagggagaactgacgaggcggttccacatgacagagactgcgaggcacgagacgacagtgaaacacagaggctggcattgcgggcccgaccgacagtgacgcacaaggcgactgacatcgcgaccccaggtgtcggcgcagtgggggtttagttgggctggcgcgaggtggcgtgagatgggccagaa

SEQ ID NO: 6823 - DNA, 466 bp, Zea Mays
cccccccccttatgaaaagcaatttccgtctcatctgagctcgtctcggacgaaggacagcctcaagcccggtctcggccaaagttatcgggaaccatgacttatgaaggcgtgcacattaaatgcaacgatatgaatatctactccatgtgacaccacagtcaacaaaggacgatgggaccgcagtctcatctagtttcaccgactacaatgacgcacgtccgcgaataccggacagttctcccccacttcggtcattgttctcgaacaaactttggatgggacatgcaacgtctaggcatagcctcacgctcgagagagagctctgcctcgctcgaagttggcttcggcctcgggaggaactccgcctcacccaagctcaatctcgaccaactgtcttagcaatagcacattgttgccgactccccgcgaatcccgctagggaccactccggctactgttctga

SEQ ID NO: 6824 - DNA, 536 bp, Zea Mays
gagttgcgctctcgtagttaggatgcatgactaatccttctgatttgtcgcgttcatcgtcgttattgtattgtcaagcttcaacaaatcagaggctcgctggtttctctacatgtcatggtggttgttgggctctcctaccggttggatcatgcctttgtcctttgtgcatgcaatcatggtgatggttgtggggcagacgacatccacgtgttgtcgtggtgacgattctggagaggccgtgtgagcccatgggctttgtcacccttgacccctagggtgctaagagacgaattcaagagcatattgcctaccatgtatttcctatgaaagttggctaggagatacctaagccaaaagatgaggacaacacgaaggagattgaagctcgagagatgattcagttaccttataaattcaatcccttcagcatcttcataaagccgagcaatgagtggctcattatggtggagacagttgctaacaaagttttatgcaactatattgtgaaagagatcatctacttagtgcgatag

SEQ ID NO: 6825 - DNA, 527 bp, Zea Mays
gaaaaatcaaggcgatatttttgtttgggtggtggtggtggtgagtggaagcacaggcagatcgacaggatcctgtgtttgggtctctgctacagtactgggtggagaagatatgataaacaagcacaggcagcggtctgctccatcccctagctagctcgcgattgacggaggggaagcgattagtaattagcgagggcgaaggtggtggtggtggtggtggtggactgccgcccctggttttctcccgtgacaacaccaccatgcatggctcacatagtccaagcagctagccaccttttttcagaattcctcagactgcatgcatgcatgcatggcaatggcatgctcgcgactccggctctctactaccggctgcgctactccagccgtcggccactgtgcctgagaatctactgtgccccccgagctgatccgctcgatcggacacgcactgttgccgtcactaactaactagcaggcaacaacatgctctctggtttacaccctgcgtgcgtggatttgta

SEQ ID NO: 6826 - DNA, 376 bp, Zea Mays
gccttctctgtctaactgcattggaaagtgcacttctatctgctccgtgcttcccggtccgatcctgctccggaatttcgtccttcgtaggcagtaaagactctgggacctcacagttactagacattctgccttcctgtttggggaggaaaggagggacacggaggcgggtttgggctcgatttcttttgaatcaccttttctccaagtttccttattgatggaaccagtatattagactaacagtatatcctcggtcgacccccttattgatggaaccagctgtgcactaggtacctactaggatggatgtggtctgcaccggtgcgtctaatagagttgatgaagacgcgaccaaacttgaatggcagacaac

SEQ ID NO: 6827 - DNA, 527 bp, Zea Mays
gagtgcccttgagaatgaaatcttttattgatgaggtattttccaattatagaatacaatgctccccgatagcttttgaaatcttgctaagggtaaaacttcctgagatgctctatattccatgaattccctatttccgtgccatccatttgagtaagcctatatgatcctggccgagtgacctctgctactacaaatggcccttcccatagtggtgacaatttgtgccatccttccctcgttagaattcggcgaaggaccaagtctcccactacaaaggatcgatgtcgtatggccttataatgtagcgcctcagggtttcctggtatcttgctgactgaattactatattcaatggctattcctccaatacgtcaatgtcctctaatctggtagcctctgcctcagctatgttttcgaagaccagcctaggtgccccaaacctgaggttggcaggtagcactgcctccgaaccatagaccatgaagaaaggagtatttccatgcagagctcgactaggttgagtt

SEQ ID NO: 6828 - DNA, 1261 bp, Zea Mays
ccgcttgcaagtgttgaagatgatatgtccagttgacgttatagatcaatatatataaacaccactaccaccgtaggagtagctcaaggatatttcgaaaacgaagtaaaagctcacgtgtacagttcatgtataaatctcacgtgcatcgaatggatttacacgcatgtttatgctaagatgtacacgaagaattttccctatcaatcttcttcctcactctgctgatcttctcccagttcccagatcaaaaacccagaaacatgactgcgagtgacctagcagagatgggaagaaacccaagcagcatgtcagcgagtgacagggaggctgttcaactcaacctttccccacacccaagttgaatggcacatgcgaccagccaacatgaagaaacggggaaaggaacagggattcattttcattcatcattattagtttcggtttagttacaacttctatgtcaaaaaaaatattacactcgtcatgtatcaaattccctaaagcagtcagatgccgcaggggacatccatcaaacaatcccagctctgaaaagaaaagaaaagaaaaaactacgactacccactgccaccactaaaataaaatgaagcagggtagaaatggggtaaatcctaccgacctagcattcctcctctaatcccctagaacagatcaacacatcgggcaacagattaaacaccagcacttgcccggtgccatccctcgagtagaatttacagagattgagccttagcaacagcagatatcgcgcaatggcaggccagtaagtaggacaagactgaaacgggcaaatcatggctgcacccttgctgtgacactggaatgtacagtaagaaagaggtcacacataggttgcgacctgtatcactaccatctatatctccaatctacctgaccactaccatctatatctccaatctacctgaccgcgttgttatgctgccagagaactgagaagcctctaaatgcagatagatagaatctacaggggaagccaggagcattgtggttacgatgctcatgaatctatgtctttcttcctcttccccttgtttccagaccttgcattgtcagctggctgcaggtttggagctggatcctttgtgtacatgatgcagtcgtcgagggtgtaaatcctgagcgcaagcgatgatacagttgttgtcttgatagctgcagtgaaggaggaccagtaccaccaatctttcttcagaaactcggcttttatcatgctctgcaa

SEQ ID NO: 6829 - DNA, 495 bp, Zea Mays
ctcaaaaacatgggttggagccgattaatcagtgtttcttaaccattgctcaacttgaattagttaacacacaagtcacctaattagcacatttttggggggtctatcatggaggcatttacacatggcgtaaaaactccataagactacatttgctactaacaccaaacaatacctactgacctattattcgccatacgaacacagttacacgccgcctactagtttctaacataatccttacataactcgtaatcccactactcactaacaatacatcacgcacgacaactaccacatcaaccggttaatttatttggacaccgcctgcctagcgtaccactagtaccccacatttgactcatgctcaacaatacatcctttattcgattatacaacagcgacctaagcgtcatgttacccaatgcgtacatcttttctcgttgcgagtataaccatatcacgacatatacccgcacacctcaatcaaatatc

SEQ ID NO: 6830 - DNA, 658 bp, Zea Mays
ccgagacagatctcggacccttccaaatgtggtccggatggttcaccaccgggtcccagatcctaggggcaggaaatacccggaccctgccctagaaggggtccggggcagacacgtttccggggcttgcaccacgccccccgccaaggcagaaacccgctactaccacatggcttgtggcccatgacgtgagccaatggaaggagtctgacgtcgggtcactggagtcgcgcagccactgcatttattgcagtagggacgcgacgcctgtgccaagccaacgaaagatgtgcccccttggcatttaatgcatccagtcctctccgctggcagacggtgtcaaacgtcgcgcctgtccaatctatcatcaaacagcacgcctgtgccatgcgatggactatgctcattgtcccttctgcaagaaagcttccccagcacgccatggacgtgcatatctctagcgttagggcatgggaagattgcaccagcagcgaacattagaagcttcaagtattatatatacattttgtccctgggcccacatgtcggggcctagtccctttgtgcatgccccccttcagctataaaaggggaggcacgcgatgctacgggggtcactcagatctaactttaggcagacactcacaagttcatacag

SEQ ID NO: 6831 - DNA, 348 bp, Zea Mays
caagaacaaaagctcccaaattagtcaactactccttcggggcctcgggggctacacccaacgggtgcgctcgtgcgcacccatcgaaaatcaagcgtcctactcctcaaaaagatgcggcacgcccacgggcaaacaacatagcctccaaagcaagtaccaaaagtacctccttggaagactcgggggctactatcgggggtgataattagggatacccgaattaccccctgaagaacgcactctgaggagtaacaacaaaactcctgaggggaaacaaccgaggcttctccccaagagtctatcacctcgagcagaactccgccttgcccaaggtcactatcgctc

SEQ ID NO: 6832 - DNA, 351 bp, Zea Mays
acatcctggaaattgctgaggtggctatgattgatgacttctatcgaggatccaacgactcagccttcgaccgagccatacttcaaaaggcgtcagccacctccgaacaattgttcagggaagcggacatttacatcaccgcggatgagcgggcccaaaacctcatcagaggcacaaaatccgcaccgcccgcatcgcggcgtgatatgaactagcaaccagacaaacgctgggaaaagaggccccgcgaggaggtgcacaccaccgggacacctgtcgctcgagcccgcggaggagtacgaacactggatgagatccttgactcccagtgttcatatcacaaggacatgc

SEQ ID NO: 6833 - DNA, 849 bp, Zea Mays
gtgtaaaagcgcaagatggagcataagtataacttttgttgaagaaacgacatctaagaccaaagggaaaactgaccataaacccacacacatctagatgtcactcttctaaaggatgcaaacccaccgtaactgctctatacacacgtggcacccaagtatcgaaacaaagtaacaaactgtgtcaaccaaagatgcagtatgcatagcccgtccctcacaaatctaggtatctggaacccatcccaacacaaacacacgcaccaaagagtaagaatccaccaaccacacacggattgtgcaccggatgaccgacggtaacacagttcttgcaaagagcaaacaccctaatgcagcaagcaccaacggagccgaccctaatgcagatgcagacgatatgagggggtctagcagagcaaacgtggacttacggagtcacagacaatgtctacggggcggcgggcggcaggagcagaccacacgctcccatgacgacggtgggtgcccaaaccaaagtggcgaacaacgacaaagacaggctggagaagctatcggttccaggacctaataaggcgaacatgaattgaggagagagggaagaaaatattaaaagggaggaaagtactcaccatcgtgcattacagagcgcagtgttgtttcagccatgcctgtcactggtgaggcatgggagcgagagagatgactactggtatggcgacgacggctacgtggccacccactcttcccttacaggctgcacatggacccgcacggcgtcacggaccacataagcagtgtcatccgacgccgaggcgatgacgatcgcacatgggagctaggccattgccc

SEQ ID NO: 6834 - DNA, 484 bp, Zea Mays
tttacacagcgatctgttcagtacacacagaaacatatttgttgttgtcacacagtataaacggtacacatagttctcaaacacaccaaggttcacagaatattcgaacaaacatgttcacagacagccatttgcattaagcaaaccagaatgtatgggcaagggttgacaacagggatatcatcacaagggaggagatcaaggaaaagctcgtgcaagcatcagaggaggatcctcttaggcgaacttgatcaaacttttgaatatggtagacgaagaagtgaagaacagtgttccagtatttagactcaggtgaggcgtaaagttttggtgtgatattgtagggtttggttatgtgactaatcatttgcattgtcagtatctaaatatgtgtaacccataaagcccttctttcataatttggaggtgatcatgcctgtccaataaaatgcattaattttgttcatgttattcttcaggaatt

SEQ ID NO: 6835 - DNA, 530 bp, Zea Mays
aaaacacaacagaggctgggcgtcgtggcttcggtcgcggggaagcaggggtctcgaagggagaggttcaaccgtggtagaaggagagggtgacgattgattggctgcgatcaccagatcgttgattggctgcttttcttttttggcggcacaggactgtccggtgggggtatgatactgtccgatgacccagttgaccgttggcgcctgccgatgtggccaaagtagccgttggacacctgtcaccggtctgtccggcggtgatgcctggactgtccaatgatttttagccgaagaggccgatgctaaggaggttgggcaatacagccacctagctgtcaggtgcacaccggatagtccgattggtggcaccatacagtccggtgctgcccatactagcccattttcttctcttttgtgccaaacttctttagctccttttgacttgacttgagaggttccctagcatttagacaaacataattagcacataaaataattgactaagtacgtgttagaaccataccttt

SEQ ID NO: 6836 - DNA, 411 bp, Zea Mays
aggtcatcaaggctagctagggacatatccttgacgtcggacaaattctctctcctggcgggaggtggtgctggaggggctttcttcttccgctcagtctggcatccttggctcttggtcttcttttggattttcttcgtgggggcgagcttctttagcttcttatcataatccatcttcagggttcggtaggcttcacgagtgttggcctcctcgccttctgctatatcgagacactcttggagggatgccttctcctttttaagttccttgacctgctgctctatgctttccactcgggagtttaggtgggtgcagtgggaggaaaggttgtcgtagtggttatcgaaagtgtgtaggtatccgaccatgtagacgatggtgggtcatcctcggtaggatctctccctg

SEQ ID NO: 6837 - DNA, 393 bp, Zea Mays
gatgaacgccctagatcactactctgaagcggtatccgcaaatctaatctccaccgtccataaccggatggacggcccacgacacaacttgcctattccctcacctccccaactcaggccgacaggtgcggcggcgccgatagctccccacgacggggccatggccggcgatggccatcccacgcaatagtgcttagaacttttgaacgacaggtgctaaccaacgcttggatcctagcgggtacgttggtatgaatcttaccggggttggaagcgcagagggcattgcccatgacgacgagcggctccacggacccgaagggttccagtgagcaattccaggttcatcggtcgacgatcatccccgccgtgacgaagaccacctccccggac

SEQ ID NO: 6838 - DNA, 730 bp, Zea Mays
agactacaacactctaatcccatcaaaacctagccatttggactttgaaaaatctactgtgtcagaggctgatgtacccatgatgatgaagctgggttactttagagaggctgagaagaaaattattcgttttgccggagaagaaaccactccagagcccagaaatgacgaagtagtagtttacaaaagctttttcagagcaggattgcggtttttgcttcacgagatgattggagaagttctggataactatgagatctaccttcattagctgacccctaacactatcgttaggctgagcatcttcatctgggctcttcgaagccaaggaatggacccgaatgctgaagtctgccgagtgcatgagctacattatcagacgaaggccagagaagacagactacatgaaaattttagctgttataacttcgcgtatcgcaaggatacaaaggcccagtgctcagctatcgcaccaagtggccaatcggctaaaaaagtgaatggttctatattaaggccgatgagaagaagagggagaagttgaagacgataatcctgagcccactgagtttaagcttcggactgactaggcccctgtgccgcatgacatcggggtcaccatgccaacaagctgtagcagaattcagggtggtggctgaacaaatcagcactagagatttagtgcaagaatacctagccaacaaggtatttccaacattgagtgaatgga

SEQ ID NO: 6839 - DNA, 459 bp, Zea Mays
gtcctaaaaggggaacaatgtgagtgcaatgcccctcttctccctctacccctctgcgcttttcttcctcctcaatttccttggttgacagtgtggcatggatttgtgcctcattgatgtcgcaactcaaactaaactagcactaggtcggctcatgtcgtagctagatgttgggattgccttgttgagcttctcaattttgtttggtcattgttgtctccaaaaaatagttgatgatttggttttctcccatttgttatatgattttttactgagattctgggaatgtatgctctagaacggctggtcaggttaagtgcctcctatccaattgaccttgctcagagttaaggccaagactcttaagttttatgactatactggtgcattattatacttcgattgagtgtcattacattacatctcagaaaagtttcatcctcagttttattcagtgag

SEQ ID NO: 6840 - DNA, 606 bp, Zea Mays
gcccattttcccttattgcgtcatgtgtttgtccaatttcgccttcgccggtgatcggccgcggcggtccgccgtgctcgcccggtggctggccgatttagcccggtatagttcaccggagtagttccctgtgtcacccctgtctttgctgaagccagccaaggccttagcgcaccttaagtcccctccccgtgtccggaatcgatcaccggagtttctccggcccgcccgagactctctcaccgccgttctcccctctctgcccgtggattcatgatcctttccctgccatagagttcgccgtggtgccctcttcccctctacccaactccggcgaccccgaagccaccgtagcccgtgcctgcctcaactctggcgacctcaccgccgcgaagaggagcggcgccgcccgcaaccatctgtttccccggtctgatcccctccgtccgattcagatcgaacgacccagaccgcgagataccgcttcgtgcatgcacgcctgtcgccctggctcgcttgtcagcgccacccgcagccattcaacccctcggtctgattgcccccatccgatcttgatcgaacggctcggaccccctcggaccaacc

SEQ ID NO: 6841 - DNA, 777 bp, Zea Mays
cgcccgcgagctctctgtctcacggcgcccccctctgctcctggcgatattccggcgaactcccgccaccagcggccaccaacctccgacgacctcatccccctcctcggtgcgcagatcttccctctgttctcctctccctctcttcctgtgagcagaagtccctctcttctcccttttgtgcatctcttcaaatttcttgaaatcaggtgaattcctgtgaatgcaattggtggtttgagttctaatatctctattgtgtatccctgcaagtttttagctccttcgggagggcattcccacctcaaatggccgtttcaccaaaaccctagctccccgcacgccacatgctcgatgaaatgcccaaaccagccaaacttgctccaattgaacccagatttttcaggcaccttcacaacacttccagtaacctacttgccaaatttcacgccaatccgagatcccaggcttaaatttcaccaaaatttccgttttgagcgatcgtttctgagccgagtgccctaattcctttttcttcgcctaaattcaaaccaagcacacacttcactcatattcacctatataaacctattcgtgaagtatcggctcaattccatatcatttcgtgcctcatttcgaattccaaacctcctatgtcactatttgtctgtcaaacgtcgttttcacgtcgtttgacttcttgatcgtcccgtctcgtgccatatctctctgtgtatgtatttattcacatttcatatgcttatgactatgtgacta

SEQ ID NO: 6842 - DNA, 599 bp, Zea Mays
aaacaacctagaatgcaccaagacatcatgtgtacaccaaacatgaggcatccagatatggtgtgcagaaaaggctgaaaatcgacactcagagctaaagggcaccagacgtatctagtggcgcatcgcacccctcatcggatatgacatgcaaagaggctagaatagatcaagtcagatacaatgcacctgacgtatctgatgtttcaccaaatggcacaccggatacgacactcggacacgatgtaaaatgccagctaggaataaggcacctaaagtgtccggtggaacaccggacggagctctagataccagtgaacttaacggtcggcaacaggaaactccaatgactagctaacatggcacatctagtgcaccacctgacatgtccaatgtagcctaacatactagcaaatgtggcaactttttcaaagataacttttgaaatggtatcagacatgtccggtgagtaggcagaaactacaatcagctttcaacgactactttggagtgggaaggctataaataccccaccaactgggcataactcgatccatgagttgagaaacattgcgaataagttagaggatgttctcttt

SEQ ID NO: 6843 - DNA, 474 bp, Zea Mays
actgcggagcggcaaacaatgttttgccagaagaatttttgagcggtcttcaatgttattgtggatactaccatggcctcaatctactttgtgaaatactcgacggcgacgaaggtgaacttgaggttcccttgagctgtaggcagtggtccaacgatgtccagcccctagcgttgaagtggccatgtatgggcgatgagcttggtgaattgcgaagggctgcctgagcgaggggagaacttttggcatgctttgcatgaccttgtgactcgattggtagtacaaattattgcgggccagtaaaatccctaatgaatcaccatggcagcgagggccctaggtcctgagtgggagccgcaagttccgctgtggacttcacggaggatttgtatgccttcggtttcagttatgcacttcagcatgggctggctaatccctgtcttgtacagctgcccctcgactaatgtgaagtcc

SEQ ID NO: 6844 - DNA, 336 bp, Zea Mays
cagaaaatgggcgggtaggattgacggagcgatgagagaagttgttcgccgtaggattttcatttgacgatcaggatcggatctaggcagtcttgggtcagatgggatctaaaccatagaacttggatcctggggtcgacatcgaataccgattcaaggtgatactagatctaatgctgaccgtacgatatggatctagcggttcacattccataccgattctcttacaacgcaacttaatctggactgtagatcagatccaatggcccaagattcgcagtaccccttcggtgtacacatttacataagaaaccccctgttttcgtagaataaacc

SEQ ID NO: 6845 - DNA, 348 bp, Zea Mays
ggtacttggcccccctgggatgtaggctcgatgtgtcgaggctggataccagtatacctaagaaagagttggtgacccggcccccaggaggtagtctcgactgggacctggacctgtacacagcttcggctaggaagtgttagtagcacacccataggactcatcgtctggtatctgccatcctttgatttatgcaacaggacctgcatgatttagcctgggaaaccaagccttatgcccagacctacaggatcacagctccaaatactagggcacccgttgcagagtggtggaggtgcaggcttagggtacgggaccaggctaagcggctacccagctccgaaccac

SEQ ID NO: 6846 - DNA, 655 bp, Zea Mays
aaaatatgaagcgtggagcatcggatagagatggtggaccaaagtcttcttcctacgatgggcatgtatcttctcttggtcaccgtgcgggccctctatctagactcgcctttgtcctgtcttgtcagcatgtgtgtgaaggctatggttaggctgcgacgtagattggcttgtcgacttgtgtaggtgagtaggtggtcggtgttgtcctgacccatgcgcctgtctctttgcctgcctctaaagcgggaatagtagaaatcgtgatgagagttgcccacatgtggcgtagtcggtcaatggtctttacctaagagtaacgcgtaggttactagcgcgacccaggcattatggactgcacacaccacctgcattttatatgggacacatgacgcctgccactgttgtggacaggcgcgcatcttgcctacaattaatgtgggtggccctccatgtgagaggcccacttagacaatgcctggtaacttccttaacgtgccttaggccacgtggcaacactgtatctctgcttgagtgaaaaataggggatgggagcatacatagacgtggcacccctagacctcccctggttggggatccagatggcacttgtggaggtctgagactcacccatgatggctcggacacgtggcag

SEQ ID NO: 6847 - DNA, 378 bp, Zea Mays
ttgtgagctcagacgggactccgaattggcaaacaatgttttgccagaagaacttttgggcggtcttcgacgttattgtggatactgccctagtctcgatccacttggtgaagtactcgacggcgatgaaggtgaatttgaggttcccttgagccgtaggtagtggtccgacaatatccagcccctagtgttgaagtggccatgtgtgggcgatcagcttggtgaactgcgaagggttgctcgagcggggagaaaacttctggcatgcttcgcaggacctcgtgttttgattcgcggtacagattatcacgagccagtaaaatccttgaaggattaccttggcaacgagggccctgggccctgagtgggacccgcaag

SEQ ID NO: 6848 - DNA, 294 bp, Zea Mays
gcaggcacacccaaaaatgcggagggccgagtaatcaggtgtggagccaagaagtttatgaaggggtgtatcaaaatttagaagtttggtgggtgttctgttgatgaggtagacggcagtgagaaaagcctgatcccagtatttcaatggcatagatgcagtggctaagagagctaatcctacctcaacaatatgtcggtgttttcgttcggccacgccattctgttgatgagcgtgagggcaggagactaaatgagtgatgccaattttccggaaaagagagttgagccgaac

SEQ ID NO: 6849 - DNA, 349 bp, Zea Mays
ctgaaatttgcacggtacttgttgcccttaacaaaccaccaagccaagtggggttgcattacctggcacctgggacatgattttccaagattggtggagcaatgccgaaggccaggtttctaaagagaagagaaaaggttttaacacgttggtaatccttgtggcttggtggctgtggaaacatcgaaacacctgtgtcttcgagggagcttccccgagcactagagatatcctgcagcacatccaggaggatgctacgctgtggggtatggccggggctagagggcttaggggcttatggccttaagactaggagggcctgctgttgtgtcatagataagggatgagt

SEQ ID NO: 6850 - DNA, 511 bp, Zea Mays
cggtcgtgggctgttggccgacgggatatgagcggggaactccttcttgtcgtcgactggcagggatatcatcccaatccccgatgcgacggctcgaagtgactcactagggtatccgttaggggtagaacgtttttccttgaagtttagtaggccggatcaatgggaaggtttacacctgcaatggcgcgccgtcgtgtactccctgtgcgacgccgctcggcctggcttagggaaggaggaaaggcggggaccgtcgagctgggatgcggatgagatgaagcaccacataacgattcagccgggtatatcagaaccgtagatcgtagatcgtggggttgtgagagagtcgcttttcattaaatctggtccatcggatctaatccaacggttaagaattagggataccccttcggccgggtctttttgctaaagagtcctcggaaaatcttgaaactaacccgccatccccagcctgtgctaaataatttaatctgtgccctcgtcattt

SEQ ID NO: 6851 - DNA, 809 bp, Zea Mays
gtgaccgtatggacaacggccaactaaacacgttcccggcgatctagggtgacttagctcaattgagttggtcgaggagcatcaggggaacacaagaatgttgaaacaagatagcagggagcatgaacagacctagaagtcgctgaccacggtgagggctcaaggcacgatgttcttggttgatttgggggaaatcccaaattagggaaatctagtggacgattcgagtcacgggttgctgcactggttgcacaattacctagcggagcagacgggggcggcaatttatagcctccaacggtggtggcgtccaatttcacgaggatgtgctggtggccggaggggaaaagggatactggcgctcaggatgagtggctttcatcgtggcagtcctccggcgatcaccggatatgcataccatgattcaccgtgacgtgggctagcgcttaagcatgtggcgcacaacggtgagcgatcaacggcggcgaagtctatcccggccgcacgacgagcaagtgggtacggtgaatctcattcgcgcccgagctcaagctgatccggtgccaagagttttactccgtcgtggttatcccctcaccagcgagcacatgtcgcggcgatggtgtaaatcacggcgtaaaaatcaccggtggcgaggggaatgcatctgcaatctatttcagtcactgtaccatcgcaatcttcttcagtcagcctgacagtcgatgtttagggcagattttctcccaattttccatggcaacacaaccaatgctctgcagcaaagtcgtagccctacaaaccatttt

SEQ ID NO: 6852 - DNA, 640 bp, Zea Mays
gctaccctgaccgaagtcgtcgctgcctcaagggggcgaccttcaaaggagactccgctacagctaaatctagcgccacaaaataatctaaatcatcttccgaagattcgtcatctatccaagcaaacaagctccctagttcttcaccttccgaagaccacgacccaacatcagattcctcagatgcgtcactactaagaatcacaacatttccacacaccaacatatcatcattcgtgttatcatcaaggtttgcttgcacaggcctagtcgccggaacctgcgcagcaaccgaccttcagtatcatgcacaaaacgaacactaacaaactattcctattacattttttcaacctgcgtagaagcacccgccgctgcaggaccctcagcgccaccttcttgaagcaaggatagctcctccgctcccgcctccaccgcagcatcctttcgagccaccgagctctcgaggccggcgaggtcctccacctcttcatccctcatcgcctgcgaagataacacaataacgttttagacaacgaacacacacaccaccctcaccaaaacccaaaacatacttgtgcccgcgctcggtcgaccctctctcggatgacaccgcgtccatgagggccccacatcctat

SEQ ID NO: 6853 - DNA, 624 bp, Zea Mays
actggcccctcgccggctcctattccgagtccggcgaccacccctctcccctcgccggcgtcgcaggacccttcccctggtgtccagcgcggcggacgtccggaggtgctgcgctacgcgccgtgtcctccttcctctggcctctcgccggctcttactccaagaccggcgaccactcaacttccctccccggcgtcggaggattatccccttggtgttgtgcgcggcggaagatcgaaggaacagcgttggctggaagacggtggagcttgtgcctcctctgctgcgtcactagttcggggtgacgtggggaagaaatcctatagggaggctctgttttctcccaggcctgctgcgtccagggacgttgatggttgggtgacggtggttcgtcggcgtccgaacaccttgaagtcgctccccagacctgtcccggtggatttgcgcggaagatgcttcaattgtttctcgtctgagcaccgtgcggctgtgtgccgtaatcgcgtgcggtgttttttctgccggttgccggggcaccgtgtgggcgtgtgcccgcgccggcggacggaccctcccatccctggacgcactttggtgtggcgacctgtggctatgagaccttcg

SEQ ID NO: 6854 - DNA, 410 bp, Zea Mays
cgcagccctaggtccacaacatagccaaccaacaacaacagggcgatgtcccccctcgacgttaccccaacaacaaggtcgtggatgtggcgtgccaagaggcagaggtcgaggtagaggttccagcaacctaggaagttttattgtgtcttccacgaggaagactcggaacaaccaaccaaggattgctcggagaccaaagaaaccaaagagtgcatggctagggctgcccccacaaacaatcaacaagacatcgctcatacataccacccccaccagtatcaacaccttcactatgaaaatgaacaccagtaccacccccaacatcaaaattacaatcagagagccccataacacccacaactgcaatactaagaaagattacccacctcatccagcaaataaacaag

SEQ ID NO: 6855 - DNA, 394 bp, Zea Mays
ttccctggccccacgatcctgatcgcgcgacattccccaaacgtaagtcgtctgggacccgagatccaatcttacccctaggtttaagatcccacggttgagattcaccccctacctcgacgacgcaagacggcggcaccgctggtcaaccacggcggcaaatccgtcggcgcgcgacgaccacgtgtaatagtgctctatctgaccccctgaacggcgctacgcgtggagaagaagataacagaggtgatgggatactactcaccagcggtcaagaggcgaagaagtccgtccacgaggaagtgtggctcagtggtgaagtaattgcttcgacgagcaattcaatggtggggaggcctctgccgcgtgcacaatccacccgaaacgattcccg

SEQ ID NO: 6856 - DNA, 309 bp, Zea Mays
gggatgtcggtcgtcctcctcccagcgacgtggtggggatgatgcagctggggatctcggagttctgttgcaatagactccaagtccacctccctctcctcggctggtgcgttactcccatcggtataagtccccaggctctcctcctctcgcccgggtgcgcaggccgaaccagcacatgccaccatgatccatgttcgccatggtggagagagaaatgatgtcgctgttatgccgttgtgctggcagaacagattgagagggagagggaaaaccacatgtcgcgccgtcgctcgggttaacttagta

SEQ ID NO: 6857 - DNA, 478 bp, Zea Mays
cgacgacgtcacaaggcaacgtgagtctcgagcacgacgagtgtgatgcacggtatggtgagcacaagacatggcgtggcaaggagaggtgacattggggttgcaggggcacatgttatagcggtcacagagaatggcatggcacgacaagcatgaggcagggcagtgcaatcgtaagcacgccacaaaggggaaagcctcagcgcgcacaacactgggataaggagcgacagtgcacatgcgcaagggcaaggtcattgacaatagacggaagtagcggagcgtagatggcacgcaacagcaaaaggaggatctgtgtggatgtcaacagcattgtttgcaatatggtgcttcacataggcattttgtcgaacaaccaatgggcatcgacgagaacagcaagaaggggctcgcggctactcgtagaggagctcagagggggcactggtggaggaacggcaagactagcaaggtggca

SEQ ID NO: 6858 - DNA, 350 bp, Zea Mays
cgcttttgtaacagtggatgggctttactgctatgtcgtaatgccttacggtctgaagaacgccttgccaacatttgtgcgggcgatgagtaagactttcggggacctgatcagggaaagagtagaggcatacgtcgatgacatcatagtcaagactaagagaaggtcgacccaagtggaatacttaaccctagtcttcgacaagctgcgggcaacccgcacgaagctgaacccggacaagtgcatctttggtgtctccgcaggaaagttgctgggattcctgttttcacaccggggcattgaagcaaactcagagaagatcaaggcgatcgaggcgatgaggcctccgg

SEQ ID NO: 6859 - DNA, 561 bp, Zea Mays
ctctggattaccgttcatcagaatacttgcaggcggctattggctcttttggcagattgatcttgtgggaagaggacagacgcaatgtttacaggactctgcttagggttcgggtcacgtctctggaggaggtcccatagttcattgttttttcagaagctgatggctttattggtgactcgtggacggtgcagtgtgagatcatccaacaaactttgctggggtcagcctcaagatgaggacccggtgccagtggtcccggaggatggtcagcagctccctcttgagttttttggtttgggccaacctgtgccggctgtgggctgggatcttaatttcccgccagaagacaatgtccaagctcagccagcagacaacattcaaggagattgggaccaatggattgttaatgatccacctgtacagcagcctcagcagcctcatctggacctgccacctgacgagcaacaggtcagcaacccgcattcggacctatcctcagatagttcttctggtcacattcatggtgccctgctgcagaatgggcagattcagaatggg

SEQ ID NO: 6860 - DNA, 313 bp, Zea Mays
atatgatcccggccgagtgacctctgctactatgaatggtccttcccatagaggtgacaacttgtgtcgtccctcccccgttagaattcggcggaggacgaggtctcccactgcgaaggatcgacatcgcatggtcttatcgtgataacgcctcaaagtttgttggtaccgcgctgattgaattaccgtgttcagtcgttcttcttcgagtacatcaacatcctccagcctagtagccttggcttctgctatgctttcaaagaccaaccttggcgccccaaacttgaggtcagcaggtagtactgcctttgac

SEQ ID NO: 6861 - DNA, 556 bp, Zea Mays
atgaattccaactctttaacgggtgctttaggagcaggacatttagatttctcaggaacattatctttctccagagctattggtacagtttccgaaggtctagcttcggcaggagcttttgaaggtccagctacagcaggagtgtgggccatcttggcgacagcagttttccttgaatctacagcctatgtgctatgagcttcggcagaggcaagagctgatgtctttatggactccagcacaacatctagcacgctagccattctcctattccttggagtcaatgtaggaatgcttaatggcttcggcagtcctattggacatgatggactcaacaccttcaactattctatcgtcttctctaatttcagatcttcggccggatttgtactagcctcgactggcatagcatgacatggttctgtgataggagcaaactctgcacgttccataagctcaggcacattgactgtctcaatacgtcgcggactatggttcaagaccttcaccttcttcgccttcggtgcactagaggacgccgaagcagtagttttcc

SEQ ID NO: 6862 - DNA, 479 bp, Zea Mays
gggagggcggcgtccagatctgcaggcggaggactagctcgcccgattagctaggagaggctaagccaaggaacctttacaaggggaatcaagtagagacagaagggtggaaaggtggatggattgaggatggacgaagcagcaagaagagggacgaggaggagaccaagcacgaaggaagagacacgaagcaagcaaagtcgatgtcaccattcccttggccttgatcgtagtgtcggtagcattgaccacatacctccatctcctcacgtcgatctcctctaggcataacaccacatccctagttatctccaccttcatagtcatcgacgctagaaccttagcgcctagggtggtatccttcatcattccctcgacctccctcaatagtgacatgcacagtatctcgcacacccgacatagacaatgtgatgttctacgctgctgccacccctactccgacactaggccgcttcaac

SEQ ID NO: 6863 - DNA, 358 bp, Zea Mays
gcacgttcgagccctgtagcggcatgaccggcgggatggcccttgtcctcgtgtccaagccttgtagcatgttcttttgacggagtagagagctgaggctaggctcgagagcatgggcatgtactcgagccaacctgtacatgggtgcggatgtcgaattggagtagttgtcataatacttggcatggtcctctgcgagattcgcggaagagtagatgacaattaatgcacgtctgctggggcagttatctgaggccgagctcgggcgaggccgagatttctcccgaggttgcgtccttgaccggacgttacatgtagtcacgctcggagtggttgaagcagtggtcggagtcgggga

SEQ ID NO: 6864 - DNA, 505 bp, Zea Mays
gttcatgttttggtggtgcatttctagatgagtgttggtctcatcgagctcttcttgcacatcatggagctgattttccaggacttcaatggtgttgtcccggatttccacctgctgctccaactcttgggtgcggttgttcatttgctcaatttggagatccttctccacctactttgaagacagatcgaccacgaagacctacttatcatcaagggtagtctatgcagtctgagcgagcccaatgaggtgcgtcatagcatcgctttgcagggcctgcaggtggtacaatgcactcatgcactagacagtgatcctcccaacctggtcgggatgcatggcccacacatccttggcatggcgcactcggtcgcaccacatcagatcatccctcttctcagcggggaagagtcctagtgggtgcatcatcatctccaattggtggtatccgtagaaggtcgtcaaggccttcattgtcgcggcctcagtggtgtcatctgccctg

SEQ ID NO: 6865 - DNA, 333 bp, Zea Mays
gagcatagttgttaagtaaagttgggagataattaagtccaaagttggactgtcaggtcactgggtctgaatttttagaccaacagtgcaaccactgagactttgagcatggattcaactatgatccagcatgaatctgcccatggcatctatgacaaacttgtagctggttagtagctctataactttgctgcagagtttggtatgtgttgccatacaggtttgggagaaaatcatgttcaaaaatggtctgtcaggtcgactgcatacactctgcgatggtacagtaactgtaatggatgagatcaccagcgcactgtcctcaccgtcgac

SEQ ID NO: 6866 - DNA, 586 bp, Zea Mays
gaaaaatgtgctgcccaggaaaaatggacgcactgcatctgaagccaggtggagtccaggaagccggtagaaacctgtgactcagctgtgggtgcgctcccctgtccaaacaccagcaaacctttaccctttgcctcactgtagactggtcttatgtggacataggagtcgaggccgcgtgctagctcatgcaaacctcagctgaaacacatcggcgcccagataagtgcaagtccggccgagtgctctttgttttactgtaactgtgaccaccagtgccgtaaaccatctctccctgtttgtgtttcttatctaaaaccgagcagagttccactgtctataccccacgctcctaaacgcctggtcatgtcagggtgttcagtctgatgtcgtcttgagaatctttgctcctcagtctggtgagcacgccgccgatgtctcatatcatcataatctgtcgagatcgatgctgttattattgataatcatctgttctgtattctttgggtaataataaagcgctgacagccttgggcagggtagattaggcgcgatatcgatatgaattcggaactaggtctgaccg

SEQ ID NO: 6867 - DNA, 459 bp, Zea Mays
gaagccaatcgcatcaaataccatgttcaatctttttttgcctcgacccccaaaagctgcggacaaagcattatcttcggccttggagtatgccccgagtagctcatcactggtagcttcaatacatttcagccagtcatcatctggctcatgaaactactccctaaatctgaaagtatactttaatcgaaccagaccaccttcacttgattcagcaacagtatccttcgacatttcccaattctccacaagtggccataccctgaagactatgtgctcttaaattaaatccctcctgccaatgaaggcacacatagtactaaaggccttctggcacgcttcaacatcactatcaatattcaccttcggccttcggaggccgaagcgagaccagatgggacgctggataatttccttgatgtcctcccttttctttaaatcatttttaacgtaaatcca

SEQ ID NO: 6868 - DNA, 656 bp, Zea Mays
ggatggtgtgcaagtaggactaacaattatactggttcacccggaatgtccttactccaatcttcaacgatctgcactaccggcactagattgctcgtagtaggaggttacaagcggaacgagagagtgagaaacttccaagtctcttgtatacgtgtgtgttgtattgtgatgtggttgcgacctgtcgttgtccctatacctttttatggcacaagcctcaaggagagggccaattacaattgtcgtcccgtgcgatagtgtaccaagaaaaataaagatggtccccttgtttcctgttagtaacgccttttcccttgtcgtatgttggtcctgtaacctcctgcttgatgacgtgtcttgatcaaggcgtcctcataccatgtgcgcaggtatagtgcccgtgtcgttgaaggtccctggttctgacgggcacgtacccgagttggcaacatagtgtcgtccgtagtggtggtacacgtctccagaatggagtcttcgctcgtaccctccggttttgtgggcctcttataccacatagttcgtccgtagcaccttttcttgttttcgtatgaggggtgtgggagtctatgtctaatttagacgtaattaggtgaaacgaggacgacctccattctgtgtcacgctgtgatgac

SEQ ID NO: 6869 - DNA, 949 bp, Zea Mays
gtacaagatgtcgtagacatggtggccaagcgcttccagcgggatcctgctgatgatgagtagccggatctgcatagagaaagcaagagttctgctgggaagcggcttatcatattctggttttgtaagatacttttaagtactacttgtcaaccaatcattacaacttatctgcatgctactttccctttgctatgtgtgctgttgtcaacttcttctctgatacttggcccctctgggatgtggtctcgacttgtcgaggctggatgccagtatacgtaaggaatagtcggtgacctggcccccaagaggttatttcgactgggacctggacctgcacacagccttaactagggagtttcagtagtgcactcatcggacccattcactggtatccttcaccctttgacttacgcaacaggaactgtaggatttaggctggggagccgacccgtgtgtctggaccccctgggccacggcttctaattactatggtactcgttgcatggtggtggagtgcgtaggcttacggtatgggaccaggctaagcagccacgcagctccggacctccccatgagacatgtgtcctttctttagagctggacctcggacttccggacctacagggctatagtttcgggtactaggacaccctccacagagcgacatatcgtgtgggcttagggtactggaccaagctaagcggtcgcacggctctggacgattatccgttctcttcgactggcccctaggctacacagcctggcttattcaatccggatgtcaatataccagcaatggagggaatccgtttgggtgggtcagattaaaaataatggttgcaagattaagcagaataaaaccaccataaagcaaatcaggggcgggtcatcttctcttcataatttgttgttcatgagcgtaaaccaacataccgggtttataagg

SEQ ID NO: 6870 - DNA, 728 bp, Zea Mays
tcttctagcattggcttgacttcgagactgtcgttgtttcccagacatgcatttagttgtgctgattcttccttccagtcttctagaaagttggtcccttttattccgaatggctttcgactgagagcgtcggctaccacattggccttcccgaggtgatagtgaatttcgaggtcataatccttgattagctctaaccatcttcgctgacggaggttgagatcaggttgagtgaatatgtacctcagactcttgtgatcggtgaaaatgtggcatttgtttccgattaggtaatgcctccatatcttcaaggcatgcactatggctgccaattccagatcatgggtggggtaattctgcttgtgcggcttgagtaggcgtgatgcgtaagcgatgactttctcgttctgcattagcacacaccctaagccttgcctcgaggcatcacagaagacgacaaaatcttgatgaatatctggcagtgatagaacgggtgccgttgtaagtttttcctttatgatttggaaactttcttcacattttggggtccacataaatttatggtctttcttgagaagttctgtcattggccttgcgatgctggagaatcctttgatgaagcggcggtaataccctgccattcctaggaagcttcgaacttcactgacgttggttggttgcctccattttgacactgcttctactttggaagggtccacttctattcc

SEQ ID NO: 6871 - DNA, 412 bp, Zea Mays
gattttcggtggtatattacatggtgccgcctcgttaaaaacctcaccccccgggaggcaaagagtgcgggcctaaatgacattgtttgaagaattacaaaggcgcttgggccttggatcttaaatgaaatttttttggagatgagcttggtgaattgcgaagggttgcctgagcgaggagagaacttttggcatgcctcgcatgacctggtgactcggttggtcgtgcaaattatcgcgggctagtaaaatccctgacaaatcaccttggctgcaagggccctggatcctgagtgtgagcgcaggttccgtcgtggacttcacggaggatttctaggccttcggtttcggttatgcatttcagcataggttgactgatgccctttttgtacagctgaccctcgactattgc

SEQ ID NO: 6872 - DNA, 432 bp, Zea Mays
atcagacaccactgttttgggcactccatgcagcttgactactgagtctaccatgatttgggccactccctgagcagtgaaagggtgctttaagggaaagaagtgggcatacttggtgaatcgatctaccaccaccaagatagtatcatatccttctgacttgggtaacttctcaatgaagtccatagttaggtcttgccaagctcctgcaggcacatgcaatgggtgaagtaacccagaaggatactgcttgggacttttggcctgctgacaaactccacattgtttcacaaacaattccacgtcaattttcaggcctgaccaatagaacaactttttaactctgtggtaagtagcagtgattccagaatgaccacccaatgatgaatcatgtaaagctacaatgattttggttctgagggctgaattctc

SEQ ID NO: 6873 - DNA, 438 bp, Zea Mays
ctctcctgtaacgtcacatgcctccccttttatagctgaaggggggcatgcacaaaggcactgagccccgacatgtgggcccaggttcataatgaatatagcgcttgggactataaatatttgctgctggggcaatctccttgtgtcctgtcacctgagatctgtgtatcttcggcgtgtaggggaagcttcttgcagaagggataatgagcacgatgcgccgcatggcatgggcgcattgttcgatgatatattggactggcgcgccgtctgatgccgtctgccagcggagtggactagacgcattaaatgccgagggggcacatcgtccgtcggcttggtggcaggcggcgtgtcctctccgcaataaatgcggagaccgcgcgacctcagtggcctgacatcagactacgtcggtcggcttatgacatgagccac

SEQ ID NO: 6874 - DNA, 534 bp, Zea Mays
ttcgacggcgagctctagagcttgatcatggtcggggcgagtggtgtggcgatcggggtgagctggtgatgcctctagggggttcaattttgcacgggattcttagtaggggggcgaggatggctcatggatgatagtgggcggtgatgcttgctttgagcaagccatctcgaggaaaggggaggtggtcgggggctcgagcgttgcggaaaagctccaggcgtgctccttttataggtggtcgaggaggtgtggctcgctcagtgaggcagtgagggagcaagggggagcgatggagggtggtcgatgatgtgaccacacatcgggaagtacatggccgacatggttgggtgcgggagtggtgaaagaggactgggcggtgcataactcaacgagacatgttagcgtggcaaggatagtggctagtgaggatgcaacgattgtcgtgctcctctgctttgacgaggacatcagcgttgacacgcgggccccaattgtcagtgggggagggctgagggacgcaaggtacgccgg

SEQ ID NO: 6875 - DNA, 341 bp, Zea Mays
gtaggagtggagaggggtttctgattctgtggtatctagcttccggtctcgctgaatcgagtatttatgcagacagaccgctgactgcgatcaacctagcttatatttacatattctttttgttttccctcggagatcgctcaggtttgagcttgactgactagctcaaactcctttttcattaatctaagttgatcactaatgtcagcggggtcttttataatctgatgatgccggtcttctgactggcggaacaaatggacagattatgtaggtagagagaggttgactgctctgtgccgtatcattgtacatgcatgcagcagaaatttcggtctctg

SEQ ID NO: 6876 - DNA, 693 bp, Zea Mays
gtgacatgtgtatgtctctactcaaatgacaatagaggtgggtctgttaccaatcaaatagaatagaatggggtggcacactttgttagaaaaatcgctagagatattatcgtgttgggtaaacacctagaggtggcatgtgatggggtcccaacttttggagaagcagacattagttcttgggggtttattgttatggaaacagaagaaattgtgtgtcgtcttcataagagaacaaccaattgtaatcaccctggttttaccaattcagtgaggaacaaaatgtctagtggttcgtgtggcctgagaattattagtcaatgggattttttagtagtgtttggttcaaaagcgaggtgaaatggagtggctctgttctacctttagtagtgttcaattgagggaatcatggaacaaagtggctccaaaaagagaatcttcacctaatatgttgaatccctccgctcccaaaaactataaaacattttcacttgtgagtgttcatgtccaaagaaccttcctcaaaaacattatgagcaccacccgtgagtcctaactctcgacctcccccgatttcacctccttctgtgtcgctaggaggcaatctggctaccaatagcgagctccttctcgaccacatctagatccaccaacgtctgtccttgatgcaccccctataggtttgtccatccc

SEQ ID NO: 6877 - DNA, 494 bp, Zea Mays
ggaacgttggaaacaaagggtggcttgggtgcgtaacggagaggcaggactaagagcaggctcaatttaaagggagtcaccatgatggtgatcaatttgaccgctgaatcacggcggcggcgatagcccgaggagctccacgttagcgtcaacggtgtccacaggctagtaatgtggcggacttaacgcgaaccctttacggtggtccaacacgagagcctccaaccagctgcgtggatggccggagcgtccggtagcttgctacggcggtggtggatgaaggacggtgaggacacgtggtgtccgtagctagagcggtaactcgatcaccaaatctgagtcagagatcttttaccacttcaatgatccacgtctccgtggcaccaatcgtggcgcgagctcgaatcacggtagcggtacatcggcggcggtcacatggaactcaatcttgttcggttcactgttcatgccaaactgaattccgagtacctgac

SEQ ID NO: 6878 - DNA, 462 bp, Zea Mays
gcttagacaacaacaagtagaaatgaatctgccaaatcctccactagtcggagctgatccagcaattgcagcccagatgcggataatgcaacagatggctgatactatgacagatatgcacgtatagatgcgacaggagcatcaggagatgcgccaagagatggaggagatgcgccaggagcaaagggtgcaacagcaacaaccaccactacctccaccaccaccatcagctccacccaaggataaacaccgggagtttatgaggcacaaaccaccaaccttctccaactccacggacccactacaagcagatgactggctaaagtctatagataagatgctcaacatagctcagtgctcggacagagagaaagtgctctatgcatcgggacgtcttactggccccgctgcggattagtgggatgcgtactgcgctgctcatgctcccgttaacacaatcac

SEQ ID NO: 6879 - DNA, 578 bp, Zea Mays
aaaattaccaatgagatgttggctgggttgtctgagaactccagcaatagtgaaagcttcgatattgagagtgaggatgagaatgccaaagatcggtcgtggagacctagccacgttgtttttgggaaatcaaccatcaagcaaggacaaattgaatcgatgaaagggaaatattttcatgatgtgtctatagtgaagggctaggggagaggacaatgttctgctgccagaaagcgatgaagtggtagtcttcaggagcttcatgaaggctgggcttcgtttcccgcttcataagatgctagtcgatgttttgaagacatttgagatataccttcatcagattacccccgaagctcttattaaagtgggggtttttatctaggccatgaggagccaaggactagaaccggatgcaagatgcttttgcaatattcatgagttgtcttatgagacgaaggcaattggaaaggaacaatatcacaataattttggttgttacagcttcgtgcctcgatctgaggcaagttatcatgtgcccacgtttcggaagaggtggccaggctcttggatgcaggaat

SEQ ID NO: 6880 - DNA, 584 bp, Zea Mays
caagttcgtcgggggagttcttaccgacgacggtggcgcgacgagctctgcccacgggaaggggtaactctgcccctgttttgagctccggtgagaaattcggcggcgacccgcccacgatttggtcatggaaggtacctatcctaatcggcgtgcccaggtgatccccacagacctctcgtcgacggccagatggtgacaaccgcgtgtagcggctgcggcggcgctcccaaccttctctctttttctctcgggttttttctttggggttgtgctaggctcttgggtcacttcgaagaaagaggaatacatgtctctaataatgcggcgggcgcggacccaagagggagaggtcaaggatggaggagagtttctcgggggttgttggctgcgacggactgcatggagctccgtcgcgtggcacgttttttgtcggggacatggttctgacacgctggtcccacacgccagggaaaccggaggcagctagtgacccgcggtgagtgtcgagctaggccccacaagcaagcgtccccgcgtgcacgaatgcacttggcatccaccatctgaccacgaggtcccac

SEQ ID NO: 6881 - DNA, 303 bp, Zea Mays
cgtccctctaattttgagagacaacactgagatagtaatatcccaactctcgattatgaaacaaacaactttatttaagggatcgtcccatcccgtcccgtcctgtcattgaatggaagtatacatagccttgaatggaggatgcaatcgccttggggaaaagaattcctcgctagaggagcaccgtcggtgcggaactgaggctcacgtggacacgagtttctgcatcgccaccctgggtaagaacctcaccgagcgactcgctttcattcccgcatcacgtagcactccacatcttggtag

SEQ ID NO: 6882 - DNA, 459 bp, Zea Mays
ggagcaacttctggaggaggtccatgctgggcaatgtggagtacatgcagcctccagaacactagtcaggaaggtcttcaggtcaggattctattggccaacagcaaagagcgatgcagccgagttagttcagagctgcgaagcttgccaatacttgtcaaagcaacaacatctgccagcacagcaactgcagaccataccagcagccgagttagttcagagctgcctttcgcatgctggggactggatatgattggacctttcaagaaagctcaagggggatacactcatgtattggtagcaatcgacaaattcactaaatggatagagttcaagcccattgcttctttaacctctgctaaggccatggaattcatacaagacataatattcagattcgggataccaaacaacatcataactgacttaggatccaacttcacaagttcagagttcttc

SEQ ID NO: 6883 - DNA, 560 bp, Zea Mays
cccagcgatctatcatggtctagtttaattggctgggccgataagcatccatagcccacaagagtgctgaaacgagggtaaggagggtatgaatggacctggaaacgatggtccacgacacggtggcttacggtggcgcggagaaccgaattgggggaagaaagaaattagggcgctactgtggctaatcggaggcaggggcgggtgctctggcctcgtgacaacctaacggagctagcggcaccctcaatttatagcgtccgagggcggtggctccgaattttgaaggcgaaggctggcgaccggagagaggggtgagtcaccggagtcgcataacgtggcatttactagggcagaggcttaagacgatgactgaccaattcacacgacaccttgcgatgaggtaatagggttagtagcgtggcggattccagtaaacggtggtcacaccggcaatggtcgtgcggccacgtcgtggcgcaagtggatgggcaatagagcggccacagtgctccaacttcatctacgacgaggtcttttcaccccgcaaagttatcagc

SEQ ID NO: 6884 - DNA, 349 bp, Zea Mays
tgaacttgtatatgagacgaaggccatgggtaaggaacaatatcataacaactttggttgctatggatttgtcgcccgccccaacgcaagctacccggtgccaacataccagaaaaggtggcccggggcctggatggaggaatggttttacgtgaagaatgacttgtaggcaagagaagatattaaggaagttattatgcgccccatttggtcccgcttcggcctccgaaggtcgaaggttaaaattgacgaagccgctgaagcatgtcagaaggcatttggtactgtctgcttctttattggtacaagagatttggttcaagagcacatagcatacagagtatggccg

SEQ ID NO: 6885 - DNA, 451 bp, Zea Mays
ccggtatgaaaacgaggcagacactattggcccacgtcagccacgataaggcacctcgtcatcaaacaccgtctagaccaacgacacgacacgttgaagaagtgacggggagtctctgtaaacatgacgaggcatcaccatgtactgcccttaatgtctcccgactctgccttgttggaacaatcaagctccgctacaaggggcctcggcatcagagtctctacaataacccgtgaagcgatccaccatactagacgtacgcttacacgcgtatcagacggtgacatcaggggagccacgttagtaaggctcccgtagactgcaagtcccgctccgcttcagatcaccccacgctttgtatgaggccacccacttgaaatataaaatgaggttgcagaacatgaacaagggatagaggagcatttggccagaactctccccttcctctcat

SEQ ID NO: 6886 - DNA, 409 bp, Zea Mays
cggctcccctatcagttcaaatttgagaagcaattcaagaagccatgcaacgagtggttagaaatgatcaaaaccatgtgtaatgagattcttggcaattgtacgaagaaagaagaccatataatgattgttgctttgatacccggccaaaacgaaggctgaaccgggtaatggatgcattgaacttcgaatacatacattatgagaagcttgacgaaggggccgggggggtgaaagaaaacgagttgtcagtatcttaagtaggcaagatgtccggtccataaaagaagatgaaaaggccctgaagaaagtaaaaacagcgccatagccgaaggcaacagtttctaagaagcaaaagcttgatcaggtaccctctactgaaccgaaggttgatgaagcaacagagaaa

SEQ ID NO: 6887 - DNA, 312 bp, Zea Mays
ttcaattcctcatctactaagaacttaatgctaagaaaattgtatagaactgatgcacatacacaatgaaataagagaagcaaaagcacgtggatagaactgatgcacatacagcagaaagcaacgaaagcaactggaaaatatgttatcttgttctttgcagtcaacccttgttctttttacttggggtgtcgcatgtggctgttgtttatttggttaaaaaacagagataagtgtgcagattagcagccctggctcgacgacaacttaatttataagtggactagaattagctggtttaattaagtaaat

SEQ ID NO: 6888 - DNA, 646 bp, Zea Mays
atgcagtggtagccgttcgatcaacgatcgatggcatggattttattctcgctcaattgattctgtaccgatagatcagatatggacggtcacgatcaaatgcactagggcacgaaacggtatgcaatacggaccaccggatcgaaaacttacgccccagatttattgggccagatccattcgcatccgatcgatatggatccagcggcttatgttactcctatcccacccggcatccagattcaatcgtaacagcatgatcgcgatccaacggctagagacctatattcttccccgccgaactggataagcccgccggcgaccgagctccaatagggcttgccaccgatgacccccaatcccttgcctacacgcaaacctcgatgcgacaagtgctaaatgatgtgggaaacaaggcaaacaaggaggagagatcatcacctcgatttcacacgtgaaggccccaagccacggaggaacgcggcaccgcggcgatgtcgcacgtccggcgagcaattcctagatcgctggcggccaatcccaggtggagcggccatgatcgcctactctgcaaccaaagataggcccaaagcacccatatgaagtgcggacgacggcaattcggagcttcccctcgacggcctcc

SEQ ID NO: 6889 - DNA, 547 bp, Zea Mays
cgtgactggatttggacatcagcttgaacatggacaacatcagcttcaacatggggaaaatagctcttccattatggacagcaccttcaacttggatagcaccttcaacttggggaaaaatagcgccatcatcatggataatatcttcaactgaaaaacaccatcttcaacatggaaaacagaaccttgaacttgggggaaaatagctgtaaaactgcaggtaagatcttgccagtaagttgtctccaattcttctccttttttcccacaacaccataatcatctccctacgcttgtctgcaaggctcaacaacagaaagatccttccaatctttaatccaattgttggatacttcagctagattgttggtgacatagtcacacttgatggaagggttaaactcactcctccatttcacctcttaataaaattctgcataagatgtctaaagaatttcgtatggtcagcccgaggaaacacaaccttttcttcattttctaaccctttgcatgtatctgtacaaacagcaagcgaagtaagatctcc

SEQ ID NO: 6890 - DNA, 595 bp, Zea Mays
caaacaccaaaaatgacatagttaaatgggtcgaggtccattttctataatcaacatcgtactctacttcgtacgagtttcgtgtgtcgtgtgtcatgtgcgaagcacgcatagatccgttttctcccttaggtgtcgcctaataacaagataatataagccttacctcttacatgcacaaaccaccacgaacgcttcctcctcctcgctgtcgtcgtcatatattaacccgcaacttctcatatcgcctccctcaccctagatcttccgcaccaccatagatgacatcgacctccccctgttgacccagcatctcaaaccgctgccgcaactctcctccgctcgtcgtacgcctctataggcattagggcaagaacaaccaagggagcaaccaaccatgcaaccaccagtccatccaccatgagtgcttcctcctcgtcgctatgtgcctctataggctgcagggcaagaacagccgagagagcaaccaaccatgcaactatcacaagcacttcctcctcctcgttgttgccatcgtatattaacctataacttccatctctttcgcatcttcgcctctctcacctaaattctt

SEQ ID NO: 6891 - DNA, 860 bp, Zea Mays
ctagcgaacctatactggccagaatgcatagagactgacaccctaatttggttgacaccagttcctacccccggcgacctaaatccctctgttaattgcacaaatccgggccggagctcgtctactcacgacgacggcgaacgctaaggacaaaccgaggtgttcccggtgattgggtgcggtttagcttaattgatcgggtcaacaagcatgccaagcgtgcctgagtgctaaaacaagggtgaggagggcgagaacggacctggagacggtggtccacgacgcggtggctcacggtggtgcggagaaccgaattgggggaataaaggaattagggcgctatggtggctaatcggaggcaagggatggtgctctggcttcgttacaacctagtagagctcacttgggcagcaatttggagactccatcgacggtggtgtccaatttgaagaagtcacgctggcggctggaaagagaggaagtgcactggcgcgggttatcgtggctttcactgtggcaaagcctccggcaatggacggacttactactacggttcactgcgacgtgctaaagttcctaggcacatggcgcacgggcggcaagcggtcaatgccggcgaggattatcacagccgaccgcagaccaagtgggttcggtgaactatccagtgaccgggtccgagccaatccgagcgccaagatcttttactcccctcggttatccacttgtgccgagcacggatcgtggcgaccggcatgaatctgagcgcggggtcaccgacggcgaagtgcagctaacctgtgatctttttcagtcaactgtacaatggaaagccccatttagagtacctaatagagcgc

SEQ ID NO: 6892 - DNA, 401 bp, Zea Mays
tgcgtgttgcgagaagaaaagcacgtccagtagctcgcgaaaaacaaggggagattagagagggtatgcagatgtagggaagagagaggcaacgtcctttttcatggccgcgttcgtgatccgttcgtgatccgctagatggatctacagtgcttcgcaaccctctaaaacgcgtatctgcgacgctttacgcgagcagggcgagctgttggactcagccttatctagtcaacgcatccactcacttcctttcgtcctcctgctctctgtgtgtgccacgcaagcgccctatccaccattagagtcgctcgttctacaacgacgtgctagctagccgatggctacgaccacgaaaccactcagatcgtccgctgctctgccgcacgggtaagccccccccc

SEQ ID NO: 6893 - DNA, 367 bp, Zea Mays
cagagtgcgctgcttgtgatagaacctctccgtggcccaatcgtgggcggattggcgaggaattcctcaccgtagatccgaacaggggcggaatcacaccctttccgtggtctgcgcgcgtcgcaccgccatcaccggtatgaactgggcacctactcttgcattcgtctactctttgcgtggcacctcctagattagagttaggatcattgggcaccgggaggctgtattccggcgatgctctgcggcgctcggaatggctgagggaaggaataggagagagagaaccggggggtggaagaaacctggccaaccattcgatccgatagggacgcgtgagattgatccgtagtttaccccttccgcc

SEQ ID NO: 6894 - DNA, 1182 bp, Zea Mays
tgcctaagggtgcagccggacatgcatactaagcgcgataaatcaccttaagagtgcaaagcctctactatccgacacggccgaacaaaagccgcctaagggcgcagccgggcacgcgccaaaggcgttcattatcacccacaggaagcgaggtccccatcccatccaagtaccacgacaacacgattacaagtcgacacaatctcacaacaagcgccgcacgcagtcttatcatagtttacatacacaaagcgaagggtccataagccacatggcacatcaatacaaatcacatcttgttgccctccctctctattgcgaatcgggggagggcagtgttttcactcactatcgcaacacgagagcgaggccagcaaacatgttacatcggctcagccttcggaataagacccgcttcccggaaattaaacaacatcatcttcaactcttcgccttcaaacagattacgcaaatccccctccccaatacatgccccagacgtcgagcatagtaaatcacgttggtcgccccgatctaatcgaagacgggatcgttccatacccatccgacgatgcctcccacttcgtgacatcccaccaacactatgcttcgacaccacctttcgctgacggtcgtcttgggccatcgccccagccggggggcggactcttcacgcacttcagcctacggcaaggactcggctgcggccaaatccaatgcagcaaaataatctaaatcttcatcagaagactcctcaatctatgaaaacaggctcccaaaatcatccatgtccgatgaccacaactcagtttcagaaccagccgcatttccattaatgggcatcgcattcacagccgccacaaaattagtatcaacatcaatgggggttgcttgtgcaggcccagacgttggaacctgcgcagcaatcgaccttcagtatcacaaaaagaaaccttaaacccaacgaccctaatgcgaccccgccacctgcgaaggagcagctaccgctgcagggtcttcgccagctggagcagccgctgttgcagggtcctcgcagggtcttcgctaggggcggcttgaggcgccgattgctcttcggcccccatccctgcgtcctctgtccaggtcagggagctttcaaggtcgtcgaagtcctcgacctcttcatcgttcagcatctac

SEQ ID NO: 6895 - DNA, 1183 bp, Zea Mays
tttaacccgaacaccactcaagagctcgattcacacaaacccgcggagttgtagacattcctgacgcgttcctaatgttctagtgtggtatagcctaattggtcgagccgacgagcatcacaagcatgcgagagtgctgaaacacggacagggaggacgagtgcagacctgagagcggctggctacggtggggtgacatacggtggcgtagacgaccgatttgggggaagaacgaaattctccggctatggtggctaatcgagccgacgagcatcacaagcatgcgagagtgctgaaacacggatagggaggacgagtgcagacctgagagcggctggctacggtggggtgacatacggtggcgcagacgaccgatttgggggaagaacgaaattctccggctatggtggctaatcagaggcgggagtgggtgctctgggttcgtgataagctaacggagctgactgtgcactcaatttatagcagctggccacggttgtctggaatttgaaggagatttggatcacggtggtgataggatgttgcactggtgagctcgtcgtggcgttcaatggcactatgactcaagggcggtaactcttagcttgccacggcttcgggtacgtggtgaaaggacttcgacatggcgcaatcacggtgaacggtgatctccacggcgatgaccgcccgaccacgtcgctgcgcaagtgggtacaacaactgggtagtaacagtgccccgacttcatcccctgcgcgagatctttcactttacgtaggtatccacatgccattgggcacgaatcgcaacgccggcaaggatcatgatgagggatcaccggcggcaatgcactgaacctgtcgatctttatcacgttactgtaccatgcgaattcctttcattacgcctgacaaagcagattaagaagctccattctccatttttcatgtggagagctaccgatccatatgcaccaaagttgttgctctataaaccagcttggtttttgttataaagaccttgatcgaattctcaccgaatcatacagaattcagcctctaaagttcatccgagctcactgtcagtcaaaccctaacacctgatccgactgacagcctgacttttagtccctttttctccaatttttgtacagcaccaatgcttagtctcttaatcaaacttg

SEQ ID NO: 6896 - DNA, 562 bp, Zea Mays
ttgacgcacggtgccagctcctggttttcaaaagacacgcggctgccataggatggtgctcggccaggttggattatggataggcggtaattccttttttttaccgacatcgatcaatctggaaacagcaaagaggctcggccgacgtacacagcctgagtatgccgtccttactgcccaaacagatcacagctagccagcacattgcaccagaagattcattcattcgggcaatgtccctttttttattaaataggtcaaactgaatggcgtaagtggaccacagcagagacatgaatctctctgctccctaaagctgaattttaaattgcattcaaagtgcttgtatcaaacctgaacctgagacttccaatcagattttctctcattttcttatgctagtttgatacagttctttactaggagttgttctcctacgatcactctcccactttgctttaaaagatatcagctaaaactcaacaaacctcaggttagagagctccaaagtttgggcaataccactgaactgcacccgtcagctaaccagattaaattcagc

SEQ ID NO: 6897 - DNA, 712 bp, Zea Mays
tcgggagataaaaagcagcccgcgcgcacgtgccgctgccgttgccatcccgcgcccgtgctcctgaccaagattagtggctgcctgctaaccctttgcttgcctcctcctttcgttctctctgtctctctgtgatacttttacacggtcgatgctagcgagtggtggtggtggtgcctgcgttgcgtggtctcgtcggggtttgggcatggcggtcggaaggatgcttattacacctgcatcattgcatgtttgcactgaatgaacaggtgaacatcatgtccctgattgggcctcacaccaccatgtgaacatcacgcacgccgagcgaatctcttctccccttcttaatttaactagtagtactaacagacgacgatgatgatgccatgtttaataagcgataagctccggccggcgacgattctctcgcacgagtggttattgtcgacaagggcggttgcgtctggtctaccaatactatatataaaaaacagatgccctgcttcgtgctttgacgcatcgatactctctagtataattggattggaaccaacttagctttgcatgcatgcctctccgtgtcagcttgttcaagtggcccccaccccactgcactgatagcaacctcaatgtctgcaaaaaaagaacggttttcagacaacatttggacaatgaactttataaacattttgcagctaactttataatt

SEQ ID NO: 6898 - DNA, 725 bp, Zea Mays
gaatgatcaatgttcctatagtgaaattgtagatggactatagctcaacagctttggtgcagatgaatgatcatgttgtcacacaatgtttggagtaaatcgtgctcaaacttgctctattaggcacactgaagacacttccgattgtacagtaactgaagaagatcttaggtacgttgcacctcaccaccggtgatctcgcgcctggatttgcgccgaccgccgcgattcgtgcctagtgcaagtggataacttaggggagtaaaagatcttagcgcccggattggctcggactcggtcactgttgagctcgccgtacccacttggtctgtggccggcatgaatgatcttcatcggcgttgtccacttactgatcgtgcgccacatgcctgggaggtttaaacacgtcgcagtgaacccttgtagcaagcccgaccttcatcggtggccttgccacagtgaaacccacgatatcacctatgcgagtgacttcccctctatccggtcgctagtgcgccatctcaaaattagccgccacctctctcggacactataaattgatggtaccgctagctccgttgggttatcacgaagccagagcaccagccccttgcctccaattagccaccatagcgcccaaatttccttttcccccaattcagttctccgtgccgccgtgagtgaactcgccgtggccagccttctgcatgtcagttcaagcttcc

SEQ ID NO: 6899 - DNA, 639 bp, Zea Mays
gacagtgaggaacaaagatctaagttttcgtctgaataactataagtagctggggaaagtttcaacaacaaaattgagataagataacaaccgacacttggatgaacagttgcaacacatctagagacacatgtaaacccatgaaacagtctcatattctcatttgacaaatgtaaacccatggaacacattcagtcatgttgaaacacattcatggcatcagaatagtacacgcaccaaagtatttctgttcaagtttacacacaccaaagtttacacgcaccaatggcatcagaatagtacacgcaccaaagttcaggcatgaaataacttgaacattggtacccgcaacgcagaaattcacgcaacacaggtaccattgacgcaacattgataacattgccatacccatgaacatattaaacattgaggcatgttgaaacacaagatctggcagagaactgaactcaccagcgaaggcgttgaagcccactgcacagacaacgagcgtgttgaacagacaacgagcgtgctgaacagacaacggtcgtcgaagtttgatgggagatttgtctacatccctcgcagtggtcgtgtgttttaataggagttgacagcgacgatggaatgggacttgac

SEQ ID NO: 6900 - DNA, 380 bp, Zea Mays
gaagctaccacccttggcgggaaattttattctgaagtgtggatgaatggcggcagggagatagcagatgaagctatcaggtagagcgaagaagaatcttatcttgctttagaggaagcaagaaaagttgaagaagtcgtagaacgcgaaaggagtataggtgcgtctgtcatatttttagcttcgtatcttagagaaacttatattttggtgcagctgaactttctcctcccccgaagccatataatcctgacactaatccagccctaaagggtacctttgacaaattcaaaatagtgaacacaataatatataaagctgtagagaaacttctaaacgaaactactgagaaagtcctaaaggaggatgactaatctgtg

SEQ ID NO: 6901 - DNA, 491 bp, Zea Mays
cagccggaataataggtgcgcacaatcgaagccgctcccaaaatactctccgtgcagaagtggcctatgggcgcggctgtatcaacaaaggcgcgcaaccttatcatacaaattatggttacatacacacaacgagggcatcatatattacattggctcaaccttcaggatgatacccatctccctgtagtttaatagcattatcctcagttcctcaccctcaaacagatttcgcagctccccctcacctacactcaccccaatcggcgaggacaacaattctcgcttaccagtcccgtccacgcgaagacgacctctccccacctcgctacgataacgcctaccacttcgcgacaattcactcactctccgcttcgccactgcccttcgtcgcctatacccagtactcgcgcccgggagttcctcggaaccctccgcgtgcagcgaaggctccgctgcagccacatccaacgccacaaaataatataagt

SEQ ID NO: 6902 - DNA, 544 bp, Zea Mays
gtagcatttaatgcgccactgccagggcagttggccgagactgagctcgggtgaggcggagtttcctcccgagaccgaggacgaccttgggcgaggtgaagttttctcccaaggctgaggtcgtgtatagtcatcgtatgtcctgttccagagttgttgaaaacagtgaccgaggcgggagaacaatgcctggtattcgcaggcgcgcgccattatgggcggtgaaagtagatttgactgcggtcccatcgccctttattgattgcggtgtcttggtggagcaggtattcgtacagattgcatttaatgcgcacgccttatggttcctgagaactttggctgaggcggactcgaggttggcctttgtctgagatgcactcgggcaaggcggatttttgcttcctgtaaaagggcgctcctcgagtgagtcgagggtccaagcgggcgtagccttcacccgaggatgggctcgggccaggcatagttttgggcagccgtcaagcggggtctcgggtgaatcatgattcgaccctgcgtgacctcg

SEQ ID NO: 6903 - DNA, 502 bp, Zea Mays
gtttggaccttacctacagcagggctgtcaatacatcgttggcagttgaagccaaaaatgcaggacacagaaaatcaaagggatatgcgggtgagagatcaaatcaaggacctgagaagagaacaaggttggtaatcggacctttcaatcaaaatcgttcttcgccttgcccaccttcatatccgttcaagcagcctgtctttattcgtcccactactacccctgctcttaccaatcagccgagtgcccctggtactcgtttccctgcccttcccagttcttccaatgggtgcttcaactgtggaaagtccggacatttcatcaaggactgcccatatccgaagcaaaataaatccaactttcagcagccctctaggaactcaaatcaaggaaaggggaacagggccaacacttcaacaggcaagattttcaagaaaactagacgggtctattatacctaggtggctattacatcggagggtaaactggtgatgatgggtac

SEQ ID NO: 6904 - DNA, 645 bp, Zea Mays
gaaaatcaaagttccaggctcttgaaatcgctctgtcaggcaccctaatgagaaatctaatggtacagtgtctgcagaaagatcttcagatacatccccctcaccgccggtgaccctcgcgccgtgatccgtgctgccgccatgattcgtgccctctggcgtggagataatcatggcagagtaaagatcttggcaccggataggtttggacccggtcgctggtaagctcgccgtacccacttggactgtggctggccgagatgatcctcatcggcgttagccgcttaacgatcgtgcgccacacatcttggaagcttagcacgtcgtagtgaacctgtgtagcaagcccgtccatcgccagaggacttgtcacggtgagagccacgttttcacctacaccagtgaccttccctctctccggccgctagcgcttctcttcaaatttcggagccaccaccctcggacactataaattgagcgtgtcgctagctccgttgggtcatcacgaagccagagcacccgcccttgcctccgatgagccaccatagctctctaattcctctcttcccccaaatcgtgtttccgcgccaccgtgaacgccgcgtcgtggctagctctctgcaggtccgttcacgcccacctcgc

SEQ ID NO: 6905 - DNA, 495 bp, Zea Mays
aagatacgctcctcgagtgcgtaccagacgagcctggcttgcatgcgtagaacctgtttgtttgatgcacctaaccaaacacagcatgcttcgagactccacggctgtgctgggcagctacagggaaccaaacacatggataaagaagtggtatgagcaaatgatggaaggtggtgtggtgtggtgtggtgacacggcccatcaaacaaagctacatgaatatgcttcccactaacacgcaatgaccaaaaaccacccatggtttcccatggttgcataaccaaaacatcaaacattctaataacacatcaaacccaaacgacaatgagtaagcatgccacctgtagttcaattgaaaactgaagcacatcaagagcacacggcataatgtggaaatcaaggcatattacaaagcagcattaagtatatttaggcctacaaaatccatgtttcactacacatcatcgcatatcaagatctctcttcaacttacca

SEQ ID NO: 6906 - DNA, 523 bp, Zea Mays
tgattcgtgtagagcgttgcgggtcggggagtagtgcaccagagccctggatcgccgcactccggcgatagctccgccgtcgttcactggtgcgccgccgtgtgtagctgtggggaggaagacgtattatttgtcgttagatcttcagcagacgactaggattagatcctaggtaacggttcggagcattcaatcctgaccattgattcaactgcggacaaatctgatgggacctgggcatgggaagttgccatccgtggatctcggatcctacggtggacagagcgtaccggttcgatgtggctcagatctaatctaagcgcttgaactaggatccaacgacctaaatcgccccatatcccttcgttgaagccgttttacaaaagaaaccccgggaatagacataataaacccgcagtcagcagagcctattcactgagtcttagagtttttgcatcctagaccctggattcttcgggtttaatgcgcccagtccagaagattagaaaaatcaagaaataaa

SEQ ID NO: 6907 - DNA, 574 bp, Zea Mays
attctgaggtttaaaggccgtgtgtgggtggggaataacgcattggctcagcaaaacattttacaggcacttcattcaagtgggattggaggtcattctggtattcaaggtacctatcatcgtgtgaagcaactttttgcttggcctgctctaaaaaaatcagtgcaacaatatgtccaatcttgtgagatttgtcagcaagctaaaacagaacatgtgaaatacccgggattattacagccactgcccattcctcaacaagcttgggagatagtgagtttggattttattgaaggcttgccatcctcagaaaattataatactatccttgtggttgtggataagtttaccaaatatggacacttcttagccttatctcatccattcacagcattgaaggtagctcaactatttttctcgcaaatttacaagttgcatgggctgcctcgcatgattatctcggatagggacaggatcttcacgagtacgctctggcaggaactgtttcgactgtcagatacagtgctaatgatgagctcgagttatcatccacagacagatggacaaactgaga

SEQ ID NO: 6908 - DNA, 309 bp, Zea Mays
aacgaatccattctgctcctgaaatcctcgagctgggcttgcgacttctgcggcccaacaactccacctgttgtccggcgcttgaatcacttgcttccttctctacaccattgccatggctgctgacaacggggtatgtcgacactaaaacactcttgagtagactgaattataatccgttttggattagatggaggtcggtctacgttcttcatgtatgacgttcctgccaaatcaaacaacacatatacataaaaacgtaaaggagcaataaaaagataagcgccaatcagttcagttcagttcatg

SEQ ID NO: 6909 - DNA, 422 bp, Zea Mays
tttttccacctccgtgttttgttttccaccttacttacactcaccttcgcacatatggcctcacccacacccatcgagggaggagacacaccttaccacactgacagccttgctcaagagggttttcccctcattctgtgggaagtgctgcaggaggcaagataccacacacctccacattacattgtgcagttgttcaaggaacatggagtgcctcgttgtaaggtgtggataaccttagagccccaccccttgcagccagggtggcgttcattggactccgagacccttggtttcctaacccacgacaccacggaggccatagccatgctcgcactaactaccttctgtggatatcactcgttggagatggcaactcaccccatcggtctattccccactgaaaagggggatgacccgat

SEQ ID NO: 6910 - DNA, 662 bp, Zea Mays
caaagtagcagtacgtacctagccagtgcagaggaaggcaaagcgaggaacatgagcgggtatcatccgaacgcgaagcaggatgccatacctatagagcacagagaagacatcaattgacggcaaactaaaagaaacatcaactgggaggaggcagaaccacaaccaacaacttggacgatgttttgcgacaggtaatggacggagaaaggaggcaatgccgcaaacaccacggaaaggcaaggcgtgagcagctggaatgaggacggagtaaagaagccgttctggcgtgacgatctcaccttgttgcagatgacgggacatcgcgtgctggcgtgtgggtacaatgagaagtatggaagtggaggcatgggcgctatagtggagcaggacgacgaccacggatacagaggtatgcgcggcacaacgagtcacgtgtcacgcgccgggaggcgtccgcgcccgtgaaatgcggagggagatccaatttccagcgtcttttaagactttagataggccaagagagagagcggagagtggggagtggaaacttggagtggtggactgacctctcgcttcttgtcgacgcacgtcaaaaaggcacgtagaaactgacatcacccaccaacccaaattactgagcccccagtgctctgactgcg

SEQ ID NO: 6911 - DNA, 498 bp, Zea Mays
gcgaaggggtatgcagtgtttgcaatcgttagatctgaaaccgtcggtccagattagactgagacacttatgaacccgagattgtcctcacacgtcatatccgaatcctacgatccacgacacactatctattctctcccacaccgaccgcacgatcattgatcgatggttgtgattgattaagccaaacggaggccacaagatctaaccttagccgccaggaaccgatccaacggccccgatccctcacgtacctccagcatcggaccacggcggcgcgcagagtgagggcggcaacactccgatgacccgcccaggcgcaattccgcacccaaatactccccgattgacgctacatgctcgcagagctaaaatgaaatgggtgggagatactcaccaaaggatagaggcgaggaagatcactgcccacgtaccgcgtggatccgtcgtccgatgagcgctacggcgagcaattatgggtaccctagtggcccccga

SEQ ID NO: 6912 - DNA, 756 bp, Zea Mays
ccccgcttcctgttatggcgccctgcatgcaggcatgcagctgccctcccactcacctccccctcccgttatggcgccctgcatgcaggcatgcagctgccctcccactcacgctacatgcaagtcgtactgtcatcctgcataacgcacgggcacggttgtagactgcgtacgtagatgttggtattggcgtagccggcggctgtgagaacgcgcacgacatcaacttgtctgctacgggagcatcggcagcagccagccccagcccctaggtcctcctactcccagcttcccaggcgagaaatttatttgtccatttgtccatagctagttggagctttgattagtcttggtctgactacctaagggagtgtgctacgccaatacacgacatcctctctccgcatgcagagcaggcaacctcagcccacgactcttatatattaaaccataccacgtatccattgttttcaagtgatttgttcacactcgacaaagtcggatgatgtcgagatgaaacgacactaatgttctggcattacagtaccaaacaagcaatacaaactaaactcgatccagagcgtctcctcctcctcctctctctcggttgtttagccacacatcactggctgcagcgcaagacggtaatgcttatcttagccaactaatgacgtgccccccctcatccactcatgctacatgcaagctaccgaagccgatcctcgtggctccctccactcacgctgcatgcaagca

SEQ ID NO: 6913 - DNA, 491 bp, Zea Mays
ccttggcttcgaagggcccagatgaagatgttgagcctaacgatggcgttaggggtcagctgatgaagaaaaatctcaaaattatccaaaacttccccaatcatctcgttcaagggaaaccacaatcctgctctaaaaagcttttgaaaaccactacttcgtcatctttcggctttggagtggtttcttctccggcaaaacgaataagcttcttttcagcttctccgaagtaacccagcttcatcatcatgggcacatcagcctcagacacagtagatttttcataatccaagtggctgggttttgttgggatcagagtgctatagtattcctcttcttcatcaacattttcttcctcgatatcagcttgttcagcttcggcagtaggtgcaccttcgttaatggctccctccgtcacaactaatcccgactgtctcatgacttcggagatcagagctgtctcagtggcttcaatctcctccccttcacgg

SEQ ID NO: 6914 - DNA, 766 bp, Zea Mays
agagacgtggtggattatttctgattaatctgatgcttcacacgaggagcagttactgctgttgatacgatgagttcagcttcagcaatcagcattgtgcaagtgggtgagggtgattgcactgttatagtgtaggccatgcaacgccgttcgatgggccaaatcccagaaaccaggcccactcgaaccattttcccccaatcattcgaacctcagcagcagacacgtacctgcccaactgcatctaccatctatagcatagcaaggctggttcccctggctgaaccggagcgaaatgtggctgagaacgcactactcgtcttaaaggcttcttcatggaccatacgcaaattgcaacgcgatttacgtacgcaggcgtgcctgcctgattgcttgagaatacgtgtgtgaagcagatcgcaatcgcaacgtgggtgctaaccctacctgtggccttatcatcgctgtcgcctttcatgtctgtctctgatgtccattgccgatgatgcgtgtgccacacccacacccgtgctcgtacagtgacgcttggcactggcagcatccgccggccgtgcccttgtttgtcaggaggtatcaggctacgagatgagagcgtcgccaccctagctgtcgatcggtggacgcaaacgaatgatcatgcccgtggtggccctcggccagggccatatgggccaatcagacagacccccccagtttagcccgttctgcacgttgcttcttcctctttggttggttccacctacga

SEQ ID NO: 6915 - DNA, 356 bp, Zea Mays
gatgctttgtctcgacgacatgctttgctaacacaactcgatgctaaaattcttggattagaaagtataaaggaattatatccgactgactcaaactttgttgaaccatattctaagtgttgtgatggcagaggatgggtaaaatttcatgttaatgatggttttttgttccgagctaacaaattgtgcattccagaatgttctattcaaattttacttttgcaggaagctcatgcaggaggacttatgggtcattttggcaccaagaagacagagcaagtgcttgtcgatcatttcttttggcctaaaatgagaagggatgtggagcgacatgtccttcgatgtgaatcatgtca

SEQ ID NO: 6916 - DNA, 544 bp, Zea Mays
cctgctccaacttcaccacccgatcctccttgtcgcgtaagatatcaccgatttgtttatcccatttggaatccagcgccgcaaaacgcttgtccatctcctccaacatgatcttcatcgtcggatccatgattccctggcggcgctgaaaacgagtgaagtgtgtgtggcacggctgagactccagctttgcaacactcccaagaccgtaggctctggataccaattgttagggttcgactggcactcgtattgattggtagtaatgtagcggaattacagcagaattaacagagagtagcaggaaggggaagaaggagttctaaggaactacaataggagaatcagctctctctgtcatttcctgcccttcccacgcgacgccagtggaagaagtatactctccgaacgccagtcatgccacccactcaggcccatggacccttgtgctcttgacgcgttgtctcatactgcgcctcggcccactcgcaggatcaacaggcggcccactgcttgtgtttccctgatgctgcttctgcaagac

SEQ ID NO: 6917 - DNA, 536 bp, Zea Mays
caactacaaaccatacctgtaacttggccgttcgcatgctggggattggatatgattggacctttcaagaaagctcaaggaggatacactcatgtactggttgctatcgacaaattcactaaatggatagagttcaaacccattgcttctctaactttagctaaggccgtagaattcatacaagacataatattcaggtttcgaataccgaatagcatcataaccgacctgggatccaacttcacaagttcagagttcttcgatttctgcgagcaaaagagcattcagatcaaatatgcctcggtggcgcacccaagagccaacgggcaggtcgaaagagctaacgggatgatattggaggcgctcagaaagaaagtcttcgacaagaatgaaaagtccgcaggaaagtggatcagagagctgccgtatgttgtttggagcctgagaactcaacctagtcgagctctgcatggaaacacacctttcttcatggtctatggttcggaagcagtgctacctgctgatctcaagttcag

SEQ ID NO: 6918 - DNA, 334 bp, Zea Mays
aacttcatatgtttccagtacacatagtagaaacataaacttcatcatacttaacacatagtacaaacataaacttcatacttaacacatagtaccttgggaataacagaaccgacgacatgacacattagactggacaataagactaacatacttaacacatcacacacataaacttcatacttaagcagcttcggatccatgccgcgtccagtggtggtggattagatcaacctgcaactgattatatttcactggatcatgtagttggtcgtacctgttgttgatgtactcattgcgctccgaaatggaaccatgactagtatccgccaaa

SEQ ID NO: 6919 - DNA, 332 bp, Zea Mays
aggccatcgacccctggtaaccttcagcattcgcgcagaaaatccccgagagccaagcatgtctccaacaaatccgcaacaaaacgatcggaagccctccacccgtcagctactgtacctaatttacttttcttgatggccgtgcccggagccttgtcccgtgaggggccctcgtcggccgttgacatcgcctgtttcccccatcgtacagcaacatcggcatagtcatcccctaggtagctagcatacggcaaacagttcaactcaaaaaaaggatcaacctaacatttgaaccacggatgtcccaacttcttagagtctccatcttcggc

SEQ ID NO: 6920 - DNA, 555 bp, Zea Mays
agccccatacaactccacctgcatttgatcttgccacttccgattaataatagcaagcaacttcctcttcattgcctctctaccttcaaaacccgaagtgatctttgcttttgccatatccatggcagcggcaacctctggtatggctggcttttcatcaccatcaacaattcgcaacacaatgagtggacagtggttgtgatgcaagaatacaatcttggactgagttccaaaagtttgtagaaagaagtatctctgtgaccttcttttctccttttgtgcttgataacttggacctagtccaatcatcactaacagagaggcatctcaaagcttgcttatgcttatatatggactggagagttaggaaagatgtagcaaatcttgtaactgcaggtctcactaaatcaccccatatcttctccctcatggcatcaagaagtttgccatgcccatatatgaaggttgtcacttggcgagcatgggaaatgcatttcttgaactctccaattttcccaatgtcctcaagcatgaggtccaaacagtgagcagcac

SEQ ID NO: 6921 - DNA, 298 bp, Zea Mays
gcgggggctcgaacgctatttatagggctgagaggggtagcggaggggcgctggtgggtgagtaattgctcgtcggcgtcgatgaggaggggaaacaatggcagcaacgatgaatgtatgaaatggccgtgggtgggttgtccactaccgtgaggctgcgagtgggagcgcgctgcagtttctgagtgcaaggatgcaagcggaaaatggtgcagacgtggggaggcgatggtgtggggcgtggagaagaaggcattgataggtggggctacctaccagcggaggtagggagcgtggg

SEQ ID NO: 6922 - DNA, 738 bp, Zea Mays
aatatcgacgccactatgaaatctgagtacgggagataagtgagatatttgggggtgtaacttggacaggttcactgccatggtgtggtgtcaagcatgcccaacggtaccctccagcagtgttcatccggtgtctgtctgcctgccctcgtgtcctagcgccatgaccatcatctgactgagttgttaaccttacgtggtgaccttgcatggtggtgtgttctggtctggtagcagcaggtggcaagtcggctcgtgttgtccatagccaccgcaaagatccacagatggtgatcgggtctcgctgtgtagtcacagcgtttaggaaaggaggaaaattcgtcgtgtccctatctcctttgttgaaattggtcgtgcaccttggtctgccatccccttttggccgtatagcccaagcatagaagtctgactttgcctgaccttgccacaacatgccttgaccccatcggacctcgtcgtgccctctcgcacctgccccaccatagccaacactcttcgagataaacacacccaagtctttgtgtgttctgagttcctttatatgccgtgatgattatgagcccgcccgattgaactctaccgtagcagagcctcagaaacatcacgtcgccaccggtgaatgccgcttcggaccacctcctcgtcgaccggccaacccgaatgttctcctatcgagtgtgcacgagcgtcgtagctatggtgagtcattgatccttc

SEQ ID NO: 6923 - DNA, 382 bp, Zea Mays
tgttctcattaggctgctgacgaaagttaagttaatgacttaatcgtggttcatttgttactgctattatcattaagcatgccgcactgttatggataattgattcattatacaaactagagcgcctggctgctaaaaattttatttgcaaactgttgattgtgactgtggccgtgtcagggaaacaacctcagaatatcagtgtgccgtgtttgattccagcacctacagctttcttgacttggttgccgagttgctgctctttggtactacataataccaatttgtggtatccaaacaattggtgctgattcagtctgctgtctctgttggtcaatgtctacttgcagtgctgaactgctgttaatgatagttttgttcg

SEQ ID NO: 6924 - DNA, 558 bp, Zea Mays
cactgacctcagtacccaccgcgagttcaaggtttctcagtgggatcagagggatgtgggaggttgagaacttaaactagatgtgtgggattggtgtgatgcggtgagatgatcagggaatcaactgtgatataggaagtgcagttttgcgccctatttcttcatgaccagcaactaaagagggatggagtttctgggttaaatgggcacctcaccgggtaataccagtttacatgttcaacccttccattgcatggtcaccacgtaggatagaggcacaggagagtagcagctgtggccaaatctccactggacaacaagtcatcaggtagatacgcagcaagtaaatggcctgatttctttccccccttatcctatccttggtacaacaaggcgtatttcagatgaccgcccttgcccaggccctgcctcatccatttactacccccctggaactctgtagaaatggtagtggagatggatacttctggtagatatttttgctcaggtctgaacatgcgcaggtcaatagcaggatggattttgcctccccttttc

SEQ ID NO: 6925 - DNA, 465 bp, Zea Mays
gtctagaggtcgatcgtcagctaggatggatagcttctcagcagtcttatttcctccactccatgtcctgttcccgctcagtaacgtgttcgacattatctcgtgacacatccatcaattcatcatcgaccgatgacgctagccattgccgcatgcacctctaaactgttattggtttccccgttcttctcggaggtccgactagaggagtacggccagtgcgttcgtggcacgttcgttgcgacggccgttaacgcagtaataacagtagtgaagctagcgtccagcccgggtaggtgcagggtaggtcgacgttactgcacggctgggctggctggtgcaaattgcaatgcgacgtcggagtagatagatctagggcagtctgctgcgctgagtcgctgacaacgggacgagtcatgaatgactacacaatacggtctacacattcccattaaatgagggggt

SEQ ID NO: 6926 - DNA, 1141 bp, Zea Mays
ctgaattgtctcttcttcgatgtgactttctggtacttgcaggcatttgcggagctgggacacatgaaacacattgtggatatcagacatggattttggtaattcaagacgatatgttgtgggtcccactcttccaatgatgggataggggccgacgaatcacggtgctagctttcctttcacttggaaccttttgacaccacgcatcgggtagaccttgaggtagacgaagtctccttcttcaaatctgagttctctccgcctgttgtccgcataacttttctgccttctctgagcttcaagtaatcttttgcggatcagggcaactttctcttcagcctctttaacaaaggcaggtccttccagtgtcttttcccctatgttggaccacatgagaggggtctggcactttcgtccatacaatgcttcgaacagtgacatcttgatactggtctgatggatattgttatacgagaactctacataaggcaaactggactcccagtttctgtcgaatgttaacacacatgctcttaataaatcttcgaggaccttgtttaccctttctgtctgaccatctgtcttggggtgataggcggtgctgaagtctagcttggtgcccatagcttgctgaaggctcatccaaaatttggaggtgaactgggttcccctgtctgacactatcttccttggaatgccatggagtccgactatctctttaagataaatccgggcaagggtggctcctccaaaggtagttttcactgggatgaagtgggctaccttggtgaggcggtctattattacccagatagagtcgttccctttttgcgtccggggtagtccggttacaaaatccatgcctatttcctcccacttccattcgggcactgggaggggttgcaacagacctgcaggtttctggtgctcgacttttgttcgttggcaagtgtcacaccgggccacatactgtgctatttctttcttcatccctctccaccagtatctggttttgacgtctaggtacatcttggtggttcctgggtggatggagtaggctgagttgtgagcttcatcgagtgggacttcctgtgcctctccttttggtacacacagacgattcttgaaccaaaggactcct

SEQ ID NO: 6927 - DNA, 400 bp, Zea Mays
ggactggtagctgttattataggagaattctgccaaggaaagacacttgtcccaatcctttccatagtgtagcacacaggctctcaacatgtcttccaaaatctgattcaccctttctgtctagccatccgtttgaggatggtatgctgagcttcttattacatgggtcccaagtgattcctgcaattgctcccaaaatcgtgccacgaatggtgctcctctgtccgatactatagtccttggtattccatgcaaacgaactatcaggtcaatgtagatttctgcatacttctccgtcctgtgggtggtgtgcactggcaagaagtgagctgtcttggtcaatctgtccacaatgacccaaatggaatcatggtgtcgagaggtattgggcaatcccatg

SEQ ID NO: 6928 - DNA, 879 bp, Zea Mays
ggcagcaccagctcgttggtggtgcaagtttggagatgcgccgcgggaggaagacagaataccttgacattcccctcaaggatagcattaaagggtggtgcctagagtggttttattgtggaaaaccactgcaagtccctccccccttggtcggggagacagtcatatgtacgtactccgagctaggttgagtctccaactcccttggaggtaacagaggctagagttctgcttgctgagatctgtctgctgaaggaaagaggtctgactgccgaagctgtggttgctgactttgttttcaagaatattcagcctttgaaagacagggcgtatccagcttacttgtacagtggtatcaatgactctacccgggtcatcaacaagagaattcctactgaggatctggtgagtcgactagacatgatcttgaggcaggggcaagatatcaaatgttggtgctcctgttgcctattatgcttggaatctgccacctcataggtcattttccaatttcgtgtccaaccctcctactagtgatggtggtctgggtcttagagtgtgtccctctcccgaggacattaggctctggttgctccccttcggaatcttcccgatgatgagaaacaaattcactttgagatgccagcaagtccagatgatgtagagatagatgttgtgcttaatatgttagctggagaatcttctgactctgtccatgctgaaccgatggttatcacggttggacaagagcttaacaaagcaatggagacccgaaagcctgagggtacctgtccaaagcgtcctcgccacgttagttgtccgactgtgcctgttgaggaaaagaagaagaagaagaagaggcggcttcggcgactgtca

SEQ ID NO: 6929 - DNA, 824 bp, Zea Mays
agtatttaatgtaacgtgatccaatatgggccatccgatctgcccaatggttcggatcaaattgccgaaaggggtacctcctcatctaatcaccgccgtccggccgagatccaacgatccagagacgtcttccccaaccgagaaccagcagcggcggtgagccgaccaccacggtagcgatgctcgccggagactgcaattcggcgccccgatgcccccggtcctcccgtaaacggttctacatggagagtggtcagctgcgaacgacaaggggagcatattacctgtagtggtgcggcaggaacactagtccacggcgacatgctgcccacggtggtcgtggttttccgttgagcaattccttagtgacaggcgctcgtacactagtgctggtgccgccaacacgttcgcccggtcgcggcgaacttcctagtcactggtttgaccccgaccgacggcgtgaacggaaaacagccggcggcggtgctccaccctcaccgcgaatttggtggtttctgcacgatgccttgaacaatgggaggtggtcgggtcttatagctggtcttgcgaaaatcttgacggggttggaggtcgggtcgcggactccgtccaaaatccgcgcgaggaagacgatgcccgcccgctagcgcgtgatttccggccacgagccccccaacggtttgcgcgagtcaagcgacaataaacccgcgatgcccgcgcgttaggtaggtagggagatccgggttctgttgaggtgctccacacggcggcaatggatctacgcagctcccggagtgtctggtggagcaagacggatccgacca

SEQ ID NO: 6930 - DNA, 476 bp, Zea Mays
gtatcaagagcacatcagagtactaaaacgagggaacagagggcatgaacggacctgtagcgcgctggccacggcgagctcacacagttcgatgttctggaccgatttgggggaagtctcaaattggggagctgtaggggatgattggaggtgagagctggttcactggatgcacaattacttagcggagctgatggcacgctcaatttataggattcatgagtggtggtggctaatttggagaagacgcgcggcggccggagagggggaagaatactggcgcaaaggattcgtggcgttcaccggtgcaatggctcaaaggttgtactcttaagtgtgccacggttactaccgcacactaacaagccatggcgtggcacaaccgaggtcaccggagtttccacggcaacccggcggtccggccacgttgcaacggctacatgcgcggtgataagcctcccctgcgaccacatctg

SEQ ID NO: 6931 - DNA, 736 bp, Zea Mays
actgggtgagtgttacgggcgtgagacaaccctagaacgagtttcaattatgtagctacagccctgggtttagcctgaccactgtggcggaaaaataccgacgtgaattcctgtgttccggttgattgattgtgactaagcaaaaagggtcgggtcgataagcatcactagcgcatctagatattggaacatgaattaaacgagcaggagcagacctgggacgagctgtccacggggcgcggaggatcctggctcgcgggtaacagaaaaggggaaatcgaagccgcaacggtctcggttggaattgggaggcaagattaaggctacacgtccgtaaagaagtatagcttcaccatgcactgtcaattttgggaacggtggagggaatttcacgaatttgggacttctactgagctttactggtgtagacgaaaacacctcgccgtggacctgacggctatttatagccgcggaggtacgggattggtccgcggccacgaggtggattattaacgcatgtctaccacgtaagaatgaagcacagtaatagagatcgaagtatggcgacagcacggcgaactgcgctgagtcacggcggccgccggtgagtaactccggctgggctagggcggtggcgccacgtatggttgtcctgccccgacgttatccattcccgactgcgcacggacccgggcggcgatcaacgtcggcgagctgagctggcgttctgatctgc

SEQ ID NO: 6932 - DNA, 624 bp, Zea Mays
gccgttcatcatcaggaatttctccgagcgaagcaaccaaagcgctaacttcttcggcagagggtcgcactctaaggcccaaaccgccatcagcgacaggtggattcgacacaaaatgagtgaaggccttggaaggaggcaggttccaggccgagtatgccactggggcaccaacatttgataccttgcctctaagaattatttcaagtcggttcaccaagtctacagcgggaattcttctgttggtaacccgggttgagtcagctagaccttggtacagataagccgggtacgctctgtccttcaacggctgaatgttcttgaagacaaaatcagcaaccacagcctctgcagtcaaacccctctccttcagcagtccaacttcagctagcaaagcccctgcctcagccacctcctgatccgtggggactcggtccaactcggagtgcgaacatccggctgtctccccgaccgtggggggagagatttccgtggttctcaacaataaaccactccaagcgccatcccttgatactatccttgagcgggatttcaagataatcagttttcctcccacggcacatctccaaactcgcacccccaaccagctgatgctgccccccg

SEQ ID NO: 6933 - DNA, 1965 bp, Zea Mays
caggtggacatgcatttattgcctgatcttataggtactattctaaaagaaagatttgataaattttcatcccaagaactgaactctaggatttatctggctgagtggaggccgttaacaaatatgctgcatttcttgaggaaaatttctgaccagcaaaattatagcctgttcaacacgctggaacattctcctgagtttgatggtaactcgttgtgctctgtatctagacaggttgaagaattgttgaatcaagaacaaactaattcgctggatgatgtagcaaccgcattcttattttcaatcatatgtgcacctccaaaagatgttatcagtgcctttccagatcttcttgatttggtgaaagcacattttccatctcatgttgctttcttgtcatcggttctttttctacaacatgattatctggctaaagttgctagttgttggccagatatattcttcagcagcatcagactgttcaaggatgatatcaatgctgaccatgcaaacacagttgaggacgaatgccagaacctctctgtttcaacagaatcagctccgctaagtacatttttaagtgtcagtcccttctgtgcgcttttaccttcagtattgagccttgcatgttcttcgccagatgaaatcatggaagcacataaggatgcacttctaagactccttgaagttaaattgtctgactgcacattcagtgagcttaccttgtatctgagagtcatcttgttctggactcatcacctactgtcatcatatactattaaggattcaaattcagatgatcttgagcaagtatgtcatttgtgctttggtcttcttgatagagtatttgagcgtattcaagttttgactgctgacccttcacagtcaaattctgaatacccgtactatcccgctcaacatatccaagacattgttgattctgttcttcggcatcctgttattaccctgtctttgtcatgctctttatccaattgccaaaatttagcagatgggagtttggaacatctggaagaagctttggctatttttgcgacggaaaatctgcaccttatagaccgtttcgttctaaaccttttgggtaaattgtatgaccttttgctaatgtttggtagctatggtggtaactactctacagataatgggccatcccatgagtcactgtttgctgctccaaatcttctgctggagaacataatattgttgttcaaggagaagtttgagctctgcgtggacaaactaaattttgaattgcttttgccaaatttctacatggttcgcacactgtcaaagttcttttctcctttcaaactcctggagcttgcaaattggatgttctcaaaattggatggtcacaacttcagttcacctgcttttgtttctgctgttttgatgtgcctatacattattgatgtcaccatggaaatgctgtgcttttatctgcaaaaaactgatcagagatcacaatcctatctatttcggcacttggagattcacaattctgatatcaatgccattcagcaagcctatcacatcattcttcattttgctactaaatggaatgttgagtttgctgatcattgcttgctgaagatgctgtgccatattcattacacagaaagatgcgcaggatggaacactgactatattgcattccatatggtattatctacaatggccatcaatactcccattgacattcttcatcactgcattttccccacatctaaggttaaagcaaaagcaatcctgttgcttttggaagcaagtcctatgcatctgaacctttttagccagatattcttggaaattttaaataaagacacttatgttttgcaagtcaaggattctgattccaacaatttgtgggctcaagaagatggtgctatacttctgttgcctgccgctttatcatgcttgaaatttcacagcaatgacaataggcag

SEQ ID NO: 6934 - DNA, 502 bp, Zea Mays
ggcgcctgctaccttcaaatgactggccttgactctctggcaagtgtcgcattcagatatatacttagcaatctccctcttcattctggtccaccagtacaaggatctgagatcatgatacatcttgttactgccggggtgcatggagaatttggaaaggtgagcttcatccaatattttctttctgagtttgggatttttaggaacaaccaatcggtctccaaaccataaaattcccttgctgtcttgacagaagcatttgtatttgtccaccttttgtccgatcatttccttaatgacttgaacacccttgtcaccgatctgtgccatggctatttgctcctgcaaagtgggctccactgaaatataactcaaggcacctgaggaaacatcttctatgttcagcttgcacaactcgtcacatagggtggcaatcttggaatccatactcacgcagttgcactaggccttctgacttaaggcatctgccacaacattggcc

SEQ ID NO: 6935 - DNA, 276 bp, Zea Mays
cattgctcgccgtgattcgtgcgccgtggctgtcagataagcacagcctagtaaaaatcctcgccgccggtgagctggatgccaccccggccagccatgatacccctcccctttctcaccgccctcggattggaatctcatcaccgtcgtgccatcgtcgttgtccaccgcgtgtcccaacctcgccaccgcatcgccgtgactccctctagcctctccgttgatcaccggaatgaccgccacggtagaggccacgaatccactgcaccagtaaag

SEQ ID NO: 6936 - DNA, 416 bp, Zea Mays
accagactgttatgctcatctagcatgttaagcaataaacgggccacctctgggtccggacgatcatggacgtcagactcattctcaaacatgcccaacctattttgtacctcgtgttcagtgtcatatatgtaaagctgtgcaaactgtggtcgcaatccatggctgggtagcagcgagccaatgcgatggtgtacgacaccattgattttgaaaacataaggtgctgtaccgttatttatcgatctatcaacgacggcacccagtgaggtaaacgcgaaaagggaattgtatgagcgaatttgcctaaggaaccttttggcacgattatcaccatcgaatcgcagtaggtcacttaagggaggcggcggacatttgtaaggctccaaaacaatcttacctcctctgcaacaaag

SEQ ID NO: 6937 - DNA, 391 bp, Zea Mays
gaaaggaggagaggagggggtgctgcgctctatatagtggaggaaaggagggaatcagtgtcgattaagaccctataaagagaaattgatgcactgctattaatccgtgagtaattaacagccagaatcaacatcaatggccgctgcgggggaaggtaactgctgacggggatgccgcgaggagggagaaggggaaaaatcacaggaggagaaacgtcgccgcaatggtgctccactacgcaggcgaggagacggaacggctggcaaacgggtacggtcgcgaacagcgaacaacaaacatttggcgaggaatggagaagacggatagtgttgatggctggggctgcttgtcataggaagaaaggacggaggtgagaggagcccgggtgag

SEQ ID NO: 6938 - DNA, 740 bp, Zea Mays
gccacggtgcacggcggacacatggtggagcttgtgccccgacaacaaattctgaggcccttggtcaccaatccaccgcagcgaggccacagacactatcctcgaggcacggtgaaacacctaggcatgattccgaggacacgacgacgagctcactaatttgaatcgggccgcacccacaccctctcttggtttctctcagcaatggccggtggtgcatggattcctagcacagatggatggggaagggggaggtcgacgatacacgactccatatatggacgaggtgagacagttggggcgccagctaactccccgctggcggcgagattggcggcgggttgttatagagggaagccgcgagataaaagatgcataagagcccggtggtccacttggcagcgagtatggcacgggtgctgtactgaatggctgagcagtgggcccgacatgcagtacttggcacgggcgcgcctcacctgcgatgggtgactgaccagtggtccggtgatatcagccacaggactgacgcgggggcacgttgttgcttcggtgtggttggtctttggtcccacatgtcggtgccgcgatgttgtgagggacggtgacggactagcgggcccctcccccgggacagcgcgcgccctgggtctgcggcgtgaaaggtaaaccccaacccttttcgtaggcggttgtcttctcttttgttttcttcttttcttgtctttttctattttcaa

SEQ ID NO: 6939 - DNA, 298 bp, Zea Mays
cttcccggtatgcgggttactgtagagactccggtgcttggatcccccacgaccggggttgactggcctcataaggaaaacgggatacaccagagactgtatgtggtgacgtaccatcgtatcaaatcattgattgttacatctcgacaccccttcggtatgccacgctcgtggtccgaacgtggtttggtggtgacgcgtcttgtcacagctgacgtgggtcagtagtactagatcgtggcctccgtcttgcagggttgctcggtgagtacttggttgttcgctctgcctcgtaggg

SEQ ID NO: 6940 - DNA, 545 bp, Zea Mays
aaatattaatgtacaaagaattttgggagggcaagagctgcattgagcaaatgccaaaaaaataatgcacatgataaaaattcaaccacaaggtttatgtcaaaagtggctggcatggaaattgggactgtgtgacagcagtaaattgtggaaagagcaataaaccctttatttccgaaaagaacacagcggatgaagaagcgacaaaggaggcataagagaaagatgatgaagagggccactggtttattagttatctctgtgaattctgtaatagtaccccctcaggttagtatgtccccccaaactgtgttcccgtctctgtctagcaccttctaaacccaacccatattcattatatgtagcgaacattcaaaaaaaagaagcatcaacctgagttcaaaaataggggttgttgcaccaaaatacactttccgaagagaacacaggcatacactctgtctattctacaagacaccatgagcacgaacaaaacataaatgaatctaaccagcaacattcgattcctggtacgatcgaagaaa

SEQ ID NO: 6941 - DNA, 896 bp, Zea Mays
ttttgattttatgtctaggcgtaagcctagtaaaataaaatcttagaggaactttgattgttgcattcatgccgatgtataatgtttatgagtgtaaaatgttatcgtaacatgttaatattattatatcaaatcaaatgtttctgaataggtacttacttagtatagacgcgatatatgcaatgctcgcgtgtcgcgtgtgtccacacgacgttcgtgcgtgctgttcacgtgtcatcgttcgcgcgagtcgcgattcgcgcgctttaataaaattgtttattacctatgaattgttagctattccatatataatgcgccataatcctgtttctattcgtttcagtggctttaacttcgtaacctcgtcgccaacctgctagtaacgttatttcgtcgcgcgtgtcgtcgcgcgtgtcgtcgcgcgtgctattcgcacgcgttgccgcgggttgttttcgcacattgtcgcttgtcgcgcgttaaatcaacggttcagtaaatacacgttaacttttatggtcgtctgatttactctattctaattgtttcaccttcacaataatatcatgtacacgttaaaatattattttatcgtacctcatgctttagttaattaattaattaattgtcggccatgctttagcataaatcgataaatgtagtgattctcgtgtcgtcgttgtctgtgggcgtcgtcgcgcgctattcgcgatgttgttcgcgtgcgtcgtcgcgtgccgtccacgtgctgctcgccctaccgcgcgtcgttagcgcgtatctcacatgtgtcacgtggcgtccacgcgtgataatatattgttttcgttaaatactcatgagtataacacattcatctggtcgcatattctaatgaatttgtttaatggttg

SEQ ID NO: 6942 - DNA, 750 bp, Zea Mays
gaaaaaggaggagccgcgggtgggccccacacgtaagagagagagagggagggagaacggggcggctgggccgattggcttccctagtgggcctcgtgtttcttgaggatgccgacgtggcctggatttctctaggctccatgatcctgaggccatgcggtagttcctgttcgcatgcgatgacctcctctccgacggctccaacgactatagctctaacagtgagggttacgatccgactcgagagtgctttcacataggcacaggagcatgacgaagggaaccatctcgacatgcttcaggaggccaatgccccgacaccgccctcgcacgtcgaggggggtagggagcagggtgtggctcagaccccatgaggaatcacatagaacacctagagcagctctgtgagctacatgccaagctcagagaagaacaacaacggttacaacaacttcgacaagttctcgagcgggaagcagcaggtagggatcctaacgagggagcacgtgtcaaggcacgtgatgtccactgttgcttcatggaagatgctgaggttgaagcccatccgacttttcacaaggccagcaatgtaaagcccaaaatttggtagaagaaaatatatcatgaaataataaaatagagagataatatatatatataggatagtatggtgagaatttttgaagacctttaattttttaggattctttctcctcatattcaaacaataatattaaattagttgagtaa

SEQ ID NO: 6943 - DNA, 878 bp, Zea Mays
gaatccgcactccttctccaactccggtcaacagcctataaattgagcccggactccgcttcttcatcacatcccgcacctcaacaacttagcactcgaatcgagtacgccaaagaactaacgcagtccacaaatcccctttctctctgttcttactccgccgcggggaactctaccgtgatcagcacccctcgggttagtaattcccccaattgctccctgttctagcgcatttatagtctcttatggctctcagaaccgaccaattgaagttcggccaaagtctttcaccggaacaggcacttgctctgtagaacaccgtcgtgacaccctctccgtagcccagcgtttctattcgtgcccagtccaaactttagtatgtgcgtcacctctggtaggcctgtgaagctttcccaagcttcaatttggtcgttcacgccgtcggttggtcagaatgcttccatccatatgaccatccgccctgtcaccgtggaccggttgattaatagtcccaatggtgaaattgattgaggggaagtgttcggtaggggttcaattgtgtccctgtcgcccgggagctccagccgtggcgtcatctggccggaataggctcgccggagtgcggcgagggttgttcctcgtcgtgggctttggtctgcgaaagaatagaacgtggaggttctttttgtaaaccgtcagtgactcaccttaatagtgtgtcggccttgcttctagatattcaaaaaggcggggatctcggtgcaaagttggcatgggcacgggcgcgggcacgggtacgcttctgctgtagttgggccatcctgggctggaatcggcccagtactgttcaaatcttttcccttttctttttctatcaa

SEQ ID NO: 6944 - DNA, 664 bp, Zea Mays
ccaggagtggttttgcaaagccctgaattattttatttattttattccagtaatggacggcagcttcaattctttaagactgcaaggtgtttcataaaaactttaggacctatttgatatagtatctattcatcagtggacggcgggttaatttcatcgatttccggtgactcttttgtacaaatgctcgactgagagggtgtcgctcacacagagccgtttgatctaaaaccgacgggctagatcggacaggtgaaacggtacgcctggatttaatccctacctttcgacctgatatcaacggcttggatttgaattacccggcccgtgatcgcgcatccctcccaaacagtatttcactgcgcagatctcggccacctgcaagtagatcgacggccacaaccctccttccccaacccacgacggcggtcggcagcggtcaggccctccacacggcggcacatcactagagtgccacaaattagcaccacacgcgccccaaacgtgaatccagacagagctacacacagcgggtgatgcgacagtcaagatgaacgactacttatcacggtcaaggtgacaggaggcttggtccacgacgatagacgggtccatagtgaagcgcaacgtcggtgagcaattgctcggccccggcttggttccc

SEQ ID NO: 6945 - DNA, 766 bp, Zea Mays
cgggccgctgcgccggagccactcatccacttgcccgacttccttgtcatcaactggggagtggatgagaacttcgtctctgatgatgaaccagttaaggtgagggaagacccacaacagtgggaagcacgcaagctccagaactgacaacgcaacatctggcattaccatgtcgctagcgaacaggactcaacgcagtcggtctctcatgatgatgagtctgtgctcagagatactctagaatattgagaattcttcttatgaaggaacgcccggcaacaagctcgctacgacactcaagatcgtcctcatgcgcaagaagctgctcatgcgcgcaatcgtgagcttgccaagctagcgtgtgcacaccagcacaaaccatcacccacttctagcaacatactacccgacttcacttgggccatgcagaccccaagtcgccaatgacctccataactcacctgagggggaattctatcggcaactccttacccaagcagcgaaccacctcctgcccttggttcctactgaagacaatgaacaccaccacatcaaccaccaccttggcgtgcgagacaacatcaaagcctcgcgtgcacggtggtacggtgaagagctaaggcactgagaggaatttgattgggagcagcacatcccgcaaccggggctgccacctggactcattttgttgtggtctcaacgcacaacacgatgcagtgtcacttggtccacgactgattgggtgaccttcacccgccataaccac

SEQ ID NO: 6946 - DNA, 276 bp, Zea Mays
ttcggattttgaaatggctagatccaatcgcgctcgtcagatccgaatcgaacgccgcagatttacttggacgaaccattagctagggtctaatctcgaccgcacacggtttaatctacggctagcagttgtcttccttcctcagccgaaccagcacggcggcgcgacacagaccgtggcggcgacggcggccattgccggcgatcccataccccacgatttcgcccacacaattcctaactgtctagcgcatctcaatgctaggattcaatttga

SEQ ID NO: 6947 - DNA, 827 bp, Zea Mays
aatcctgacttggaagcatttgaggcagcatagaaggtctgaccctgggggtcgggtcaccaagggaatttctagatatgcagtgggaatgctatgcttttccacaaaaccagtggctatgaaagaatgagatgctcccgaatcaaaaagtacagcagcgggggtaaattcaactaggaactcaccgagcactactcccggggcttgctgagcctcttgagcgtcgacatggttcactcgtgccgtaccatgatactaggtcttgcttagctggctgttggaggagggtgctttggaggcaggtgctgggtactcttggggccattcaccgagttggagtaggtaggcacggatgtcttcaactgaggacaattattcttgtagtgactggggtctctgcagtgccaacaggcattggctggaggttggttgcttgcaacggagggggcctggagggaacgttgaccccgctgactgaaacgtgacggagtggacctagctggcttgttgaagctcggtcaaaagatcgaactctctgatgcctgttctgctgctgagcttggaggacttggaacttcctcttgaggtgacccttttcttcttctctagccctttccacttgtatggccttgtttgagaggtgcaagaagctgagaaaatcttggctggcgaggatagtcttgagttctggtcttagccctttcaagaaatgggccatcttcttggcttccgtgctgacatcgtcaggcgcatagcgagccaattctgtgaacttgtggacgtattcactgacagatctccctccttgagttaattcccaaaattca

SEQ ID NO: 6948 - DNA, 508 bp, Zea Mays
aaaatggccacctgcctcgacctcacttacagcagggctatcagcacgacgctggtagttgaagccaaatatgcaggcccaggaaaatcaaagggctatggaggcgacagccccaaccaggggcctaaaaagagacaaaggttggtaatccgaccttttaatcagaatcgttcttcaccacgtccaccctcctaccctttcaaacaacctgtctttatccatcctgccactgcccccacctcaacaaatcagccgagtgcccctggtactcgtttccccgccctcccaagctcttcaacagactgctttaattatggaaagtccggacattttatcaaggactgtccatacctgaagcagaacagatcaaataatcagcagagtttagggagttccgctcaaggcaagggaaatgcggcgaacaataccgcgggcaaaaatatgaagaaaactgggtggatttattatacgcaagtggccacgacaccggaaggagcaccgattatga

SEQ ID NO: 6949 - DNA, 961 bp, Zea Mays
tgcaccgtcacgacgatgtgcttaccatgcagcaagaagccatcggtggtccgctatggcaacctgagggacacgtcctatagttgttggtggaggtggcttgcctcctcatcattaacggttgcggcgttgatctcgttgaataggtagaacaagggccccacgagagaaactttgcagagtctgtggtggtgttgatgtcatggcgtgagagggtgttcgccgccaagttgaggcgaatggggcggtagtcgaccgcaaaatcaaagccaaatagcttgcagatccagtggtgttggggaacgatcgacaaccactggtccaagaggaacttgaggctgcaatggttggtgcggatgaggaagcagcgacccaaaggtacaaccaccaatgccgcacagcctggattaggcagatgagtacacacctgtacgttgtcagcttgtggtgatggacggctaagggccgactaaagaaggccaagggatcgacctcttggcggagaacgacacctaaacccacgcctaatgcgtcgcggtcgatgatgctagtcaaagtccgacacctaaaccctatggagaggacgtgcttgagcgccgtgagcacctccgcaatctcaggcatccatgcaaaagcatccttgcgcaacaaccgcgtcagggatgtgacgatagtgtcaaagtcccaaatgaactttcggtagtagccacacggccataagaagccacacacatcttggggcaagcaaggctctatttaggatgagatgatttccaccttttcattgtccatggcggcactatcgatggagataacatggctgaggtaggcgacctatggtgcctcaatggagcactttgagcacttcaggtggaggtcgtgtgtgtggaaggcatcaaggatgagacaaacgtgttgcaggtgctcaaaccacaatgaactgtagatcaaaatatcatcg

SEQ ID NO: 6950 - DNA, 584 bp, Zea Mays
cgccggtcaccgtttgccacctgcagtgctggtaagaacgttgtaagatcggggtaagatgcttcataatttgtattccaccaccaccaccaccctgagagatagttgtagggttcacattatttgttgcctttttgtctctgttgtgtgctaacaatgacaggaccaaagaatcaaatggacaaggacaaggggcttaagcttaacgacgatgagtgtgtctctcagctggaattgaaggagatgatgcgcgcgatgactgaagcttttaaaaaataccaggactctgcggcgacatcctatgagcagcttgatcgacaagttgctaaacttgttacacgcatggacgtactggaggcttgtcccccaccaccaactccagccccagctcactctcctatggacgacgacgacgatgacaatgatgacgacgatgacgacgatgtttatgcaccgctgcgacaacgcctcgcacgtaatcgacaaggtatgggaggtaatggtagacgtcatcagggagacatgttggtacaggaatactaccaagagcttcagaaaggtatgctacgatgtggggtagttga

SEQ ID NO: 6951 - DNA, 679 bp, Zea Mays
ctccgccacggccatggccgagaagtccgccaccatgcggaagtcgtggaacagctagtcgtcttcggttccgcgcactgtaaatacatggtctgggtgccccgggtgtttcccccctttttgcatctcgaaccacgtgcatccgccaccattcaagggtggtcaagctgacagagaaatcacgtcgctggtgaacccatccacgctagtgttccatcccctgtacgtggtcgtgtgggtgcgccagcgtccgggagatccgtccgtgcccttggtacgagctgggaaaccctgaatcgaggggaattcctcactggagtgcacgtcagggcggaactaccccctctccgtggatggctcgctagctctggcaatccctggtaagaacccctcgcccagacgcgccttcatatatgtatcatgtgcaccggtcaaattagggtttcgtgcgtgttattcggggattagtggcggcatcagcgccgtgggtggggctcctcagggtaggagacgagttgtggaccgttgatcgggattcatgcggctaggattaaattcatcgtatcccttcgcgcgtttgatctggcgcgtccgtttcggatcgaacacgtacgcgctgatctggattcataaaacaccccagccattgatccctgatctggcggtctcaatcgcgtac

SEQ ID NO: 6952 - DNA, 631 bp, Zea Mays
gtctgattatctctttgagataaattcgggcaagggtggctcctccaaaggtagtttttactggaatgaaatgggctaccttggtgaggcgatctattattacccatattgagtcattccctttttgcgtccggggtagtccggttacaaaatccatgcctatttcttcccacttccattcaggcacggggaggggttgtaataggcctgcaggtttttggtgctcggccttcgtccgttggcaggtgtcacaccgggccacatactgagctatctctttcttcatccctctccaccattatctggttttgaggtcaaggtacatcttggtagttcctgggtggatggagtaggctgagttgtgagcttcctcgagtaggatctctcatgcttccccttttggtacacacagacgacttttgaaccaaagggctccttgttcatctgccctgaggtccgggagttgttcgttgcgggctttttccacaagtcttgctgactctgggtctaggcgttgagctttgtatatgaggtcttccagcattggtttgacttcgagactgccgctgtttcccagacatgtattcagttgagctgattctttcttccaatcttctaaaaagttggttcc

SEQ ID NO: 6953 - DNA, 303 bp, Zea Mays
ttttatggtaataacatatacttacatggtaccagactactagtccaataaggcagtctttaacacaacttcggtcactgatttgaattgtgatatttttgtaaaacctgtagattgctcttgaaacatatttacactttaaacagtttgatggcatgtacaaattatgtatgtccctttatgacgtgagtcagaatcataatgcacgttttggcataattatattgttctagcagattgatgttggtgcaataattcctaatttctgtgatgcaactgagtaatttccgtccagagttcaga

SEQ ID NO: 6954 - DNA, 469 bp, Zea Mays
aaaggatcttggaccacttcattactttcttgggattgagattgctagatcgtctaaaggaatcattctctctcaaaggaagtatgttcttgatctattgacagagacaggaatgcttgggtgttgtccatgtggctcacccattgataaaaatttccaaacttgtgccgagtcaggtgaccttgtgaatcaagaaagatatcagaggatagtggttcggttgatatacctttgtcatacgagaccggacattgcttatgcagtgagtgtggtgagtaggtatatgcatgatcctagaacaagacatatggaggtggtctataaaattctgagatacctgaagggaacccctggcaaggggttgtggtttagagcgaatcaacacctgaatctggagggttactgtgatgctgattgggcaagcagtagagatgatcggagatccacatctggatactgtatgtttgtg

SEQ ID NO: 6955 - DNA, 335 bp, Zea Mays
gccggatcttaactctcatcatcactatcaaccatttcatagtcaacaccatctgaaggcgcaagttcgtcattaatgtaattgccttcaaggattactaagtcattctcattttgcacctcatcctcctcctcatcaacaaccatttcaatatctacgtccattccgatagcttcggttaagtctatctcaaatcgcccttctagcccatcttcttggaagaactctccatcatatgtgtccgggtctaagttataatcttcatcgttaggaacaggtaatctaccgtgtggtgataccttatacacaatatcccaacccttaagatgttcttt

SEQ ID NO: 6956 - DNA, 711 bp, Zea Mays
tcagaagattccagtctgctgctccttctaacaccttctgccacctcaccttccataggtcctccttttttagcaccagcaatcttgctaggctcctcagcagtactaagatgcaatttctttttctcttgggcaggggaaggaataaattcatcatccttgatgaattcatccaactcctgagaatccaacaaatcatcttcactatcattgaattcctcatcctcattaccctgactatcaaggtaacctttagttccttcggaacctttccccattttcatactttcagattgttcagacaaggatcctgcaacattggcatgactggaggataattttaagggagattttcccttaacatccttaccagaatcctcatccccacttttggcctttttagcatatttgccaagagagatgtcaccaaacccttgtctatcaaccgaagccctcttatccagattaacagaatcatcattccacccttcatcagtaatgttgtcaattttaaagaaaatgtcatacagaaaaggtttgaccccaacttcaatgatgggggggatcatagcaacactcttcacatgaactttgaacctcacaatttctttagagtttaaagagttaatatccacttcttccactgccccaatagtggaacccaattcacaaatggcctggtaattttgaagctcttccggcacattctca

SEQ ID NO: 6957 - DNA, 546 bp, Zea Mays
agctgtgaagatcacgggtgcgaagaagctagccaaagccattggctttgctaaacaacttggatacccttccgggtccaccatctttggggagggtcagacgattatctatattactgccgggataatctagagacagaagtgtgccgccacatggcgaacaatattggttttccgatgctagatgccatgctttcaaccatgtcctccgaaaacttctcggactgactctcttacatgcatctgaaggtaacttctaatggtttgattctaagctttgagttatattgtaacaatagttagttaacttttttgacttctcataggggttgttctgtagcaaggctctgaggaacaagagaaatgttgagggtgaagctgcctaaagggagataattaagctcaggttcaaagtgtctgggctttggtttgactatgaagagaaggagaaatcttttaagattgtggagaaatattttattgaaattcgaaccgaagttcaggctacatctaaagatcaaagcaaactcaaggaaataatgtgga

SEQ ID NO: 6958 - DNA, 838 bp, Zea Mays
ctgttacctctcaacagctttttcatatggtgcttcattctcccaatcaaatgaaataaaagttgttggctctagcctagcgtcttcatgtttagtggattctagtgaacttgaactggtgttcccgcttatgacattctcttcaagctctgattcaccatcactgtcagactcacgggttcgcttcatacaaaactttcccttggattgatgcaaagagacttcggatttatctgttatagaagactcggatactcgatgaagattagactgcatctgtatccaccggttcaaggttggatatctacaaacaacttattggattgttaaaacatgaaataggttagcatgtgatagtttaaaatgcctaatcattacctctctgattgctcaagagcaaattcaaaaaatgatctctcagtttctggagcttgtgttgaatctttcacatgagtaaaagatgattcattgtccccagatagtatgctgcttccaaatacacaggccaaaactgctcttactgaagataactgggctaaatgcttcactaaatttaattggagaggatagaggggttcttgacgagaagacaaggacgaatcatgtgcactccatccttgagcaggagaagacttggtgcatagtctgttttctgaactaatattacaaatggtaggtatgacaggaatgcaagcccatccttgtcctgttcgtggaggtaaaacaggtggcacacatgctgatataatctcatgcacaaaatcaacactcattgtgtcagcaacctttgctgctgcatcagtgcttccacgctcaaaaaccagacgagttaatagct

SEQ ID NO: 6959 - DNA, 359 bp, Zea Mays
tcggtgtgaaagattccaagacatagggcgcccctgtcacggacggcggtttggattcctgaaaacccgagggcttatctgcaaaatgcacaggccgaaggggtgtgagttgtttctggccgcacgatctgatttggacggtgctgattagatggcatcaacaccgaaccggtatgcgatcatggccccaggattccagatcaacggtcggatcgcaataatgaagggcgcggtatcgttgtaatctggagcgttcatcattcaactaacggtccatgcctatcctagccgaaagggtacgcgagatcaatttgtgccgtccatccatcaaacaacgacccatgcgttctccttctccc

SEQ ID NO: 6960 - DNA, 591 bp, Zea Mays
aggaaaatgaatcaatactttactaacaggtaaataggtatgagaataagtgaagggagtgcttcatttgaagtttggctgaggaaaaataattttggcactcggctcaaaaaggatcaccaaaaagatgaatatgttgtgtaacaggtggctagagtgttggatagttgtgaaatttggcatgtgaggtactagtagtagctggagtgtgctggaaaaaattggggttgatttgagctcgtttggctagtttaggcatttcaccgagcacttggtgcgtggggtttgggttagagggtgaaatggccgttttatgtgctaaaacctccctagggagctcaatacctacatgggaacattactagaggacatatgatacatttgcccacacagatttcacaagtttgcacatgatttgagaattttgtgaaagggtgtgaggtgtgcttcactggataaccagagagagatagagggaggaggagagggtgaagctcaccacagggaagagaagcacaggcatagaagctagaacagctcgccagagatgagctgacggctgcgatggacgccggtgagggcaggtcggtg

SEQ ID NO: 6961 - DNA, 376 bp, Zea Mays
cccacctagtcagatagtccccaccccatgtctcgctccccagcaaccgactgcacgattgagccaaccctaatttaatccccacgaccgtcgccgcctgctcccactatcaccgtcgtctgctcccataatgttcgtcaccagtgagtgcccccctccccacgcgccagtctacgtaacttaccttcaccttcgccaaactccgagcgcggctacattgcatccacgacgctagatccgtctttgtaactggttcgtccaactacctcgttttctgttcaagttatcttcaatcttgtgcataatccagcaatggttttgtaactattccccgttttgaccgtatagcatccccaactccgggctcatatcctcg

SEQ ID NO: 6962 - DNA, 573 bp, Zea Mays
tagctagctacacaaccgcacaatccatgcatccacccggccggccggtacccagcccagatgtacttgcgatggcagctttgttgtcaccggcacgcactggcaatagtagaacgagtcagcgagggatagattgaagaattaatggcccacacctccactggacaactgctatatactaggataacagagtgctgttcatcaatggatccaaagaaacgttctaactcgtaacagtattcacatttccgtctctagaccaactccagcaacgccctatactcggctacacgttcgtattctgcacgcccgaagccactattccaccctccaacagactctgtaaaccacagtgcaaaatgggtgtgcattttttcattccgtatttctacggtgtctctctcctctctgcacaagttaaaaccggagcatttaaaaagcgggacccaactgtcattgagatgatggggatgcggatatggagtctgttggacgaccgtgcaatatattgagcatgttgtcacgtaaaataaggatgcggagagagattctgctggagttaattggtcaggt

SEQ ID NO: 6963 - DNA, 714 bp, Zea Mays
ttatctaacattttcagctaccatatcccacatcttgtaggtgttaaggttcatctcttcaacgaacatgattttacaccgctggatggtcggaggagggttttcgaagatccacctatttctgcatttccaaatgcaccacatcatcatgataattgtctccatggactagggttgtgcgaattttcttcacatactacggactgcaatgtgtgggctcaaggaccgagttggcgtgatcccgaccatttcccagcatctcttaggctcttagcgaagctacatttcaaaaatagatgatcccatgtttcctctttccgacgtatgcaattttcatatgtgtaggagtctagatccatatttcttttcttgagcactgatttggtgttcaatttgtcatgcaggagtagccaaaagaacattttttgtttaggctggcggtttgttttctaggtcagagcgctgcggggactttatgcatgagttcatatatcttttgagatgagtacttatctgcaacactagcgcatctcaatttgtctggtgcgttcgttagttctgtgttatgaagcattatgaccagtgaaaccatttgcaagtaagcttgagcagacagtgatagatggaacaaatccttaaccaagggtgtcatttttcttgtctttgagttatattcttgttcactgcataggagaaaagctctgggcacattac

SEQ ID NO: 6964 - DNA, 673 bp, Zea Mays
tcaaaactctacggtaccgattagattctcgctaccctgaaccggtactccatcgtggctcttagatccgaaatcaacggtgcggccaattctcaaccgaaaccctgtaagcaccgcccgatcccgggccatgactgatcgcagcgaaggggtatgcagccgatagttcccagtcctccgattacatttctacggaccagatcgcccctgcaagtgattagtcttcggaacaatgtggaccatcccctcatgaatcaatgccccacagtgtttcttcccaagtgtgacgcgcgggtgtccgagccgctagccgaaggtgagctcgccgccgtgacggtgaacaacccgagccctcacccagcttacgcctaactaaaccccccacgcttcctatcacacattcagagagggaaactgatcatacctcctatcgagacgaaggcgaagctggcgcgcagatccctagcccgcaccgcgatggaaactctagggtttcccgacgccgagtcgctaagccgcctctgccgccgcaccaggaagtcacgccgcactcggacacttagtggcctccaaccgaaggcgagcagaggacaacggccggcgatgtgtacacacgctctctctctcctccgcactccatggcgacgactgaaggtctcggcaatggcgcttt

SEQ ID NO: 6965 - DNA, 653 bp, Zea Mays
tgaccaccggaccatgggacccttcggtcagtgagcgcgctgaggaaagagcccctgatcggtggggcctgttagtcagccgcaagaggcaggcacgctagccctggaaggactatcccccagtcaaaccccatggcaccgagactagggtagggtggtggagcctgacaagggaggatgggcgtgtcagaagggaaccactcgagtggatcccgcgcccggccgcagactgacctgccataaatgactgaccgcgttaaccacacctggcaccgagctacagtgtgggtgtcgatccgcttccacctcatgacctacggacccctcaggctgcataacactcatgacctacgagcccccgtactatggcgcattaatggcccacgcgcctctcagcctacgacgcacttatggtctatcgagactagtcttgagtgcgcaaacctccgacaggacactaaagaatgggccgcgtagagctctagactacgaaagccaagggtcggcgtagcccaaatgatggcgcacgggaccaatgtcacccccacgtcacccaccacaataaatacacgacatccaggcagccccgagccccacgagtacgcgtggcctcacccaaggtaaaacactagttttacccctgtcttatggct

SEQ ID NO: 6966 - DNA, 530 bp, Zea Mays
cttgttcttgatggtgactgcattcaggtctcggtagtccacacaaagtctcatacttccatccttctttttcacgaagagcactggggctccccagggtgaagccgcaggtctgatgaatcccttttgttgaagttcttcaagctgcttcttcaactcagcaagctctggggctgctaaccgatatgcattctttgctatgggcttagttccaagaactaggtcaatggtgaactctacatctctttctggaggcatgccaggtaattcatctgggaacacatctgcaaactcttggactactggcacatcttcaggagattcggcttggatgtggtttaccatggagtcgggaaggctaggtttgattaggcaggtgactgttatcccttggtggttggtgattgtcactgctttctcggcacaagctatggttcctcggtgcttggtgagccaatccataccaagtatgacatctattcctttggaagcaaggaccactaggttagcgaggaatactaccccactca

SEQ ID NO: 6967 - DNA, 697 bp, Zea Mays
ctgactgcggggtgataaaaccggtcgtcctcatctttcttgtgccctctgctccgttgaatttgctctagcctggccaccagagaccaccatcgctgccgtgcgaagtgagtttatgagtgtcgccgcatatcaccttgccgctggtaccacctgtgcccgacccgaagggactcagtggtccgccagggtccgttgaaggggcaggggccattggcgagcttggaacccgtctgtggtgcgcgtaattcgttatcgtcgccaggcgtggccgcggtgccgcaacgtcgcgcgggcagcgctggtaccgcaccacaccaaggtaattcgagccccatcatgttcgccgtaccctcctccacgttatgctttactgaattgaggaatagcgtagccgagctctaggaacgctgcgtagttatggcgccgccgtgccggagctggcgctccgccgcggcttgggtcgggtatgagcgaacgcgccaggaccgtttgatcgtgcgtgtgcgggcaagattaaaagtggcttaccgcttcgcttgtaacgttggatcggcgatggatggataggattagctccctgtttcattaaatcttggccgtcgatctcggatctgacgcgatgggtgaaaccagttgctgcttggtgtggatctaatctcggccatcgagtaccaatcggacggccagattccca

SEQ ID NO: 6968 - DNA, 565 bp, Zea Mays
cccttttccagcccagtgctattggttcgcaaaaaggatcagtcttggcgcttttgtgtcgattttagacacctaaacgctctcacagtgaagaggaaatacccagtgcccattattgaggaattcttggacgaactgcaaggtgccagttggttttctagtttggatctgcgcgccgggtttcatcaaatactgctccaaaatggcgaagaattcaaaacaacatttcagacacatagcggccactatgagttcaaggtgatggcattcggtctgaccggagctcctgccacctttcaaggtgctatgaacactacattgcaaccagtgctccgcaagtttgctcttgtctttttcgatgacatcttgatttacagttcaaccctagaaaaacatgtggagcacctgtctgcagtattgtctttgttacacaaggatgcatggcaagtcgaaatttcaaagtgcatatttgccactcgttccattgcatatctaggccacgtaatcagtgcagctggggtgcaaacagatcctagtaaggtcacagctgtggtaaattggccag

SEQ ID NO: 6969 - DNA, 511 bp, Zea Mays
gtgttgtggcccttggtccgcaatgacattagttcactaagtgagtgccatatagttgggtagttgggttctcttttcctgctctttccctttaatccatctatgcttacctcttttctttctctacccttttcctcttgtacttgcccagttggcagagtccgagtcgaatcaaagaatctatgtgccaaccttgttttcttgctattcttcccttgaaacacaataccatcaacctattcatgtcaaaatacaacaccatccttgtttcacgctagctggcactccctttctgatataaatgtctaaatgtccttgtttcatattttctctttgtatatatcatgaaccgtgtgaaaccttgtctcactctcccttttccccctacctagatgaggaatcccagtgaagataaagtggatgaggtcaacaacaagatcccaacctcaacagtggtgaaaaggaaggatgagtcacatagtatctgctgaatggaatgaagaacaacaag

SEQ ID NO: 6970 - DNA, 511 bp, Zea Mays
gtgataataggttaatgagtgtgggttgggttaacctcccttgctaacacctgaggtgttacacctagatggttgttcattgttgttttggtgctcgtattgtaggatgcatggtggcccatgcgtattttgctcgggactgttgcgaaaacgatttatagcaaaaaaaattggggacttttgctcggatacggtcgtcataggtgacttcgcacctttgggtgtttcgcgcatttgtgctgatctggatgcacccttgggtgacttctacacggatatggtcgttgttagacgacttcgtacccttaggtgcctttgcacatttattgtgttggtttggctacacccttaggggacttttgcacagatatggttgacgttagacgactttgcacccttaggagtcttcgcatattttttgtgctagtccgactacacccttaagaaacttttgcacgaatatggttgtcgttagatgacttcgcaccctaaggtgtcttcgcacatttat

SEQ ID NO: 6971 - DNA, 707 bp, Zea Mays
ggcaggtatgggtgctgaaacaagagggcagaggacatgaacggacctgaagtacactggccacggtgagatcctttccacggtggtggaaaccgatttgggggaatcacgaattggcgcgctctagtgggcaatcgaaggcacgagttgctggattaggagcttgactacctagcggagctgggggtgtgcacaatttatagtgcgtttgagcggtggctgatgaattggacggagacgcgcggtggccggagaagaaaggggtcactggcgcacaagattagtggttttcaccgtggcggctctccgacgatcaccggatatagacgacccgagctattgcgacgtggttaaaggcctgaggcatggcgcaatcgcggtgaacaacgcggatttcggtgatggccgtaaggccacgtcgccagcacaaatgaccaagggacagcacggccacagtgtcctggacctatccgcggcgtgatcctttcaccgacgagctcaatccacaaacctgaagcacgaattgtggcgagcaggaccaatcacggcgaagggtcaccggcgacgagatactctgaacctgctgatatttgtgtgcattgtaccatcatgatagttcatcagaacaactgatagagcaggtttggggtcaatttgctccatattttatgtggtgacccaaccatcaccctgtatcaaagttgaag

SEQ ID NO: 6972 - DNA, 693 bp, Zea Mays
cttcatgtttacaacaaagagagtgggagaaagaatgagaaacaatcaaaaatcaatgatcaaaagaccatgcaacactcaattgctctagccgctatgtctcttcgacaccaatcaacaaaatgtggcatgaaaatggctttgaatgcgtggaaatgttgcacttaatgtttggaagttgggagaggtcttgtatcttcagtgtgctggttggagggtatttatagcccccgccaaccataagagccattggagaaaagctacaaaaactgaatagacgggtgatgcaccttaccgtgaacaatacctttccgatgcaccaccagacattgtatagtgtgttggcaggtaaccgttatgattttgcagttatctgttggtcccttgtcagactgtccggcgaaccaccggatagtctagtgctccctcctccaaaaaatcccaaagctagcatgttcactataattcacactggacagttcgatgacccattaggtgttgagctggttcttgattgagctaagtccttggactaaacagtctggcgtgccaccagacagtccagtgatcctccggtgcaattgtccagcaacacaattttccctcttttcttcaaatctttttggctatctttgagggtgttcctatgacttagacaaacttttgtagtgacaatccaactagcctaagtca

SEQ ID NO: 6973 - DNA, 766 bp, Zea Mays
aggtggtttagagaacagattggtttggtaaaccaagaacctgctctttttgcaacaacaatcctcgagaatatactgtatggaaagccagatgcaactattgcagaagttgaggctgcagcgactgcatccagatccaatgcacatagtttcatatctcttcttccgaatggttacaacacaatggtatgtctatattttttcgacatacatctaagtctggtctaataaattaaatactaatttcttcattttttccatccgcaggcaggtgagagaggcatccagctctctggtggtcagaaacaacgtatagcaatagctcgtgctatgctgaaaaccccaaagatcctgctcctggatgaggctaccagtgcattagattcagactcggaaagcattgtgcaagaagctttagaccgtttgatggttgggaggatgactgtaattgttgcccaccgtctgtcgacgataagaaacgtgaacatgatcgctgtgatccaacaaggccaagttgttgagactaggaaaataaaatgtttgcatgtcatatttacttgatatgagacaatggatatgaacgggggttgtggcgataataacttgagtttgaattacatcacatgatgatgccttgtatggctttttagcttgcagttcacattgcatacttcattcatgttcataacaattactttatagtacgacctatggatctttaaatgtgagcttcacatttgtcaatgtcagatgtattcaaggtgat

SEQ ID NO: 6974 - DNA, 720 bp, Zea Mays
cgagtttgggtcaccccagaatggagttaggaatttgctgtaaaaaattgagctcaaacggagcaccgagcgaaaagttacgcccgttttatggaaggtacctcaaattatggttttcaagggcacaaattggcaggaaccgtagcggcggctatagagcataggggcaataggtaagcgccagatgatgaaacaaggaggggctgcaatgcaatgcggcttgcaacctaatctagggctagcgtggcgagagttcgcacaaggcggctagtgagggcaaattgagtaatgtggtgtctcgacttgtaatctgggaaaggtggatgggatagcggcgaaaataaataacagcgacggagcggttgaactacgatgacgacatgacctaaaccagcaacaagactcgacatggacacaaactcaacaaagcaatctgaaacgaaattgcaaggctaaacagggttgtaggacagcggaattttttttgtatggcaattttctggagttataggaagaaaacataaactaaactagggtaatcctaacggtaatacctgaggctttgaataccaattgataggaacaggggtgcccgatcttccgtcaggtgtagataactatcgatttggtggagatgtcacacagacaatccagcttccaatcaacacgactagaaccccacaattgcagcaccacttctcctctggtcatcaaccgtgc

SEQ ID NO: 6975 - DNA, 522 bp, Zea Mays
ggaaatcccaaattcgcgagctctaggggatgattcgaggcacggtttgctggatgaggcgcttgactgcttaacggagccgagggtatgcgcaatttatagcgggcttgagcggtgactggtgaattggatgaattgcgctggcgaccgagaggggaatgagtcacggcggcgatctaccgtggcaaccgcagggcgactgaactacggcggtcattggatggttactacggctcatactgacgcgataacttccaaagacgtggcgtccttacgatgaacggcaaacccgccggtgagtaccgcacggccacgtcgccggtgtgtactgatgaacaagcaagcccacagtacattccagcccatccttagcaagatttttcaccccgtgatcgttatccgtgtttgatttagcgtgaatcacggcgttagcacgaatccgcgcttggggtcgccggcggcgaggtctctgagttggtgatccaatccagttcctgtaccatcgcgacacttcatcagaac

SEQ ID NO: 6976 - DNA, 702 bp, Zea Mays
gttggatcaagcagcactaatcattaagaagtgtcatggacttccccttgcaatatctgcaataggtggattcctagctaataagcccaaaactgctactgaatggaggaaggtcaatgatcgcatcagggctgaattggacatgaatccggaacttaggagtataaagacagttcttatgaggagctatgacggtttaccataccatctcaagtccgctttcttatacatgtccatatttccagaagattacaaaattaagcggaaacgtttgataaggagatggattgctgagggttactgtagaggaatgcatggcatgagtgcagaagaagttggtgacagatattttgaggagcttttggataggagcatgatcctgctgttggaagaggacactaagtatggtggggccattgattcttgtcagcttcatgatatcatccgtgaaatatgcatactaaaggctagggaggaaaaccttgcttttactctggaggaagggtgttgtttgagcgacgcacaaggtacaatacgtcatcttgctataggcagcaactggaaaagagataaagatgtactggtggagagcatgctggacttgtcgcatgtgcggtcattgaccgtgtttggagaatggaaaccattttttatttctgataagatgaggtttctcagagtgctcgatttgggtgatacatt

SEQ ID NO: 6977 - DNA, 1950 bp, Zea Mays
aacgaaggaatgtcaaccagggcagtcgaagaacatcgctagggattaattcaacaccactagcaggcatcagaaccccagcatccggtacgccgacctctaaggcaactccctcatccgaagcatgcgctgctattatgccaccagagtgtggtggagaagactcgacgtggacatccatggaggtgtgagaaggggagctcgctcggacaccctcgagggctgggttgcagctcgcactgcttatcagagccagatcatcaccggtaacaccctcgggggctgggttgcagcttgcgctacccacccgagccggatcattaccggcaacaccctcgggggctaggcaaccaccagcaccacccttaaggactgggttctctacaacagccacctctaaggctgaaggattctcagtcacctccatggaaattgagcgaccttgaccaacctcttggctccgaagaccaccttccaaggttgacgatgcacgagatgctgcccgggatacctctaatcccacatctggagtgttagagcagacgtccatcatatcaccatcagttggctctaacagcttatcttcaggaacaacatccccaagagcttgatcaaaatttgctatggataattcttgcaggctaacgagggtagacaaagctggagaaggaatatcgctatccccccactgactctgtaacgccgactgttcttccaaatcaatgggacttcctcttcttcttcttcgtcctcgtcaacaatacggacaataaacggcgcagggccacacccattgggattggctctagcagggtcacacccattgggatcagctcttgcagggtcacacccattggaatcagctctggcagggtcacacccattgggatcaactctggtagggtcacacccattgggatcagcatcagcagggtcacacccattgggttcagctccagtaaagatttccaccggtacttcagcagcaggagcagaagggccagcaccctggtctagacatgatactcgccgaagccgtctcttcttcttcttcccctcggcaggtgcagttggatgactgacctggcagagacgtttcgggcgagtaccctcaggctttcgggtgtccacggtttcttcaagctctagaatagttacaatagccattgtttcagcagggaccgagtcagaagaatccctagccaacatgtccagcatagcactcatctctgcatcacctggactcgtaggcatctcaaagtgaacttgcctctcatcattgggaagatcaccaagtgaagcaaccaggacctcaatatcttcgagagagggtcgcactctaagacccaaaccactatcaccggcagggggattggacacaaaatcgaaaaaggacttagaaggtggcagatttcaagcagaatatgcaacaggagcaccaatatttgatactttgcccctcaagatcatctccagtcggctcaccaaatccacagcaggaatcctcttgttggtaacccgggttgagtcggtaacaccactatacaaataagccggatatgctctgtccttcagtggctgaatattcttaaaaacaaagtctgcaaccatagctttagcggtcagacctttctccttcaacaaacaaatttcagcaagcagaatcttggcttctgttatctccaaggctgtaggagagtcaatccaacttggagtgcgaacatccggctgtctccctgaccgatgggggagggacttgccatggttttccacaatgaaccactttaagcgccatcctttaatgctatccttaagtgggatatcaaggtattctgttttcctcccacggcgcatctccagactcgcaccgcccacgagctggtgctacccccagccatcccaggatgacagtgatacaaatacttccacaaaccgaagtgaggaagaatt

SEQ ID NO: 6978 - DNA, 641 bp, Zea Mays
cgggatatagcggcagtccttagtcctcagtcctcatggatcagtggcatgcagttgagcaccgaataggttgttggacttgggtctctaggtcatggaatatggtgcagcacatatgcaaaagcagaataaaaatacgggttcagagatacatggagatgaaacgtaagtcggaatctaaggatcccgcaagtcgtaagcattgattccgcgagtaccacgatttgaaagctcgtgtggtcgtgcataacctactagcgggctggctttttagcctttcatgttctttgtgctaggtatagttgtgctcttccaggactttcatagtggtcaccttccagtatatagtctaaaaattggcacaatcatccttttaccaaaatgtaaggacgctgaaacaattcaacaatatagacatatttgtttactcaacataagtttcaaaatctttacaaaggtaattacaaatagtataccttcttttgcttcgaaattaattagtccaacccaaaccgcttcatcccagggcgaaatatcatggagggggtggtagtgttacatgagacgatatatgaacttcataaaaggaagaagagtggggtaattttcaaacttgattttgaaaaggcttatgataatgt

SEQ ID NO: 6979 - DNA, 320 bp, Zea Mays
cggaaactgcacagcgcctccaacaaagtctccaaacaaattcccagtcccatccccggaaccgctcgctctatccctctcgtcagctccacgatctgcacgtctaccaactcgctcactccctccctcacctcaactccacgatctgctcgtccaccagctcgcagaggaagataaatgagggcgtttgacaacggatccgagggcgcaaaggaaggagaagcaatcgggccgagtccgtcaccggagatcaaggagaagacgattatgtggcgattgtcgctgggttgcttcgttgtggcatcgaagctgacggtgag

SEQ ID NO: 6980 - DNA, 645 bp, Zea Mays
gcggtaccgggtagcaggtgtatgcggtggtcgtatgggcgagccgggggcagccctatgggctcgtcgaagatagcgccatgctgccgaaggaggacgtccatgaggggctgctgagcggcatcagagatagccgcaacaagttgttgaggggcaggtggccgtgaggcacgcacgccctgctagtggatacgttggccctggtgcaggaacgacagggtcagctcccggaagttccactagatggtccccagcgtctttaagaagtccacacctaggatgaagtcgaagcagccaaggtgcatcctgacacatgtgatggagaaggccttggagtcgataacgatggggacgtcacgggcaatttctgtgcacggtaggcggtcaccattagctacagtaaccttgaggtgttcaccaccctccataggtagcccgaggcgacgcattgtgtccccattgaggaagttgtgggttgatcccatgtccataaacgccaatagtcgctccccttttatcatgacggaaatcagcagggtcttgtccgcgtggatgcccgcgagggcgtgcagcgaaaccaccatcgtgttggccctggcagcgtcagcaaccaccggcgcctccaggaggtcagcgttctgctcc

SEQ ID NO: 6981 - DNA, 365 bp, Zea Mays
cgagcttggagatgcgtcgcagaaggaagactgactacctcgacatcccactcaaggacagcatcaagggatggcgcttggaatggttcatcgtggagaatcatgggaattccctccccccacggtcagggagacagtcggatgttcgcactccgagctggaccgaatcccccacagaccaggaggtggctgaggcaagggttctgttagcagaagttggattgttgaaagaaaggggtttgactgcagaagctatggtcgttgactttgttttcaagaacattcagccattgaaagacagagcatatccagcctatttgtaccgaggcttggctgattcaacccgggtgaccaacagaagaatt

SEQ ID NO: 6982 - DNA, 889 bp, Zea Mays
cgaagttattttctctactaatccttaagacgatactgtagaccaggcataaacgtgcccccgcctctatcccgaccgtccgattgcgtccatccccaccgtccgattgcgatgccatcctcgcttgcgagtcacgcctagcgccggatctgctcccacaaccgcttccatcccggccatgcgcgcagccgcctccttccacgccatgcgcgcaaccgcccccttccccgccatgcgcgcagccacccccatccccgccatgcatgcagcctcccccaaccccgccatgtgcgcaggcgcctccatccccacaaccatgcgggatcctcgttgccgcccccgcatgtctagtgcctaaggagcatgggtcacacatgctcgctgctgcctctcgccctctccttcctctcctcggcaagtgagataggtatgaaccaacgaggaagagcacccatccccactgcgcatcttcgattcgattccgtccccttgcctcttgcctcttgggcgtctccgtggctagatggcgtctccccctcccttcgacctctgcggcgatctcaacgacgacgacatcgatgaacccgtcaccaccgtccctaaggatcgtcgtctccctgccgccacccctacgatgaacggcctcaacgaccacctccttcgcttcacctgcagactccagcgccccgcccaaaaccctaaccctagccccaatccgccaccgtctccgcccccaggtactgtacgaccttctcttcttgcttcattgtttttcctcgcccttcaatctacttaatggttctaatttcttccttcgcaaaagccaccgccgaataacaagtcaagaaggtcaagctagatggtgtctccgtggctagatggcatctcc

SEQ ID NO: 6983 - DNA, 372 bp, Zea Mays
acaacagagcggatcatattgctgacgcaatcaaggactgacagaacacatgtctagaacatgggggacacatggagtacgctatctatgagggtttgttggttgagcctcaaaaccacccagcgatgatttcaaaaccttggcctcaaaatccaaggcgtggttccaacgagaattggaggtggcacatagagccatcacgtaggttgcgtcaaggtgaagcaaatccatgaaggagcatggccatcatatttacagcttaggagttggaccattatgcccctagctaagtggtttagctctaaaaataactagagatatgttaggaatgtgtaatagcttctagaattaagcggagggctaccccccaag

SEQ ID NO: 6984 - DNA, 533 bp, Zea Mays
tcgcagcgccgcatgcggctttttatagacaagggaaaacgcctcgggaactcaacaatcccacagtaaaatgtcaactttcaacggttatgtttcaaaaacccccgcggggccacttcaaccgagcgagggcagtgtttcggccatctctcgacaaagacttcggtaccagctcacttagtcaaactggccccttagagggcaagtgttggagcgaaggcgtaccgccccctcgctcgactattttgggacatggataaatcatgatggaggaaaagcgaaggcagacgaagactaatggagcgaaggccctgagacggagggagtgtacgaagcaggcgacggccttgtcggtccccattagagccaggaacggtgaaggcctcaccgactaccgaagacctggcgcatggagcacgaaggactctgtcaccacccgcgcgttgttgagacggtgggtccatgtaaaaccgctctggcccgcctggtcctacttgcaagccactatgtgggtagagttaatggtgtgcccg

SEQ ID NO: 6985 - DNA, 898 bp, Zea Mays
gcgggatggcagggctctgctaagcgacggggctgcaggcacacatgacattccttgaacaaagcatatatagaggtttccatggggtcaatgataatgtacatctattgaccatcatatttagtagataaataatttttatttcatgtgcagaagtgccactaacagaatatgagaaattgagagctgagaatttgatgaggaataaccaaaagttgcaaagacttggtgtcactacactagcgtcaatacttaaccatacttctgcaaagagcaaggttgacactcatgaaaaatctggatctttgtatgaggtccaggaaggtgaaggttctgaagatgaggaagtcaatcaggtattatttttcgtcgcatgtagatatttcttcaatctaattttcttgtacatttcagcatacaaatttgctaatttggttcatattttttccacaagtgtgcaacaaaacggagaaacagattaaagagggtcttggcacctgcgcaacaagatgaacctacaagatttactaggcataatacaagggatttggctttaactttcagtccagaactgcaacaagtcgaaaccttaggcctctctactatcacatccacccctcaacaggaccagaacaactctagtgatcaaagcaagtgattgtatctaatttgtgcaatgcaatctattttcattttgttttcatacaatgattagttacatactatcatttgtcatattccttctggctagattagcaatatcatctttacaattccatgattacaattcttctggcttcattatatacataacctgattgtgtgttgcaaacaacaacttaaagattgacactaatcgattaatatgatttcattaggtgcacttgaggcaaccata

SEQ ID NO: 6986 - DNA, 585 bp, Zea Mays
cgcgcccgaattcgcgccggtcatcatgattcatgctcgacgcaaagtggataaccgaggggagtaaaagatcttggcgcccagataagctcggacctggtcactggatggttcaccgtacccacttgctctatggccggtcgtgataatcctcgccggcattggtcgcctgccacccatgcgccacgtgcctaggagctttaccacgttgcagtgaagcgtagtagggagtccatccatcgccggaggctttgccatggtgaaagccacggtagtgcttgcgccagtgacctcccctctctccggccgccagcacttcccgtccaaattcgccctcctcactgtcgtcctctataaattgatgccccggcgaactccgttaggttattacgcacccagcgcaccagctctcacgcctaatcgtccaccatagcaccttaattcgggttttcccccaaatccgttccccgcgccgccgtgtgtagctctttcgtggccagcgtcgcctgaggtagttctttgttctagcttccttagggtgtagtgatgctccccgtacttagaaattgaacgctactgcaccca

SEQ ID NO: 6987 - DNA, 664 bp, Zea Mays
aatcctggcttgccatttctccagcggagtagaacctcttgtctcatttacccaaatatcttttaccatatccacaaaaccatcccgcagaaaccatcctaattctaacttgaacggaggaattgtttgggcggttacaactcctgtgctaagaagcagaggagtatgatcggatatatttctcgacaaggcatgtatcgaagctctagggaattttccctaccattatgtagctaccaaaatccgatccaacttctcataagtcggattatccctagtattagcccaggtgtaccttcgccccaacatatgcaattctctcagatcaagaccatcaattaccgcattgaataggaatgaccaatgatgatcaaatctatcattatttttctcagatggagatcgtaaaatattaaagtctcccccaatgagaataggtaaagtttctgtattgctcaaacggactagctcagaaaggaattcttgtttgaagcagtcctgggcagggccatccaccgagacaagagcccaattaaaaccatctgccttatcatgcaaattaaacttaataaagaaatccccttacatgatggcaccaacatcaaagacatcaacgtcaattcctaacaacatccccccagatctaccatgaggtttgaaagca

SEQ ID NO: 6988 - DNA, 444 bp, Zea Mays
caaggagatcatcatcgaggatgcaagagaggccaatggaaatgctaaaatttcttacaggaaagtggtgacagaaaagattccaaacggaggggagaccatgaagatcaccatcacgacctcgaacactagggggtaggtgcaggcaggcgaccaggcatgggcccctgtcctgcacaccatggacagtccatcgcataaacgcagacggtccgagacaacagtagacagtctgtaccgatcaagcggatggcccggcaacacccaaaagcagcgatgacgacgtacctacaaaccttgatgaccagaaatagatacgtggaagacaaacacattcaaggcttccggtcgactagtcaaatttagcccgacctttggtcaattattatctagatatgtgaaaaaaaggccggcccatgtgaccggccaacaaagcgaccttgc

SEQ ID NO: 6989 - DNA, 395 bp, Zea Mays
gagaggggaagtctctaagtccataggactaattgaggcaaatgtcgatatcgaaagacttggtgaaaaactattgagtcttcacctgcccctttgaagaactacactgccctatttatacacctaggagatgtatgctgtgaagcctgggtcgtcgtattccaaggggagatgtcttggtgtcatgtgagtgatatgacgatgcaccgcattgttgacttgtgcccgctaatttcctgctgagagccgagggcgaggtcgaggggttggtcgtacgcccgagaccctaggagaggggtcacccatatcgtagttgttgcaacaacgatgtggtatgggtaaacacctgcttatggggtgcgtcagtgtccttgtgctgggtgatgccatgattc

SEQ ID NO: 6990 - DNA, 1247 bp, Zea Mays
tggtggaaggccacaggacaggatgggagaatttttgagactcaagcctcccacgttcgcggcgtccaacaatcccctcgatgcagatgactggcttcgcacgatcaagaggaagctggaagccatcggatgccccgaaaatcagcgtgtccaactggcagctcatcagctttcaggaatggctttagcatggtgggacactttcagtgaggccgttagagatgctacctgggcagaattcgaaacagccttccgtgagcaccatgtaccccaggggatagttcaactcaaggaggatgaattcctggagttaactcaaggcgggagaacagtcagtgagtatgtgcacaagttcacagagttggcccgttacgcgcctgacgatgtcagcaacgagtccaggaagatggcccgttttctgaaaggactaagacccgagcttaagaccatcctcgccagccaagacttcctcaacttctctcacctctccaacaaagctatccaagtggaaagggcaaaagaggaagaaaaagggcacctcaagaggaaattccaagttctccgagctcaacaacaagaacgtcaccagagagctcgaccttttgggctcccacccaggggaccaagctttaataaaccatctggacccactccatcgcgctatagtcagcagagtcagagctcccttcagacaccctccgttgcaagcaaccaaccgccagcaaatgtctgttggcactgcggagaccccagtcacttcaagaataactgccctcacttgaaggcacccggaccgacctactccaactcggtaaatggccccaagattccctcggcacctacctccaaggcacctccttccaacagccagcagagcaggactcagtaccagggcagagcccgtgtcaaccacgtcgacgctcaagaagcccagcaagctccgggagtagtgctcggtgagttccttgttgaatttactcccgctactgtactttttgattcgggagcatcccattcttttatagccactaagtttgtggaaaagcatgacatcccctctacacccctagccatccctttggtcacccgaaccccgggatcggacctcctgtgccaactcaggtgctcccaggtcagaattctcttaagtggggtagtgttcctggcggacttaaccgtcttgccatcccaagggattgatgtgatcctagggatggattggctaactaagcacaaaggtatcatca

SEQ ID NO: 6991 - DNA, 481 bp, Zea Mays
aagtgcccgtgcaccttacagaaaagacagcggaaggccgacgggcccagcagcccaacaggccccgagaccgaacagagcgccaatggaggttgcgaagccgagaccggttaaaattcgaattttgaaaattggaacggtcgtgaattccaccgccatgaacttcgccaataggatcagggctcgaaaaccgaggggacacagctctccgccgagaggaagaagacgacaagcccagacgattgaacgcagagattcttgggcgagactgatgaagccctccagcggggaacctcctatcgctgtgaactggagctagattactaggagaagatcccaaacgactgaacacagacgtactagcccgagcctgacgctcaaggccaccggagaacttaatgttgttacgaatcggaatagcattagcaccagtgagagggagcttaacaatatccgcaaaagataaactcttcttgccccg

SEQ ID NO: 6992 - DNA, 430 bp, Zea Mays
ctagcggttcatagtccggcgaggttgctcgtataaacctggtctgtagagccctctgtggtccaccacagtaagatatgatcttataaacccagacctcctcaggatctctatgcaaggtatcgggcatccaaaaaagaggaacggttttgctctcagttcaactccatgtacataggatccattatcatatcctcggccaaggtacattttatctttgttcctccctctctagattcttatcttcgttgttatcatgaaatatagattatgcaaccagttttgctgctcagtttatatccccacttaatactgaacaagggcacaggttgactggtacctagtctaaaggaaaagtccacattctcgcgggtggtccggagctaggtagccacttagcctggtcccgtatcgtaagcctacaccttcc

SEQ ID NO: 6993 - DNA, 940 bp, Zea Mays
ttgactctaaagactgcactccaaggtcgacgaggcacgagacgctgctcgggataactctaactccacatccggaatgtcagtgcaaacgtccatcaaaccatcatctgttggctcggacagcaaatcttcaggaaccatatcctcgaaagcctggtcaaaatttgctatggacaactcttgcagaccaacgagagcagacaaagctggagaaggaatatcactactcccccactgactaggtaatgctgactgtttttccgaattaaggggatttcctcctcttcttcctcatcctcgtcaacaattggaacaacacacccattggggtcagcgtcggccgaattgcacccattgggttcagcatcatcaaggtcacacccattggggtcagcatcagcagggtcacacccattgggattagctccagtaaaaagttccactggcacttcttcagcagcaggagcagaagggtcggcatcctgattcaaacatgacactcgccgaagcctcctctttttcttcttcttcccctcggcaggagcagttaggtgactggccgagcgaaggcgctttgggcgagcaccatcagatttttgagcaatcaaggtcttttcaggctcggggacaattgcaatagctatggtttcagcagggacggaatcagatgaatcctcagccaacatgtccagcataacacttatttctgcatcactcgggtttataggcatctcaaagtgaacttgcctttcatcattagggagatcaccaagtgaagcaaccagagcctcgacttcttcgggagagggtcgcactctaagaccctggccactgtagctagcaggaggattggacacaaaactgaaaaaagtcttggaaggtggcagattctaggcagaatatgcaataggagcaccaatattcgacactttgcctctaa

SEQ ID NO: 6994 - DNA, 287 bp, Zea Mays
cgaccatgtgccacagtacacgaagctatggcttccatgtacgcgctccatttccgagacgacgtggccaccgtctccgggccgttgcggcggagccacgcgacgagtcacgacattaaccccatgcatatgcgtcctctctgatctttggctctcttctcagttctgaacttatcatcgccggtgcaaatcctctccacgccggtgcaaccatttacctgctgtcctgtctatctagctcagctcagcacagctcaggagacgccgccgactatacaagcagagtg

SEQ ID NO: 6995 - DNA, 358 bp, Zea Mays
agtgcgcgggcaaccagagccgtccagatagaatccaatggtcacaatacaacgcgcgaaggggtatgcgcttaatctattctcgccctccaacaccgatccaatggtcagcgtatatcttcaacctcacgtgctccttcctctctttctctctccgctatagtggcacgccgaccgtcaccccatgaagcatgatcccgtagcgacgagcgagaagacacgctaagcaaatggaacaacactacactgccccagcgttggcgaagttccatgtggccttcgctgtaggatcgttacctagtaggttgggcagtcggaccaacaatggagctttacgagttatccatgaaaccacgac

SEQ ID NO: 6996 - DNA, 1587 bp, Zea Mays
ggacggaggagtcttcggatgaggatttggattatttcgcagcattggatgtggctgcggcggagacttctctgcgtgtgatggatgctgttcccggtctgagtgttgggcgtaggcggcgaagggaggtggcgaagcgtagggtgagtgaggttgagggtggtcgtcttcgtgtggacagggctagcaagcggtaattgttggcttcgccggctggggtgagcgtaggtgagggggagttgcgaaatctttttgagggtgaagagctaaggataagctgtttaactatagggagatgggtatcatcccgaaagttgaaccaatgtaatgtgtgatgccctcgctgcacgtatgtaactgtaatttgtatgatgagtctgtgtgccttcgctgatccagccatgcccgtgggggacttgtgcatttgatctagcgcgtttattatgccggtccggctgcgcctgtaatcggtctttgcgcggatggtttttcgacgaagattttcgcacggatgtgccttcgattttgcgcacttgttgtgctagtccggctgcacccttaggtgactttttcacggagagtcttttggaaaaagacttcgatttttttgcacttgttgtgctaatccggctgcacccttaggcgacttttgcacggagagtcttttggaaaaagactttgattttttcgcacttgttgtgctaatccggctgcacccttaggcgacttttgcgcggagtgtcgcacgcgagggaagcttcgctgctcctcatggtgacttcgatgtggtcgaatgccgaagaccgtcgatgcggtctttttcgacattgctttaattttttgcgggggattttcgcgtgtatattacatggctccgcttcatttaaaacctcaccccaggaggaaaagagtgcgggccggaataaaactgtttggtgaattacaagggcgtgttagccctaaggatttaaacaaaaaatttacggagattgtcaatattccaggaatgttccaggtcttcgccagattgtgttgttagtctgtacgcgctgggagacgacttcgtcttgacgataaatggtccttcccactttggttccagcttaccccgtgactctgtccgggttgtgcggacaagtacgaggtccccttcgttgaattctcttgggacgactgcgtggtcgcgccaggccttcgtttggacttgatatttgttgagggcctggagggcgaagacacggtctctgtcgatgagatctttggaggttagctcgtcgacgtcgggtactgctgaaggtttgtccgcggggacccatgtttcatttcctgcggggtcatggactccgatccgtatagtaggcgaaagggagtgaatccggtcgcccgacactcggtcgtgttcaatgcctagactgcttcaggtagcaggtcggcccatttacccttcttgtcgtcgaggagcattttcttgattgccgtgaaaatcttgccgttggcgcgctctacgacgccgttggattgtgggtggtacactgaggcgaaggcaagcttggtgccaatggagaagcagaagtccctgaagtcttg

SEQ ID NO: 6997 - DNA, 422 bp, Zea Mays
tgggagcaggcaccggagtcggagctagtgctggcgtaggtgtaggtgccggtgctggtgtaggggcagacgtcggagctagggtaggggtcggggcaggtgtcggagttgaagacggtgtaggtgtcgtagcaggcgttggtgctagtgttggagccggagcacacattggtgctggcgtaggtgcagatgtactgggagccggtgtgggtccttgagccctaccatgagccacaagcacggctgtcacccaaaggagtaggagcgcaggtgaagctatggacttattgggcgccattgctagctagctgcgttggatgatcatgtatgccccaggtatttatagacgtcacctcaccttgggaacgggcgcgcgatcaacatgcatgtcacttgttcgattaatatataatattgcatgc

SEQ ID NO: 6998 - DNA, 458 bp, Zea Mays
acccacgcgtcatgccctcagctcacgctgctccgtgggctgcctatgggaccaggatgtaagaagctccctctttgctggtgttggtcaatccaatctactgggcgcggagactccccaaccgattcccatccaaccttccgtgatcttctccaacgatctccggaggtggttgcgggagctggggaaaactgggtcagaatcctgtcgcgctcgggcctataaatccatggtcgtgaccccttgaaaccaaaccagatcaccatggtgagcatcgaagaactgaggatgtgccaccatcgtcatgctccaggctgtggggtgctcgacattctctggggagggctgagtgcttcgacgccttcctggggtgttccctgggacacacggtcggggtccgcgacgtcacggtggcaggtttgcagaacctcaccggcggtgatgaagggtcaccgtcg

SEQ ID NO: 6999 - DNA, 434 bp, Zea Mays
cccatgggtgggaaccctggtggcaggtcatcgtgtgggaggcctttggagctatagatgccctcgtgggtaggcgggtccttaggttgggggcgctagagttgtcttgctcgcatgcattgtcctcagctgtgaggggcatgtcgttgtctgcgagggggccttgccattctcagtagagagggttgccttcatgacctcagttagggagaggccaactttggtggtgtttttcttaggagccatgggtgttggtcttcataccaaaaatgttgggcgccaaatgttagacctactaaaatgtggtcaagcgggcccaagcactcaggaacaaacgaggctcagatgcacgacatcacgttaggtagggaaatgtagcgtcttgttatgcatgtcatgtccgtgtatagaacagatgtatttgtaggtaaccg

SEQ ID NO: 7000 - DNA, 528 bp, Zea Mays
tggggtggggtgttttgtgcccatgagggagtagtgaagcttaagagctcacttaattgctctggtgcctagatagggaaaaggggaggctcatcggagtgaagggaggcggcagcgccggctccgatcgagctcgagggagggcagaagagaggccgacggccggtgcaggtttgagaggagctccgggcgctccttttataggtgcccggggtggggagcgatggccagctggcctcctacgggcggtgcacatcaacgggtacaacggtgtgcacaacagcggtgatggaacatcatggcgaggggagaggggcggtgacatgcaggtacatgcccacaacacgacggggacaaaacggtgtctaactccactggtgtgatcatcagcgaagaaggggaaaggggacggtgtccggcggggaagccatcgtcgttgtacgcccatgagggatggggagaggctgacaagcggggctaggccgtcagcgggggagagggggcatgagcatgggcacgagcgctgat

SEQ ID NO: 7001 - DNA, 532 bp, Zea Mays
cttgagcacctccaccgcatcgtcgtgaacccttgtgcctctctgtggctcgtcggagtgactgccacggtagataccatggattcacgcgcgccagtgctcttcctttcctccgaccgccgcgcgtcgtcatccaaattcccggccgcctctcttgcttcctataaattgagccctccgacagccccgcaaggtcatcacacacccagccaccaaaaatcactagcaatcgttcgtcagagagcttgaattttggttttcccccaaactggtttccgccaccgcagaaccgagctcaccgtggccagtcctccacaggtttaatcataccatccttgttcttgttttagcatctctgtgtgctggtgatgctcaccaactcgcccaattgagctaagatcccatgaatcaccgggaacgtgtagattgttagttcatccgcgcgctcaccgtggccagagacattggtatagttgtttatgaaattaacttagggaaaaccttcactaggccctgaatttggtttagacca

SEQ ID NO: 7002 - DNA, 580 bp, Zea Mays
aaaaaattatttccccttgcccaataggctaaaatctgcttacgcaggcccagtcgccggaacctgcgcaacaaccgactttaagtattaacaaatagcgaaaatattgttgcagcaatcctactcctaacattacatctacggagaggcagatggatgcaaggttctcgctgctccagggtcagtaacgcccaccgtagcgagcgatgactgctccttgatacccgcctcttcatcagtatcttgtttggacactgagctctccaggccggtgaggtttttcacctcttcgtcccacatcgcctgcaaagaccacataccagcacatcagaaaaacaaacaaaaagaatatcccccaacaacagagtaatcgcatacctacgccagcgcccggtcgaccctctctcggatgactccacggtcgtgacgaccccacattcgatcgtatagagctccagttgcacgctttagcatgtcgtcttccacctggaaaactccttggttgaagtcctcgtcactctggtcgaaggctttgaaatgcttgtagccctcacgggacaaggcattcgctaccccttcg

SEQ ID NO: 7003 - DNA, 679 bp, Zea Mays
cacggtatcatcttctcccaccagtcaaactcgcagtcaggaacggtgctcagcggcggcgccatcaccggcaacacggtcggtcaaccctcgctgccccaactaacacatgatatcgcgaaaaacaacgaggaaggtaaggaggatctgatggtggtcaacttacgggggatcgagcagtgttgaactcagtccacggcacgacggcaaggggaaaggagctcgccaccgacgaccacgccaagtccaccggtcggccactggcctgctcctgcgtagtcctcccaaacccccgagccaccgcgcaagcgtagattgcaagaggcggcgccaaattctctctcctaccctcgattccacttctccatctctctgctccgatctcagcgctctagatggtggggaagagggtcacggtatggttttatagacgaggatggggacccgcatggccggcccgcccccgagatcggcgcgttttgtgggagaatctgctgccgccatcagagacgatcacggcgatttcgacgggggaacggagcttggttctgttatgtttgaggggaaagagataaacctgaccggtgggtcctaccggtcagagagcgaagagcatgcgcggaggtaaacccggtaatcctgtgtggtggggcccaggcgccggtgtcacgtgcaggtg

SEQ ID NO: 7004 - DNA, 632 bp, Zea Mays
ccgtcgctgtggttgaactcggaatcgatcggagaagctttagcgggtctctgcggtggtggccgaagaatcggattggaagaaggatttggggcggcaccggaattccacgctggagctcggtgtccgctgctgctcgtggttggcctcgactacttcttgattcccggtaagaaaaccctagatcagttcgaggtcgcctctgaatcgtttagaattaaacgtactggagtttagtgcctcgttgggccgctttgcgtgcgccgatgatggcaccgccgcatcacggcgggtgcgccaccgctcggcgggggtttgggaagaaggagaatgtgcggaccacggtgtccgttgatctcactgggaacggctaggattagattacatcataccccttcgttcagttgaatcgtagccgtcgatccgtgatcgggtgacctagagcggatttagtcacttaaaatctactccgttgatggaggatccagcggttgggatcgcacactggttcacttgagtcgcgatttaattcgggtcgtttaaatctaatcgagtggccacgatcctcccataccccttcggttgcgcgttttacagaagaacccccgcagaattacaaaaacaacctgccg

SEQ ID NO: 7005 - DNA, 461 bp, Zea Mays
ccttggcccaagagccaacaagaccgtcagcagcaacaagcacacaacataagcaaccaacaacaacctggcaaagccccccccccccccgcccacagcaaaaaaaacctagactggcaggggagtaaggggtggcaaaggccacgaccgcagtaggggactcacacatgaccacaagttatattgtgtttgccacgatgaagacgtcagccacttcaccaaggattgtccgatcactaaagggcccggaaagaatggcaagaacaataccagatcaaccagcaaagttcatagcccacatctaccaacaacaatacccctcgctaccaagatatccagacaccatatccacaataccgacaaaattgccaccctcgtctcccccatcaagaaaggttgccccacaacaaccacaaataatacccccgctcgtcaacttccccctccgccacctaaaatga

SEQ ID NO: 7006 - DNA, 539 bp, Zea Mays
gtcaatttggccgatgggggcttgtaatggtcggtccgtggtgaggtggcgggcgcccgcggcggtgaggtcgccggcgaggcctatgggtgtaataggtgaagggaaagggtgcgctgtgttcgtggtgaagtggtgaaactcgtgagccaaaccaattggactctaggctaccagagaagggagggagggctcaccggagcggagaaagagggtggtgcgctggctcgattgagctcggggaaggggaagagaggtggccaaagctagtgtgaagaaagctagagctcaggcggtccttttataggcggccagggagggggaggagaggtggcgagcaccggcgaggcttgccgcggcggcgatgatggcgcacagtggtggcgacgggatggctcggggtagacggtggtgacaggatggctcggcacaggcgcaaggcgtcaatttggctggtgggcaagtaatgacgaggggatgtggcggagcggtggctggtggtgatcacgtcgatagccgatcacgggcgagagagagag

SEQ ID NO: 7007 - DNA, 497 bp, Zea Mays
gaattttaagcgtgcacataagaaaagtcgggagagctgagagaaccgagttaaccaactccaatctttcggcctgggagaggagagcagatgtgcaagacagtcttctctcaatcttttagataagtggtagaaagtgacggattctaggttttgacaagcccagagggacaccaaggtaggtgaaaggcattgatcctgtctgacagttgaacgttctagacagaacctccatctttgctgggcagacattaatggggtacatacttgatttattataattcaccctgagccccgtcaaagttgtgtaggagttaagaactgctctgaggaagaataattgcctagggcaagcttccattatcaataatgtgtcatcagcatattggacaatcgggaaatcttggccacagttctcagtaagaggcaactgaagtaggttttgctgtctcgctttattgataatactctgaagcagatctgccgctaaaataaac

SEQ ID NO: 7008 - DNA, 1054 bp, Zea Mays
ttctgtcattacattgggaagcaactgggaagccttcagaagcagaggtaaataaatccaatcggctcaactaaaattcggttttgtttcctcgcttctgttttcgacgacggtagcactatgaaattaatccacaaaacacattgttaatgggcatgagtgttggttacatagttatgagccttatggcatatcaccccatgtccgccggggccgacggctgcgatgcattttgtcaagtaatcaagacagtagttcaatagtgctagcattcataatggttctgcttgtatgtttggtgttagtaaaaatactctcatagttcagttagtgaattccaagcttccaactaccctttagtagtgtgcgaagagtgcaaacagaaaagcgttatcctgatgctcaaacaatgaacccattttgttttgtgtttttttctttccaaacagggattgccccccagaattcagggaagctgtctcaaccctgatatttgctgctgctcgctatcctgatttacctgaactttgtgacctaaggcacatattcacagaaagatatggaaattttgttgagcattttgttagccaggaggtacgcaatatgatgctaatatgttgttattgaattgtcttatgcttttgtggtcctttgctttacacacaatattataatttgatccttctgtctgcagttcattcggaaacttgacagtacagagttcactaatgaggaaaggttccaagtcatgcaaagtgttgctgaagaattatccgtcagttttgatgccaaggaattggaactcaagttatgggcctcactacaaacagaacatgtaagtcctccacaaatttattacctatttttccaaaacaaatttattacatgaactgtgatgtaggcacactaaaatgtccttaacttgaaatcatttaatgtgttttacactttcccttaggatatgcttgagaagggttcaaggaagccagcagaactagcaatgccttcatcgagcaagcagatatgtgtcgagaatgcttcatgtgaagaacaa

SEQ ID NO: 7009 - DNA, 1015 bp, Zea Mays
cccgtatgatgatcctgaataaggcaagagtcagactcaagaatgatacgacaatcatgatcagtgatctgaccagtcgacaacaactacaagttaagattaggaacatgagaaacagaagggaccctaaaacacaaagtgtgaagagttccatggctaagaacaaggtgggaagtgccatctgcaatggtaacaagcaaggaagcagatgatggacttaaggaacgaagagaggtagaatcatgagtcatatgaaaagaagctcctgagtcaagaatctaagcacaaccaaacctgacgacgaggcacttgatggtggccctggtaggggcacacgagcgacaactgaggagaccatagaagaagctgacgaaataacacaaaggcactccatgcgtcgagtcaggtcgagggcccaatcgtgaagagactaaggcaaggcagtggcagcaggagtggggcacctccacgacgacgtggaggacaatgcctacatttcttgatggtgtgtgttgtcgccatggagtagtggcagaagacaactgcaacattgcccctagagcaagagggaccactgctggagccgaagtagtaggagctggggcaggcgacgcagttagagcaataagaactgtcgaggaaaacgatagcacaccacgaagacggatgtcctcacccgggctaaggtgaccgcctcaaccagggatgagagaggagaacgagcgaggagctgagcccaaagctgctcaaactccaaacgaagacgtcgaggaaactcatggatgcgaagaacaccggtgtgcccctgctggaggacacaatagggacaagtctgacagtacgatggctctagcgagtcgagctagcaccacacatcagtcaactcatggtagaaggcatcgacgaggagtcctgttgacgaatagagctagcaagctctagggtggagatgtagagagcagtgttgctcggctggtaaagagcctgtgcgcgctcccacatcgcctgagtggac

SEQ ID NO: 7010 - DNA, 431 bp, Zea Mays
cttagaatgtggacaacataggagatatcaggacaagtgatgccaaggtagacaagattgccaacaaggtgacaatagcgagtgggatctacaagaggaacaccatctatggcacgaagacaaaggtgaagatccgtgggagtgtacacaaaacggtgatcaataagtctagcacgatcaaggatgtcctgaatgtatttgcgctgagagaggtaataatcatcggacatggaggtgacctcaatcccaagaaagaagctaagaggacctaagttagacatatttgaaactgcgcactgagttgtgccttgatagaggcaatataatcaaggtcatcaccattgatcaacatatcatcatcatatagaataatgagggtgcgacctcgaggtgaagtatgaacaaagagagcaggatcatgttggctagca

SEQ ID NO: 7011 - DNA, 416 bp, Zea Mays
cggcggggaacccgccggcaaccgcaccatggccccccaggtgataatttcttcccccagaaacgcgctacataatgtggaggtcggggcgaacttgagaatggtggatttaccgtcggaggtgttgggatttggggtgcccacggtgtgacgcggcttcgcggcggtgccctgacttaggagagaaattcatcgcggtccgaggcttctctatgatccgtgtttgtcgtgtgcagtttccaagcgacgcgagcgaccctccttaacaaccaccaagaggttggtgcctgcgcaggcccgaatcgaccatggccgtgattccggacaccccccgactcctacttgctcgatcctggcagctcaagcggaggtgttggtgcccaaggtgcggatggacgagggagggcacgacttta

SEQ ID NO: 7012 - DNA, 975 bp, Zea Mays
ggagcaggtcgtcataataggggagccgagtcaagccaaacttatgtgtccacatatgctgctcaccatatcccacaataccaccttctgtattggccacgagcccatctatctattgacaaatttcgacaccagtcatcgttgcaggtgggcggtctgtcactacgacacctttcgtaaagttcttgatgtctaggcggaatggatggtcaggagggagaaattgtcaatgtttattgaaggaagaatatttgccaccctttttcaaccaaatgaacctgagagcttcctcgcaaactgggcatgggaacttaccgtgaacacaccaggcgcagaatagcccatacaccggtaagtcatgcatggagtactggtaccaaacatgcattctgaagtttgtcttcgtagctcgatcatacgttcataccccttcctcccaggcacgtaccaattcatcgatcaaaggctccatgtacacgcccattttattccccgggtgtccaggaattatcaacgacacgaatataatctatctttgaaagcacaaaccagggggtagatttattgggataacaaacacgggccaacatgtgtacagggcaacgctcattccatagggattgaacccatttgtggccaacacaacacgtacattatgagcctcttcggttttctcacggtgaatggcatcaaagtgtttccatgcttcatcatcggatgcgtgcaccatcttgtcaggattgtatcgttttccatttttgtgccatgtcatctgtttcgcggattcctctgtcatgtacagacgctggatccacggtatgaacggaaggtgtcgtaggattgtcaaggggatgtcgagctgcctcttctgttcatcaccagagtctacctccatgaacctagacgatttacacttgggacagtactttgcctccgcgtattctttcctaaatagcacgcagcccttcggacaag

SEQ ID NO: 7013 - DNA, 508 bp, Zea Mays
gccccgtaaacattaataaagttccaaataaatcctgattctttttgaatcaccagagtctgaatcataaattcacccaactctttttctctaacatcaaacatgtccgaatcaaatcctaccagcaaacctcccgacctaccattagggggagaccaaacccaaacgaagttcctattaccactaatgaaattcaaccacgaatcttcaaaatctttcttgttggtttcttgtaaaccaataaagttaatcttctctttcatgataatatcacgtaggaattcacttttcacttctttaccaaggccctgacagttccaaatcacaccaatcattctgaacaaatcagggcatgaccaccagtctggcctctcctcttaatagggatgttcctattattgggagatttaccagctttatttttttcctcacagttttttcctgtgctgaattttacgaccttttctcaggaccataacatcatcaagatcagacaaatcatcatcca

SEQ ID NO: 7014 - DNA, 312 bp, Zea Mays
gtaaagtgtttggacacgcggcggacggcagtgagggatcaacggtggtgagatcctacccgagcgatcggttaacaagggggaggtacgacggctagccggattggtgtccagctcaacggcggtgatgatctttctacctgagacgttatccacttaccccgagcacaatcgagacgccggcaacacgaatcgcggtggagatcgtcggcggtgagttgagcgcttgatctgatccgtttcaggttactgtaccatgggaaagcccattcagtcacctgacacagcgatttgcagggctgtttactcccg

SEQ ID NO: 7015 - DNA, 649 bp, Zea Mays
cgaaacaccaatgtgccggccccgtgatctcgccgaaacgcccagccgttgcggcgtgatttgtgaaaccacttaccgatctctccctctcgtgagctgtgacccgagtggctgagccaggagcaatgctacagcttcacgtattcaccttttggctgttcctaagctcctagccttgtagggtggaagttgcaggattcgtgacccttcgtgacatttcaatttttattactacattagaatttagaaaacaatctatatgcacacatatcacatatgcaggagtacatacatgggttcatgagccctgtctagtatgaccccctggccatcacccctctggccggcctaggctgtcggccctgctactactcgcaccgagtcttctgttgtttcaacctttaattatttctggaagggtatacttctacatgccatgtcctgttgtgctctacctgcaacaatgctgggcctgagatgattcatggcatgtgaaaggtgaaatagcattcactgctaccggagtgttcgaggaagaaaaaaaaatctctcttactgaaagggtatgttggagctgttcactcaccaaaataaaggaaacagcattctgagagtgctctcactgcaagaatccccaaaagcgatggct

SEQ ID NO: 7016 - DNA, 867 bp, Zea Mays
ggcaccagctccacccacctcgcggacgccctataacatcgaagccaaaccccctccgctctcctctcaaccaccagcgacctcgagccattcactcgtgctctccaattttgtcgtgcaaactccggcgcggaaggtgaagtcgccgaacacgaggtgcgttttctttggcgaggaaccctcggtgtcggtctgtgaagccttgcggggtcacctccaacgtgtctggggttgcgtcgggtgggatttgtgagcggtggccggggatttctcatcgacgcgcatccttcacctcgcggccgccactactcgtcggggaagctccgcactgcccaatacacggtaataatgcctctggtgcattccttgtgtcgttaggatcgtgttggtatcttcaggtacgctggtggggcatcagagcgcctgatggcatgttcgccggcgttggccgccgcgggtggtgtgtgccgccgtgcgggaggccgtaggctggacgatggcatcgcgaccgttggatccagcgctgacgatcgagattagaggatagggtaacctttgcacaactaaaccgtgtccgtaggattcatggcgggcggtttagattagatcggagcaggatcgaccttcgtccgttgattccggatcagacgataggggcggattatctgttttataacgcgataatctaatcttgcgcgtcggtttgtgatcggacggtcagcgtccgcccaaaccctttcggctagcgcgatttgcaaaaaagaccccgcagaagttgagtatcaacccgcggtccatccccctatgccctgtgtcttagtagttttagccccgagatccctgtcctttctgaaaattgatgcccag

SEQ ID NO: 7017 - DNA, 570 bp, Zea Mays
cacggtaaggaggtgcagaacagccagcgcggtcaccagacacagggacggcttcgagcaccaaacttggacaaagcaactggggtgactgagggggttaacacaagcgtaaagggatgatgagccttggtgaacaatcaaacggagcgatggggcacgggaacagcgaaattcagccagaacccgagactacgatagcggagagctaacagaaaccgagttctcgtggccttattggagcttaatatggagggagccagagcgagcacatctagcttcactactgcacggacaccacatatgtccaagggcacagagaaacagtaaacggtgaccaatagtgttcggactggaggcaagcagacaggcaaacatcatagtcaacagataggcttcacctcttcaatccaatccttggcagtgaaactatcccaagttatcccaccctcatcctgccagcacaaactcttatccctaacttacccagaagcaactggaacacatagtggatggagatctttctcaaactctgaatctgctgaaactggattcacttggttcacctgcacc

SEQ ID NO: 7018 - DNA, 374 bp, Zea Mays
cgtttaattttaaattatgcatctatgaacgaacccctatgccatctaaacttcgtatcaaccaaatattgccagtgctgagtagttactaaccaccaattgcaatgtcttacctgcactaagtaacctaggatggatatttgaattatccttctcatataaggcgtatgttatctttatatatttgcaaagtcacacttatgcaagataaacctctttttaactgttggtctacttactgtgtctgttcattttgtgatgtttcaaaacaatgtccagcgtgtcaaagtataccgtttaaccaatgacgggcagtgggatgatcagggaacgggccacataacaattgactatattgaggtatggtcaactct

SEQ ID NO: 7019 - DNA, 374 bp, Zea Mays
tggcaatgaggccaaaggagcccattgggtgcctacaggctacaacaaaaattaccagattacaaaaaaaataccaaaggacatagatctagacggcagcggcgacgcgaagcatgcgcgccggatctatgggactgtcgctcacttggggataacattcaacccaacctggtataactaagtatatgggacatgtctagaacaaaccaaaacgcatccatacagtgattagagaacaaccatagtgaattccaacaattgccagtgaagtgagagcagaccaacaaaggtatcgggtgataaatctaattgatgggggagtttctagctcagaaataaataccttgctctagtcccgcaggaaataacacaaa

SEQ ID NO: 7020 - DNA, 998 bp, Zea Mays
cacgaggctgagcggccgaacaagtctctcccgagcaaccccgcgaggcagagcagccgactaccaagtctctgtcgagcaaccccatgaggcagggtggccgaccaaccctctgccaagcaacctcgtgagacggtgcgaacgaccaagtctccaccgagcaaccccacgagacggaacgaacaaccaagtctctgctgagcaaccctgtgaggtggggcaaacgaccaggtcccgtgccaagataatcggtgaaagcgaagggccgatgcaacgttgctgacccacatcagcatgaaaagacacgccaccaccaaaacatatcccgaccacgagtacggtgtcaagaagtccctgtcgaacacaacaatacgtcgccatgtacagtctcatgcgagccccccacttacgtatgggaccactcaacccctgtcgtagggacctcaacgttggagtctctaaagtgacccacatacaggaaacgacaggaaggtataccatgccgggttcatgcctacgtatgctggaaggtgacacaagggtcatgacagaagatgaagctatcgttaacacgaccctgaaccccaccgagagtctattctgtaggacccaccaggtgccgctacgttgacatcaaaatagctacagggactcgtatgccagacgaacaagatggaatgccataccaagggtacgacagcgcacgaccctacggacaatgttaggagggctatgccacctagagcaaaaggtcgagctccctcctagtagaatacgagttcccaatgtaaagtccacccttgagctataaaagggcaggaccaccttctttctacacacaagcacaccagtgtaacacgccccaaggaatactacgatcatcactacactggagtaggatgcgaacccgaaccagtataacccagtgtcttagatttctcgtggagtcccagtgattcaccatttgaagtgagtccacgctagcacctctaccgaac

SEQ ID NO: 7021 - DNA, 487 bp, Zea Mays
cccgcgtgtgtcatccaaatatcaagccatgtgaggttcgatgctatcatgtgtccagaccattacagtcggggcctggacccccagtaagggtggtccgggggtgccacattgtcacacattcctaggcctgatttctgcccaggtagaggtccggtgccgacgcgtggccggggactcctgacgtaagcctctaacatggggcctatcaacattaagtgcagacgcgatgcatgcttgcccgtgtcagtggcaggtggcatgcactcgcattaaatgcacatggcatgccgagtccgcaacacatgggttacactgttaccggcgcgttaccaatgcatgaccattgactcgatgcgtcgcttgggcgcccctcattatgactcctactgttccccttgcgttaccgaggtggggtggaacatgtggagaggactcgacgacaccgtccctacacccctatgcatggcaatgccgcaacctacgc

SEQ ID NO: 7022 - DNA, 478 bp, Zea Mays
ggttaccacaggggaatatgaggtacgacctttgatgtgtgaccaagaattgcttggaactgaggaggttggatcaactacgcaaaatatggtagcggtaatgggcataaggcaacaaacggtgagcccaaagtcagtccaacaccgagtgagaaaccaaggaacctaggagctagagttgaatatgagtggcggcctctctgtatcccattcgaggtaacaatttatgtctcatctgagcatgtagaaactttgcagttatggtgaagtcggctagagagcgccttgatttgtctgtgaaaggtgctcagaagagaacaaagacatgagcagtacctggagcgactccgttgtgagggcaacgaggtgggtttgtagaacaatagcaaatactaaagcctcatcgatgacttaggaaagccaaacaactctctaatctgagcagcatgcaaagtgacgtcctctcgctcaaagcaaa

SEQ ID NO: 7023 - DNA, 526 bp, Zea Mays
cggcattggaggacaacacgcagggataatgaaggagtggcttggaggaagaagaaggagcgtgcaacattggtggctttggccggctggagcaggcaatagcgtggaggggaagggagagggcagggctgcatggcgagcgagcgcaagtccatgacggtggctggcggccagagcgcgtcacgtccagtgagaagcgctaggtgacctacgtgcgatggcctggcgatgcgggaaggtgtgctgagggtggggaccgagcaaggagggcgagctcacaacaataagccttcgtccggcgctacggctccggcattggaggacaacacgcagggataatgaaggagtggcttggaggaggaagaaggagcatgcggcattggtggctttggccagctagagctggcaatagcgtggaggggaagggagagggcagagactgccatttatagagcagaagctctggacatatcagccagctccagatacagtgtcgaccttgggcggcgagttttggcgttttccc

SEQ ID NO: 7024 - DNA, 501 bp, Zea Mays
cagttggtgagggcaatcccaggctgaacagcacggtcaacctggccaccatgctcaacacagagttggaccacacccttgacgagttgggcaaggttctggtggaggttgcggaattgcgtgttgaatgcgcgacacgccactatcttcatggtggttctcccgcccctgtcgggattcagcacccttaccattcaccgccccatggtcgcttcgaccatggtaccccagacttcaggacccggatagatttagatccatagatcgacggagtcggagtctgtaataatgcttaattcagtgtcttagtttagtcagtcttagttagagttagtttgattatcgtgtgttggaatgcttgtcatgatgaacatgtaatgaagttggatctttgtaatgattgtcatcaaggtgtgggtatcccctacaacttagtgtagttattaataaagtcagtcatttagttgggtaatccatttgtatccactttcctctttatct

SEQ ID NO: 7025 - DNA, 406 bp, Zea Mays
gcggccacggtgagtcaccggagttatcccagggggtggcttttacctggcgaccatatcgggttagtggcgacgcgaatcctacagcggtggcgtgaatcacggcgagggtcgccggcggtgggattcttttgttgcgctcggtctgatctattggggatactgtaccatcagaagttcggttgaatgcgcctgacagccacggtttagggccaaattgctcctaaattccaatggcaacacacctaagtttctgcagcaaagttgttcttgtatggtagctctacaactttgttatagcaatccaaggtagattcccactggatcttagtctaaacggctcttaatgttggatcaaggtcactgtcctactgaagttcagtctacattagcctgacagtccaac

SEQ ID NO: 7026 - DNA, 442 bp, Zea Mays
ccaagcttgcctttgcctcagtatatcacccgcaatccaacggagttgtggaacgagccaatggaaaaattttcacagctgtcaaaaagatgctcctcgatgaaaaaagggcaagtgggctgatttgctacccgaggcggtctgggcgctaaacacaactgagtgcagggcgaccgggttcacccctttccgccttctatatggatcggaggccatgaccccacaagaaataaaacatggctccccgcgaacagttccgtcagccgtccccgacgtggacgagcccacttcgaaggatctcatcgatggagaccgagtcttcgccctataggccctgaacaaataccaagcctagacaaaagcatggcatgaccacgcagtcatcccgagagaattcagcgaaggggacctcgtactcgtccgaacagctcgaacagagtcc

SEQ ID NO: 7027 - DNA, 586 bp, Zea Mays
gagagaggtctgaccgccgaggctatggttgctgactttgtttttaagaatattcagcccttgaaggacagagcatacccagcttacttgtaccgtggtgttaccgactcgactcgggttaccaataggagaattcctgctgaggatctggtgagccgactagacatgatctcgagaggcaaagtatcaaatgttggtgctcctattgcctactctgcttggaatctaccacctcctaagtcctttttcaatttcatgtccaatcctcctgctggtgatagtggtctgggtcttagagtgtgaccctctcctgaagatattgaggtcctggttgcttctctttgtgatcttcccaatgatgagaggcaagttcattttgagatgccagcgagtccagatgatgcagaaatagatgctatactcgatatgttggctggagaatcttctgactcgtcccctgctgaaataatggacgttatggttataccagagcttgacaagataatggacacccgaaagcctgagggtactcgtccaaagcgtcctcgccaggtcagccgcccaactacgcctgttgaggagaaga

SEQ ID NO: 7028 - DNA, 640 bp, Zea Mays
gtggtggttctagtattgatgtgaggattacaagttgagagttgtgagtgttgtaggctaagatgatatgttagcagggggtgtgtatgagatcagatcccctaagatctgccttgggagggattcctagcctgccttatataatctggcatggcttgggttacaagtaggtttccttctttatctcctaatcgatttatattttattagagtcctcatcttgtgtaccttagagtcctcatcttgtgtgccaagtgcatcctgggaccgagttagtcggtcagtccatgtcaagttagtaggcccatgtcaagtcaatgggcccatgtagaaaatatgcttcatgagggcctaggggatatctatcccccgacatccgcctcgtcaattcaaggtcaaaccaatgacattgtaatatcactggagcaagaggtttggaaccatgaaaatttagttcttatatttcttcaattattccataatactcgatctcgtgaagcccgggcataaagactccaaaacatgtggtttttcgattgggcctactttagtcgtagcttgttgtgcggaaacagtatccattgacatcatacctagaaaatttcctcaccttataggtaaagccattggctacttgtct

SEQ ID NO: 7029 - DNA, 502 bp, Zea Mays
gcctgactgcctggtcagggttcgcaccgagatccttggacggaagaactgaggcgatttcgacacaatcttcttgggctcaaacaggtgaacggagaattcaggtcccacttcatccgacgatcacgcatccactccatttgccactgacctctctgttactgcgtccaggggtaagatcttgagagagcaacgcaagaacagagctcactagtagctgtatagcaatcttcgttttcttgttaaaaagggagaaaaacaagagagcacagcagatatttttgtattccattcctgaacctggtctcactttccattccattccattccattggatgccaaaccaaatcacaacccgtggttgaaaccaggacaagctcgcaagaatttggcatcagcagtccctagtagccgtttggaccttccgtagtctgaaaccaccaaagtttggccacggaatctgtagacatgaaaactaacaagaattaacaacaacaaaatg

SEQ ID NO: 7030 - DNA, 382 bp, Zea Mays
ccgaaccaatgcccaaacaatctggtaccgcccgcggattttgcatcaaaaccgcccggaaccacatgaaagtctcgcgattttgccccgatccgcgaaaccaaaacaaacttttggactaaaaaccaagtaaccaagacccgcacgcctcccgtatctatccatgcgcccccgattggggacccgatcgaccgaatgatcgctgcccgtgctgtgccaaaaagcggtcaggcaagaagggagcgcgctggcgtccgtcatcggcgagggctctggggctgcgacggcaagcgggagcccgccgatggatcgctgccggaagaggcccgactccgaccccgaaggctgcagcgaacccgaaccccccgccgataagcgcccg

SEQ ID NO: 7031 - DNA, 476 bp, Zea Mays
gccgaggatgctgctctttgtcagttcgacactcaggatacagcagctgatgatgatgatgatgattttggggttcctcctccgcctccgcctcctatgcctccacgctcacatgatcatgaggctgggagttctagtgctgcccctcctgctatggaccctgctcttgcttcgattctccagtctatcactcagtagcaggctcacctggcagccgagcaggcccggttatccgagaggatgctctcgatgtttcagaacatgcaggataggcaggacgcgcttcagtagcagctacttcaggatcgggctgagagtagggcattcatggctcttatgctacagcagtctggtgtctcagtacctccggttctgtctgctccacctcctccgcttcacgctccagttgtgccatcgattttgtcaggaccccctgttggtacctctccgctccggccggtcactttggcgttcac

SEQ ID NO: 7032 - DNA, 921 bp, Zea Mays
gattttcaggttccaggtcagacttaacccaatggctaagtgctgaatttcagcaggggttagccgtattcaagcatatgtattaactaatccatagagattcaagtgggaactgtgtagtaaaatggggacactgtgtagaggaacaaatctctctgagtaattctgatttgatgccataataatgtagcagtaaaggtgcctctagaaaggtgttgtcagcatgtgggttctaaaaacctagtttagtgataacaaaccagattttgggtcttgctgtgttaaacccatgcggctgtgacccatgttctctatagagaagttgtagttcatacgttagggaacaattttggttaaggaacattagcttgttaccatatgaaataatgaaataaagaggcataaacacgagtcgtttaggtggatgctggagtgcgaattcagttttgacagatccaaactctggaaaagattttcccctccctgctgtattccaccgtgctatacaagttcggatgaggttggacgtggctagaagtgagttagagagggcctaggagtttctaatgctgagccggaaaggggggcttcaccttgtaaatatttgaagcctggtacagtcaaaagaaattggtagaagctagtgactcagctggggtacgctcctctgtcaaaacactagcaagcgctggcctttgcctcactgtagttggagcttgcatggacatggggtcgaagccgcgtgcccagtccatgccaaccttagccaaaccttgtcgtcgctcagataaggacaggtcttgccgagtgtccgttttttactataactgtggccacccgggcagtacaccatctctcgttgcttgtgctctttatctagaactgctgctcaaggtcttactgtcactacgttctcgtccg

SEQ ID NO: 7033 - DNA, 483 bp, Zea Mays
ggcttcctaggctaaatcctgcaggtcatgttgcctgaatcaaaggatgacagataccagacgatgggtcctatgggtgtgctcctaacacttcaaagccaaagctgtgtgcaggtccaggtgccagtctagaggtaggtagtctcaaactgtagagactacctcctaggggccgggtcatcaattttttctttgatatactggtatccagcctcgacacgtcgagcctacctcctaggggggccaagtatcaggtggaagttgatgccgctacacataacaagggcaaataacatacagataagttccactgttgtttgattaacggttcttaaagtatgtttcatggccaaaagttattacagccgctccccagcggaacccttgccttgtctctataggcttagctactcggcgtcggaaggatcacgctggaagcgctcggccaccatctccatagcgtcttgtacactctcccgtgtg

SEQ ID NO: 7034 - DNA, 360 bp, Zea Mays
ttgtgatctgatccacttataccctgttcaaaccctaattttagagctcaggtttgtattcttttgttgaagaaaatagaagaaagatctaatttctcttttactaatcaccagccctatctccagccgcttgaggcttctagccttttctgtagccggcattgtcctctcaagaatggatcacataactccttaatggccttatcctggtgtaaatcactcaacaggagattctctccccatccttatcctttcagccgccatggagcccagttttcctcccccacacgtgagatcccttcaccagcatctctcttcctcaagcgccatccctgacttctcccatgctgagcgtctcca

SEQ ID NO: 7035 - DNA, 677 bp, Zea Mays
aactttgatgttctcaccatggagtatttctaaaaataatgtgttcattcagggattggatgatagccacatagaggacaaaaaggaagagggactcagtttggagggctcatcagttaccaaggtgattatagttttctgcttgttttgttatgttgtgactgttgcataggagatttatgtgtggtttctgcatgatgtgttgttagggagggggcctattggatgccatgtttgatgttccaaaggtcaatttcctatcggtaagatgcatctcaatagtttcacctatacttttatgtagtttcctgccctatctcaaactctgttctggtgtttcaatgtatcaaaggttttgcagaagaaaattacatcgtttgatggtgatgaggtagatgcttgtgtcacctattcatttggtgtcctagacatgaaaatccatccagtattcttcaccattgcatctaagttttaatctatttactactatgtattccatattttgttggagttgcaatttagtgatgagagatgaatcaaaatgttgtgcttagatgcacaggctctttggcaagtcaccttttaatagggatcagtaatccacattaatgtctgcagctacagtttggctccaagagatagatgaaaatattgtgattagaaccacaagctattgg

SEQ ID NO: 7036 - DNA, 792 bp, Zea Mays
ggagaacggagtcattctagaggacagctcagagcagtttctgcctatgcccaccccattggtagaatcactagccttcgcagctggatcgtcagcttcagcaccgccagcaccagcagtcccagcccctgctcccggaggctacgacccagacgactctagcaacgaagatgaagacgacgaggaagaagaagatgaggaaaacctcaacaaggaagccaacgaagaacagtaggaccactacgtggggttatggcgtgtcactgaacattacacctcaatgttcgagacagggcacttccctaacctgctgcaggatgttctgcacgcgttgggaacctacatccgacctctgaacaagacaaggcgagtgtacgagcctcctcgggcttgctactacgtcactcgcattcatgtcagggtgatggatgcaggtgatagagggttcaggactctgtcagcacatgagtctctgacgccgctatccacctacgctgcttcggtcagcgatgctgctacgcgaactctgtggtctcttagccacacctaccagcagcagctgcacaacacgaagtacaggcatcttcctctgtgtattcgtggagagaaccagaccagcatcgttctaggtggagcaaatgaagatcgcctcagcaccttagctggtgtggtggcaggtcttaacaccgacctggatagtgctaccctggacctctctagggtacacttggagctggaggatgcacacacaaggattgtatcccttgaagctcagcttgatggaaggaatcc

SEQ ID NO: 7037 - DNA, 631 bp, Zea Mays
tgggtcttggtagactgtctccggcaaatcgggagaccatcactatgggcaccacagtgcgacatgcgtaagaatgtgacatcgaatgttgtggcccagccaagggagccaccctcgctccatagctatcggatgagctctgggccgtcggtgagaaggtcccaactgtgaagaaggcaagcgtgatcctcaagacggcagacgacataaagagggagccgctagaccccgagcgacccgtcgagcgggaagcgtgtgtcgggtccatgcccccttcgagtaggagggcatcctcacttcccttccccttcacaaggaaaaggacaccttcgcacgatgacccttcgacgcgagaggcaccctgagggaatctaccaaacattctttgaggatcggtcccggctcccgagcccgtgaagcggattgctacgacgctttcgcaagcgcaagcggagcgccatcgggtagaggactggcaaaatcttcgcagtctacgttaaccaggataaatgcccaactcagtactaggccagaagggaaacggagcgtgaaggacgtatatcggtaacgccgacctcaataaagcacgctcggaggacccgtttccccttctgcgtaccagtcagtaggc

SEQ ID NO: 7038 - DNA, 451 bp, Zea Mays
ggatcggcaacgtggccctgtgtccacggtccagcgagtgccgacggcgctcgggcggaattagcttgacaagtgggtcccgcgtgtcagccgatgcactagagttggaagcgcgcgcgaggttaggggctggtgagaagggcctgtccgtcagtgactcagtcagaaaagaaaagaagaggggcgcaagtgggccggcggggtgcttttcagcccagctagtgaagtgaaggcgcggggtgagctgggcccagagagaaaacaacccaaaatgtggtcgactgtttcttcttttctttttcttattttcttttctatacattcaaattctaatatttaagcttcaaaattgagggcgagccagtaatgatgggtacgttccttgttgccaattacccagcagttattctcttcgattctggtgcatcacataccttcagaagcaagaatt

SEQ ID NO: 7039 - DNA, 734 bp, Zea Mays
atccacagtgggtagcacataagctccagaaatacccgcagaagaggaagctcccggagtgaaattaacagaagaaccccactgagcaaccggatgaggcaggcgcggagctccaaactgagacaacataggagtagccggtgcaggagtaggcgcggcctgatactgaggaaaaccctgcatcggcacgaactgagaagtcccaggcacatagagctgctgcagaggaagaggaactgaaaactgctgctcagcacttgacatcatgttgatagtgccctgagaagaggaggaagtcaccggctcccatctgagcttcccattaggattcctcctacataccacatccttatggacctgacttcagatagaacacctgccactccactggcactctgcacggcgatgcgcatcaccacagcggaaacacaccagccccagcccgggcttaggaacagcccgaaacctctgagtacttcctcctgaagtacccgagtcaaaagatttgccacggtaaggatggtggtgctggtgttgagacttgcccctcttgtgggctggacctcccatgttgcccctcctcgcgtcctggctacgaggctgatcaacacccgaagacttctgcgactccattgtgtactagtgttgcatttccacacccagtgcctgctccaccgtggtacggaagtccaccaacggaaaggccctagagcatgcctgatagaaggcttcag

SEQ ID NO: 7040 - DNA, 543 bp, Zea Mays
ctggctcgactgtgggcagcttcggcactacaattggctcttcagtgctctgcacagtcagagcagcttccttggcctcggtagctgaagaggtccccgcaccaaatttaggcaccacgaccggttcaatgtaacgcggccggttggtcagaaccttcatctttttgccctttggctcagctacaatggtcgaagcaacattcttcctctttttctcttgcccttttatcggataatggtaatcagggtatacgaagccaacaacatcaaataccctgtttaatcttttcttgccccgacttccaaaggctgcggacaaagcattatcttcggccttggagtatgctccaagtagctcatcactggtggcttcgatgcacttcagccagtcatcgtttggctcattaaacttctccctgaatctgaaggtatacttcagtcggaccagaccaccttcactagaatcagcggtggtctccttcggcatatcccagctttccacaagtggccataccctgaaggatatatgctcttgaatcagat

SEQ ID NO: 7041 - DNA, 534 bp, Zea Mays
gttaaatacgaaaaagagcaggggttctttaacaaaaggtcatggccgaaggggtattgagcgaccacagtcgcacgatcaagatccaatgcatcggattaaaccttgaatcagtacgcagcgcccatcgttagatccagatctgacggccgtgatttaatgaaaccgcgatctaatcctatccctctgcaaccgatccaacggaccacactacattgcatgaacatctacgccagatcgaaccccaaccgcacatccgaggatcaacggtttagaattggtcgcgcgaaggggaaagagataacctgatcccgaccgcaccttactagatctacggtcagggcacttcctcttccccaacggtgtagcacggtgcgccagtactccccacgacggaatacgccggcgagccctcccccaaaccgcgccagtaagcgattctcggctctaatcgactctactcgaagctatcgaggttgcgaacatgggagcacacacgtaccagagatggtgacgacaggaatccgaccccgc

SEQ ID NO: 7042 - DNA, 470 bp, Zea Mays
tactgagccctgacatgcgggcccaggagcataacggaaggaatacattatgtgagcaattaatgctagtaacgcctgagcaatcaccgggagtcttgatgaccacagtccatgcagcattgatagccaaaacgtacgagtaatggagaataatagcacgacccgcgtatcgtggactgtgcacgccacctatcagtggaatggacaggcgcacgtgttatccgtaatgaatgtggaggcgcacatagcccagaggcgtcatgctaggttccgcccgctggcttaagccgcgcgcagtatgccacatggctgcaacgggtctccgcttgagcggggagcgggagtgtatgcggataggtccggaacccaccagactaggtctgaacacgtgtcggcactggacccccgtctgggtcttgttcaaggcccgagtatgttctgtcctgagaccttgggaccccatggtgggt

SEQ ID NO: 7043 - DNA, 368 bp, Zea Mays
gtggaattaacttcttgactcactctatttaggttgtcgtcacggaagttcttggttatgggaagttttatgttagactgtgggtgcgatggtcgagtgattttaagggatgatgctttacagattggttcaaaaaaagcatatcctctttcaggttcttcagtccagtggggatgactgcaggggttgtgctattcggatttggcctttccaaaagggttttccctatggtaccgcttgctttgtccaaacctccattttatattatcaacttgtgtgcatgaccagacaagatgtgaatattgtccatccaattgatgtttgatgcgatgatacttcatcaggctgggttttccctatggtaccgt

SEQ ID NO: 7044 - DNA, 540 bp, Zea Mays
cgcctctctgttacgtgcccaacccaccctcagctagcccctctcttccactatagcttgagttcatcggattttcctgaaagcggtcaccagcgtcgtaggggagcttcaccgtggccagcgcttctccggatagtttatgctcttcttattcttgttctggtatctctctgacctctagtttctcacggtgtcggccaatcaaaatctactgtagtgaaactctgagaacatcgtctcacaatcactagacaccgtcgcaggccgccctccacgtcgacccactgctccatccattcgcccaccttcccgaccgtcgttttggagttctggtgactcactgattctcgccgtaccttcaatttaaactctaccatcctacactgctaggaacagctccaccatcttcatgggtagggagtatcccgaggtggttttgccagatatatatcgtgtgggttaaagttgcctaggttcggaaatggtcgacatgtaatgttggggatcttctttcccaccgaaggtcctcaagacagaaac

SEQ ID NO: 7045 - DNA, 428 bp, Zea Mays
ggcaaatggatcggatgtcgttctccttcaccatcgcaatatgtagcaatagttcgctagacaaaatatgctcctcagactcagatggcgtgcaccacccagtgtggtcgataggaaggaggaggccacctggccgtccaattggctatgggcggctaggattagaagacgcataccccttcgtggggtttgatctatggccgttggatcgtatttggatgaataagatcgcatcacgcttaataaaatcctagttgttagatctctagccaatggctgagattagaaccatcacgtaccgcttcgtgccttgatctaagcagtaggtctgtgaatggagggctccggttaagtcgcgctgacgagccttggcgtttttctttaagagaccctggggaacgtcaaaatcaatccgccatccactcccg

SEQ ID NO: 7046 - DNA, 420 bp, Zea Mays
cggtgacgaggaggggggtttaggtgaacttaggggaaggggttaatttaggacaaacgctctgggaggttgggttccatggcgaggcaacacttggccagaggtcggctgagagcctcggctctcgtgcattttggctaggaggcggtggtgggcaagtgagagtgtgttcaggcggagttgggtgtggggttgtattggagactagagcttctaggcgagctctcaccggcgagcggcggaggaaggagacggtggtgttggcggcttcgcggtggagaagagagaggaggggaagtactctggagagttggtgcagggcagaaggaggtctgggcaggccttttataggccacggggttgagcagggccgttccggactatttgggggcctgaggcgaaatgcaatatggaggcccc

SEQ ID NO: 7047 - DNA, 986 bp, Zea Mays
tttgaatgcaaactcattggcctgatacaggttgtacaacactggcgatcgtatctttgaggtcgtcgcttcctcgttcacacttatcattacaatataaagttttttcttgaccaacaattgtccactatgacctaccaccagtggatcagcaacttgtttggcttcaattttgtgctggagtactgctcggggcacctcaactctatatatagttgatgtgttgtcctgctgtggctctaactctatggccacagtcatcaaccctgactcaaaatttgcaaccactgagctactcgccctgtcagtgccctcgtttcgtcttcttgaggacatacacgtcgccacagaagatgacgcagaaggcgatcacattcaacgacagctgctggaggcttcccttgctcctcgcatgttggggctagaacaccacacacatcgacccctagtgcacttttgacatcttttagagcacccagtatagcggcccttggacacctcttgccctagcgtagtccacaacttatggcctcatctacaacaagaacatcttcatgttagcacaactcaatatgtgccactaggtggttgcattggcccattctgctagccaagaagggaccaagaaagacccttcaacgcatgcacatgaacttttgtatctgcaatgactgagtactttgtcattgactttgtccgcgcgtgcaccacatgtagacaaaacatgaggccgacactgcaaccggttggtttcctacaaccactcgatgtaccatcttaggtgtgggtggacgtctcaatggatttcatagagggtctttctaagatccacaggaagtctgtcatcctcatcttcatcggtcgtttctccaaatatgcatacttcattgccctcaatcacccatacttggttgcaacggtcgcttgtgccttcttcgataatagtattcagctacatgccttctccctgttggatggctattggt

SEQ ID NO: 7048 - DNA, 324 bp, Zea Mays
tggcggtcggcttcgtgtgggcagggctggcaagcaggaattgttgtcctcgccggccgttgcgagtgtaggtgagggggagttgcgaagtctttttgagggtgaggagcttaggataatgctatttaactatagggagatgggaatcattctgaaggttgaaccgatgtaaggtgtgatgccctcgctgtatatatgtaactataatttgtatgatgaggctgtgcacctgcgcgcatccggctatgcttaaaaggcgttgcgcgcttggtctagtacgtttattatgttggtctggcgcgcctgtagttagtctttgcgcgg

SEQ ID NO: 7049 - DNA, 410 bp, Zea Mays
tgagaccgaagctgttgaaactgttcctatttcggaagcaatgaagcgatctgggttggtaacaccggaagacgtccctgctgctgaagcagagcaagctggtattgaagagaccgattctgaagatgattacaacatcgcagtgccgagcaagcctagccacctggacttcggaaagtccaccatttccaaagctgattttcctaagatggtgaagttgggctattttagcgaagataagaaagagttgattcgcttcggtggagaagaaactactctgaagccagaaaaagatgcaatagtagttttcaagagtttcctcaaagctggtttgagattccctttaaataggatgattgccgatgtgctaaagaagtttgggatccactttcatcaattaactcctaacg

SEQ ID NO: 7050 - DNA, 1023 bp, Zea Mays
cggccatagacgacgtggaacggcgtgtcacgcagggacgactgaaaagcggtgttgaagatatattccgcccatgggagccagcgcaaccagtcgcggggtcgatctcccgtcaagcacctgtgatacatgatgatgaccttgttcgccgattcggactggccgtctgactggggatgaaatgtcatggtcatctgtagcttggtactgctcaagcgcatcagctcgctccagaagttggaggtgaacaccgagtctcgatcagagacgatcgactggggaatgccgtggagacggacgatgtcggtgaagaatgcctgcgccacagactcggccgtgtacgggtgcaccaggggaacgaaatgtgcatacttgctgagcggtctatcaccatcaagatgacggtcttgccgcggacgcgaggcagcgcttcgacgaaatccatggcgatgtccgtccataccccttgcggcactggcaggggcaacagcaagccggccgggtgctgatggtcgggcttgttgcgttggcagactgcacagccacgaattagatcctgcaccacacgtttcatgtgagaaaaatggaagtcgcgccggagtcggtgcagggtgcgttgtacgccctcatggccttcctcgtggaccgccaccaaaatctcctggagcagcggggaggcgggcggaatgtacagcctgcccgcatagtggacgaggccgtcggttagcgcccagggccgcgacctggcgccgctgctgatgtcgtgctggagggccgcgagcgtggggtcgacagtgtgtgcctgacgtagccgatctatgaagtcgaagcgtggtccggacaaggctagcaccaagccctcctccggtgtgtcgcggcgtgagagcgcttccacgacggcattggtatgtcccggcttgtactcgacggagaagtcgaagccgagaagtttgcccacccagtggtgttgtggtatggtggacagcctctgatccagcaagtacttgaggctgtagtgatcgg

SEQ ID NO: 7051 - DNA, 401 bp, Zea Mays
cactcggctaccgggagacagttgttagatgagattcatgtaggttagtgtggtgtgcatgctgcatcaaggactctagtgggaaaagctttcagatccgggttgtattggctaactacaaagattgatgctaccgagttagtccagaagtgcgaggcgtgctaattcttgtcaaaacaacaacacttatctgcgcagcagctgcagaccattcccgtgacttggccatttgcatgctaggggctggacatgatcgagccctttaagaaagctcaaggaagttatactcacatactggttgccatcgacatatttacaaagtggataaaatacaagcccattgcttccttgacctcagcaaaggcagtggagttcattaaggagataatgttcagatttgg

SEQ ID NO: 7052 - DNA, 282 bp, Zea Mays
caggaagccactaatgaaatcaaccaaggccaagcctgcaatatggcactaaagtacctgattcaaatagaagctaccaactaagcagaccccaacagtacaaaatctgcaaccacaaaacaatctggttaccaaaacaaccaaatgacgaagtctttttcctacagttggacgtgaactctcacttcgccacttcacctgttgctggttcctctcctttcttgtcaacatccaggttctccagttcacttgttgctggttcctctgctttcttgtcaacct

SEQ ID NO: 7053 - DNA, 685 bp, Zea Mays
cttgatcgtgacctcattcagagctcgataatcgatgcacatcctcctagtgccatctttcttctccacgaacaagacaggggtggcccaaggcgaggtgcttgccttatataacctttctctgacagctcatcgatctgcttcttcagttcaaccaactctggtctagacactctgtaggctcttttagaaatgggggcggtgccaggaagaagctctatggaaaactcaactttccgctcaggtggcatacctgttaagtcttccgggaacacatctgggaattcagacacaaccttgatagtttcgagtgaatctggctccttgctatcaatagccatatgatgacaacctcctttccttggttcaggtgagactaactcggctaccacttcttctcctagtggggacaccaacttaattatcctcttatcacaactaataattgcttggtacctatctagccaattcatccctaggatgatgtctattctctgagtacccattactatgagattagcgagaaacactatcccccttatttccacacttacattcaagcaaatgctatcggcttgaatcctaccaccggctgagtcaatttggatgggtgttgacatggtagttattggaagattatgtgcttctacacatgatgcaataatgaatgaatgtgttgctccag

SEQ ID NO: 7054 - DNA, 500 bp, Zea Mays
cctctcgccatacaccatctaccccctgcaccggcgagccactgtctcgcgcaattgtctttttcgctcggtcgcggtcacctcattttgcctcgccccacacgtcgtgcgcgcaactgccttgcacacccctcctctatatatacgcacacatccctcctcgccacccctccactttccccagatcagatccagatcagacagagtagacgtcccttcggttaccgatcgtcatacaaggtgagtactcttcttctcccttcgtcccccacacgacacacctcctacttcgttgcttccctacgcggcggccagccctgctcccaccgaccttggacctccgacgagccccctactcccagccccttgacacggtggcgtagttcccctcgacgcgcccagccctttccttgccgtgcagatcctcgcttcaccgtgctccgagcaaccatggctggcgctgtttctcgtcatgtagccccacccatctcctctctccc

SEQ ID NO: 7055 - DNA, 864 bp, Zea Mays
atccacatgatgggatagtaactttagagaaatacacatttgatcaagatgttgctagaaaagagcttgcattaatgattattgtccatgagtatcctttggctatggtagaccatgttggatttcgcaagttttgtgctacactgcaaccattattcaaagtagtctctagaaacacaattcgaaaggacatacttgatatgtatgaggtgcaaaagaaatctatggtgaagtatttcagaagtttaagttctcgtgttgctgttactacggacatgtggactgcaaaccatcaaagaaaaggttatatggcagtgacagctcattttttggatgatgactggaaactaagaagtttccttattaggtaataaccaagcatttgagctttatgctattgatgataacaatcttgcaactaccttgatgataacttatggcttgttaattttgcaggtttatatatgtcccagctccacacacagcagatgttatcactgatgttctccatgaggttcttttggattggcgtattgaaagaaatctatccacaatcacgcttgacaactgtagcactaatgatagcctcatgagaaatatgataggcacaagtaatgaggatctcacaaggactatgactgcaattgaaggcaagttgccactttcctcttgtatgttgcatggtaaattagtacacatgcgatgtgcttgccatattctaaatttgattgtgaaagatgggatgagtgtaatggagttaggaatggatagtattcgtgaaagtgttgcattttggtcagccacacctaaaaggcatgaaaagtttgagaaaatggtaattcaaatgaaaggaaaatatgaaaa

SEQ ID NO: 7056 - DNA, 459 bp, Zea Mays
tgaggcacacaaagacggcccctgaaacaaaccaaatcattctcatcaatggtgaactctcgtggtttaccatcaccaaccctcttttgagcttcctgcaatagacgatcctactactgagccgcacacactctctccatgagggaggattgaataagcatccgagtctcctcgctagcggtgccgacataacacaaagcgatccccaaacggtccatatcagcgatcaacgacaaggccacttttggaaccccagacctgctaagggcatcagccactacattagccttcctcgagtgataatgactggacaaatcataatctttaatcaattcaagccaccgacgctgcctccaattcagctccttctgagtaaaaatatacttgagacttttatgatcggtgtaaatgtcacaagcctcgccataaagataatgcctccacgactttagagcaaaa

SEQ ID NO: 7057 - DNA, 1310 bp, Zea Mays
cggccccctcaaccgaattcctgggatcattaagctgggcgttggggactcggttcctccctttctctctccccagtgaccctatcagccgtcgcgggcaacaccaactcgtcgacatcattcgcttcaccagggctgcggtcgaagccttctctctctactcattcctacttctcgcacggccaccattttcgttgaccggagatctcgcgggagacatcgaagctgtgcgatgccaggcagccgggagcatccgacctggacggtctataaggctacgacgccatggctgactccccaacgccaagcccctggatctggcgcaagctgagtcacctccacctatacgccatgactccgccgccgtggaaacatcactcgataaatccgattgcgccgccgcaaccacgctctgcgccgctgggtgagaggaattaaaggatcgggatttcgttgtgggctcctcggcgtgcgtcgtgcagtcaccaatttgagcaatagctcgttgggttcagctcagcgtcagcctaccgccatcgggatccatcgggagtctctgcgccatcaacctcggtgagtgcctgtccatgaggtctgcgtattatcggattcgcgtaactgcatcccatgtcgtgatccgtctgcctgggcactggtgctatcctctctggcataatcaccaatgcgtgttctctgttgtcgtggggttcgatgtcggggaggaagaagggtgttagccattgatgttaggattggtggggcctacgccggttgaagtcgcgccaccgtagggagacctgtgcgccactttggctctggccggaggtagatgatgacagagcaccattggattgagtatgggcgtgtaggattagatggtgcggtgagtgatggcttgccgtcgtggatgactgggctcgtcgtgtcgtcacagttctcgaccggagttgaggagagagagtgacgagggtagaagaagcgctctgcacgggagcgccgccgccttgtgcctgtgcgctggagggtggtgaagacactgtcctagacgttgctgccgtgttgggtggttgggaggaatgggcgctagaaaccgtagggattgaatccaaaggccaggcgtggatcgcgattcataaaaccttaaccgtcgatctcagatcttgcgatccttaacgcgtaccggttcagataagtggcagtctaatctagaccgcagggagtagatcggacggcccgagatgcttcataccctttcgcgaatgcatatttttataagagcccctgcattttctagaaaataacccgccgtc

SEQ ID NO: 7058 - DNA, 826 bp, Zea Mays
gaataatcaaaaggtcaggggctactctgcaaaagttcccagacacaggctaacctccaaatggacggcgggttggtttattagaaatctaggggctctttagaaaaacgacgagggccgaaggggtacgagcgcagcacagccgagcgatcaagatctaacggctcaaattaaatcgtgtcttatatgaactggtacgcaatcgaggtcgtaggatctaggattgaccgtctagattttgaacaccaagatctgctccaaaccatccgatcctatatacctatggcccagatccaatggtttaaagcgttatctcgagtattcatcgcaaccgttgattatgatccaacggtcaacattctctctctcatcccgaccacaaacacgacggcggcgccgccccagcatgcggcggaggaccaccagaaaactttgagagccgcattggtgaggtaatcatgactaggaatcgagcaaaacgtgattcatacaagcgcaaacctcagagaaggcatcataccacgtatcggggtgaccgcaatgccgcccatgtgacatggcggctccatggcgaccggcgagaaatcgccaaggttcagtagccaaccacgccgattcgctggtagccgcagcttcaacacgccctgacgatgcgcccaaacctcatgaagctcgacaatctctctcgattgccccacccagagcccagcgacgacgacatccacgagcaccccggctgcaagggccccctctccaccatgcacggctcctacgcggcggccacgacaatgatttataacccgggttggagtccgaccaagggcat

SEQ ID NO: 7059 - DNA, 601 bp, Zea Mays
ggggagtatttaggggaaaccactgcgggagatgaaaaagttggagatacactattgatgatgtgacccagaaaagtgatataggggggaaaaatttagagggaaccgctgcggatagcctcataccctgctgccgcctgtctcggtccactctcatcagagagcgagcgagagggcgggagttaagggtggaaaggaattaatggcgccatccagcccagccaggaggaacaagcggatgcctttgatcgattccactgcaccacgcttctctccatttctttctggcgagagagagcgagacagcgagcgggcgcctccctcctgagctgtagtgtgctgctccgtttggaccagcgagattactgccgcgtattgtacctccctccgctaccaccaccaccaccacctgcgtagcagcgaggttatgtagcgcctcggaggaggagctagctgtagctagacacctcgtggtactagtactagtagagccgcccgctatataccgctaggccactggagtagcttgccaggtccaagcagccagccctcccggcccggattgcgctcgaagcaagcggccgcccgaggcgaggcgtgc

SEQ ID NO: 7060 - DNA, 810 bp, Zea Mays
tgaattcaagcttgatttattaagaattgaaccatggttgctatgaaaaacttgtagctagtttatagctctacaatattgctgcagaaagttaattgagttgccatttgaaattgggagtaaatcagcgctaaacctgctctgtcaggcgctctgatgaagcagtgccatggtacagtgtccgatatggatcagactgccagcgttggatcctcatcgccggtgacctccctgcgcaaggattcgtgctgccgccgcccggattcacgctagagactaacggataacatcgcggggagagggaatcttcgccgccggtgagctggactccactccggtgacaccccgcacttcccctctaccctgcggcttgagctgatatgctcgccagtgaaccgccgttctccggccttgcgtcgcgtgtcccaacctcgccaccgcatcgccatgactccctctagcttcccgtcgaccaccggaattactgccacgacattgaacacgtattcaccgcgccagggttctttcttatctccggccgcccgcgatgttcgatcaaattaagcgccaccgtcgaaacctcctataaattgagcccgagaccagctttgcaacatcatcacccatctcaccaccaagaatcactagcaatcgtgcaccagtgagctcgaatttcatttcccccccaaatcagtcgaagagcaccgtgaaaccaagttcaccgtgggcagtctgttctggtaaaactctgcccaattcaaaccttgtttaagtgctctcgtatgcctgtgatgcccatcgacccactta

SEQ ID NO: 7061 - DNA, 311 bp, Zea Mays
cgggctatgtttctcaagccaatccatcccaattataaggtcataagttgacagttgtagcaccttgagtgtagaagaaaatgttaccccactaatggaccatgaagcatccaagatctgatgattgcagcacagatgtgttccattgggcagttgtacttgcagagacttattgataggaactagccctggcaagttagccaccaccacactgctgataaacgtgtgagaactacctgaatcaagtaatgccaatatgtccatgcattcaatatgtccaacaaacttcattgtacaaggagcttcatgtc

SEQ ID NO: 7062 - DNA, 297 bp, Zea Mays
aaaacatagagcattcaattctgaagggcaggccggcatgatacgtagtcttggtttatcccttctccagagcatttaaggattggtgtgctagtctagtcaattaggtttctgtttcttctttagtcattgtccacattaaatccattgaaccagaatcatctatcctgtcagttagctttccattgcgtgtgcaaatttaagtatcagtattaggttatgtggagggcctaaaatgacaaaaaggaaatcatagctcatgctgtgtagttccttctcaggtagctatgccaaggc

SEQ ID NO: 7063 - DNA, 352 bp, Zea Mays
actgaccctagtgaaggtgatggtggcaacgatgatgatggtagccatgggatggtggcgacgatgatgctggaacatatggtgctgggaggtagtcatacaggtgggagtggtacgagggactggagattcaaaggagacagtcagttcacccatgcctcccaagattccgcacatcatttgcaactcgagatgagaagcgacgatatcatttggttttacagacctgttgatgatggtagccacattacaattatcagtttcgacgtgaccaataccaccatcaatcatgtatgggtatttacaaccacctcttccacccgcatatgtatacccgagggctagtttagag

SEQ ID NO: 7064 - DNA, 381 bp, Zea Mays
cgcctgcccgcctccgaatccgggtctgccgccccagccctccaccttggtgtgctggtcgcgtctccgtgaaggtggattgctcgatgtggtgctagaatccagctacatcgggtgagacgaggcaaacccaagcgagtctctactgctctatatgatcgcaatgagggcgttcacagcggcatcaccatgcccccgccacactccccatgcgcgacgcctccatcacgccatcaccgtccttccccacgcgattcccttccccacgcctgcgccaccatcccgctatcaccgctcacccgagccatcacgccatcaccgcccttccccacgcgacccccttcccacgcactgtgtcctgccatcaacactgcaatcccc

SEQ ID NO: 7065 - DNA, 570 bp, Zea Mays
tatagctctataactttgctgcagaagattggcataggtttcacacaaaatcggaagtaaattgtgttccaattggctctgtcagtcaagctctttattgaattcagagcactgttcactatcatgagaaatatcgcgccgtggattaggatcaccctccccgccgacgataagaacgccaccgcggcgtgaccggtcatcggtggtcgcggtaaagctccttggtatcgtggcaaaaatttaccgaggtggcgaactctggttaagcggcgaccccgtgccctcaccggaaaccgccgcgcggaaagcttgccagcgcatccgcaattcgcgcttcttctccaactccggtcgacggcctataaattgagccccccctcggcttcgccatgtattctaccagctatcgcacccacctgcatcccaaaccccccaccagagaacttgaatttgggatttcccccaaactggttgaagaacaccgtgaacccaagctcaccgtggaaagctctcctcaggtccgatcctgttgtctttagtcttgttctagcatcctcatgtgcccttgat

SEQ ID NO: 7066 - DNA, 730 bp, Zea Mays
tagaggggaggctctacctccactggattcatgatcgcgcccatgggtcgagttaccgaggcgtcagtcggtcgcgctccagcagtcctaagaacaacgagcacttgggccctttcttcttgcaactaatccaggtccaaccccgggttggtgaggtggacaatggatcctactgcattggaactgctatgacggtcggccgaggcggaggcattggtgcaaccacacgtctaggtggtgcagcagcagccggacatgacacacggatgagtcgggcccctaagtgcaggtgtgggccgcacaaggctcaattcgtgactgaatgaggtttagccatgaccgtctccagggccgccctggatctcaacaagggcttcttctctgtcggggcgatggtgtgggacaacggggcctccttccccacactcgctacgtggtgcagggcacccctttggtccatgatgcgtgagaggcatccaaagtggaaaacatctccgatgatgaagctgaagacggtgttgaaaacaatggccctgtagctatcgtatatgaatgttgcgctctctgcctagcgcgccagcaatcggagtttggtaccaacgtcacactacggggtataccacatagtgcttttgggaggatgatgaggtcgatcgcaactcgatgggtcgtgtgaggcacgatggaacacaataaactatacaggttcggaccgctcaagcgcataata

SEQ ID NO: 7067 - DNA, 502 bp, Zea Mays
gacgagcatacaaagcacttgcacatagtacttctgcgactgcgggatcatcacctgtatgccaaattctccaaatgtgatttctggctaagggagatcaaattcttgggtcatacaatttctcaggacggtatagcaattgatccgaagaaagtgcaagaggtgatggattggaagccccctaccaccgttcgatagatttggagttttctaggactggcaggatactatcgacgattcattcccgacttctccagaattgctaagccaatgactgagttgttgaagaagggagtgaagtttgattggggtcagaaatgtgaagatccctttcacaccttgaggcagcatctgacaatagcacccatgctagcgcagcctgacaacaccaaatcatttgatgtgtattgtgatgcttcaggcactagactaggttgtattttgatgcaagacaaccgagttattgcctacgcatcaagagcactccgacctcatgagcaaa

SEQ ID NO: 7068 - DNA, 841 bp, Zea Mays
aatgtttactttttcagctactcaacttctttttgaaacggttctccaccacctgtcaatcggagttcgataattttctattttgcattggtatttccaagtaattaaaaggaagcgattctggttgacatccaaagagttctacatattgttgttacgactccttggctctcccataatagaagatatcgctcttgtagaagttaatttttaaacctgaggcttgttcgaaagcacataggatcgtttttagattccgagatttttctaagtcatggtccataaacaagatcgtatcatctgcatattgcatgatagataacccgtcatcaactaggtgtggaagtacgcttgcaatcataccacctcgcttggctctgttaactagaatagctaacatgtctacaactatgttaaacaggatcgacgataaatggtcaccttgtcttagccctttaaaagtttaaagttattatcggtgtagttattcaccttaatgcctacttggcctttccgggttaacgcgtcaatctagttgcaccatttttcactaaaccctttcatttgtaacgtctgcctcataaaagatcatttgactttgtaatatgttttttcgaaatctatcttaaaaatcacccccatcaagtttctttctatgcaactcgtgtaaggtttcgtgtaaaacgactatcccctccatgatgttcctccctagcaaaaatgtggtctgcgacggacttatcacttttttagcaaccgagattagcctattcgttagaaccttcgtaaattttttaaaactaacgttcaggagacagattggcctaaactgttgtatttt

SEQ ID NO: 7069 - DNA, 323 bp, Zea Mays
gccaaacatttctgcgcgtggggccaccctgtcatatccatccctcagctctcggcaatctcaaaactaaatcgcgtgattcctccgcggccaacctagaatcgtgcacgctaacttgtggtgccacctcgggtgagacctggtcgtcttccctgcacagcggtcgtcgaaacagccgaggcaaggggtgtggagaaatctccaccggcctggccgcatctcgggggaatcgttgggattcttggccataggagcataaatagcagcgctgcatccccgcctcgacctccaagccaaaacgcgggcctgacctagctgctccg

SEQ ID NO: 7070 - DNA, 299 bp, Zea Mays
ctgaagcttttaaaaaataccaggactctgcggcgacatcctatgagcagcttgatcgatgagttgctaaacttgttacacgtatggacgtactggaggctcgtcccccaccaccaactccagccccagctgctggtgcagtactgctctctcctgtggacgacgacgacgatgatgtttatgcaccgttgggacgacgcctcgcacataatcgacaaggtatgggaggtaatggtagacgtcgtcatcataatcttaaaccagacaatgatccatttgctaagattaagttctctatt

SEQ ID NO: 7071 - DNA, 1275 bp, Zea Mays
ctgaggcgtagttacacgctggagagtctgaacatttatgttcagaatgtactggtgaagacaggatcatgatcactgatgatggagcacgggccgccatgaagcttgacaacattgtcgaagaatgccttggcgacagtgacaacgttgtatggatgccctaggggtagaaagtggacatacttggagaagcggacgaccacagtgaggaccaatgacttgccaccaatgtgagggaagccttccacaaagttaaatgttgtaatgttggttcatgcctttctgctagtactaaaaaacttcatgttctagtgctgcctgcttctgctgatggagtattggattgcgatgtggtacaaatactaagccatagcccaccttggccgacacatagcttcgccctatattttgtgcatatttatctctatgatgcattgatacaatcattcggtagggtccaccccaacggttatttggagaagagatttagttcctagagttacctaagaaatgcatctgttggttcaataaagggctcccacgagctatacttgtcattataggatctggccacaaaagacaagctcacagttgcattaagatgatgaggacctccatgataacttagtccaacactgtcaaaggacaccccaaataatggcaccatctgcatagaatactacaaaaatcaatctgagaacatatatcagcatgcatcagaggagctacatcacttgaaataaatacacaagccaattattgcttggggtattaaaagttaatagtagttactaggtaaatatccatgtacatatgactcaccattccgccataatcatcaaaggaaacagcagaaaatgttttaattttggcatcaacaatgatgctatctgaactgcttgatgtaggtggacctgcaagcttcagtgcaagcctctttggaggttttctatatccacttctcacaagaaacgtaccagcatcattatcaacagtccataagctaaaaggttcagatgttctagcattagatgaatcccataaactttcctcagaaaattgacctccagccaccatgtcatttctaatacatcttaacaaactgaagtcctctttggttggagaacttttagatgcaacacatcctaatgccacaaaacctgaaggagctttaggaaaccaaaatgatacaccctcagtgccccggtgcttcttaattcgaccaacaaggtcaaaaccttcaggagctctgagaaaagtgtcttcaccagtatc

SEQ ID NO: 7072 - DNA, 840 bp, Zea Mays
ctttagaattgtacgtgcaaacggtgcctttatgggtgagagtgggttttctgttcggggatgtttgttgtttattgctctgtcgttcttgggtgtggcctcaggggcatcattagtgagggttcctttgcatttcttctcggcgagggtcgccttcgtagcatcacccagtgatgtgctggctctgattgtctctttcttgggggccatcgtgggtttgttctttcgtagcacaaacggtggacgccaaatgttggttccttcctgacacgtggacaggtgggcccaacacttgagaggcaagaggattatggtgcacaacgaggcagtaggtagggactgtagcgtcttgttatgcgtgtcccatccgtgtacagggtaggggtatttataggtaaccaggaggggcagtgggtccccaagtactgttatgcccccggttacccgctacattcctagaatattccccttaacatggtcattacagtggacggagtacaataatccagacatactacgaaatctaccccgcaatgaggcttacaagtgggcccgaaggactacgaggtagagcctgggtctctacgtaatctgtcgtggcctccgcttgtgtgtcacacccttgattccacgaagtcacatcctagccttcgtgggactaggagttcgcatctgggacaaggccttcagggtgcgtctaaggctgtagtgagccccctcctcgtctgacgtggacattcgcctttgcccctatcgaaggaagatgagtggagactgatgcagcctgatccgaagtacccttcgattgatgcacctgtataagaaacgtctggtcgtagc

SEQ ID NO: 7073 - DNA, 488 bp, Zea Mays
cttgttcttcgccggcggcgagggctgcaacttcccatcgttcccaatctttggccttactgcgacccggcgtaggtgcgtcaaggtttatggattgcatactgacgagtcgtaaatcgtaatcttgatgcgacattagttttaggttctacttcgacttctcgatgaccaacatcggcgtcaggctattcagcctgtgcaccacaccatctccatgctcgtgggaaccatgatatcatacgggatcctaatgtcgtacatgaagacgatgcagggcatctgataccctcgcgacaaccacaacgcctacaggatgctcatcgggatatccatgggactttaagctatggtccaatagtggggcgtcatgccagtctcaccaccaaagttgctctttagtcacttggtggtaaccatcgaactcgagcttattggtcagacgaatgagaaaatcataatattcgatgggacaaacatactgtttacta

SEQ ID NO: 7074 - DNA, 562 bp, Zea Mays
ctagctcgttgctggtgcggagaagtaaggaagccgggaaacatcggtagggtaatccgctgccgtgaagaactccaattcacagtcgttgtgccatctggtttgggtcggaggtcttcgcctgattccagggacccgttccagtgcatcgcggaggtgcctgtcgtgataggggtgctggctcgccggagctcagcggacattgttagccgccatttcccgtggtcggggcttgtcacagggcaatcactggtaagatgacccctataaggctcgatgtttccctctcgatgtgatgcacccgtccgtttacgtattggggctctagggcgtcggtggcgaattcctagggtaatcaccgccgcggctgcctgggcgccaccgtgctccagcgccgggtggagaagatgccccgtggccattagatcaccagtgagcggttgagattagatcaacccatacccttcactgtgcttgatggtgtccgttggatcctgaccaatgggctagattataccagggcatacctccttcgttgatggaattaggaccgtagatcagg

SEQ ID NO: 7075 - DNA, 294 bp, Zea Mays
gttatatagcacgcatgcgtgttgatattaggataaaggattggcgaaaagtgcctacagtggtaaaatcaaacctatgggaggatgtgtcaaagaaatttgtcatgccaagggatgaaacccataccctcagtgtgaagaaggtcgctttgaaatctatgagtaaggattgacttctcgagattgtttgatcctgtttgcatcatttcttgggatttatgatttattttccttttattcgtacatgccatgcatggaaggatttcaagtggaaactaaatataaattatgtca

SEQ ID NO: 7076 - DNA, 505 bp, Zea Mays
aaaaagtcagggattatcaacttatgaaaaggaatatttggctatattgatggctgttgacaagtggcgtcagtatcttcagacagctgaatttgtcatttattcagaccaccgcagtctgtctcatctgacggagcaacgactatctactccgtggcaacaaagggtgttttccaagttgctagggctgcagtataaaattgtctataagaaaggtgctgataatggagcggcggatgcgttgtctcgaaggccatcatctgaattgtttggattaacttcagctattcctcaatggacgcttcagatagtggatgcttacaaacaggatacgcaagctcagcagttactggcagcattatctgttgatcccagcagttcagggcattacactcttaaaaatggtcttatacgttacaaggaccgtatatggataggaaacaattcagctcttcagcttcaaattatggcagctttacatgacagcccagttggaggacactcg

SEQ ID NO: 7077 - DNA, 591 bp, Zea Mays
gaaatttgaattagcatgtcatttgatagcaatgagaagagatatctcacgacatattgatctctggcttcctagtcatcatactctggattgtccacctcaatctcttttttgatgtcacacttctaggggatttttgcaggcgtcgctttggtgtcatcggttaggaagccaaatagctttgcaccatgaatagtatccctaacatgtgcatgtcatagtgcatggttagagtatgttaccttcttggagacaggtagaccaaggagagaattcacggaggtagatgacgatgaacttgtcatggctatgattaccatgtaaaaacacaaaggtgcttgaaagaattgtcgatagcctaaacccgggtctacgtgcattgcgtgttgatatgttggataagtaataacccttcacggcggcgtacatatataggagccgattctaggagttctagataaatacaatataggtttaaattagattctagtctaccttagaatcggaacatttaccgatgataacttcctgtcatatacaatatctcttacctatatatgtttctgcttccattccaatccatcaattcac

SEQ ID NO: 7078 - DNA, 559 bp, Zea Mays
ggaagggtggtggaacttatttacctcccaatcggcacactcggaggatatttagacaaccccagccacaaccagtagagatggatcctccgccaccgcctccaccagcaggagttgacccactggttgcagctcagatgaggatgatgcaacaaatggcagataccatggtgaatatgtgtgctcagatgcagcaagaacgccaggagatgcaccaggaacgagaagagatacgtcgggagctacgccaagagcgagaggagatatgccaggaaaggagggcacagcagcaacagcagcaacaatagcaagcaccactgcctccaccaccaccaccagttccaccccgagataagcaccgggagttcatgagccataagccaatgacatttgctagttctcctgatctactagacgctgatgattggctgaagtccatagagaagatgttgaacattgctcagtgcactgaccgggagaaggttttatatgcttctagatgtctcacatgtcctgctgctgattggtgggattcatatactgctgcccacgacgctgc

SEQ ID NO: 7079 - DNA, 505 bp, Zea Mays
aaaaaaattgaacggccagcaggtaccctgacgatcaatacgacagattatggacacctatgattattgacgccatcgactggctggtgctatccacgacggaaaaggtgcggaacatatatgatgacctcttcgaggtgccgtcgaaggtgatgcagacggcgatcacgccgcgtgacgctaccagcagcatcaacttctattggaactccaagggctcgtcgcttgggtacataccggtcttccacttctccgaggtgctgcaggcgggcgccggcgttgttcgccagttcaacatcaacatcaacggcaagcggttcacctcccatgattattacacaccacggcacctcgaaagtggctacgtatacggtaccagaccttacaccaaccagatccggtataacgtctccatcgttaagacagacacgtcaacgctcccgcctatcatcaacgccgacgagattttcatcgtcatctctacgaccaacgttggcacggactc

SEQ ID NO: 7080 - DNA, 795 bp, Zea Mays
acaaatggaaaataaaacacaacgtggatcctgttttccaacaaaatacgaaacgatagcacagaatgattaaaacggtctaaacccacaaaataataaacgcagaacttcaataaaacgtggggaaaactaaccccaccaatttgtggcacagcgcattagtagtttattcgcaaaaccctggaaatttttgggaaatcacaagggggcgccggacgcaaaaccccacttcgaatgccgagatcaagctcaaatcacacgaacttcacttcgaagtagactgaaattcgcgaacccaaaagctaacggtagaaggcagaagttatccgccgtgctaagcgactggagtatcgatcgatcagagtggtacaacacaaacggaaataataattgtctatccacacaaaagtccctggatggcaggatagaataaactaatttcgaattccactgcacttggctgatcattttgacagagtgagatcgtgaactcagagaccgaggctaaattcagaccaatctatctatgcagcagcaacgtacggtagtacacactgaataaccgcttagaacgaattggccgcaggatttcgaacaaacgtatggaatagtagaaccccacgaagttacgccacgatgcaacaccagcaccagttggttaccaaaactactggaaattgttgggggaccagaagcaacccaaaaccccaactaagcgcacagaacaaaaacaaacaaatgccgacaccaagcacaaaccgcagcaacttcgcttcgaagcgacaccgctcggat

SEQ ID NO: 7081 - DNA, 444 bp, Zea Mays
tctatcagaataactgaagcatcctctaatggtacagtagcgaaaatatcccaagattcagtccccctcgccgccggtgatccatgcacccggattcgcgctgatctccatgattcgtgcttggcacgccgtggatattcacggggaggtcaaaagatcgcgcgggggcgtggatttggtcgcggcagaggcttatcacagcgcctatagccattgcgatgtggccggaccgccggtgtcgccatggaaactccagtgacctctgttgtgccacgccatggcttgttactgtgcggtagtgaccgtagcgcacttcagagtacaatcgtggagccattgcgctggtgaacgccatgaattctttgcgccattgctctttcccctctccggccgccaagcgtctccttcaaattagccgccaccgctcaagggccctataaattg

SEQ ID NO: 7082 - DNA, 516 bp, Zea Mays
gtttctacaagataaccgagatgtatttgcatggtagcctgcggatatgccgggagtcccgagagagctggccgagcacaaactgaaggtctatccccaggcaaggccgatccgacaaaagttgcatcgtttcacgcctgacaagagagaggctattcgcgccgagctagctcgcttagtcgcagcagggttcattagagaagtactgcatcctgagtggctagcaaatcctgttattgtactaaaaaagaataaagtggattggcgcatgtgcgtcgactatacagatctcaacaaacactgtccgaaggatccctttggacttcctagaatagatcaggtggtagattcgaccgccggatgttctatgttgtccttcctggactgctactctggataccatcagatcagcctggcaaaagaagatgaggaaaaaactgcattcattaccccgtttggagctttctgctatacctccatgccgtttggcctcaagaacgctggagcaacttacca

SEQ ID NO: 7083 - DNA, 574 bp, Zea Mays
ggtcaacaatagatcaataggttgtagctcttactttcatctatgaccaaagatgatctgtcttaggtcatgatatgtcgaactactgctaaacatgtaaggttgtacaagggaactacacagcatcaataagggcacactccatcaattcaaggattgcactttctattaccaaaaaggagacatctccatcaccaaatacattagcaagatgcactccttgtgtgacgagctagcatccaccagcaagctaatcgacgatgacgaattgatctccaacaaccccatcgacctcgactacaagtgcaacctagtcatcaccacacttgcaaaggatcatctcaccatcaacgaggtgtattcacaactagtcagctttgagaaatgcatggaacccccacatcaactaccacacaaaaactaatgttgctagtcatgcgtgaggatgcacacacgcaatagaggaaacactcgagaaggtgatcgcggtccaagagttcacaagcaaaatgttgggtgtgtcccagaagcgacaaacaataggagaacaaccttgatgccaattttatagcaa

SEQ ID NO: 7084 - DNA, 303 bp, Zea Mays
cgcgtgggtaaacaagaaagtgatgaaatacgacgttgggagatgtcgtaggagacgaagattctattcgcttgctacttccctctgctcctctgctactactacttcagttctcgccttctctttctgccctcacctgactcctcccttcctgccatttctctctcgatagtcgataccaccacacctccgctcccctccaagcctctccttttcctaagccccgacgtcttccgacttccaggtcggtgccgggcaacaataacttcttggtcaccgagccaaaagggggtcttttcggtt

SEQ ID NO: 7085 - DNA, 961 bp, Zea Mays
gtgatctctaacgaagccgcctgggtaccgagttgtgcgggtgggggaaacacagggcgccatcgcggtgcagtgggaagaaggtagccgccgccttgggtcctcacccccatggtcgaacgaatcgcgccttgtgatctagggtgaccgccccatgtctgggtccgtgttcaaggttgcggaactgcgcgagggagctcaacatcgtcgtaattgctcgtcgtcgttcctcgctgccgtaccgcgcgcagggtgtcaccaccgtcgttcgaccaccagaaacacgaataggtgaagcgttgctggtggtggaaggtgtccgctgcattccgggtcggggattggcgctgtgtcggtgcgaatcgctcgccggaatcaatcctcgacggaagaaccgcagctcgttgtgacccgcggtaccaacatcttcattcctggtatggttatccccatgagcttcccatcggtcctcgcactgcgatgcaccactgggataggcactttgacgcgggggcattggcttgcacatcaccggtggggtgcgccgccgtgcggtctgagcgcgccgccgtgactcaatgcgtggtgggggaaggattcctggccgttcgatccatttgtgtggccaggattagatcgtcgccctactgttggtctgaatgcgtggatcgtcgattgtgagatctacggtcgcgattagagcatacataccccttcaccgcataaaaatgtggtcatcagttttgaatgggagggcgggtgtgggtgttgatctggcgcgttcgtttttaatctgacggttggcataacataccgcttcgctttaatggaggatgtaatcgcgaccgcagaactcagatccaacgaccagtagttatccataccccttggtcgtgcgcaatttgttaaagagtccctggatttataggatatcaacccgcgctccaccactgtgtaaaag

SEQ ID NO: 7086 - DNA, 491 bp, Zea Mays
gtgtaatataggggatctggggccgactcataagcgtggaggttatcaaccagtttagaaaattcagctatgtactctgctactaattgggtttgacgaatgtggaatagtttgtggatcataatggcgtgctcatcgcggccaaaacgatcgtcaaggagggcacaaaatccggaccaggagagatggatgagtttccgctcaatggattggaaccagcgagcagcgggaccttgtaagtacattttggcgaccttaacccaaatggtagagtctacggagtacatctcaaagtacgactcacaacgggatcgtcatagtttagggttctcgccattgaaatgagggaacgacattttgggaaggttgtcgcgagcatctagagctcccggatggggtgtaactgactcgcctcggaattgattgggtggggggtcaaaatttgcagtgaatcgagggagtggggtatcgtgcttacccttgaccgggtg

SEQ ID NO: 7087 - DNA, 1106 bp, Zea Mays
gatcaagtcttcggagtccgactccaagctgtatataaccgtaccctcatccagccattagcagccccaagttagccacgcaagaagaaagagagagagagagggggaaagaagcccatcgctggttttgcccaggtcgcgtggtgctctgcggtgcgatctgaatggtcggccaagcgctgtgaacaaatcgaacggagggctggggtgttggctgggcgcggccaccttcggtgctcgtgccgccatgggcagcattgtgggctgggggtctccgtcaactatccagccttcacttgagctcgtacctcattgcagactatgcgatgatggctctccagtgcgggcgtaacaccatggggtcgctgggtacctacgcttgggaccttcgcttcacgattggaggtaatcctggatcatgtacttctccgctacgagtagggcaatctagatcgatggttgggggcgggggtcgcagagtcaggggaacgacgatggcgccgccgtgttgacagccaggggaggaagaagatggtcctgtagccgttagatgggggtggacggctgagattagaagctggatacctcttcgtcgtattaaatccatgccgcagaactttgatcgggcggataggattaagacaaacacgtggacttattacgtccgtggatctctgatcctgcggccatcattgaataccgattcacttaattgttagatctaatcctagcccttgatttccaatccagcggcctcgattcaccgataccccttccttggcttatttgcttaagaatccctggttaatgcctgaactaacccgcggtccagtccaggattcgctgtgtcttgcgaagttttgcaccgagacccctagctttctctgtaatagtgcgcccactccagagacccaggaaactcaataattaaatgtagaaattgatttttatgtataaataattgctagaaacttgatttaatcatagaagatccattctagctccaaattagtatattccagttcctaaaattttgtaataatgttgtttattacatagcacctctgttttaacatgaaaatggtattaaaatttatttcttaact

SEQ ID NO: 7088 - DNA, 428 bp, Zea Mays
ctaggaagcttcgactctggtccggatgtgtgttaataagccaatgaagacgaaggagagaagctcgacaccttattaaacatgtccgcgaatgaaaagacgacacccctggaggattatgtggtttcagtgtataaggcctgaggacatatttgtaattttatatagaattgtactacgactctccattataaattgagctaccatcccatggagagggatactttttgtatttctagaggaaaagacgtgagaaaccggaatcgctacctccgaagttgtaccttcgtgctcttaccttaaccctcgaatgtatccttgtattgtttatcacttagaagagataataaagagacaaggccaaaattatcttcttacgctcttacttcgttttattacatggaaaattttcattatgtctacctttt

SEQ ID NO: 7089 - DNA, 323 bp, Zea Mays
gtaaaaaccatagccacccacacacgtggttgtaactgccatccctaatagatcccagctaaccaacacagggaacgagctcacgagcagcagagattgagatggatgcatggatgtcggtgatcaactcatcaacatacaggccgcggaaagaaaaaaccagagatcgagaaaacccaattgaaatgaaaaaggtcgatcgatgaaccgacgtggggcatcgcaccgtgctgggtatccatcgttggacgcggcgtccttctcgccgctgggccacacaccgcacgtccatgcatcatcatcgttttcgtggctacgcgttg

SEQ ID NO: 7090 - DNA, 318 bp, Zea Mays
gtcggaacgacgtcacccgcagaagcagtagcagcatactcttctattcgtccacgtggcgagcggccactcctccgcccggtgccacggctccatcgggctgcagcaggcacgcgctatagctttggagcagggcgtcgcgtcgagccaggtgtcgagaggccgtagacgagcgcaaagacgacagcccactcgcattggtcgggatgggatcatgcgtgggttcggtgaggagaatcgcaggtgcagggccccggccccggccccgtcagcgtcagagtgccactggcgagtgttgacgcgacgacgagcctcgcc

SEQ ID NO: 7091 - DNA, 749 bp, Zea Mays
ccaatggggtccatgctgaggtaggcctcgcacggcgtgatgaagcatgctatgtgaaggatggtgttcgggtgaagattatgcatctgtagctcgtagtagaacaggatcccccagacaaacagatgtaggggaaatctaaagccacactcataaaaggagacgagaaccaccaccttatcgtcccgcggcactggagcgccgcctccttcctcaaggcaccacctagagaccgcctctgggggagagaaaccctttcctctccaaatcctcgagtcgactatgggttagggtgcaggcaggaaaggaatccatggtaccagcgaggggcgagcggagaaggaaggagaactagggagcacaagaaggcttcaaatgaaagggagaagaaaaatgttggggcacgagtctgcggtaagcgtaaccgaacagaggcacccttcccctctattttatgtgcaggagaaggaagcccaggcagtgcttgggaggtgggcccacacaaaattcttgtaaaatcagtcgcctgccgcctcagaaaccgggcggcagactgtgtgttttacaggaaaccaaccgcctcagagaaatcaccgagagagcacgcaacggggaaggcacgggtaatgggcagagaggcacaccacttgcgcgcgatcgtttcacatcccatcgggatgcccacgccaagtggcgtaatgatgacctcgcattttaccgcgtcaccacgataattacaccgcgccaac

SEQ ID NO: 7092 - DNA, 496 bp, Zea Mays
ctggtgcataccattacaacgaggatacctccttagatttcggtcacctcctattccggcgacgtagatgggatcgtcgtcttggatctttgagtacttcatagtgtgcgagttgggctcggagattcaatcctggatggcatcaatgctttccatggcgttgtggagatttacatgccagttctcatcgtccaaccacaatctataacctcctcctctgcaactccccaacatgagtacgcagatcccacttgtcatcccttcccctcaccccgttaatttgattgagtgtcgacatgctttaagtgatttatggccaaatttctgacagagtagaatggatcgaattggcgatcatgcaaacacatgcgtccaacatcagcatttggttatgtgtggcagaggcgggcccaggggggtttcatgggtattcattgaatacccaagtttttggtgatgtacaatgatttatcaataatgtattacataaaatagc

SEQ ID NO: 7093 - DNA, 422 bp, Zea Mays
tactactagctcgctaggacagttgctaaaaaccatggaagcacatatctgtttgggacttatggagaatggcttcgactgaatgcctgaatcgggccgggaagcacggagcagacagaattgcagatagaagtgcagtatatcctctgtgtcccttttttcctccccaaacaaaaaggtgtttctgatcactgtcaccccaggacctatccaaatcgctttccaatgcagttagacagagaaggcatggctgtgatgttataatgctgaaggaccccaagaagagattatggcctgtcgtttaccacgacagcccgttaattgtgggcttcaccgagggctggaaacatttggtggcagcaaacgaccttcgggctgtggacgtttgcgagcttgttaaggggccagacgatggtgagccg

SEQ ID NO: 7094 - DNA, 688 bp, Zea Mays
aataaatatccactcccccgtattgaggttctctttgaacagttgaggggtgcccaggtgttctccaaaattgatttgaactctggttatcatcaactaaggattcgtgaggaggatattgagaagaccgctttttgcaccaggaatgggcattatgagttcatagtcatgtcttttggcttaactaatgcccctgctgcttttatggaagcaatgaataggacgttgcatgagttattcgacgactttgtggtcgtgttcctggatgacattctgatttattctaagaccaaggctgagcatgagcagcatctccgtctcgttctgggtgccctaagggagaatcagttctatggcaagttgaagaagtgtgcattttggctgtccgaagtggctttcctggggcatgtgattaatcagcagggcattgcggttgatcccaagaatgttgcggctgtggtggagtggaatagaccctctagtgtctttgaaattcgaagtttcttggggctcgctggatattattggcgtttcataccaattttttccagcattgctaagcccttgactagactcttggagaagggtgttctcttcatctggtccagcgattgtgaggtcagttatcagacattaaagagcaagttggtggacgcccctatcctagctttgcctgagagcggtaagc

SEQ ID NO: 7095 - DNA, 668 bp, Zea Mays
ttgcaaaaagtactcgataagtatcctagggttaagtctaaaattcagtgaacttggggcatcattggagccttatatctttaaatccatgaggattctgtcctggatcagtacatcaagatgatagagccatgataggaggataagtttgattaaaaggcttaacccaaaaacctagtggaatttaacgaaaaaccccctcaaagttgagctatcagactagggttctgtagttctcagcagaacaattgtatagggccgacttttggaccatgtggaactcgatttgatgggtgcttaactaaaacctctataacaaagttaaagctagtttgtaggggagtaactttgatgcagtcggcttgctagggtattgtacaaaaatcagagtattagtgctatgaagttgagctgtgagaaacaagttatgcgaattgggcaatactgaaaatcggattcagagcagtatggcttctttgaaatgcagtcgatttgagagcaccatatttgagaatttatgcagaattgatccatgaatcctatagtaaacttgaagactgttgtttggtgaacaatttttattaatgaagatcaacctgttcttaacaagaattaagagaaataaatggtgaaaggaggtcggttcagcagagcaatgcagatcagag

SEQ ID NO: 7096 - DNA, 740 bp, Zea Mays
ttcgattagagtcggctatggtctagagacacgccccaaaagatacttgcgggtgattcgcttggttccgaacccgtttgatggggtccgagggctcgatgcctccctacagtgggatactgccatgaatctctcccggggtctcggatatgtcttaaggtaccttgggtcacaacccgagctagggccatgtatgggcacacctatagtcatccctgacctctggggcggttatggagcccttccaggggccaaccttcaaagccctgatcaatattgggctcggagccctgacgccctgaggaggtttttctgaatcctgccatgggtcaaacctttgaacctctgaacagtatgcctcattgccttttttcctcccaagatgagatgcccaaggcagaagacgactttggttcgctgcttcctttctgaggtgggttgcccgagacagaagatgccttcttccggttcgctgctgagaggataaagggcagagaggcagagggcaaagggcgtaccttttgaggcgaaatgcagaatggcgctcgacgcgttttttctcggggggcacgaccatttaatgcgacgatacgtcctgtcggtcagccgaccgtttgtgacacacgtgcacataggattcgaaacgaccgccatccggccgttacaagttgcacctcggtggcttcgctcgttcctatataaagtcgaccgagataaggcttcggaccattacctttgtt

SEQ ID NO: 7097 - DNA, 542 bp, Zea Mays
ctccgagcgctgccggatcctccgcccgcgccacgccgccgccgaccggcggtgatcccatgcatatgcatgcggacgtgcagcggatcgaccattgataggactcgatcggccattaaaaaaaaactatgcgcgcaccacctggtctccttctcttttatgacatgagtaattggtaatccaacaatcatgcaacggattcggaaatacattgatgtgcctaattgcagcgtcaattatatgatagcagttggccattgatatttttcagatttgagatcgaaatgtttatgtgccgatctctttctctctatgcataaataggaggcaactagtagaaaggaaaatatattatcatctatagctgattgcaatctcacattcttttatttcttaggctcatagatggtgggatccgatagacaggatatatgatattagtgtgtttacatcttaattcttttgcactagatttgttactattacaacgaacagaggtaagtgagtttagtcgtcaacaattgagcgcgaggtggcgacgg

SEQ ID NO: 7098 - DNA, 660 bp, Zea Mays
tgactgagcttcgagccttcgatgatggagaagactcacaatgatagtgaccaagacggcgtagtgcaccagcatgagtacgaagacgacgtcgagcaagcacggcaacgagggctcggtgtagcgaaagtcgacgacggggcagaggaggctccgaggaggatttcgacgagctgcttcgccggcggcgggactgaaatcggcacggaggcggctgtgcgcggctagacgcgagaagcacgggagagggtgaaaggaggctgggaaggagtttggcgagagcaggcacgcgatttatatccggggaggaggaacgggcgctgggatggcactaatggagaagaaactgtcgccattaacggggaagaaacggatgactctaatggacagggatatggacagtaaagaagaggagaggagagggcgcgacagttggggaggagaacgggacagacgcggtgctgatggtctccactacgggttggcggccgtgggaggcgaggcgacatccgttggtggcttcaactgacggcggcgacaattcagtgcgcagcaacgaacgggagaagaggcaggtagaagagatacgatgaatggggttgggcccacctggaagggagagaggtgagggagagagcatatacgggcgtgggattcggt

SEQ ID NO: 7099 - DNA, 455 bp, Zea Mays
cttagcgtatagaacctggcagaacgtgtgttggggcgttagtgcgtcgatgtgcgtgctcgccggcgtattgccaccgctatctaagcgccgcgatcggtgggtgtggctggaggaagaatatggatgctgaccgttcgattgtagttggacgatggagattgggtctggagaacggctcggccaggagtgctgtgggtcgtagatcaagggagggacggcacggattaaatctcgcgtaccggttcggccaagtcggtagtggccattgatccttgatcggatggctggaagatcgtgtagttcattatcttttatgggccgttggatcgggatccgatgaccccggtcgcgtactgatttgagctaggcgtgatctaatctggatcgtttaaattggatcggacgactcctgtttcgggataccctttcgtgcgggaacatttgcagaagag

SEQ ID NO: 7100 - DNA, 684 bp, Zea Mays
tactgctgcttcggtggctcacgtgttcatgcaacaagtataccgtttgcatggcttaccatttgctattgtgtcggatcgagaccgaatttttacaagtcaattgtggaagagtttgttctccttgacaggcgttgcattgaatatgagcagtgcttatcacccacaatcggatggacaaacagagcgggtcaatcaatgtctggaaacgtttatgtgatgttttgtgaatgcctgtcctcataaatgggtgcagtggatttatttggccgagttctggtacaatgtgagttggcattccgctcttcagctatcaccatttgaagtattgtatgggtacaaaccaaagcattttggcattgatcttcaggatgcttgtccagctcctcagttagctgattggctccaggagaaatctgtcatgtccgcattggtacatcagcacttggcgcgggctcaacagcgcatgaaaattcaagctgacaagcaccgatcggagcgacagtttgcagtgggtgacaacgtctacctcaagttacaaccttatgtgcagtcctcgttagcacctcgctccaatcagaaacttgctttccgtttctttggaccttttctggtcatcgccaaagttgggtcagtggcctacaaattggcgttgccagcttcatcgcatattcacccagtttt

SEQ ID NO: 7101 - DNA, 651 bp, Zea Mays
atcaaacccaactaatgatttgcatgcagagtagcagtcaagcctaacaaaatgaaagtgggtggagtactaacacatgattaataaacaggaagaaccaaaaacattggaacatctatgattgtcttaccgagtaaaggattgtagacgcacattggcaccccacaacaatgtcccctgaaccaacatcataacacagaacacaatcactgacacacatgttggaccaaagtgaagttcatcaacatacctttccaagtcgggatgcacgaacacaaacacgtggaccgaatatgtgaccaagataacaattcctcgttacaaaagataagaacacaattacgaattgaggtggtacttgtttgtttgaatcgtatgatgcacaccatccctagaacaaatgggatcgaatcactaaacgatgcacgtaaggtgcaaaccctaaacactgacgcatctatggtggaaaacctagaaacgacgtataggcaacatgggggggttgcagatgacgacgaaatgtggcagaccatacctttgtaggagccaacgacagctgagcggacacctgcgactgcctcatcatgtctgcaggagctgcaaccaagtctgacgtgacatgaatcaacgaggtgggatgcgcctaaggat

SEQ ID NO: 7102 - DNA, 3995 bp, Zea Mays
attacaagcctagcttatatatcagccggccaccacaatcacaatacggcccaatacggcccaccagctacatttcaaaattgtgattccagaattaactcccgtgctcagtcgccaccatctccattcgtgacaatacctccccctgaagaaccagctggtccccagatggttgcttgtggaaaacgagatttgagcacagtataatcctcccaagaagccatgtcggctggaaaacccatccatttgatcaacacttgagttacagctgcagaccctttcctgaccaaacgccggtctaaaatggcttctggcataggaacaacatcttcagagaatgctggggcaggtaaatccctgaatactggaacgctgttaggaacatgaggcttgagttgtgaaacatggaatattggatgaatgactgccgatgcaggaagctggagcttgtaggcagcagtacccaacttctccaagatgggaaaaggaccaaaatatttgaaagacaatttagcacatggtcgatgaaacactgaagattgggcaaacggttggagtttcaaatataccatgtcccccacttgaaattgtcttggagatctcttagcatcagcatactatttcatccgattttgtgtcgtagccagattagctttgatcaattgcaagaaatcttgtcgctgctgtaatgtgagctgagcatctgagggatctgaagacataggaacaggtagcaccccccagtttggatccactccatatagagctttgaagggagaacatttcaacgaagagtggtaacttgaattataccatagctctgcagagtccaaccactgaacccattgtgaaggggtttgatgcacagcacaccttaagaacatttcaaggcattggttaattctttcagtttgtccatccgattgtgggtggtaagctgaacttaactgtaacgtagtgccagtcagtctgaagagttcctgccaaaaatggctagtgaatactctatctctgtcagaaacaatagaccttgggatcccatgtaattttacaatctgagaaaagaatacttgagccacttgagcagctgtgtaaggatgtttgagtggaacaaaatgtgcatacttggtaagtctgtccaccactactaatatcactgtgtacccttttgatttaggcaatccttccacaaagtccattgacaaatcttgccaactttggtgaggaatgggtaagggttgtagtagaccaggatatttacagttctcatgcttagcctgttgacagatttgacactgcttgacaaatagctcaacatctgttttctgtccaggccagtaaaagagtttctttagtctctgataagttggtaaaatgccagagtgacctcccacagctgaggcatgaaaagctgaaataagtttggtgtgcaatccaacattctgtcctaccaccagttgatgttgtttgtagatcagaccattatataaagaataaccttgaggattggggctttgtatagcaagttcttgtaacaattcttgtgcttgtggatccagctcataagacttgagtacttcttgaatccagactggtgtagcaattgatatagcagctagctgaacacctgctggcactctggacaaggcatctgcagccttattttcactccccttcttgtattgcacagtaaactgtaatcctgccaactttgccatggcctttttttgtaggtcggtggccaatgattggtcctgtaaatgactcaagcttttatggtctgatctgataacaaatgaccccctttgtaagtagcatctccacttgtcgactgccatcaaaattgccaagaactccttttcataggtggacaatttgctattgttgaccccaagtgccttgctgtagaaagcaatagggtgcccattttgtgataacactgcccctatgcctctatcagacgcatctgtctcaattacaaactcctcattaaagtttggtaaggccagcactggagttgatatcattgcagactttaattcttcaaatgctgtctgagctgcagaagaccaattgaattgcttctgttgaagaatggaggttaagggtttggccatcataccataccccttcacaaacttcctgtagtagccagttaaccctagaaaccccctgagctcagtatgggaagtaggaactggccatctggtgattgaaactgttttggaaggatcagttgcaactcctctatgagatatgacatgccccaaataatcgatctgctgaactgcaaatgagcacttgcttcttttagcgtacagctggtggtcttgaaggatttgaaagaccttattcaagtgaatggcatgagcctccaacgttggactatataccggtatgtcatccatgaaaatgagcacacatttcctcatcaattcttgaaacaccacattcattaagcattggaatgtggcaggagcattagtcaatccgaatggcataactctaaattggaaatgaccatggtgagttttgagggctgtcttcagttcatctgcctctgccatcctgatttgatgaaagcctgatgccatgtccaacttggaaaaatatgtggctccagataactcatccaagaattcatcaataattggcataggaaacttatttttcacagtgatatcatttagtttcctatagtcgacacaaaatctccagctgccatcttttttcttcagaagtaatactggagaagcaaaaggactcacacttctagtaataatcccagactttagcatgtcttgcacctgtctttcaatctcatccttttgcaaaggagagtatctatagggtctcagattaacaggtgtagtaccagtcaacaaggtaatggtgtggtcatattctctagagggaggcaacgagtcaggtgttttgaataccttttcaaacttgtcaaggatttgttgtatgtttggaggaatcatttgtgtttccaccttctcctagttagatattatttgcagcatggccacagcccaaatttcattgcctctatgccacttattcacttgttcacaagagatctcttgcagcctttgcactttaccagagtttagtccttgtaatctgaccatttctccttcataagtgaattcaacccactttctatcccaagcacacagcataggactaaacttctctagccagtccatacctattaccatgtcataggctgcttcgggcagcacaaaagcgtcagccacgaatgttttaccacaacaccaccattccagttgtaccaccttcttattgcaaattatcgtctgtccatttgctaccttgacagatactggaacaatgtcttgagttgtacactggattcggctgtaagctaactcactaatgaaagtgttagagctgcctgagtcaaacaactgtagtatcaactgattttgaatctgagccctcaatctgatgcatttggtctattcagtcccactcaaggcattcaaggatactaccattccttcctcattattttcccaactggactccagaaaatttaagacctcatctgacaacataggacccccatctccaccttcttcaatagtaataccattgagctgtggtgcagctgccaccttgcatttgtgtccaggtatatatttctccccacaacgataacaaaggccattcaccctgtggtattccttcaattgtttggccttccaaagttccccttggaattcgtttgtatccttggtgttgagtgtaggattcccctttgctgcattaaatcttctgttgcccatcggttgtctggcctgccaaccttcatacttcatagccagctgagcagccatcaacaccgtttgaggaaactgaacctccacatttacccttaactcatgtttgagacccaacacaaattgggttaccaggaatgtttcactgatggccttctcaaacagtctaatgtggtaaaccag

SEQ ID NO: 7103 - DNA, 848 bp, Zea Mays
tgccgcatggaagtagattgcgctcggccgtgaaaagatcacgtcgcggatgagtttgggctactgtggcctcgctgttcctcgaccacttgcaccggtgacgtggccttgcggtcgtcaccggagtttgtgcccttcaccgcgattgtgccacacctcaggccattaaccacgtcgtcgtgagttgtgatcgttacccagagactgttgtggcttcttatcccacaattgccacgaatcactgcgctagtaacctctcccctctccggccaccaccgcaccatctccaattcacaagccaccgcccccagagcctataaatggagtgtgccgtcggctccgcaaggtagtcaagcaaccaatacaccaactcgtgcctcgaaatatccaccagagaacttcaatttaggatttcccccaaatcaaccaagaacaccgtgcagtgtgagctcaccgtggctagctcattgcaggtccgttcatcgcttccctgttctcgttttagcatctctatgtactatagatgcctagcagcctggtcaattgaactaaattaggctagatcaccgggaacaccacggattgtcctcggtttgcgccgtcgccgtggacagagcgatttaggggtagaactctgcaattgaaggtagggaaatggtgaatatgggtcaaatttggtgtcaaccgctcgggagcactgatagttgagttatccggccaatatgagctcgccggagtgcctgctccaccgtccacggtcgtggatcgagctctgtaaagaaatagaactaggggttgttttgtagatgtcagtgactctaggaatagtgtcgcgaccccatttcaag

SEQ ID NO: 7104 - DNA, 700 bp, Zea Mays
gcaaggaccgagtgcttgtcatgtgattgcttgctccaatgtcaagaacccacataccttcaagaactgaaattggtacagtctttatcagatgaacctgctgaaccacatcgtgcactatgtcacacgtggccagcattagagcaccattttgttcagctgcaccagggtcaaatttgcctccggtaatggcatctccttcttcttccccctcttcagacgtttgcagtcctccgcccaatggccatagatgccgcaatttcgacactagcctttacaccgcgaagtgccctgggaggtcagcctgaccggtctagaggcattcccgtcgtgatgcaccggtgacttgccttttgatgaaccagtgttggagtcgccgacaccgtccttgtgacttgaacataggtggtgtttgttcttctcaagccagtcctcctcggtgaggagaagacgtcccgccttgtcgatgaggtgtgcgcccttatcattaaaccgatcctcgacggcgcgcagacaccccaccagttcatccaacgatagctgcttcaaatcacaaaacatttcaattgttacaacaacctgggtgaagcacaccggaaccacccacaggaacttcttgatgacgcgaacatcttccacgttcttgccaagcgctcgaaggttgccgacaagatttgtgattcgcatcccgaaatcttcg

SEQ ID NO: 7105 - DNA, 484 bp, Zea Mays
gttttcagtggactagtaactcaggaatttgcatgaaaactttgttatctttcacgagcatgttatttccttaaaaccgaatttcagtcgaccatcaagtaacgattttccacgatgtcaatgttatcttatatcttacaatcatattccccccctttaacttttcttgaacagaataaccatgtcaaggttgctgttgttgctgacccacaggcgagttccccttctagcattattctgtgtaattttgctgttaaacctgcaatagtatgcagcgattatcttgaatatgttgctccttcctgaaaaggtcttcctttgcagcttatggatagcacctcccttggtcttccatcaagctcagttgctctccaagctgctgagttttacacggatttgaacatgagaaggtccttccagtccaccatactgccattcaaacctgatgtggtcttatttcttggtgatcactttgatggaggcc

SEQ ID NO: 7106 - DNA, 396 bp, Zea Mays
gtccagctcccattgctgcaacttctggtggcacgttcggatgcagccggtcgtacaacacgtgcacctcttcatgcaaggtgttacaatatgcttgcaggttttccaatgatgtgcttagttctgctacccgggctagagccttggcctcacaatcccaggcgaaagagcgcgaatttacgacccagtcaatggtcgtgtcgcgttccacaatttccagttgcaagcgttgaacttccgctgacagttcagcaatgcggtggctatcgtgcgcacgctccctactcccgtggcatagctctgacataagtcgcgccaccctggcctccaaatcccccatttggttgttgcttccactgctgctcccctcatgtctaggagccatctgatgccggg

SEQ ID NO: 7107 - DNA, 734 bp, Zea Mays
tgttagagaccttgaagttgggaggccattggatggcccgaagacgcggagtgagcgtgaagactccgcacgtgtcctcctgccggtgttcgtgtcgtcagtcccagggaggggagtcggtagttggtcgtctcgaccgtccccagaatggcccactggttgtggttgcagccgactcaactcgggtggcacaactccatgatggtatgccgtgatcccggtcatactcctcccgatgccttatctcattttcatgtcaccaatcgcgcgaagcgttgatggagctccgcgcgtctcatcggctgttgatggtgtgacgcaggtcaatcgaaggatgagcgaggggtagaaggtgattagctgcctgagtaagcagtcgtcggtagccttccgcgtctaaggtttgcgggagaccgtcagctatctatgttagtactcctccgacttcactcggcgtgttcagtgctcgagcaaaatcagggtacaggtttcgagcgaggagagggttctctcgccgtagcctagcatcctactcggctagctcacgctccctgtcttgagcttgtcggcgatcacggcggcgagagctacgcctttctcggtgtactcgttcgttaggagtttctcccacctctgaggcttcgtctcgggatatgggctacgccagaccccgttccccgacttcatgatgtcgctgcacgttctggtatctgttcctccgtcgccgtgcttca

SEQ ID NO: 7108 - DNA, 538 bp, Zea Mays
tgtaagcaatgtgttcctgtaccaaatccctggtaccgatgtaagtgcacacggtgttgaaagccattaaacacgcctgcacttcattcctaattgcaattgacgaccttctaataccgaagtgtgaccatatgagacgctgaataatgcccctcacatattccctctcacttagatcatttttcacatagaaccattgtttcatccaagagcccggccatttctttcgaaatgttggcacgagatatcttgcatcagagcggggcacgaagttgtagcacccgaagttgttatggtactgcgcctttccagttgccttcgtctggtaagataattcatgaatattacagaagcacctggcatttggctctagcccttggctcctcatagcccaaataaaaacctccacttcaatcaaagcttcaggagtaagtttatgaagttatatttcaaacgtcttcagtacttcaaccagcatcttgtgcaatggaaaacgaagcccagccttcatgaagcttttaaaaaccactacttcatc

SEQ ID NO: 7109 - DNA, 518 bp, Zea Mays
aaatagctaagtatgtatctgagtgcgacacttgccaaagaatcaaagctagtcatttgaaggtagcaggtaccttacaacctctccccataccatcttagaaatgggaggacctcagcatggacttcatcatggggttgcccaacacctcccggcaccacgattccatatgggtcattgtggatagactaaccaagacagttcatttcttgccagtacataccacccacagggcagaaaagtatgcagaaatctatatggaccaaatggtgcgtttgcatggaataccaaggactatcatgtcagagagaggagcaccattcgtagcacgtttctgggagcagctgcaagagtcacttggaacccatgtgataagaagctcagcataccatcctcaaacttatggccaaacggaaagagtaaatcagattcttgatgacatgttgagggcatgtgtgttacactatggcaaggattgggataagtgcctttctctggcagaattctcttacaataac

SEQ ID NO: 7110 - DNA, 1936 bp, Zea Mays
ctgagaaatacaataaactacaagagactgtatcgagagccaatcacctgaggccagcaagcccgggtcgcaaaagccgatgtcataggttatacacctacctcggtagcccgttatggcgatcagtcggtcaccttgcaaagggataactaagacaacgtttgcattaaatgtgagcatgacattacgggcacacctttgccttgacaacgcgcacagggtgcaggtgtacctaaagccactaagcaagcattctttagtatttatcgttgtatccttacaggcgatcttgactgtcggaggattgagagaatacttatagtggcgctaggcagtacaaaggccctcactagtgacaaagggtacaaggaaccgtactagaatccattaaaacgtcatccttactctaggtataaccacagctacacgcctccaaatgattgcactgatgcatgttgttgtaggtcacaagacaaaataggacaaggttgttggcccaatggcaggtagggacgacaggtagtgtatacatgtaaaattgctgcccctttggcctctaaaaggagatggtagatggtagagcaacattcaatttaggtttagacatctaactcctcacaagaatccacaacaagatccaccaaacctaagccaagagagttaaagacaatccaatatccaacaatagtgagagttagtctagcttgcccatacgactccccatcaagaaggtgttgtgtctctatggttttggcttgtaatcttgcgtaccaaatacactcaataatccatgatcagcaagaggacgtaaggtgttacgcacaatatggcctgaaactctcaatgtcatgatctcgtatgcatactctataacgttaggactcactcttcgctcccctagtaatccttcctcaggtacttttggtaccttggtgtctttgctatgacataggttattactgaacagtttcattgtagtactcgtttggaaatatgactgctttagccccatgaaattttattctataaagatcatttgacaaaaaaactataattcatgaaacaaaatgggggcagccattaaccttttgtaaggaacatcaccaatagctcttgatagtgctagctcgccattaacacgatatacaccagcccactcaagaacataaccaccagcagcctccacacggtttctctcgtcttctctattaggatgatggtcctttgtcaactcccttgcatgatacaacggtccatcataatttgccaaagcaaattcctcgtgattaattgagtttctctttctccttcgtttccctgatacaatgcaagctttcatattgttattcacccgaagcgctagaacatagtctaataaggaaaataaaatatgcaaagcaaaatgcataacttttattgagcatccttccctaaaactgaaactaacgaaatattaagcagcctgctatatccaattcatgcataaaccaatattggttctgggtgattggtgattgcgaccaactccctccatttgaaattacaaggagcaatttgtttgcttcattaggaccgtagagaattaggggaacaccttacaccttttttcggggggaggcttccatatatatagtcaagtacattgttattaaaatgtcgtttaagcgataaagcatgattaggagctgaaacgtccgaacgttctagtaaagtggcgtagaacgtccattttggacgttgaatcgtcgtttaagcgtctgaaacgtgttttatggcgttttaagcgttctgaggacgttctagtcattagtgggccttcctaggcctttaggtttacagccagagcacgcgtggaggcctcctcttcctcagccagcgcctggagctctcccggccgcccagccagcgcgtggagctacggtcaccccctcagccg

SEQ ID NO: 7111 - DNA, 435 bp, Zea Mays
gcggttgtgcaaccgtctgtgaagactgttcacgacacacaccgcgtcgagcatgtctacctcaacgagcataaggtgctgccggacttcgacggcgaacagcaggagatgaagtggtacctcgacactggtgcgtcaaaccacatgaccggcaacgcagacatcttctccgactacacccgcgacgtcgtgggctccgtgcgtttcggcgatggatctctggtggagatcgctgggtggggatcgatcctgttcgagtcgaaggatggagggcacaggacggttcatgatgtctaccacatccctcgtctttggagtaccatcctcagtgtcgggcaactcgacgagaacggcagcaggatcgacatcgaagacggtgttcttcatttgtgggatcgccgcagccacgaactcctcgcaaaggtacatcgttca

SEQ ID NO: 7112 - DNA, 420 bp, Zea Mays
gattggctcagatcagatcgcctttcgtgtcagtcacctctcgtatcgaactctcttcactctagctcggttcgacccctctactcccgccaccactaccagtctaccactccaccttcctccaccacaccagcttctgccgctccaatgccttccaccacactcgctacgcctacagcctccaccacacctgcttccactgctcctgctacctctgtcactccaccagtacctccaccccatttccgagagcatgacgagacagaggttcgagcacttgctgcagatcccagactgtttgacctcaagagggctagtaccaccagggtttgtaatttcagacatgtgccagtggagtcctggtttctagctcagcgagatccttcagctgctcctctcttcagcactcggacacaggag

SEQ ID NO: 7113 - DNA, 1320 bp, Zea Mays
agaaaaaaaagagaaaaccctggtattgggccgctcccctccaattcggcccattccaccttccctctcgcgccagcccacccacgcgcttgcttctgcttcggtcgcttacacgcggggccggctggtcagtcgcgtcgcgcgcacgctggctcgcgggacccgtgtgccagtcaagctaacgcagggattcgttgggtggtgtcgatgatgggtgggacccgctcgtcaggttcatcctcgacctcctaacagaagcaccgaacccgccgcgcggcacgctcgatcctcgctgggttgttgcgatccccggatataaaaccaaaacgatcccgcgacccccttcgacgatcccatcctcttctcacctcatccagtccgccgtcatcgccgttgtccgagagagagggcagtggggagctcgaatcgcgccgccgtgaagagaagctctacccgaccaccaaaatcagccggtgaacccgtcgttgtggtgcattgggtgttggggagggtgcgcgaagcctcgccttgggcgaattgtaatccgggactccggaattcctcgccgtgtccgctgcgccgccgtgaacccgcccttcgccgtgggatcgagcccctgcgtcggccggaacatcaaggtatgcaccgacctcttcgttggagtggttagaaggtagttggagtagcgccgcggggaaatctcggcgtgtgcccccggaatttcacaccggagcaccgccggccgccttaaatcgcgatgcaccgtggacctggggtctgcgttgggaaacgattgaaattgaggggtgaatcgggttcgggatgtctcgaatctcgcgtgggtcatacgaatttggggttggcgctcgggttagccggattcaaggactccggcgaagtccaccgccgcgcccctgggcgacaccgccatcgggacagcttgggttgggaacgacgccgctcggccgttggatgcgtaagggacggtcccgattagatcaagcttaccccttcgtccaatccaactgcgtccgtcgatgcgagatccagcggtgcagagtagatctttgattcattaaatccgtgccgttaatctttaatccaacggctctgatcgcgtaccgattcggcccgggatacatctaatcctagcggtcgatagtcgatcgtgcggctgagattgcaagatacctcttcggccgtgctttttgctaaagagaccctctgttttattaaaatcaacccgccatccccgttttactgtttcctgagtctgggacgacttaccccgagccccctgacttttcttataattgaggc

SEQ ID NO: 7114 - DNA, 822 bp, Zea Mays
gtttcatataccctgattattgctatccctcgcaaaagcagagaaagaagaggaaaaccgccgcttcggccatctctattgtgctgaagggcaaaaagattaaggtcttgacgcactgaccgagatacattgagacgaccacattgccgaagctgggtgaagggacatcttccattgctgaagcagaacaacctgctcctgccgctcccagggaagacctatttgaattgccgaaggttcctgcaatcgggccagtcgaaacgttgaaacttggtgtcaaggccaaagaagaggcgaccaaagagccaaagctaggggaaaaggtagggctgccaaagatcttgagccccccggcggagtcaggattgccgaagataacaagagctcctgcaataactcccaagaggaggagaatggctagagtgctagacgctgtcatggagacaacaaggacattaactcctgcccctgcaaagaaaattgccgaagctgctataagtcgcgctgaaactgaagctaggccctcagcgcctgctgagacagagcctcccgcaactgaggataaggctgagcaagaatctccagatgttggcatggccatggagaaggatgtggccaaaaaagctaaatctcctgctcccgaagcaccgtccgaagatctcgactttattattcgacatgcttcgggaaaaagactatctgaagaagaagttgcagaagccaaacactatgcctgggaactgaaatacccgaagggggtcttagtgttcaatggcacgaacgaagatgatttcctatactgtctcccggacaacaaagaaa

SEQ ID NO: 7115 - DNA, 641 bp, Zea Mays
ctggggtcctgactgaatggctggcaaaagtgcagtctgaagagcagaagtcagagcagactgcaaggatatgcgtcatgaattcccggtgctctgccctgtctaccaagagctgttgctgatgggtgttatggtggtcctaaatagtttggaacatagacaacatccgctcggacatttgttgttggatggctgcctaacgagcctcctcgcctgctaggtgagcctgctgctgagtgagagtctaaagtatggcagccaacgcagggtcaatcgctggaggagcagccggaggagcagcactagagccactagcctcatgatcatgggaacgaggtggcacaggaggtggtggcagaatccctagatcctcatcgtctgaagagatgtcagcagtggcaccctgatcctcaaactgacgaatagcatcatcctcatccttgaagtctagtgctggcggatctactaaagccggagcggtgtccttaggagctgggcggtagaatccgaactgatgtctggaggcatcaagagtggcctagaactgagggggactgatcagctgcgcgaagatgtggtagaggtagtgtgtatagggcagatgacgttgagctcatagtccatccaacaatgtgtcctca

SEQ ID NO: 7116 - DNA, 379 bp, Zea Mays
cagcagcgagatcaacgacggagttcgcggtttccggtggtaatagcctacggtgacttcgggttcctgtttcacgcgcggcccacggggaagacaatcctgacagcatgggtccaccaaccagagaggaaaaccagagggtccgagcgcgaccgtacaagcggtcccacacgctagagccaccgggatgacagccatgagagcgggcagtggctggccattgggccccacatgtcagcgcggaaagccaccagctgggccacgacgggggaaaggttaatgggccaaaaacgtatttccgagcccatcaagttctctttttcttttcttttctttttcttttctattccccttttattttcaaattctaattcttttt

SEQ ID NO: 7117 - DNA, 1754 bp, Zea Mays
gctctatcatgtgcaacttgtatcaatacttggtactgacttcaaaacactttggaaggtctatatttcgagagtttctctttaaataattggcttatttaatcctaatgttttttagcttcatgactcaagctcaacctatagtaactaaatggtcaacaacaacagttataaaataactgttgtataaagaagctataagaccatgatgcataaggtgaagtctcttaactgaataaaatgttgtatgtagaaatctgcttaaactgaatatagtgaggtctgtaaactgaataaattttacaaactaaaaaaatgtcaagtatgcaatctgaataaaatacacaaaatgaaaactggttaaaggttactgaaactgacaatgtacaggttgcatagactgaataaaggtttgtttggaactgtagcaatgcaatctataaactgtagacgctgataaacattatggaccacaatctataccattttcatgaatgtggagtgccatctctaaaaagagaatagtataaaaattatggaccacaacctggatggggtatatctgatgacacacttcatgcattaactatatatgtgcaaatttgcagagcaaacatagaacaatagtcaaaacacctgaattggtaattcatgaaaaaatttgagacttgccaagcaatagaaatctcacgtagccaggtagtatcaatcagtgcgcgaagggtctattcagattgacataatgtaatcaatagtaagacaagataatgaaggggaaaatcattatagagtgtccggtagcagtaaattccaacagtgaagtaaaaagtttaatatagaactaaaagatctcctagattcacattactgcactgtttcaatggatatgtgcgaagtcggccgctcttatactaaacaagcctaggcaggaacagattgagcagtacaagcaatctgtgcaaagatgaagatagaatcatactttcaactgaagaaaaaatgcaagtggaaacaaatcttgtattgatatcaggaaaataaaaatggcaaaagtctactacccgtacatgctttagaatttatattgattgatgcaaaataaaaaatggcttacaaacttatccttgcaaaatcagttatcctcttgtcaaaccattaggaaaatgcaagcaaacgttagtctaggaagcaatgtaacttacgccaggtaaacctgctgatatttttaggggcaatagttaaccatggcacagaactcatccccacaagcagaaagcatttcccaacatctcccaccatcaaccacggctctttcttccccatctctctctcacgctcaaccagccacgccaagccaagaactggtggcgccggccactagccggccctccatctccggcaaaaatcatggcgagcagcggcccaatcctaccttcttcactgatcggcagttgaaaagggagagggagcagtgtgcacatcacagggagattaccgcacgatgtctggagaccagggggcacgcggccgaggcgtagcttgagcctggaggagagcctgaaggatccgtgtccaagaggtccggagaaaatgacgtctactgagtagaaagggacggcagagtcgaagttgcagacgacgacattgcggttggcagggcgaccgctaggagaagtagggacggcagcgtggcgaccacaagacgaccgtcccccaaatccaacgaaccctcaacgaatcgagacagtgctgag

SEQ ID NO: 7118 - DNA, 551 bp, Zea Mays
gaggacactgttctagatgggattcgtgctcggcggcagctaccctatgctcactacttatgccacatatttgcgcagctgatccagccacctcgctttcagagcacccttgaggcctcacgccttgtgtttggatcttatcgtcctgctccagagattccagtgccagcttatgctcctgtgtttgacactcaggccgaggatgccgcacttcgacagtttgacacccagggtacaacagctgatgatgatgatgatgattttgggattcctcctccgcctccgcctcctatgcctccacgctcacatgatcatgaggctgggagttctcgtgctgcccctgctcctcctccggctatggaccctgctcttgcggcgattctagccaacctggcagccgagcaggcacggttatccgagacgatgctctcgatgtttcagagcatgcaggacaggcaggatgctcttcagcagcagcttattcaggatagggcagagaatagggcattcatggccctcatgcttcagcattctggtatctcagctcctcc

SEQ ID NO: 7119 - DNA, 620 bp, Zea Mays
aaaaactttggttgtaacaacggtgacacctagaccatttgaatacaaaaaccacagaggggtaggccatcaagacctacacattcgtagctcgtgcccagaccaggaagtcttgcagtttggaggccccagcccacctccaaagccgacattcctaaacaatccttgtgatcaaagtgagtttgttaggctctgaattcccgaagacacaagaattcctgtgcttccatatctcccaagctgttaaaatgataagggaattcagtccatgtctcctttctttggtactaacttgaccaccttcctccaccacttaggaaaggaagtttcagcaataatgggtgccagctctggcatctttatagcctggaaaatataaaaccaaagttgcttggagaaaacacagctcactaacaggtgctgaatattctcatcctcttgatcacaaaggggacatgcattgggatggggcagctctcttttagccagattgtccgcagtccaacatcattttttaaacaccaaccaaatgaagaatctgcagcgcaggggcgccctacttttccaaatcatttttccatggggcataactaattgatcccatgaagaaggccaaatag

SEQ ID NO: 7120 - DNA, 496 bp, Zea Mays
gtagaattgtcatagttgctcgatattccatgcgttggcaagcgtcctgccttcctcgtcctttagattgtaggtgcctggtaggagtacctctctgatcataaatgacccctcccattgtcgggacatcttgtgcttgtccttattggtttggactcgtcaaagcacaaggtcccctacttctagagtcctcctccatatgtggcggttgtagttccttcgcaatgtctattggtaacttgccaaccgtaggagcaccacatcatgggccttgtcaagttggtccaacgcctctttgaggcttgactcgttgtcttcattcgcatacaaccttaccctcggggcgtcgtactcgaagtcggtggggaggactacctcggctctataagccatgaagtatggtgtgtacccaattgaatggtttggggtcgtccacaggctccagagaaccgcgatcaattcctgggaccactaccagccgagtcgcttgaggtgg

SEQ ID NO: 7121 - DNA, 675 bp, Zea Mays
gcaggagaagatgcaaggggagattgggggcgcatcacgaccgcaaagatatgcgtagctcgtcacgaaggattagcgtcgctaaaatttggggcagatttacgatatctgttggacctcagtttttatgtttcccttcctaaaaaacatattagcggtcagattaatagccttttggagatgctaacctaatcacctcaatcacatgcatgcatatcgtgagtaactacccgccctaatcagacggacgcggatagctatggcacacgccatacttgttctagcccatggccttggctcacgctggccaaagcattcctcttctccgcttcgctgcaggtcatagtttgtgtgtgaggctaaacagccttatcaacagcttctatgtgagttccccgttgtctcgcttctccgtaggctgtcgctcgcccgctctaccctctgctggactgccactcacgtttgcgcccgctgcttgactctgcgtttcgtgcctatgcctccgggactgcagggggaggagaaagatgtcgtcggtagctaaaaagtacagggcacgacaacacagttatctactagcttatctttcccttccccggtttggcagtttatctgacccctcatccactactgcgtgagtccctcatctactactgcgtgagtaacaagagtaag

SEQ ID NO: 7122 - DNA, 1006 bp, Zea Mays
gtttattgctattatgattgatcaatggtctctatgtgttagtttccttattgttttttgtgaaatgatatatcacctatgtgtgaacatatagtatgtagtcttttatgaaagatggaagttgatgataactttgtaaaggagaatctggtcttttcctagttataaaatggacatctgttgtggatcaacagcgtctgtggtaaggatgcagaatgagactaataaggaagactacaggaagggtcagagtagtctgttcttatgatgactaaatatgcaggattttttagtcatagtgaggctatggttgatagggatgcagagcagattgatactgccgaaattactgcatcatgggaggtagaagagatggcctggacatttgttacttgattaggatgttggtgctaacaataatttgtaaagggatttggttatatgcatttccaaatgccctatccaaacacaaattgaacttgcctcatatacacctgacacctcacatgagtatacacacgtgtacttctaaaaatgatacagtgctgatgcatattgtcattctttgccaaggcctacaagagtatgttctcattttcaatttcaatttgttttcctagtgcaaatcaagttgaagatttggatttaccactcggtggcttgacctcagttaggttgagtgtggatgccaatcatcactgttctcctgtgatagagtaatgaaccatgcagcattcggatatgtacctagaggggcggatgatgatctgctagtgcgaatatgatccttcaaattcatcaacatatatgctcatgagaatgttgaaccttgagacccaagctgtagtacagggctatggacatagtaaagactacagatgtagcagattttagttagatctgtgactcataataagacaaaattagctctttcagtatccatccacttggaataatctccaccctttctgtgttttaatatttttaactttttttttgaaggatc

SEQ ID NO: 7123 - DNA, 527 bp, Zea Mays
ggtgtcgaacatcggtgctcctgttgcatactcagcctggaatctgcctccttccaaggcttttaccagttttgtgtcaaatcctcctgctggtgatagcggtttgggccttagagtgcgaccctcccccgaagaggttagtgctttggttgcctcacttggtgaaatacctgatgacgagaggcaggttcattttgaggtacctttgaatccaagtgatgcagagataagtgccatgttggatatgttggctgaagattcctctgatgcagcccctgctgaaacactggctgtagcacccatcccagaggctggcaaagctttggatattcagaagtctgatagtgttcgcccgaagcgtcgtcgccgagccactcaaccaacttctcctgctgaggggaagaaaaagaaaaagagacgtcttcaccgagtgtcgtgcttggatcaggatgccggtccttctgctcctgctgctgaggaagtgccagtgccagtttttgctgaagctgatcccaatgggtgtgacc

SEQ ID NO: 7124 - DNA, 1094 bp, Zea Mays
agatcaaacaactgtgttagtttgttcaagcaaactgttaactaatatgaatctacatgtgaggttctcaactgcatagttttgtggactggggacatgctcagttgggcgaacaatcgtggtaacgttgatgtcaatagaattcaccatagctcagttgacagaagagacaaagtacaatcccaattaagcacgcgagtcaactcgttagagaacattttgttgtcagtgattccattttgaggagcgactggtacactaaggctactggcacctccggtacgacgctgctggtaaaacttatttcaccctcctatagaaaagggaagagacaacattctttcgcataagcagacgtagagccaacattctttcgcataaagttctgaaccgatggctatgaactattctaaaaattgacttgctaatttgcatacggatatatatttcattaagatgtgaaaacaatttgcaagtatgtgtgatatgttgctttactaaacggcttgaccaatctatatttttcggtccaaaacgactaaaaattagttgtcatagttatatctgatattaaatgcaaagaaaattatacagatcatcgaggtagcaaattcacgtaaaaagtatcatggttggcctgagcatgacccggttttatttttcccctattttttcataaatgtttctatattatatttgagtatagagtttaaaataaaaaatgtgtgtgttctggtggctaggtggatgtgaacgtgagtttaaagcaaataaccatggttcaaatcctatttacatatattttatcttatttttattgtttagttccttgaaactgcccaaacacatgtgcttattagcgcatttatttttaacatataattcctaccgggtatcaaacacatgctctgtcactcgcatgtgcatcatgctttgcattcatgcttgtgcacgtagctttagttgcattcgttgcatgcgcggctggcggggcttgcatgtacggagaggacggagcttgcatgtgtgcagaggcttgcatgtacgcagagggtggggcgggggcatgaatttggtctacattagcctcttaa

SEQ ID NO: 7125 - DNA, 498 bp, Zea Mays
cgaggacacattagaatttgtgttcgatgggggaggctagcgtggactcactccgaatggtgaaccaagtgacctaagggggcaggcttatatcagtttaggctcgcgccctacggccattgtagtgcttattgtagcattgctctaaggaacatgttacaaagggtgcaagtgtgacaatgacatgaaggggagaactctggcataatgctcctaactctcctgcctatgcctgttcggtcatccccttctatatttcaagggggaggctcttacaaggggacttgttaactgaaggagggtgcaatctgtcgtctatgggagtccttctgacgtagtattcctgatgtcatcccctgatatgtgcataggaatacgtccagtacggcggatcgcttcatcctactcactatgcaggtcactgtagagactctaatgctgaggttctccgttgtaacatcccaattttgatcccaaggttagaaaccctaaactcct

SEQ ID NO: 7126 - DNA, 458 bp, Zea Mays
ggggtatggtgcattatgggccgttggatcgactacctacggatcagattagatattcataactgtgaaccggtacgcaactcaagccgttggatcaaagatctatgttctggattttattagggtgcgatcagatctagttcatctgatatctaatcaacggctcggatttaacctaacgaaaggcattcaacacttaatcagggtcgttcattctgatcggatggccaggattctacagcgctgaagggggagactctgattaaatcagagccacacattctccgatcaaaggttagcaaactctcttccctcccgagctctggtcatggcggcgctgcccaccgcggcgtacgctacatcgccgattggtgattccgcccaacgatgggactgccccgagtttgacaagctctacacgaagctcagcatatggtggactcaattcaaaaccctga

SEQ ID NO: 7127 - DNA, 489 bp, Zea Mays
ccactctggttggtgtttgttgatcaatctcaacctccttcaccacaactttctccactagattgcgaaggttccgatacatatcccttggctctagctcctcaggctcgggggtggaccggagcattatggctgtcgtagctatgtgtttgttcagtgttgaggaagtaatgtgcctcatcagtgctctcggtgagctggttctaaacttttttcgcctgtggtctttcggcttcaaggcgcttctgctcgatgtcgccataaacccgatcgagcttacgaacaagagcatcaagctcctcctcctgttgccagagggtggcctcgcgggcgacacactcctcatctagatgagtcttagaattcactggtgttgagcttgtagggcatgttcaccccaacatgccacacttctctcctgacgcccgcacttcattccgaaagcacgaagccgacgaccgccctctcctcacacgccgacggcgcagc

SEQ ID NO: 7128 - DNA, 403 bp, Zea Mays
cgccgctcggctgggtggagaagataggctttagccgttgattcatgagcgcgcggtccagattatcctgggaagaactcttcgcgtgctttagatcgggaccgtgcattgtcgatccatcgaattccagggtgatccgcttaccgtcgtcgatctggggatcgacggtctgggtgtaaacgcggcgaccgtcgtatcaagttaatcggagccctagatattaaatcggacggacagtaactggccataccccttcgccctggtcatattgctaaagagtccctctgctttcaggaaaccaacccgccgtccatgtgttactattctctgtgtctaggctatcttacgcagagacccctgcgctttctgaaaatcgaggcctagtccagaacctgtataaaat

SEQ ID NO: 7129 - DNA, 418 bp, Zea Mays
ccgataaataatgtcgcggaagaatgtgatagcctccgtagacttgagcttggtgatgggtttggcctcgatccacttggtgaatttgtcgacaacaatgagcaagtgggtgaagcctccgagcaccttcttgaagggcccgaccaagtacaacccccaaaccgcaaatggctaggtgatgggtatggtttgaagggcttgagccagcatatgtgtttgtcgcgcgtagtactggcagccttcacgagtctagatgacctgctcggcgttggtcatggctgtgggccaatagaaaccttgccagaacctttgccgacgagggttcgtggggccgtgtggtgcctgcatgttcctccatgcacttcagcgagtagttgtcgtccttcctcaagcatgatacacttctgcttgattctgg

SEQ ID NO: 7130 - DNA, 1322 bp, Zea Mays
gggtatgccacgccgagccttggatcagagaccaactgtggtgattttaaaatactggagatcagttcctgatcgtggataaacggatcaacggctgcgatcccctggtccgaaccggtacccttctcccaatcacgcacgtctgattagcaaatcaacggtcacaagatcttcttccccaaggcggcagccaagtcgcatagggccgagccccatcctcccgagcggcgtgagcacccaaggtggccgcacccggcgatgcccaggcaccagtacggaaatccctgtgcctggctctcaatcgcccgcagacgacgcgcccatacctaatgaagtccggcaatccccctcgatgccccccagaacccagcgacggcagcattcccaccgaacacaccacagcaaggcgaggcgaacaacgatggcagcggcttcaaggtcaaccccccagcccacacttcgatttattcacggtgtttggccgacctcccagaccgcaccgcagagaaccacacgaccgaggcacaaccagtgatggttttctttccctctttctctctttcttcttgcgtggctaacttggggctgctaatggctggattcaataggaggcgctagggccggctatttatggttccgggagagggagtcagggaagcgcggcgttggtgatggagagatcgagtctttaggagagggtctcaccggtgctggcaccctgtacgaaccggtcgcgacgccaatagcttgaagatcccttgatgaagaagcccgatcggtgccgaccgaggtgtagagcgatggctcaggtggcgcggtcgtcaacgttctcaattgcgatggctctctgtgtcctcccttcctccccgttctttgatttcttgccgtggccgagcgccgagcctatgggacaagggcatacgatgtctgtttatatatccgagtgagcgagaaaatctgttgccgagaagctcgggttgaggccgaatcggcgggatttgttggcaatcggttgtaggcgttgattcggattgggaagaagacgaccgacgcttggtcccacacggcagtgactaaacacacaagtgtgccagcacgtgcgggtgaggtgggggaaactggctagtgggccatacgtgtcagcgaatgtgaccagcgtggctgattgggccgaccaggccgtatttcggcccaaacggcaacatgtgagtttttcttttcttttatttttttattctcttttccattcaactttgaattcaaacctattccaaatgtgagttcaagtctaatggaaccccaacataatgtgggatagtttt

SEQ ID NO: 7131 - DNA, 323 bp, Zea Mays
atctaaattagtgtaactcaaaccatgagtagaagagctaacccaaccaatagtgtcatgatggattgcataatctgtctatccccacctaacgtcaaactagattttgacctacatcatgtagtccatctcacccataactacttcgaccatatgccccaactctgctgatatacatcaacctcgaattaatgagaccaagactagaaaaggaaaagataaaccccgtcaagaaagaagagaagtcaaactcgatcatcagaggcattactacccaacacgaagttctttctcaccataaactttcttacccctttctattc

SEQ ID NO: 7132 - DNA, 467 bp, Zea Mays
atttggaacagatcgagacgagaccgacgtaagtgaacagtgaatggagaaaaaggaacacgcgcgctttgggggcactcaaatcacatgcatggcccgggaccaggacaaacaagtttacctgggagcagtagtatagtaagagaagagcttcggtttatgacttttgtgggcatgaattgaataaactctggcgatttggcagggtgtcgtccgtgccgttccatgcacacacaaggacggatatatatcgtcgtagcatggaaatgtgcgtgtgcatgggttctgcgtaggatatgcgtaaggttttttgtccagcaaaagcacggtccaaaaaaggtagcataaagtacggtccgacacgaaataatataagtgttggactagcacggccagaagccgggtataggttgggcctcaaaattcagcccatcgtaccccgacacggcccacacagatgagtcggg

SEQ ID NO: 7133 - DNA, 342 bp, Zea Mays
cgaaggatactgctgccgggtccaccgaaggtggattagttcgtttgaaatataccttcaggttcagagatcggtttgatgagccaaatgacgattggctgaaaagcattgaggctactagtgacgagttacttggggcatataccagagcccaagatgatgctttatcctcagccttcagggtcggggcaagaaaagattgaacatggttttttatgcaattggcttcatataccttgattactgctacccattgcgaaggcaaggaaaaaaggagaaaattgttgctttgggcactactactatgccgaagggcaagaaaatgaaggttttgacccaccg

SEQ ID NO: 7134 - DNA, 450 bp, Zea Mays
ggcggaacgacgggcctgcgctttgtgaagcactaacccctggataatgggggcatgagcaggagggagattaacatcatcatcctttcctccttcgtcatcactagtagcctcctaggcctgtggattcgtcgcgggacgagaccgaccggaggggttcctagccgttcgtccgtgaggtccatgggacccagaggcctcaccacctggcatgacattgctagatccgcgcccgcgcttggatctggaccgaggaggagtgtctccacgaatttctggggcatcgtcatctgagtcggactcaacaacagatggatttctacgacgaaccattcttaagatcaaaccaaaaatacatatggtgagagagatatttgatgttcaaggagtttaacgaacacgtttgaggaaagataagtatgatattgggcatgcacttcaaccgttcat

SEQ ID NO: 7135 - DNA, 744 bp, Zea Mays
aagttgtagagccattgtagaggaacaactttgttataggtgtttgggcttggtgccatatggaactgggagaaaatttggtttcaaatcgctcggtcaggccaactgatggagggttgccatggtacagtgcattgggggggaagataaggatcagcccctcgccggcgataaggatcccaccgcggctcgggataggtcatcggcggccgcggtaaaggtcctcggcgatgtggcagagagttactgaggtggcaagccccggttaatcggcgaccactgtgccatcaccggaatctgctgcgcggtaagcacaccagcgcaatctgaaatccgcgatcctcatccaattccggtcgacggcctataaattgcacccgggttctacttcttcaccacatcccgcacctcagtgactgagcaatcggctcaatttcaccggagcactcacgcagcccccaaatcccctttctccctgttcttaactccgccgtgaagaactccaccgtggtcagcgctctttgggttagtaacttctcaattgctccctgctctagctcgtttgtagactcctattgctctcagtactgaccaattgaaattcggccgaagcctttcaccggaacacgcacctgctctgtagaacgccgctgtgacacccccactgtcgacccactcttcgattcttattctgcccaaaccaaagcgtgtacgtaaaccctggtgaacccatgaacctttccc

SEQ ID NO: 7136 - DNA, 592 bp, Zea Mays
ccaaatcctcgtgcttcctcgaggagatccccgcaacgtcaccggctgtgtgaagctaagcatcgtgatcaggctgtagtatgtatccatggggtgagcggagagagcgacctgccggtagatccgtagccgtagatgaagcctccaggccattaaacaatttccggtcgcgaagtccagatgcgtctctcttctgctagctggataagttttaaagaagtcacgagcttctgcaaagaaatattccaccctccagcggcagacttgtctgtatttgactgacaacacggctataaaattcagctgatgagcaactgcaatgacgaatgctcatcccgccaccagctctgaagctctgacaccacccatggcggctctcgctctcgcccttgccctcgccagcatcaccctctccacgcttgctccacgacccctgcccctgatgaccagcgccttctcctataccgcaccgcatgacactataccacggaaatcccggctcatcgtcgaggagtacaagacccgaatcctgcggtcgtcaccggacggcaccttctcctgcggcttccaccagatctacgacggcgccttc

SEQ ID NO: 7137 - DNA, 417 bp, Zea Mays
gtttgggatatgccgacccttggcctttgtagcctggggctcggtgcagctcattgtgttgcgccctgccaacggtctgtgcccttaggcctagtccgataggtcatgagcgcgccgtaggccgggaggggtgtgtgggccaaaaacgtactataaaccgaggggttcttaggtcatgagtgcactatggcccaaggggttcataggtcatgagtgggaggcggattggcgcctccgccgtggctcgtcaccaggcgcagttaatgcagccggtcactttatgacgagtcggtctcaggctagatccaggatcaactcgagtggtttccctttggcacgcccaaccccctgttaggtttatccacgcctgaccccgggctcggtgccacgagattcgtccgagggcgagtgccacca

SEQ ID NO: 7138 - DNA, 1149 bp, Zea Mays
gtccttcccctttctatgtcttcacaacctgagatccccgaccgtggacggcggagcagtggctccagcgagcccatatcagccggaacacacaacgactagcactcaggtgtggctgacacctaattccacccctaacgaccatagcccctcaatcaattgaggagttctaactctaaatcgctctgtccacggtgatggcgaaaactgagaacacaccgacgtgttctgggttatccaggtgatctagttcaattcaaagggtctatgagtactagagaacttgagggaggctagaacatcaatcaaggatgcttgagctaacctgtagagggtggccacgacgcggtggttcacggcgtgaagaaaatcgatttgagaagagaaagaaattggagctctctggtggctagttggaggtaggagcgggtgctttggcttcgtgatgacccaacagagctgatggcacgcttaatttatagggctcgagggcggtggctcttgaatttggaatggcgcgctggcagccggagagaggggagagcactggcgcaagagatgcatggctttcaccgtgacgagaccaccggtgatgaccagacatgctaaggcaagtcactgcgatgtggtattgcgcttaggcacgtggcacccgatcggaaggcggccaaatccggcgaggttatctggaccgaccgtaaggcaaggggggtacgacgtccagggcgaaacagtgtctcgagcacatccccaacgtgatattccttaccccgagcagttatctgtacttcaatgaacacgaatcgcaacagcagcgatgatcacggtgcgggatcaccggcagtgatacactgaatctggcgatcttcgtcagatcactgtaccattagaacaccattcagagtacctgatagagcttacttgggggcgatttgctccaaatttcatgtagcaacttgaccattaatttgtatcaaagttgtagctctgtaaaccagctacaaaatcgactatagagacctggctcatttacttactccttcgagcttgaatggagtccaaagtttagcagaactcactgttagaccagtatcagactatatgggtgactgacaacaatactttgagtccatttaactccaacttttg

SEQ ID NO: 7139 - DNA, 676 bp, Zea Mays
ctccaagggtgaaatggcagcagctccaagcattggagaatcttccccatcaccaaaaccccctgccatagaaccagcaccacccccctttccatctaatttatgttttttgaaagcatgttctagacttttatcctcttgatcagaaaccttgtccataccacccccaccatcattacgagactcctccctaaaaatcaccggagatgcaggaatgaagttcttatcctctatagaataggtgatctcgtatcccttcttgtcaaaaacaatatcggtggtcaggggtagtggatctctcctcatcacaccaacaagcagtctgatgacgcccatctttctataggtgtacatgtctacatcaagagtggcgccgattactgatcctagggcccaaaaacccaaataatgcctccaagcgtgaggtactcccctcacatgaacccaaacctcgtccaattgataactgggttcaacatcactagcatccttccattcagagatggtgagagtaactccatgatttttgagagtgaactccacatcagccatcctaatcagttcatcaactgagggaaataccaccaataaggaatcatcactatggggtagcgcttcccaaacccattcttttgtaatgaatcgagctagttcagcttgcaccgcctcagccgag

SEQ ID NO: 7140 - DNA, 304 bp, Zea Mays
gccaaggtaatccgtcaaggattttactggcccccgataatttgtactatgaatcgagtcacgaggtcttgcaaagcatgccagaagttttctccccgctcgagcaacccttcgcagtttacgaagctgatcgcccacacatggccacttcaacgctaggggctggatattgtcggaccactgcctacggctcaagggaacctcaaatccacctttgtcaccattgagtacttcaccaagtggatccaggctagggcagtatccacaataacgtcgaagaccacccaaaagttcttctagcaaa

SEQ ID NO: 7141 - DNA, 821 bp, Zea Mays
gcagttagacagagaaggaatggctgtgatgttataatgctgaaggaccccaagaagagattatggcctattgtccaccaccactgcccgttatttgtgggcttcaccgagggctggaaacatttggtgacagcaaacgaccttcagactggggacgtctgcgagattgttaaggggccagacgatggtgagcctatgtactctgtccggatgtgtggtcacaaaatttaaagccgccccggcttcatctgtgcacttctcttctcttatgtcggctactaagatctcttagcagcccacctaagagaagagaagcacacacatgaagccggggcggctttaaattttgtgaccacacatccggacatagtacaccggctcaccatcgtctggccccttaacaagcttgcagacgtccccagcccgaaggtcgtttgctgtcaccaaatgtttccagccctcggtgaagcccacaaataacgggcagtggtggtggatgacaggccataatctcttcttggtgtccttcagcattataacatcacagccatgccttctttgtctaactgcattggaaagtgcacttctatctgctccgtgcttcccgacccgattcaggcattcagccgatgccattctccatataagtcccaaacagagaatagggatgaggtagtcaagattgtacgcgctagtgctcaactactagcatctatagatatggacacaagtccaaatttggtgctactcggcaccatcgatatcactagggaaaacaaatacatcaaagagatccacttcccaatagtactcgaagatag

SEQ ID NO: 7142 - DNA, 586 bp, Zea Mays
ccatgagcccagggaacatgaccccgctcagtccgtatgctgggacgtggcatctaaagcaggagcaactcctgacgatagggcgttccgtgagcaccgcaattcctgacgccacgatcgttgccacgcctaggagcgcgaggaggaaggagcagagcatgatgccagactccaacacgagaacccactccttccctggaatctgccacctaactttgctcaagccctaaacacgccgagtgatgttggcagggtcctagcttagatcgccaacggcttgccatgtaccccgaacgcggaaggctaccgacagattctcacctagccgacaaatcatcttattcccccactcattcggcaccggccatgcgctacatcatcaacagttggcgagacacgtggagtaacatcaatgcttcgcgcgatctacgacccgaaagtgagatgaggcggcgagaagagtacgacccataaagtttctactattcgcccacatacaattgtactttcgcatactactaatggagcaatcgacttaagtcagagatcgtcttaagtcagtgttacatgctcacgcttacaaaca

SEQ ID NO: 7143 - DNA, 500 bp, Zea Mays
taccactgccatcaaaagaatccaacttcatgcccatccactgcatcagagaaagaccactaactggaagaggcacctcggccccgccacctggagtagcaccctcagggacagcacccccaggcactcctccaccactagcaccctgagcagcatctgcagaggcaacaggaatagcttgcctcagaatggccaactcctgctacatggcctgcatcgcggctaacattgccgccggactcatcgagtccccactaggaacttgcggactaccccgagccctacgaggcggcatagctgcagccacagggttgagaataataagtaaataagatgggcatagcatctcttcagataatgtcaaactagctcagacaataacataacatatcaatagtaaagcagaaaacccatcctacatgtgcagtgtgtcaatttattattactccacttgctaggacctacaacctattcctttgataccaactgtaacaccccac

SEQ ID NO: 7144 - DNA, 779 bp, Zea Mays
gttgaaatgccttaagaaattacctggagcttctgtgcaagaaataccttctagcacaaagagaattattcagaatatacctaggtatcacgtccaaaagtgggcttctgatgaagaagtacatgagcttctcaagaaactgccacagcaaataaaagatgcgcttttacccttccaacttgaaggagtgatgtttgggcttcgaaggcgtggacgttgcctaattgcagatgagatggggctcggcaagactctccaggtgggcatatagcatggattcttgcatagtgcaatccttgctgttttgtatacgagtaccttgagatattcttgtgatgtatttgtagaatattattgcagcactattaattcaacaatgatttattttatttagatttatgacttgttaaatgatgtgaatagacctccctatttgttctttgttattcatttcagatttgatgacttggttttagattatatgaattggcctaccaatttgcctatattaagggagcgagtgagcatattctcatgcattttaatgcaggcgattgcaatagcatgctgtttcaaggacgagggctctatattaatagtatgtccagctgtattgcgttattcttgggcagaggaattggaacgctgggatccttcatttatgccaaaagatattcatattggtatgagaaatcttttttttttggttgatgtgaaagctggtttttattggacttgctgtacaatttcatctagtcctgaataattatgaagtacag

SEQ ID NO: 7145 - DNA, 783 bp, Zea Mays
gcgacgggtccatgggcgtagcttaattcgttcgtcgtaggcaggtgtcagttccgctataacggggtgggcggtgactagtacgtgtgtggcttaattacctgttgtgacgagggctgactgacatgatcatcgtcggcgaccagtcggggtggaaccgtggaaggacttggacgtacgccgcggcgccggtggcgtggggcacgccatggacgtgcctgatacgatgttgtacgccgcgaacctgctgtctttgaggttcccagacaccggcgacaacggcgtccatgctgccaggatgtcgatcccctgctacgacaggtcgggctgcacattaattccagggaatgtaaacaaagcacaacacatatacatgccatcaatgttgtctttttttatttgcttgtatattaacaaccttgagaatccctgggctgatcaaatttggctctctggatgagaaggaggcgacggtgggcgccttggagtccaaggccgtttcggtactgcgtatcgtatcgtgctgacagggtggctgcagaagcacaacagacagcaagcactgctcagcaaaggccagtcggatttgtttcctactgcttgtgcgacatgatttcacaccgtgttttgtcgacataggccacgattttggcgaatcggtcgtagctcagcgcaagaaggggcagtaggaaggcgacgatgactgcaccgacggcaccggcgaggagagtgtccgtgccgtcgcctccgctcgtgcagtgccagaagtggctccgacgacct

SEQ ID NO: 7146 - DNA, 313 bp, Zea Mays
gacaaatggagacagataagatattaaaaatcttaataggtaaagacgattataatttagtgactattatattcatcgatatcctgtacttaagtccgtagtcgatatcgaatgggagataaacacctcggtgttacacgttaggttgtataagcgggtttcttaagtgtagttagtgtttagagaaccataatatagtacctatgacgtatatgtccttacatatatgtgttgaacaccaaaagtgacggacgaggcccagacggtccgcccccgtgatcagattaaatcggacaattatttttatctcgtg

SEQ ID NO: 7147 - DNA, 544 bp, Zea Mays
tgatcttcgaaagcatagcagaagccgaagctactaggctggaggacattgatgtactcgaagaagaacggctgaatgcagtaattcaatcagcacgataccagcagactctaagacgctatcacgacaaggccgtgcgacaacgatccttttcagtggaagatctcatcctccgccgaattctaacgggggagggacgacacaagttgtcaccttcatgggaaggaccgttcatagtagtagaagtcactcggccgggatcatatcgtctcactcaaatggacggcacagaaattgggaactcctggaatatagaacacctcaggaagttttacccctagctgtatttcaaaagctatcgggacgataatgtactccgtaaaatgggaaatatgtcatcaataaaaaaggggcttcaagaatactcagttcgttcatgattgaccgacattcttatttaactcggggtgaccactatgccctgctaacggagcaatcagcttaagtcggcaacgacttaagacggtgcaacatgctcgcgctt

SEQ ID NO: 7148 - DNA, 325 bp, Zea Mays
aaccatctatgtgtgccaaaaggagaggcacgagaagttctacttgacgaagctcacaactcagcctactctatccacccagggaccaccaagatgtacctagacctcaaaaccagatactggtggacagggatgaagaaagagatagcacagtatgtggcccggtgtgacacttgccaacgaactaaggccgagcatcagaagcctgcaggcctattgcaaccccttccaatgcccgaatggaagtgggaagaaataggcatggattttgtaaccggactgccccagacgcaaaaagaaaacgactctatctgggtgataatag

SEQ ID NO: 7149 - DNA, 754 bp, Zea Mays
cgccgccattactgggaacgtgaacgacctccccctctctccaagccgggaccccgtgggataaaggagcgctcccgtgacccattcttgccctgccctcttctcgcgcgagctcattttccccagaaatgcaccgccaccgccgacagtgctgcgttcgcggaaagggtgagatctgccaccatagacccagccctgtatcaccgattggtggccagtggggtgtcgggatcgttcattggagtgtggggattgttggtgtgaagtattacgctcagtcgtccgcccaaacgcccgggattcctcgccatcgctgcatctccgccgtgcgtcgcaggtggcttcgttcggtcctcaattccggtgagtaaacctcataccacttacgcccgtccgctgcgatggtgtagcacccgacagaatcaagaatagtgcactaaatcactgggtccatgactccggcgatggcactcgccgcgggttagtgtgcgccgccgtggcccctccgtcggagttgagggaagggtcctgcaccgttggatcattgatggacgatgtagattagattctgcgtacccttttgccaggttcgatctggtccgttgatctggatcgggcggtagatcgacgaccagcgatggatctggatctcataaaaccgtaaccgtcgatctcagatcctgcgatcctggatacgtatcggttcgcgagaataataatttaatctggtgcgcacatcttggatcggacggtc

SEQ ID NO: 7150 - DNA, 313 bp, Zea Mays
gggtgatgtcggcagtgatcagttcagcaacaggtccaataccatccttatccagtgaaccaagtctcacaacccagccccatcccagccttcacttatccacatcatccctggaaacacctggagcggtggtggaggaagatcttttactgcagatatttttggagcacaataaacagccacaactctactaagccctccacttcaccccctgcaatctcttagttccaagcaacaacagggggatcaatttaaatgaaccttattcacccattaaccctctaacaattttccacagagactttagtcttat

SEQ ID NO: 7151 - DNA, 875 bp, Zea Mays
gccaggtggcggtcggtgtccaacactggtgttggcgggtgagttgggccaccttggcagacccagcatggtggaggtgctcgtgccgctcatggagggtccagatctggaggcaggccatggcttagcctgtggcggtggcacgtggagggaggtgtgaggacagtcggtggctcggtgcatggtggcactgttgtccgacgagacgggcttgagttggcgagtagggaacatgggtggccgacaccagtagtccaaggcagggcgatgtggagctcctgtctagtgtcaccgagtgggtgagggccggggcgaggaggtgagccacgagtctgcaacggcgcaagcacatgcctgagatgggggcacactgtgtgatctgtttgtcgcgttcctggagaaacagtgattctagctatgagggatgctcgacggagaagagaccggatgatcggtgaacaaccagaggttgaagaaaagggtagaaaagacattcccccaccttgaactctaataatcggtgcgatgtgttatggcaaatatacactcattcataagggtactaggcatatttcaacattggcggtgtggattggccaattccattgaagtcggatgtcctgcagcaaaatttgcctaacagtatgacatatttctagctatcatgtcattacttgagctgtctggagaaaagtacaattacctagggctgtctgactaggtgctactgtggtaggcatagcctgaacacctccctagcaccaattgctttatgaaacatttacttaactactgtttttctgagaatgaggtcaaaatggaaagtacaactaatagttaataatttgtaaatgagtagtactgctatacagcgg

SEQ ID NO: 7152 - DNA, 492 bp, Zea Mays
gggaattctgacacaatcctaattgcctcaatcggattggactctttgtcatctactgataaatggtgacaggctccttcttctagttcaggtaagtacaacttggttactacttcctttctagatggggacaccaatttgatagttctcttatcacaactgactatggcttgatttctgtgtagccaattcatccctaggacgacatctaacccttgagttcccattactactaggctagcggggaagtctatcccccttatttcaatccttagattcgaacaaatcctatcggactaaacttttcccccaactgaattaactcttaaaggtggaatcattggttctatggggatgttatgtgattctacccaagatgtagaaacaaaagaatgcatggctccagtatcaaatagtacttttgctgggtaggatttgactagaaacatacctactgccactgtcacacccggttttagaaggcaaaccgaa

SEQ ID NO: 7153 - DNA, 432 bp, Zea Mays
tgtcgttctgcctccagtaaatctgcaccgtccatccatcctgcgccatcgtccatcgcaaccaccgccgctcgatcgtcgctctcccgaggaccacccgcccgctcaatcgtgtgctggaacctcgccctcccgaggcgcatccgcctgctcgatcatcgccctcccgaggctgccatcgtccatcgcaacccctcccctccgtcgaggtcgccaaatctcgtctaaccgtcgagggctgcacccctccgccccgtgccacggcacccaaatcccacgccccatcccacacccttgatgacgacgacgagcgtgtcgctgcttctcctctcccctctccccagtctccactctctccacgccgtcctccgcgcgatgtctccagactgcagcaaccgctccctcttctttcactctctcatgcgcacctga

SEQ ID NO: 7154 - DNA, 359 bp, Zea Mays
ggaaattcccctcaaaggacaagcctacacttggtcaaatatgcaacgtcacccacttctcgaaaaacttgattggtgctttgtttcacaggcttggtcggtcacctttccagctacctctgcactctcgcttcctagaggaacctcggatcatatcccttggatggtcaatgtccaaatcaatgttcccaaaccacccatctttagatttgaaaattattggcttcagcttgatgatttccactctatctttcaagactcttggaatcagcctatctttcaaccagaccctgctaaaaggctcatggcaaagtttaaaagagcacgcaagcacatccatgtctggtgtaagtctctcc

SEQ ID NO: 7155 - DNA, 669 bp, Zea Mays
ggccttagagtctaggaaaggggtcctcggctacgtaggtcgtaccctcggtccgtcttctccggtgaggttttacccctcttccgaaggcttgagagtggtagggatgagggaggagatagctgtgttattacttatttctcacaggagccggctacaaggctttatagcctgagttgcaacagaaagcagaaactaatctcctatgatttaggatctccactaaaggaaaactaatctctataatttaggatttctactaatctctttcctcttctagccggccttccttctctagaggtggcggctgtatgccctgtggattccttccttctagccactgatttcctggctttccttttctagtgctggggtggccttggctgctgctcgctttgcagcgcgcctcacgtccctcgcgcgcctccgacggttataggggagaccccacatgacatctctccccccttgactctcgctcgtcctcgagctgaaacgacgggtgcttggcgataaattcttcccagtcttcccaagtggcagccgaggccggctgacccttccaacgcaccagcacctccttgatcccccttgcgaggtgagagcgcaccacccgttcaggctcgggtaccaccgctccatgtagcagctcaggcagctccggggttg

SEQ ID NO: 7156 - DNA, 511 bp, Zea Mays
ctggaatttcatcatgtggaaagagatcgcaacgcggcagcagacgcgttgtcgaaactaggatccagtcggacccaggccccacctagagttttcgtccaagaagtaccacactcgagtatttccttagatcgggcagaagagtgcaatgttctgagccagccagagtcagattctaatgactggagggagcccatcatcagatatataaataatgaagaggaaccggatgacaaagctgtagcagaacgcatcgcaaggcaatcagctcactacaccctcattagggaggcactatacagaaggggcgcaacaggagtcctcatgaagtgcattctttcgactactgggaagcaactgctagatgagatccacgctggacagtgcgggatacatgcagcatccaggactctggttggaaaggtcttccgatctggtttctactggccgaccgcaaaaagtgatgcagccgagttagtccagaggtgtgaagcttgccaattcttatcaa

SEQ ID NO: 7157 - DNA, 504 bp, Zea Mays
ttgaacttgtcctttttgtattccttctttgcttcttgttcctttttgttaggacaatccgctatgaaatgaccagtttggccacattcatagcatgccctcttctttcctttcctttgaaacttatcatttttcctcacaaacttcttgaaggttttgatgaacatagttgtgtcttcatcactcgaactatcttcatcacttgatgtttcgaccactttctttgccttgtggtctttgttcttcttgggggtatattgttcatttgagatcaaggcatgagagtctcttgtcttgattggggcttcttcagattcatgttgttgaatctttgcaaatagttggtgaggcgtcatttcctcataatcatcatggtcccttatcatccttgctagactcttgtccttttctttgtatgctcttattttgtttaccaacaccattaaccgatctaagagtgattgaagtgactcatacttagtccaatcatatctagcaagctca

SEQ ID NO: 7158 - DNA, 593 bp, Zea Mays
ggcaactcgacatccccttgacaatcctacaacaccttccgttcataccgaggatccagcgtctatacatgaccgaggaatccgcaaaacagatgacatggcacaaaaatggaaaacgatacaatcttgataagatggtgcacgcatccgatggtgaagcatggaaatactttgatgccattcaccgtgagaaagccgaagaggcgcgtaatgtacgtgttgcgctggccacagatgggttcaatccctatggaatgagcgttgccccgtacacatgttggcctgtgtttgttatcccaatcaatctccccacccccggtgtgtgctttcaaaggcagaatatattcgtgttgttgataattcccaaacacccggggaataaaatgggcgtgtacatggagcctttgatcgatgaattggtacgtgcctcggaggaaggggtatggacgtatgaccgagctacaaagacaaactttagaatgcatgtttggtaccagtactccatgcatgacttaccggcgtatgggctattctgtgcctggtgtgttcacggtaagttcccatgcccagtttgcaaggaagctcttaggttc

SEQ ID NO: 7159 - DNA, 834 bp, Zea Mays
gagaaagagagaacaaacgcctgggcactcccatcgcgtggaggaccttcggaccgtgagcgtcagtcccgtcttcaccccctccgcgacggtatgttccgtgcccctcctctgtagcgtgataggaagcgcgagacgtcttagcctaggcactggcgtggatgcggtggggcaatgctccaggcgctgtcgaggggatgacttgccactggatggcacatagtctcgagcagtctgtagatgaaggcttggcgccgagctagacgggtagtgggaggcgaagaacattccgcgccgtataacggcggactcgggtcgtcgctgccagatccttggcgctcggccgcggcgaagtggtctggagagagaaaagagagaagggagagaaccggtgatgaagaagacgcccgacatcacttgatcatgcgttggacggtaaggattaaagggataaggatgaagaaaccgggaccgtaggatggtgattggagggggtagatttatctcgcgtacccgccgttcatcacgaatcgcacggctttgattagaagcaggaaataccccttcatcccaaccgttatccaccgtagaccggcaatctgacgactaaagcgaaatagtggggatcgtgcgctgtgagtcgtcgatctcagatccgacgatgactcgggaatcaggatttatacccatcgccggtctaatctgggcgctcggggttggatcggacggtccaaacatcactgtaccccttcggccctgcacatttccttaagagcccctcgggtttcagtgaatcaacccgccgtccagtgagcgctgttcactgtgtctggg

SEQ ID NO: 7160 - DNA, 661 bp, Zea Mays
gcgagtttgagagcccgttttcttggattgaagagtcttcagatgaagatttggattattttgttgcgttagatgtggccgcggcggagtcttcgctgtggctagagatgggcgaaacgtttgatcccccggctggggcgaggatcgaacaccgtcaacgaaaagtggtggcgaagcatagtgttggtgagagttcgcgaagtggtaggcgccggatggggttggagcgaactcgtcttcgtgtatatcggggtaatcaacgcgacttgttgtctttgtcgtttgggacgagtattggtgagggggacctacggaatttgtttgagggtggggaattgaaaatgatttttgtttaattatcgggaggcgggcattatcccgaatgttgagccgatgtagaatgtgtgatgccctcgcttgtcgtgaggtagtagaggacgcaattgtatttatttgtgcggtgggtctggtgacccttcgctgtgtgtatgtaatctgcgacttgtattgtaatgtggcctgttgcccttcgcttggcagtgtgatgttgtaagtgtctggcggcacccttgggcgatttttgcacggggctgtcttgtgggaaagactttgtgtcgcacattactgtgcttgtccggctgcacccttaggcgacttttgc

SEQ ID NO: 7161 - DNA, 620 bp, Zea Mays
tgtgtccaaccctcctgctcgtgatggtagtctgggtcttagagtgtgaccctctctcgaggacattgaggctctgattgccccacttcggagtcttccggatgatgagagatagactcattttgagatgtcagctagcacagacgatgcggagatagatgctgtgcttagtttgctggctggggaatcatctgactcaacccatgccaagccaatggctatcacagctggacaagaacttggtgaagcggtggagactcggaagcctgaaggtgctcgcccgaaacatacacgacgagtgaaccgtccgactgcaccggttgaggaaaagaggaagaagaggcggcttcggcgtctgtcatgcttggaccagggtgcaggtccttctactccgtttcatgatgaggtaccgacagaggcccttcctgaggttgatgccaagggttgtgatcaggcacaggctactgttttcatatttgataaagacgaggaggaggaggaagaagaagtcccgctgatccgcaagaatagccggcactatagtggtagcgaggggggtagtgatattccttctctagctctgtcggctcttgtcagtcttgagggactttcaatattag

SEQ ID NO: 7162 - DNA, 357 bp, Zea Mays
gtacatctgtacatgttattgtaagtaatcccatgttagattttggacttcattgacctgcttatgaaaggagccaacatgcttgtgcagttgcgcgtttttggctttgtgctgctagaagttgatctcatggtaggatatagtgtactgacccataagaaatttacatcaagcagttcaatggaaacaaaaactataggcttaccggaccatgcttcagtttattctttagcctgcacctttttatggtgtgcactttttaatatcaggtaacacaaatcatgatggcacaacagtatctgggacaatgcaacatttagttatgcttcctcatgatactactttttgtaattctga

SEQ ID NO: 7163 - DNA, 449 bp, Zea Mays
caccgtgcatgcgcggtggccggccgatttagcctggtctagttcaccggagtaggttcctgtgtcgccccctgcctctgctgaagttagccaaggccttagcgtgccttaagtcccctccccatggccagaatggctcaccggagttgctctggcccgcccgagactctctcaccgtcgttctcccctctctgcccgtggattcatggcctcttccccgccattgagtttgccgtggcgtcctcttcccctctacccaactccggtgaccccggagccaccctagctcgcgcctgcctcaactctagcgacttcaccgccgcggagagtagcggcgccacttcgcgcacgactgttttccccggtctgatttccccgtccgatcttgatcgaacgactcggaccccctcggaccccctcgaaccccctcggatcccctcggacctccc

SEQ ID NO: 7164 - DNA, 625 bp, Zea Mays
gccactgtagactgtccggtgtgcccatatcgcgttttaaaaaaccgcccccagcccgaccgagccgagccagagacgttagttcttctccctgccgcccagctctctgcgtctggcgactgcgggcgactttctcctcgccggcgatctcctccgccggccatcctctgcggccgtgctccggtgaacctgcgcaccccctctgctccccctcggtgagcagcccactgtcctccctctctctctctcttttctctgtcgtttaggcagtgaactccacccttttgcaaatcttcaaattcctgtgaatccaattgttgaaatgtgttcatatacctccattgtgtatccctgcaaacctttagctccttcgggagggcattcccacctcaaatggctatattcctaaaaccctaaatccccgcccaccaagtgttcggtgaaatgcccaaaccagccaaacttgctccaattgaacccaaatttttcaggcactttcaccacacttccagtaacctacttgccaaatttcacgccaatccgagatcccaggcttaaatttcaccaaaattcccgatttgcgcgatcgtttccgagccgagtgccccaaaccctatttcttcgc

SEQ ID NO: 7165 - DNA, 539 bp, Zea Mays
ccggatagaaactctgaaaacactgaggggaggccttcaatgaagatattggcgaattttgaagtcatcgaagcgtggagaagtcgaagatccctgatggctacatgatcatggacagagtggagatcaatccacgatgatattgggacaggatagaaactccaaaggcacttgagttgcttggtgcctgcggatttcagggtcgacctcacatttaacgtattatatttgcggccatttatcattaatgaggatgagcttgagtcgaggatgactcaaatgcaagtagggaaagagaatgatgacacccctctcacgatacaaccctaggggcccttcgcgtcttgaagcaccacttgctccgaacattagagtacctagcgcatcaaccttcgaggcacctctggccctgacccctaggacacctcaagcatctactcttagagcacattctgccccgactcctagggcatctcatgcattgacccctaaggcacctcctaccctgaccactagggcacctcttgccccgaccccag

SEQ ID NO: 7166 - DNA, 1246 bp, Zea Mays
cgacgcttcacagggggcgacctcaacggagactccactacagctaaatccaatgctgcaaaataatctaaatcatcctccgaggattcgtcatctatccaagaaaaagtgctccccaactttccaccctccaaagaccacgacccaacatcatattccctagacgcattactactaagaaacaccgcatttccatgcatcaaaatatcatcatttgtgtcatcatcagggtttgcttgcgcaggcccagacgccggaacctgcgcatcaatcgatcttcagtatcacacaaaacgaacaatgccaatctattccctattacactttctcaacctacaacgaagcgtctgccgtcacaggacccccaatgccacctccttggagcatggtttgctctttggctcctgcctccgtcgaagcatccctccgggtcactgagctttttaggctggtgaggtcctccacatcttcttcgttcatcgcctgcaaagacaacacaataacatttcaaacaacaaacacacacaacacccctcgccaaacccataacatacctgcaccagcgctcggtctgccctctcctggacgacgccacggccgtgagggcccacatcctatcatctagcgccccagcagagcgcttcagcacgtcatcttcaatctggaacacgccacgatcgaagtccttgttcgctcggtggaagacctcgaaatgtctgcatccctctcgggacaaagcattcgcagccccttcgcaagtgacgagagacgcataggacatgagacccgtcataatagatgggagcgactctagctcatcttgcaaccaccccagaaagtgggtccccgcctcctcccccaatttgtcaaaaggggcggtttgcgcaccaaggtcacggtacgcatccacgaaaagcctgtgcgcccggtcaaccccagcacgggtggaagattctgtcctctcgcggtggccacacatattcttcagcaccagctccaagtcagcagcatgcttgcgggtagcctgagcctttgcacgagcgttctccgcatcctcttttttcatcattaagtcggtggctaaggtcctccttttccttctccagtgctatcactttctcgaggaggttccggttcttatttttggtcgccgacttatccctaatcgccttagtgtgctgcattcgaaggcgctcaatcctaccctcgaatcgtttcctctcgaaaacaaactgcgaggtcagcg

SEQ ID NO: 7167 - DNA, 2356 bp, Zea Mays
atagtgtgcatagtccaccgacttgattaaatgagatgtcaacaacaatgttttccacaagacactttataatcttgacctgtatattatacatgaaacatgcgagaataacacaaatgtatgaaaaaaatataagtggcaaatccttaaacatggtatattccccaaaagacaagggaaggggagcaagaaaaaaggatatcagatgcatttttctgtactagacctaaggctgatgctagaagtgccttcaaaaacataatcctcctaaaatttaatagtatattagcatattgattttgcccacacaacattctgcaaagaactgtatgaaagaagtgacagccacatactaaacttaagtttaacttagatattttgttactttctgtcctgtacagatttatatggcgtagcatgcaataggcaacttctggtaataacttcgacaaaatcataagtcataaagacagtcatgagcccatgatgctgatttaaactccatcataggtacacgttagcagaggtgtaaccttgtattgagcttctctgatgcttatacatcaactaaatgagatatcacagaaaaatacctctgcctgaatatactggacttcttttacatgaaattcagcgttttcatccttctcttcacgctccaatgcatcccggacaagatttgcccaaatctcctttaattcttcactattactaaaagcagtgacatcaatgtcaccatcgggtaagtaagtcttgagagggactgacccaaaggtaaaaacctgcagagagaaagagatcaattctctgtgaggcatatatagtgaactggatgctgaagataagagcaggaacgtccaaaatggtagtgaaaaatccccccccccctcttgacatgcataagacaaacaaacaagtctgtttctattatcaaagacgcatgaaggtaaaagtgatatcctgatgcacctcgaagcaaggaaataaacagccggctatatgtgccctgtatagacagctatagctgttttgagcagtaaaccgttatttgtactcacgttcagtttagctgttttagcccactataactgggtcttagcctcaagaaagccctgccaatgtgcatgacctgctatttactacactgcctcctaggctgcacagcaaatgctcatcccaacagacaagccaggattttcatacggccgcatatggctattgatttataactattaaacaggattttcatacatctcatgtcacaggaatgtgtacaaagagtgaatacagttcaactatacactatccattatctcaattcatgcttttccccaatgcacggattacttttttccagttatcctcattgtatgaaaacttcatgcttctaaacacgtatcagatccaaagcattggtgttaagtgaccagaggccttctggaaccataagtcaacatttacaatgagcactatctccagaataagctacggttgttcagacaaacatttaaataagagaaagtaaaacatcgattattacactagccagttctaaagtagcagtcctgtttatacatccacacagcagtcctcgccgccatctaagagcgttctacttcatacagatgctaatctccactgctacagggggggaggcaatcggaccacttacaggtaccctacctggcaggagaggcagttcatgatgagccgctgcacgtagtggtacacggccagcctccgcccctcggagtacacgttgggttggatgcacgcgatcaactccgccgtgcggtcctccgcgaccgcccagcgctcggggtcgagccgtcgcgtcatcccggcagacgcactgggcaggagcccgttgggcaccatccccatgcgcaagccaaccaatgcaccctcctctgcctggcagtcccaaaaccctattcctcgacaccagcggcagccgacggcagagcacccccgcagcagcaggctacagcggcgacaggtggctaagagctcggagcaaccgccctcggcgcgaatcgagccagaacggtggagcaccaggaggtagtcgagcagaaaacctaaggcgagcgatggatcggtgcggttgtggggattagtaagcggaggcggcgatgaggaatggagtggtcggcgtgaggagaggaggggaagacaatgggagggttgtgtctgggagggggaggagacatgcggttcgggtccgtgtttggtttggaccgtggggatgcgctggccgctgggcaaacgtctcaaacacttcgatgggacgtggccgtggccgcgtgcggacttctggggttcgagcgggagcaccgccgtgctacgcggtagg

SEQ ID NO: 7168 - DNA, 344 bp, Zea Mays
gcaggatcggacggtgcacccctgttgtcctccacaccagccaaatgcggcaacagcaatccgccgcggcagagaacgccggtgagcgttctcggttcgacgtccaatgccccaagggcggaacaaaggagcccaacacaaaccttaggagatggcgaatgcacagggagtaatcttaccataaatcacagcgctattgactacggccacgacatgcggcagcacgtgcactccggcgagggacttcccttgttctacgtggtaccgagaccgaagtccccaccattctgcatccttacggcaccgcgaagctccctggcacattcctaggccccgaacaacag

SEQ ID NO: 7169 - DNA, 754 bp, Zea Mays
tgctcagcactaaggaaattctctgatctggttagtcccaccagtcctttcctgtgaatttttggtcgaattatttatgggggcgtgggaattcagcagacttcggccgaggacggttcgaatccgatctgtattatgctatcacacaaatatcacgggaggccgtagaggtgttgtgatgtgtttctttggagcactcactgcccatttgatctttgtagttgatttggggatcggaggcttcttgatttatgttgtagggactattctcttaattagtatgtgatttggtcaagaggtgtggaaacccatattctcatattcccgttgttggtaggttaattgcgatgattcattgataaaaaagaactcagtttttaaagtcattgtggtcgaaagacctagttcttatatagttcactgctggatgctttcttgtatcattccataggcctgtttggatacacgaactatttactagctagctaaaaattagccttagtgcatccaagtaagaaaactaatagcttagtaataggtgagcttattctttagctaagttttcaactagttgttagccaactagctattcaaactcagctaatttgagctaatttttagcccgaccagtaactacccctagctcatccaaacagaccgtaagtgggtatcaaagaggttctatcttccacctctaaaaacagaagcagctatcaattcttgttccctgggtaactctgcaaaacaaagttgc

SEQ ID NO: 7170 - DNA, 411 bp, Zea Mays
ccatcgccgagaacttgccgcaggattccacgagaaacaacctcaagaagatcttcggcgtcatcggcaggtcacacacgagaacacaacctctgaccgacggcccatgtagtttaattagtttgttctatgcatgttagcctttccatgtactagtgtctcttaaccgtgtgcgcaacgagtttttttatagcatgaaaaacatcagaatctgccatccgcaagaacccggctctgcaagatcatcacccaggtcgtcagacacaaacacaccagccagtaacaaggtacttacttggtctttttttattttcattaattgttatcttgttatcttgtcatcttgtgattaagatttgagttaacttgtcgagattaactgttgattgctttaattcaaattcatatttg

SEQ ID NO: 7171 - DNA, 544 bp, Zea Mays
agaacttctccggtgagctcccgcctgacttcgctgacctcccctacctcctccagctgtgagttgtcaatcttcagatcttggtcaagctgacctgtgcacaagctccacctgttaagagcaataggaataacggtgttgttcctgtgctgcatgcagagatctaagcaggagcttgttccatggcggagtgcctcaccagtgggccaggatgaagttacaaggactgtgagtgtgcctttgcacttttacctggccattattgtttgcttgactactagtagaatagaacaaaatgtatcactgggttagtggttttcctgcactttgtgaagccacagtcattgtctcgtctgtggtgtagggcctaggttgtcggcaaggaatatctaaggtagcaacaaactagaccgccactccgagtcccaagcacatttttttccatcttcctgtgctgtgatagattaggtggcttttgccctatgtcaaaaagcaaactttatgaatactagtcatcatatctctgcacttaagcctacctttt

SEQ ID NO: 7172 - DNA, 353 bp, Zea Mays
gtctcattctgcaatttcctgttgcgagtgattaacctccaatgacagttcagcaatgcggcggctatctcatgcacgctccctactcccgtggtgtagttccaacataagtcgttccaccctggcctccatatcccctattgggtcattgcttctgctgctgctcccttcatgtctaggggtcagctaatgccggggtacaccatgaggtctagttgctctccgttgggtggtcttggtacgcgccatatctccataagaggggaagatttatttagtataattcaaacatgatgcatgcataacctaatgattatcgtatcaactttttgttgatcccctaccacctacgt

SEQ ID NO: 7173 - DNA, 586 bp, Zea Mays
ttcttaacatgctggctagggaatcatctcactctactcgcaccgagccgatggcgtttgcgattaggcaggaccttggtgaagacgaggaaattcggaaactagaaggtgctcatcgcaagcgatcacaccgagtgaaccatctagctattcctgacgaggagaagaagaagaaaagacgactccggcggttatcatgcttggagcaagatgttggcccctccacactattcctcggcgatggcccggtgagcaccatcctcgaggacaatgtcagaggttgtgacaatgctcgggttgacggcagtgtggtcgatgaggatgaggaggaggaagaagaagaggttccgttaatccacaagaatagtcatcacaacaggggcagcgacattccgatgcaggccttatctgcactagtcagccttcaggggttatcgatatctgattttgatcaggcattggaagagatcatccccgagaaccttctatcagagccccttgaggttgacaatcccgtcatctgttcaggggttccagatgatgttcttctgccacgtgatccggtcgggcaagaagtaacccggat

SEQ ID NO: 7174 - DNA, 686 bp, Zea Mays
tagcagaacgtgtaaaaccatagtgatctggaggttcaatgttgccacagtcacgaagacaatatccctgattaaaaacaacaggagactcatgattgtcagtacaagtatctgcaacaggttctacatcaggactagcgtggggatagagcaggaacgatgactgtaggtttgggtgacaggtggtttagaggattaagatggagatgatgtggaagtggaaggaggcgtaatgggaataagagcatctggtttggttataggagaagattgtcacacagatgaaggatcttggatgggaggaagacataggaagcatgaggagtgggtggacgagttgtggaagaagggtcgtttttcattaaaactcacatcttgtgaattatgaatgcgacaagatgggttataacacttttttctcgaacgcgcaggaggactacacgtcattatattaagagaggaaaaaggtccaagaggaccaaaatacaatgcccatagggcaatccgaaacacttgaccacagtctagaccctactaataatagcaggaacaccaaaacttgctagctgcttagccccagccctatcccagtaacttaactcatatgggtcataacactgataaccttttatatttaggactgtagccaagtaaaacgcactcaacagattgagtagtcaatttag

SEQ ID NO: 7175 - DNA, 853 bp, Zea Mays
ggggggacgcccaccggttcccgcagcgcccgttgacggcccttgggggcacggcttccacaactactgtcgggaggggggccaagggttttcctacacccaaggtccactcccgcacaatggtatgcaacctgaatctgacctcattccgttcatgtcttctgttcctcatcatcatgatacactagttggatcaatgtacccccaaacttcacacctcctcggtcaattgcctaaagtgccttttcctccttttgatggggacaatcccaagctgtggcaaactcgctgtgaggattattttaccatgtattcagttgatccgagggtgtggatccgtatagctacaatgcatttctcaggacctgcagcccgttggcttcaatctgtagaaccacaattgccacatatttcctgggttgattttgggggtctgattagggagcgtttcggtcgagatcagcatgaaattctcattcgccaactctttcatatcaaacaaacaaccactgtcgctgtttatgtcgagcagttttcccaattagttgaccaactcaaagcttacagcaccatttccgacccactatactatacaatgagattcatcgatggtctccgtgatgacattaaaagtgttgtattagttcaacgtcctcgcacattggattctgcctttgttttggcccaattgcaggaagaggtgggcgccacgcgcagagatactcggaagttcgatgcaccagtcaatttgaggtccttcgcgcgtacagctttgccactacctccaccccctcctcggcaaacaagcaatttcaagtcagacgtggaaccagtgcccaacacgtccaagtct

SEQ ID NO: 7176 - DNA, 450 bp, Zea Mays
tgacacaaagaagtgtgtcgtgactgtatacattggatccagtccgcaccatgtggaatggagtgtcactactgcgggacacagattcaaagacacctgccaagtcgtcgctcgcaaggcattgagggccctgtgtcaaatctatgaagaagaagtggccgacaccccgctcagattatttttgccctttcagagaaaccgtcccgtttggatggccaggatgcgtgcattggaagagcagctgctgcttgaggacaaccccacagtcgtgtacctcactgcctacctgctcacccttgatgcccagtatgatttcttggctcggcaccaccgtcagatgattgctcgagcagaagatgcagagaagcgcaaccgtaagctccatgtgaatctcaccacagctcaagcccatgtagctgccttggaaagtcgtgtagtctttgctgttga

SEQ ID NO: 7177 - DNA, 783 bp, Zea Mays
cggttgaagaggaagatttactgttgggctggcccattagggttccaagccgtgtaatagatccaggcgattaggcccagattagcatctataaatacctgtaactgcttctggaagaggacgcgatttgaataaagaacacattccaccaaaatctggaacttatctgagcgtgactgggaagtcgtcttctccagttggtcgacttctcacgctgcgggagctcgccgtcagccacgggacgtcgatccttacacctggtatcaaagctctccttcctcggtgtgggttggtgatcacaagggggctaggttggctgtaggaagaagaggaggtgatcaccacggcgccctctgtcaaaccttcggcgcagtccaggctggtgttggaagccatggcgacagaagctaaacaaggggaagcaaggtgggacaagatgatggtgatgatggagaggttgacagggaaagttgatgctatggagaaggtgcatcaccaactattgggacagtcagaattgactgccgacttggtgaaacaggctgcagatgagaggacaattttatccaggcgcgtggaggagaatgggaaggcgttggccaggatgaggttggaagctatggcgagagagatggaggatgttggcacgggaccagagtcatcggatacaggaggtagaagaggggccataccgaaccaggatcagggaggaagggagttgcaacaacatgtacctaagatgcttttccccaagtttggaggcaaggaaccggcgatttggtt

SEQ ID NO: 7178 - DNA, 613 bp, Zea Mays
cattcttccattattgttacaatataagcttgccttgtcaaatagttatgttaatgtatcaaacaactttttgacagaattattatggcaatttggaaattgcggtcatcaggtctggaacaaaaaggtgaggtgattgataaagaacctgaactgaaagagaacccttatgaagaaggttctctattggccaacgaagatgtaaaaatgtcagaagtctactcggccgttctttctgtcgacgtgagtcttgtgccttgccaatgaacacacatctagaatgtcataaatgcactctcagatgtttctgttggcatctcaaattctgtatttgcaggtcagtgcgttaatggagatgttctctggaggtccactggaacacaaagtgatggagagagccggttgcgtcgactacttagctacagaatgggagctgctaaaccgtaatgtataccaacgtcatataaactttcggtttgacaaaagcttgtcaagatatggaggggaagcaacgaccactcagcaaaagtataacttaccgaaccaaaatgactggattgtcgaggaggtgatgaccctccaaggtgtccagcatgaagattactccagtgta

SEQ ID NO: 7179 - DNA, 330 bp, Zea Mays
ccaggggtgttcctcggatacaagggtcgcggataccttcgtggcgttatggcgaaccctcatggtcagacacgaggtcggagcaccgtcgaagattcaagcgcaatggcgacggcccttgcgctcattctgtttctcaaaatctctctcgcgtcaaagagggagaacaggggaaggggcggttttactaggatatggtcgaggcactggtgaattgagcggtccgcgaagggtatggcaaccatataatgcgagaaaggcacacgcctgtcgagcgatttccggagtttagttgtgagctccgccatttccgccatcaccgcggggagg

SEQ ID NO: 7180 - DNA, 979 bp, Zea Mays
gccgagtaagtctacgaggtgcggcaaacgagcaagttcccgccgagcaagtctacaaggcggagcgaacgaccaagtctccaccgaacaagtccacgaagagggacgaccaagtccccgccaaacaaatctacgaagcgggacgagcaagtctttgccgagcaaatctgcgagcggggagaacgaccaaagatccgacaagcagacctgcaaggaaggaacataggccgacgccgctgggccacgtcggtcgtaacaagacgcgtcatcaccaaaccacatccagaccgtacgtacaacaccaaaaggaccctgataaacacgatgatacaccctcgcatgcgcctcggatatgccctcactaactcgtggggccggtcaacttcggtcgcgggaacctcagcgccgaagtctacaatgacttgtacaccggaaaggccaggataacaccccataccgggtgtatgcctacacgtgctggaaggtaacacaaggggtatgacgcaagatgaagttgtagtgaacacgaccctggacctcaccataagtccactttgcggaacccgccaggtaccgcaacgttgacatcgagcaagctacatgatccgtatggagagcagaaaggatagaacacagtatcgtgagtgcgtcagcgcacgcccccacatacaacaccaggagggctagagcaacctaggggcaacaagccaaggaccccgagtaaaatacaagtcccgactgtaaaggcagccctcgagcgataaaagggctagacaacctcctttctcaacacaagcacactagttgtaacacgctccaagtaatattacgatcagcactacactggattagggctcccgcctgaacaagtctaacccctgtgtcacagctcctagctcagatcctcatgattcaccattcagagttagcccgcgcttgcatcctccactgaacacaattctattgtcctcccggtttt

SEQ ID NO: 7181 - DNA, 460 bp, Zea Mays
atgcagcatgagtggatgagggggcacccgtagcttacatagttgcttgcttgcatgcagcgtgagtgggagagcaggtgcatgtcgtgcgcaataaggtgagggcttgcatgcagcatgagtggatgagggggcacccgtagcttacatagttgcttgcttgcatgcagcgtgagtgggagagcaggtgcatgtcgtgcgcgataaggtgaggggggcacgttttggtctatgttatcttcttaatagttagtagagatagaaatataattttaggatgtatattaagaaaatgaaacctccaacagttctctaaacaaaatctcaatttgtccgcgcaccctaaatcatattcgtgctcctcaaatgtttgccattcacatgcactcacaatctcgtgttcgcgcgcacgacaccaacaaaactccgaggacgtcttcctttcgtgccattctctttt

SEQ ID NO: 7182 - DNA, 506 bp, Zea Mays
tattgttataagagaactcaacatattgtagactcttgtcccaactgcctccatgcttaagggcacaagctctcaacatatcctccagtacttggttagttctctcagtttggccatcagtttgaggatgataggacgaactgaagttcaacttcgtatccatgttctcatgaaagattttccaaaatcttgaggtaaactgcgatcctctatcagaaatgatattcttcgactctgccaactgagaacctttataagtaaccttgaccggaatgaagtgagccactttggtcagtctatccacaatcacccatatcgaatcataaccctttgaggtgcgaggcagcccggtaatgaaatccataccaatttcttcccacttccatttgggtacctttaacgagtgaagtagtccagctagtctttgatgttcaactttgactctttgacatacatcacacagagtcacatgtgcagctacatctctttttagcccgtaccaccag

SEQ ID NO: 7183 - DNA, 390 bp, Zea Mays
cgttttctacatttgacccgaccgttttcgtatttacggaaaaatatggaaacgggacggaaacgggagagggcttattccgtccgtttttgcgggatcccgtttttttccggattgaacccgtatttattccgtatttgacaaatatgggacgagcctaatatgcattagtatataaactaaatcctcgtgtatttaggtgacaaattatagcacaattgggcattgtaaccaccggctcttttcaaatgacaagtgatctaaagtcttaaacaacatcagatgtagctaaatatacacatttagtaaccaaacaacaatagaatgttgtctctctatatctatttgttttatgttattgttctgccaaccaatcactagtcaaacatc

SEQ ID NO: 7184 - DNA, 671 bp, Zea Mays
atctctgcatcactgggatccaaaggcacctcaaagtgaacctgtcgttcatcatcaggaattttttcaagcaaagcaaccaagcactaacttcttcggcagagggtcgcactctaaggcccaaaccgccatcaccagcatgaggatttgacacgaaatgagtaaaggccttggaaggaggcaggttccaggccgagtacgcaacaggggcaccaacatttgataccttgcctctaagtatcatttcaagccggctcaccaagtccacaacaggaatttttctgttggttacccgggttgagtcagctaggcctcagtacagataggccgggtatgccctgtccttcagtggctgaatattcttgaagacaaagtcagcaaccacagcctctgcagtcagacccctctctttcaacaatccaacttcagctaacagagcccctgcttcagccacctcctggtctgtgggggattcagtctagctcggagtgcgaacatccggctgtctccctgaccgtggggggagagaatttttgtgattctcaacgataaaccactccaagcgccatcctttgataatgtccttgagtgggatatcaaggtagtcagtcttcctcccacggcgcatctccaagctcacgcccctaccagttggtgctgccctccggcca

SEQ ID NO: 7185 - DNA, 504 bp, Zea Mays
gcataatggaaggaatacattatgtgaataattaatgctgacagcacacatgagtagaggcatataggcggagccgttcagattccctccgccttagtaacacatgagtaatcagcgggagtcatgatgactgcagtccatgcagtatttgataggcagtgaccctttttttggtaacgcgtggtaacgcgcgagtaatggtgagtcattgtccttgctatggtaacgtgtgagtaacagcacagcccatgcaacgtggactgggcgcgccgcctgtcactggaatggacaggcgcacgtcttatccgtaataaatgcaaagacgcgtgtagcccagaggctttatgctaggctccgcccgttggcttacgccacgcgcagtaggccacgtggcctgggcggggagcaggagtgtatgtgataaggtccggatcccaccaggtcaggtgtggacacgtgtcggcaccggacccccgcctgggtcctggttaaggcccgggtatg

SEQ ID NO: 7186 - DNA, 725 bp, Zea Mays
gtcagctggaccttcccctacctcgcgcgtatggcggaacgaccgcaactgccgccgcactttctctggaaattggccagcttgcgcccaccacccccggacctctcggccacccgagtacccttattagctcctgggacccgtccgcgcctatcccaccggatccaccattggagaagccccacgccgtatacccctcgccgaccgaaagggaagagagagcgccgtcgtgaccgaagtaggcaattactgtcgttgggtctcggagagttcgtcggaggccttctccaagtctcctgggagcatttcgcgtagtccgcgggtgggaagggcctctgcgcgtggaacgattcctcgccggcgcctgggaaccgcccttcgtcgtgggaagcctccctgtgaccgtctccaacccaggtgagctgtccattttcttgggtgtacctgtggcatggtctgggacgctggtattatgagttgagggcttggctcgggttttggtagaactccggcgatggcccgccgcaaacctgggcggcgccgccgttctactcgggtgcgcgggggagaggaaggcgtggccgctggatacagagtcgacggctgcgattagttggggataacggttcggcttagggttgctgtagccgttcgatccagatcgtgtgggcgagatttggtttggggcttttaaatcaggagcgtcagattttgatccggtggtg

SEQ ID NO: 7187 - DNA, 422 bp, Zea Mays
caagcgtgtcctgtcagggcgccatgcagatttttgttttaatccacagccacgctccaatgcagggcgcgcagaacttttcttttgcgcagctttttcttttgccgtccggtctcatctgcgcagaaactttgttttgattttttttgtggcgcatggaatctctgccggtacatttttcagaaacctgcgtcagaaatttgaattttttggcgtttttccctctgctgtttctggctctctgaccacactggtcagaaccagttgaactggcccatgggggcggttgaaccggtcctgaggaccagctcaactgcctatatatatatttgacactccccttctcttctcccacttcatccactctcgccttagtcgcttcacaacatttagagcctctctttcacacacctcaaccagtt

SEQ ID NO: 7188 - DNA, 425 bp, Zea Mays
tggtggaaacggatgcttgcatgaatggaattggggcagttctcatgcaaagaaacagacccattgcatatcttagtaaagcattgagtgaaaaaaatcagctgctctccatttatgataaggattttctagctctcctaatgacagtggaaagatggcgtcagtatctacagagggctgaatttgtgattagaacagatcacaaggcattgagcttcctaactgaacaagtgttgcaatcagatctacaaaagaaagctatggccagattaatgggattgcaatacaagatttttttataaacaagggaaggagaacatcgctgtagatgcattatcaagagtgggtcattttatggcattacaaaccttgacagaggtgaaacctttatgggtacaggaagtgcttaattcctatgtgactga

SEQ ID NO: 7189 - DNA, 384 bp, Zea Mays
gtttaatccgagccgttcgcgttcagatctacggccatcactttgccatatgaagcgatatcctccctttaattccggccggccagttgccatcctacggttgacggcacacggccatcgtcgagcagtagcggcggtgccgcgcctctcctacacggtggcaccattgccggaaaatgcaatccagcaatcctagccgccaagcttaaatctaatgcatcctatcgcatgtacgagtggtttcgaaacaacgtatgaacacgtaccggcccacggcgatccgagtaatcccgaccacggcgttgtggggaagatgcgcgacgttgagcaattccgcggtctccgtcaaccaatcacgcacaccgaggccgccgataccttccc

SEQ ID NO: 7190 - DNA, 1137 bp, Zea Mays
aaaataataagtctaggaaaattggtttcacaattttaggatttttctaccattttctatgattgttttggctctggaataaaaagaaaaggaaaaaccagtgaatagttctgggccaaaagcagcccatacggcccagtcactcagagaaacggggcgcgcccgcgcccgtgttggcagtcttgcagaagggcccctgaggttttcattatctgggaatgggtccttccactgtttacacagtcactgacactttgcaaaaatgtccctagacttctgtctcttctccaaacacctccctggtcacggcacgctcgccgttcatcccggacgaggtctgtaccggctatggccggcgataactgcccggactaaccatcggggaggcttcactgacctaagatggccccggaacacacattaatttgacccgaacgcactgagaatggcatgtccacatgcacggcggacaccgagcttgggagcacatgttcccgccaaaccatggtcgattagagcgaacggacgccaccatgagctttgcaagcacgcagaggcatggaaacaacactttaattggataggaactcactagagtggcccagccacgggcgggctgttctttgcgatgcggtggaccaatttggggggaaacggcgtcgcggtggctctggttgaaattggggttggggattgaggctactcggccgtaagaagctgtgctttcaccgtgcgcaaatgatttgggagaaggtggagggggcggtgcgaatttgacttcgatctagtcactgtgtttgcgatgatcatccttcgccgtgaacccaatggctatttatagccgtggcggtccggcgatcacctcgcggctgaggatagtatcgcaatcgcatgtcgaccacgtcggtagaaggtacagtgagggagaactatggcatgagcgccaccgcggtggaattcactgagtcacggcggccgccgatgagtaactccggctgggccagggagatggcgccacgtacgggttatccctccccaacgttatccacaccataccgcccacgaatcaggacggcggtggaactaattttggcgcagagaggtcaccggcggtgagcaagccgcgctggcaacctg

SEQ ID NO: 7191 - DNA, 1242 bp, Zea Mays
ggagtatatataaaactaattattagctactagttgcgcatatacaatcaatgcaagtcgtcctcatcgatgacgctaaaatctgaagtacgtgctacgtaccagtagtagtagctagaaataatgcaggagcaaatcacatgcatgctcaccgtaccggccggccatggcccagacttatatgcatgcatctgcgggcaataatcagaatcagtcaaaaactaagcaaaactagaaacagaaacgacgatgcaattgcaatatgcaacgcgtacacacagcttgcaaccgtacgtacgtacgtacgtatttcagcaagctcagctggcccggtcgtcgtcgtctctgtcgttgctgctactcgacagacagcgatggattataaatttcagcaaacagactaaaccacacacctgacagtctgacagcaacaaaactctgtctgtttttggctcgcgtacgtgacctctgatctgtatttgctcctcccggccgctcgtcgtcctctcgcctagcttctttcttcttcctgtgtcgttgccctcgtcggcgcctctgcttcttttaatctttgacgtggtcctgcattaattgctactgctttgcaggcgggatcttgattattaacttcgtcctgatgctggaatctttcctaatgcatcggatgcgtcccccattcctgctttaagctagctagcctccgtcgtttctgtccagttcatcagagtatacactaaatatactcagcatgcatgcatgtacaagcagctgttgagatttgttgatactagctactgcgtgctgtcgggactcgggagcagcagtatatggtttactcaactttgttttcttatttggatcgtttagatgcatgagttgcaacgtacagcgtggtgacagtggattgattattctgtctgtcttgtttgaattgggtactagtgtacgtaggcatatccatccttcctgtacgtatgtatacacgaactgaaaccatcgatcaggcaggcatcgtcgtcgacacagttggcatcggttgacggagcccctctccctgaccagctaggcagttggcatcgaccaaggcatgcagaccaagcatgcagactgagcgccccaccagtacttacgtgcccggccgtcccccggctttgagaatttgacagtggattgataatttgtttcaaaggatttccatatttccaagggaaattagtttattgtccctagaaaaaataggaa

SEQ ID NO: 7192 - DNA, 521 bp, Zea Mays
gtcatcttatggttctccattgtgctacaagtccagccactatggattcaagatgtgctaaattcttatactacttatgctgaggcccaagatctgttggctcagttggctgcgcatagtcctaacgaaaagggtttttctctgcagcagggggttattagaaaagatggattgatttggattgctcacaactcagcattaagaacgaaacttattttagccctccatgacagtgcagtggggggcactcagggggacaagctacctatcatcgacttaagcgtcttttttggtggaaggggttaaaagctgatgtgctggagtatgtgaaacaatgtgatgtttgtcaacatgccaaaggggaaaggagacatcctcatgggttattgcaacctttgcctattcctcaaggggcttgacaagatttgactatggacttcattgaaggacttcctaaatcagaaggatgtgatacaattttggtggtgatggataggtatacgaagtatgctcattttccc

SEQ ID NO: 7193 - DNA, 624 bp, Zea Mays
gatttggagccaatggacgactgaaaacaaccattctgagtgtcgccacgtgttcgataccgtgttgcagtgctcggccacgcactggccactctctgggcgcgccccacactctgtcggctccaccatgcgcatgcgcctagccgtgcccgagagcacctataaatccctcccagggtgcgtgacagtccactccacaccccgcctcactccctcacgcaagtccccaactccgacgagctccacaccgctcgccagtgccgcccgaaactcgctgtcgtggccagcccaccccgaccaccccatcgactaaccaagcacaccagaagcttcccagcatgctcccacagcttgtagcctcgctcgattgaactctaccatgccgaagaagccccgccaccaccagccctcatggtttgccgccagaacacggtgaccggtcactccgagcgtccaccacgaaatctgagctcggggacagcttcaccaaggcactaacaagctccctgagcatttccacgaagctctactgcaccaggacctgggattgaagctcgtcgccggcgtacacccgcctacaccctggaccggcttgctcagcttgccgccagcctatcaccttgc

SEQ ID NO: 7194 - DNA, 576 bp, Zea Mays
ggagcgtagggcatggactggacatgtgctagcaccggacccttactcatgtcggggtcctccccatcccaggaccttgccaaggcttggaccttactcggagggacctggggcccacccgaggaacccggcatgccttcttgggagctccggacttgtacgtataggggtccggtgtccctctgtggaggtccggacccaatgatgcatcctggggtgtattgtgtttccttgccacgtggtgcccttagccctgcccatgtggtggggtcgggtgtcgttttccgtgtggcctagagacgtcgtatgtgtacaacatcttcataatgtagaagagggtacccctgattcagggtacggacagtggcccccgggcccacctcaggggatgatgcgagcctacaggtggggccagagtctgattagctgttggcctgctgctcctgcgcacctgttgacgcaattactgccggcccgcctatggtcatgccgactgctacgcctattcccacggctgactggcccgtgaccttcgtacttaatgtcactgttgggccatgcgtggaatgcctcgag

SEQ ID NO: 7195 - DNA, 1009 bp, Zea Mays
aacgggtccgggtatgggtgtggaattgtacccgcgcacgggtacgagtattggagaggggagtttttagtctaacgtggtcgggtctggggttgcaaacccggcgggtcttcaccagttgccatctctacctactaaggtgaacagggaggatgaagccattaccaatgacgatagatggagtagctaaattagaaggatgaaagagggagatgttatcggtggtggtggtggtgtggttggaggtgtcggtgtcgaccacccagtttgtgaccacaataggtgtatttagagccatagtgttaaacaagttagcaagagactattgatctcatctgtcggaccatcgagaccagcttggcgcaatgaacacatgtggtgaggatgtcggagcctgtaggggttcgaagccgaggatgttgggtggtccaagcagtctagacgtcgccatcatggcatggagcacttggcgttgttgctatcattggctgctaggaaccaggtcgggccacatgctgatgccgctcatccatgggttgtagaaggtcagccatggagtgttaccatgacaacaccttctctacttgccagatcctaaggtaggagtaagctgccttctggtcctggaggagcgtgccggagtagaaggagctagggcagtcggtgtggggacgaccgacagagtggcatgaaggctgtcagagcagcagcaaggctaatggtagtcatgtcgagcttctccagaacaagggcgtccttgaggaaggacgggaagggggagtagcgacagatgatggctgcgacgtgctcaaacttctttctcaagcctcgtagaatgttgaggacgaagattgttaacaagggcgttcaagtcagccagggagttcgccatccccttcaacttgcatcagtagtcaccgacgggaagattgccctgcatgaaggtgcaaaaggtagcatcgagctagatggtgcaggtttcacaattatcgagaaacttattcttaag

SEQ ID NO: 7196 - DNA, 770 bp, Zea Mays
gtgcacgatttagagattctacaggggctagtttacaaaattcctaggcatgtatgtaattactttgcacagggtgtggactccgggttcatatcaaaaaaacagagggacttttatgctaaagcgcatagccgaagcgttatccacatatctcatcagtccgatctaattccgacgttccagattaaatcagtgctcttgtgaatcggtacacaaccgagagcccatggattacggatcaacgtcccagagcatgccacgggtccccgactaatctgggccccaggatcgaacgcctacggtctagatttagtaatgaccactgtcgactatctcccgctcgatcccagatctatggtccagatactatgatgcgaaagggtacgttagttctaatcaggatcatccgtaaaccgactgacggccccggatccgtccctgccctccgccgagacaaagcacagcggcgatcgattctgcgaccggactccacatcggaggtggtcaccggcgaaccgagccccaaacctaactcccgattagcgcaacgtgcatggtgaatcaaggcgaaccgagtgggctgctccataccgtgaatcggtgcttggttgatgatggccacgacgggacacgagctcggcggagaactctactccggcgaggaattccttgatcataacggttcctccttccctgcagacctcgcgaaaaatttgtcggggggcaacggaggtgagattcgccatggggcgcgcggcggagcggcaccc

SEQ ID NO: 7197 - DNA, 704 bp, Zea Mays
cggtggagaggacgcaagtacggagatgcaaggcgacaactatcggtgtttagcactaacaacacactatgagatataccatagagtgattttgtggtcggcgaagtcgacggtagctcgatggttcgtgctaagcacgatagaacacgatcgaggatctatacaggtttgggccactaagaagcgtaataccatacatcatgtgtgctgttgagatggaattgctcttggggtctaaggttatagagttgacgagaactatgctctagctatgcctaatcgaggatccaattgttttgtagggatccctaacccaccttatatccgacagaattagggtttacatggttaagtagatcgctattgctatgccttcatctaaggagttgactcagactaattcgcaagtgtgtgaatctctatccggcttatcttgtcttatgcatgcacgggagttggttacgatgccttcacacccacgtattcgagttctgcatcatcctttggccgagttcgactaatcagtcttcgaggtttatctctctagcccactgaggtactataacggtccacagactgaatctgggtcgcgaggacccagtggatatatatacccgacagcagctggccacaatacttctttggaacgtcgggagatgtccgttcacgatcgtggtggaaacgagcgttgcggtggcggagag

SEQ ID NO: 7198 - DNA, 940 bp, Zea Mays
caaattccagggcacggttgtaattatttaacactgtgcgcgggtggcgggttcatttgaaaagagtctgagggctcttaagtaaaatctccaggccgaaggggtattcacagatatgggccatcagatccccactggacagcccggattacattcatcctagatcgaaacagtgcgctgcatcaaacgtcggatcgaacaccaacgcaccagattgaaataagcatgacttaatcccgcccgctcaaatcgcatcgaacggtcaccgtcgaatgcctcgctacgctactcccagattggatctgcgccgttcatcagcgattccacggcaccggtgtcgtcctcctccccgctcagttctccccgtctgccgcgacccgaccacggcgaaaaatccaattccggcaagacggatcaccggcgataacgcacctaaacctaattagaccagttctacacgtaatggtgatgcaagcgggcataggcgaggagttcataccaacaatcgtgggcgcaggagagctgtccatggtgaccgcggattcttggtgagatgcgagcgacggcgagaaattgcgtacgccaagccactggatccaacgcgagggtggcctcgatacgtgcagtagaacaccctgatgccctaggaacggaattcggcgaccataagtccgtccgagagtgtaacgacggtggcgtcgcgagctctcgcccctccgctgtgttttctcaatggcgttactggaaaaagggggaaagagagtaagggttcagccttgctatctaataggggagaggcggtcgacgagcgacgcgagaatcacggcgaggtggtttggtcgccagggatcgcggagtccgcgcagctcggcatcggttgcgcacggtccgaatccagcactgaggtgggagaagaagctgccgacaagtggggcccgcg

SEQ ID NO: 7199 - DNA, 979 bp, Zea Mays
ctttcttgcatcgcactaaggaactccatatattcacgatcatgcgttttgttgcattgcaattgccctttttctgtatctttcttcaagaattcatgattatgctcatagtttaccagatcaatccggacggaaataacattctctttagcatcatcgtagatttttttaagtttcaccccagccttgcattgtgttcatttcgaacatgtgttacatatccttggatttccagctaccctttcagcattctttccttccattgaacaattcaaccatttacaattcttccgctccctatatttcttcaacggaaatccaacctcgtatgcatattgactataaaaattatacgcctcgtccacgttactaaatgtcataccgactttaggtatcaatcttatatcaatattgtccggctgcgcacagaaatttaacatttacgattcaatagcgactaaatctaacgtaatataggtacaacattacaaagaagtatgtaagaaaataagagtatcatatttgggagaacttacatggctttgaagaatatgaggtgtgtcctgttcatgtggcccaatatgtctcatggggatgtgcttctctgcgccgaccacgtctgccgtttttgtgtgctcatcgatatgtccaggtgccctcaatgccgccgggggagtaacggagacaccctctgtgtaaccggcgatcgcagacgctacaggatgcatgtccattgaaatagacgtacctattggcttatgcacagacgatacatgtggcatgtcatcgccagcgctggtgctggacattttctcgccgctaatcgccggccggtcctctcacttccgccgccgctaaccgccgccaatatctcagatacgaacgtggacgagcgactgtaaatttgtatttgtttcctcccgtaactgcgcctttatttacgcgaacgaagaacacgtctttccttatctcaaacctg

SEQ ID NO: 7200 - DNA, 391 bp, Zea Mays
catatcccctcccctgtgctgaggagtgaggacctcaccatctcctcctgttggttgttccaaggcccagcgatggagcgatgatggtggtcttgcctcttttgcgggtgcttcagcggatagtcggcctcaggcctcttacaaagaggtgttgctttcctcccgaccccccatccatcatcctgctgctgaggttgatggcgacggttgggtgagagtcaaggatcgtcgtgcatgcttcagggatcatcgtgcctgccagcgtgatcttcgtcaccctggcctctctgcccccaaggctactcctattgacttgcaggggtggtgcttcaattgcttttcctcgtctcatcgtgcaatcagctgttgtcgtcaggtacgctgctttctc

SEQ ID NO: 7201 - DNA, 484 bp, Zea Mays
gcggaatattggtcccattgcaccaacacaacaaagttctgaaaacaatatggaacctgttgtgatgcccactggtcctacaccaccaccagaatcgggcctcaatctaggttctgcaaacttcctcgctgatctaacattgactgaaccgccagtgtcgcgcacgaagggtaggaagtctgccagtggggctaaatgtgctaaaaatagtgtggaacctgctaatccatacaacacatacagtgggggttagggcataagagaatgccaaacctgccatgttagggggcactatagcacaacatgccctcagaactcaaacagaagtagagcggccaagaacaaggacaaaaagagaagtgccaaaactgtaggttggactccacgaaaaagaggtcgtccaacaataaaaaaggactagatgggaatcaagatgaggagcatagtgtgggggatgagacacaacaatctgggtgcactatgg

SEQ ID NO: 7202 - DNA, 285 bp, Zea Mays
ggtatgggagatggtcaaattggctatcataaggtttccgatatgactgccccccagggactatgctaactctgagcttatctcggaacgccccagctatttcctgccttactatatcgatggcagccggtgggagaccaccgactctttggtccaatatgggtgaggttgtttggatgttggtatgtcgtctgcccccattggcttgagttttgtggtgtactaatatttgccctatgtggttcataggactggtcatctcttcccggccttctatggaccgga

SEQ ID NO: 7203 - DNA, 455 bp, Zea Mays
cattcgttccttactattccaggcttcccttcctgctcaatattggattgaaggtcttcacacagccacctatcgtttgaatcgccttcctaccaaaactatacaagccatctatccttatgttgctctctttggcaccattccttcctatgatcatcttcaggtctttggatgtgcttgctacaataacatcacttctacggcaccacacaaattagctccccgctcaaccaagtgtgtctttcttcgttattcttccaaccacaaaggttatcaccgtcttgatctctccacaaatagtattatcatttcccaccacgtcacctttgatgaggcagattttcccttctctgcctcgccccatctaactaacaacttggattttttggatactgagaatgcgcctttgtcccctcccattaggactttgccctttcctgcaggtaccatggcgt

SEQ ID NO: 7204 - DNA, 370 bp, Zea Mays
ctacaacagagcgcattgcaaggcagtcagcccactacaccctcattggggatgcactgtacagaaggggcacaacaggagtcctcatgaagtgcattctttcggctactaggaaccaactgttagatgagatcgacgtcggacagtgcgggatacacgcaacatctaggactctggttgggaaggtcttcaggtctggtatctactggccaacagcaaagagtgatgcagccgagttagtccagaggtgtgaagcttgccaattcttatcaaagcagcaacatttaccagcacagcaactgcagaccatacccgtgacatggccatttgcgtgctggggattggacatgattggacccttcaagaaagc

SEQ ID NO: 7205 - DNA, 501 bp, Zea Mays
gtgagcgcacatgctcagtatagatggatagatgggatgggtcaagcaggacgacccgaggcacagccaggtaagtagggcctaagcccgacctggcccgatgctaaacgggctcatgccagatcgacactatgctcgtgccgggtttgggccgtgatccaggcatgctgtgtcggcccggcacgacccgattaagcggcaagcacacctggctcgactccacggtaaacccccacgccctaacccagtcacacggcacatgcacacaacaacacacctaggtcaggtcccctcccctcatctcccttgcctcatcgcccattccccctcacccagatatcctcacccaggcatggaggcgccccgctccatcgatgtcgaggcgttggtcgtcgcccgccgtgctccctcgatcctccgtcctcggcacgtcgtcgacatcctagctcctacatgctcagtcgacctcgtgcgagagctagtggactggatctgctctgg

SEQ ID NO: 7206 - DNA, 682 bp, Zea Mays
ccccctccggctctgggacctcctcggcccctagagcgcgccccacaccgcctccaaaataccataaataatgcatttcctgcatgcggccagagtagatcctggatgtaccaaactccactatgtgccccagcaacaaatccacaaccgtcgccgaatcactaaccgtcttctccgaggacgacgagctcgatgactcagtcgcggcggacgacgaagaagaagattgcattatgtaccgtctgcggcaacgagtagtatgcttcacatcggccagctcatcggcagcgaacagtttctcggtgtgaccggagctagaagatgtgcagcagcgtttgcaaacattgtgcaagaatgtttgttcgctggcgtgagaaattgttaccccatgggcagcgtcagcttttattactcaaaaaatgcctcagaaaaccaaaggtcgcagagtaaaaacatcacatcccccaacggtcacatcccccaatagtcacattacaaaaaaaccctcgggccacttcaacctatgatcgagggcaacgttcgaccatccctcgagaaaagacttcgagactagctcactaagttgaactggtccctcgggggctagtgttggagcggaggccgaacacgacctcgatctatctgaccctgctatcatcaaacatgtttttggtacaggtgc

SEQ ID NO: 7207 - DNA, 466 bp, Zea Mays
aaatggcaaaaaaaaaacacggcaggcagaggaatagcgttggaataaacaaaaaaattaaggattcattgaagtcactgaaacagtattaagacatcattaaaaatttggaactgaaacagtattaaatgtcaattaaaaaattagagtgtaaacatctgaaaggcttcgatgaaagtcactactgtagacgcgccaggtaggggtcgaacctacggccttctgcttaggaaacagacgctctatccactgagctacaagcgccttaatgactctaaatgatcatcagattataagactgcgcttatttttgtcatgctggcagaggagacagtgtggatgtcctgaaaacgacgaaacggtgttcatcggcacgtctgctagattcaccgggaacgagcatcctgtgacactgacacgcggggcatgtttgattacgtggcctgggctagacaggtttaggtta

SEQ ID NO: 7208 - DNA, 345 bp, Zea Mays
gcatagcagacaggacgggagtcataagcgtgagacgaccagcccgattgagcatgcttcctttccatccggccagacggttccggattttctcgatcagaggttggacatgaattctctggagcgcccgagtgtgaagttggaggcccaggtaacgacacgggaaggtcccccgggtcccttggaatggctggagcacgtggtctaggtcaatgttatcacatcttatcgggtggatagaactcttctcaaggttggtgaccaagcccgaggcgcaaccaaaagcgtgcaggatgtctttgaccgccatgaggtcttctctagaggggttgataaaggtagcag

SEQ ID NO: 7209 - DNA, 414 bp, Zea Mays
catgtgaacatggactaaacaaaactatcatgcttgcacataggttaatcattaaaaaccacatagcatgacttacaaaaagatacaggtttatccacatacaccaagagagttaatcatggtggatatatcaaatgaaaagctacccattgaatgattcaagagatataacctataaagcacacaatcacgattgagcaagcatgattatgatcttggaaatcatggatcattaattgaaagatattcaacacaagcaatctcaaagtataactactctaaggataggtatagcacgacaatccaacttagaagcaatactgattagaaataatgcacttaagatacacgggtaccgtcctttggagagcaagttgcagattctcatcaaagtcctttgcttgattcaccaat

SEQ ID NO: 7210 - DNA, 519 bp, Zea Mays
cattgatatggtcaactgaggacctaaagtaggtagagcatagaagcatttgccaaacatttgctaggcctcacactcctcaccatggtcactgccatcattgaggatttggccactagtgccctcaccctagtcctcactcatcaacacatgatggtggtgcgctcatgcttctagaggtcgaagatggcagcgtgagtgaagacctcgtgtctgtagatgcgcatgttgaaatggaggttaagggaatcaccatagaggagcttgtaggagctcgagaggtcgcacgggtgtgacgccaatcgtggtcgacaggagagggtgacatcagagggctcgtgcggggaaggctaggcaagggcaggcagagggtgcgctcgttagggggagggaacatgatttgaagcggtgtgagcaaggactctgagttaattacaaagaaatataatggttttgataaaagtgttgttacatgacgatgatggaaactggtgctattatagtagtagagaagagatg

SEQ ID NO: 7211 - DNA, 468 bp, Zea Mays
atccggcatacatatatatcgatacgctcttcacatagtaattttcattttaacttgggtatcacatgaacactactaatttttacctgcgaccgtaaccatgcgcatttaggccataacaagcaaatcatcgtggttacgagcttaaccaacccatctaacacttcggctaactagagcaatggcatagcccgctaaataacatacacgtcggcttgcctattattatcactatctaagacacaacatacaccacatcatttttataaacatacctattcacatgtatattcacacatcgaccaaatcatacgaaccgtaaaccactaatctctaactcgaaaccatcatgcgcttacttcccaattcatgaacacataacgcgtattgacccgactcaagatatagaggaagcgatgactactttggcatgtcatcacctctctatataagccaaaacaatttcta

SEQ ID NO: 7212 - DNA, 437 bp, Zea Mays
tctgtgttgcccagaattcatcgtcggagcgcgcggactacgcaaaaccatgggcgacgtcttcttcgccaccgaggctggtgagtatcccttgcgccctgttcaatagctccctatgattgcgtagcgccccgtagagttgaggttagtacgcaagatcgcgggatccggatgtccggcgatggcgtccgccgcagctgggatggtgcggatgcgctcggttatcggaggtagacgacgacctttctgtcgtccatccgagattggacggtgcggattcgaccggggggtgtggttgtgtggaatcgcctgtgaccgtccgttgggagatcgacggtcccgattagattgcaagcacattgattatatatcatagatctttgatccaacggcctggccagcgtaccgtttcgcggccgcatctatctaatccggag

SEQ ID NO: 7213 - DNA, 884 bp, Zea Mays
ccaactcgtagtgtcatcctcgtgatcatgtaagagtcccgttgcttacaaaggtgacgacactatcgatcaaggaaccctctactagcggccacctttctgagagatagggttgttgtcttcatcaacgctgccatctacacttccccaagtacgatggcttcgaggatctgctacgttggctccaccgctatgagcagttcttccgagcagcacgtacgctggacatggagaaggtctggcttgccttcttctaaatggagggcaccacttagcagtgttattattggtgggagaggaaccgagaggaaccagggcaccccgtattggacacgcttcatggagctcgccaacgcacacctccgccttcaggggtccctcgacgagtacatcaatgcgttctactaacacctcacccactacgacgacctctccaagttgcaacatatctccatcttcatcgtaggcctgggcaaaccattgaagaccgtcatcaagcttgacacacccgccaccctagaggaggcaacgaccctagctcacacctacacccgtcgcaatactgtggcggctcgggcaccagcaccatccacacatcgttcattggcccgcgctacaccatcccctccaagacttcccgccacgccagttgcccctagctatccggctacaacccgtccacctactggcagacacatgactagattgacgcccgacgagatgattcacctcatgaaggtctttgcttcaattgccttgagttctcacggacgcacctgaagacaagcaccagtagggcatttacctcctcgacatcagcgatgtcgaccccctcgactttgacggcgacaataagatgaccccattgtctggcacttgcacag

SEQ ID NO: 7214 - DNA, 442 bp, Zea Mays
ggcaggtatacggatgatcagatgacacgttgatgaggacatggcaatgaaccactggtgccactgtgagctcaaggaaagtggacggagcaacggtggcccgattctagccgatgactagcatcacagtcgcgctctggtggtggatgaggcccccccaagcgacactgagtgatgctctccatagcgcgcatgcagagagctcgcccacatgccggttgtgggtgctcacataatggcgttgggttagataaaattgcagtgctcacctacgctagcttgtgggctgtactcaacaaccacacatgtctaggctcgtacacgcggctcgcctgaatccttcgcagacgtgcgtgtgcgcatggccctcccacgtccactgttaggagcacaattgcccaagtgcggcaacgacctcccactgcttctgattccgcggaag

SEQ ID NO: 7215 - DNA, 480 bp, Zea Mays
cgagaacaggtccatccaatccccatcccatggttcacattcgacaaagtgaagaggtatgcttcagcttgatctccactgtccagtgatagatcgacgggccaggaccttccatcctcctctactcaccaaccaaagctcacacatgcggtgcaggtcaccctgcggtggcgccattgccgtggcccaggagttcgtacgcttaaacaccaaaattccaaaccgcccgcagtcacgcaaaggaaatggcagggaggaccacgtggagggtttcttaccgtgagttgtgcgcaccgaggcttggtccagtcgagattatggcaccgcagcaagacccacaccggcaaagaaactccatggtccgaggctgcccacgtcgaattggggtttcacaaagcctccacgcacgaccttgcatcacccctagaaagtcttctaggcgattcccaaggatcgagcaccggtgtaggcatgctgtgg

SEQ ID NO: 7216 - DNA, 492 bp, Zea Mays
ggagaacggcggcaagacgaagcccacttgagagagtggacaacaaatctggggagaaggcaagattggatccacacttggaggcccagatctacacaaccactgaccggatgttggcgctgcgaagtgcgacgacggatgtgtgtggacggttgaacaaatggggaaggaaaagagcgagagacacagggagggagcagtggagaccgggtcaacgactggatgagagggcagggaagtaaccgtcgctactgtcggccgtgttgtgcggccggaagctatcgtaggaggtgttgcgtgtggcctgcgtggacgagtcgtcggtgtcggcgtcaccggtgccggtcgtggtccactcgatgtcgctgagccggaattgcgctccccctcgagcgaccacgcgaacgactcttgaacggcgacacctcgggcggcggcgaggccttggacaggacatgcagtatggcagggcggtcgcccgggttgacggag

SEQ ID NO: 7217 - DNA, 652 bp, Zea Mays
acggctgaacgcagtaattcaatcagcatggtaccagcagactctgagacgttatcacgacaaagccgtgcaacaacaatccttctcagtaggagatctcgtcctccgccgaattctaacgggggagggacgacacaagttatcgcccttatgggaaggacccttcgtggtagcagaagtcactcgaccaggatcatatcgtctcactcagatggatggcacagaagtcgggaactcctggaacatagaacacctcaggaagttttatccctagctgtatttcaaaagctatcgggacgacgatgtactctgtaaaatggaaatatgtcatcaataaagaaaggcttcaaagatactcagtttgttcgcggttaacttgcatgcttacttagctcggggtgaccactatgccctgctaacggagcaatcggcttaagtcggcaacgacttaaggtggtgcaacatgctcatgcttacttaactcggggtgaccactatgccctgctaacggagcaatcggcttaagtcggcaacgacttaaggcggtgcaacatgctcacgcttacttgactcggggtgaccactatgccctgctaacggagcaatcggcttaagttggcaacgacttaaggcggtgcaacatgctcacgct

SEQ ID NO: 7218 - DNA, 769 bp, Zea Mays
taccatgtcctttgatgtatactaagcttttagacctctatgtgattgaaaaacatgtttttagttaccctacccgctatgtattttttagttaccctattcactatatttttgtaggaatcttaactgggagctgttagacctagcaacttggccaatctatcttgttgaatacttgctaactaggggcttagaattgaggtatggtatgaagcttacagatttatgtttgctgagtacagagtactataggcagcctgcaggtgtaaaactcgagctgctgcgttcactctctgatgatgttttggagatcggggctatacggtcaaggttgtcagagtcagatggaaacgacgagggctttagaagcactggtgtaagaagaaaaaagagggacaggggctcttctgctaaggtggcagtgggttcttcttaatttccagaaggatctgctgaagtggatgatggaaacaacgatgaatgttatctttgtggcatggatggcaacttgttatgttgtgatggctgtccagctgcatttcattcgaaatgtgttggggtggtggaggatcttttgcctaaaggtgattggtgttgtcctgaatgtttgatacggaaggatggatctaaaaatattgcaaatccaatgagaggagcagagattctaggaactgatccacatggtcgactatacttcttcacttgcggctatcttttggtgtaagtcaccttggactccttacatgtgtatctctctgaacgatctttt

SEQ ID NO: 7219 - DNA, 395 bp, Zea Mays
caagtttatgcagttgtcacgttacgccccagaagatgtcaacacggatgctaagagtagggatgaaaacggggcgggtacccggaacgggtaccggatacgggtacgaaaacgggacgaaattttggatacgaaaacgggtattttatttatcaagacggatatgggtactacctggatattgaacctcgaatacgggtaggatacagaatcattaatacccggtcaatacccgaaaatcccaggtaggatacgggtactattcgggcgggtacctggattgtggattcggcttgggcctacttcctgttgggctgcttgatcggccggcccatcaagtaaacctaaggagtcctggccgcacagcatagctaccctacccacagccagccgcc

SEQ ID NO: 7220 - DNA, 673 bp, Zea Mays
tccatgcattgtcatcacatggtgggcaggcaaatttgccatgaaccatatgtgatgagagcattcctaaacctggcaagtcacttgtcgtcattaaaacagcccctcgcaaattaaataattcatctctcgatgcgtcgtatgtggacatgccattctgaaatatatgtttcaggtcctccaatagtggttccaagaacacatgaattttgtctccaggacttttaggaccaggaatcattaaggacaacataagattatgatctttcatgcataaccacggaggtaggttatatactattaaaacttctggccaacaactatgagtacttctcaacatcccaaatggattaaacccatatgtagccaacccaaaacggatattatgagagtctgatgcaaaaattgggaacttttcatgatcttggtcaatacgggtgcatctgctggatgacgtaatgcaccatcctttatgcgctcttcatcatgccaccttatgaaaggtgttatatccttgcacataaacaatctttttagcctatctttaataggaaagtatcgcaaaacttcgcaaggactagctttccttctttgtttctttattaaaaccgagttaggttgcatacccttccaccatgaggccttacaggtagagcagaaatcatcatctttt

SEQ ID NO: 7221 - DNA, 515 bp, Zea Mays
cgggggtgttctggtcatttctctggttattgtttttctggggtgtctgatggttgcgccttgggcagttgttggcatagtggcctagctcaccgcacttgaagcagccattgggttggacaggtgcgttgtttctagcctgcgtgttactggcgccaccttgacggttctgcgaatttccaccagacctttggttggtttgggagttgctcctttgttggttctgactctgattatttctctggctttgctgcccagagcgttgcacttgataattatttccgccttgatttccagagcggaactgcgaaccttgagcgttgtttggccgggtgttcctgctggactgaccttggaacttccttttatggtcagataattccttccttttgctctcaaggccaattgccttgttcaacagtgtctggaagttgggaaatgtatgactctgaagttgatagttcagaggtccaatcagtcgttccaagaaacgctcttggcgcttctcatctgtg

SEQ ID NO: 7222 - DNA, 384 bp, Zea Mays
tatcttcagcatggggaatttatcattaaaacagatcagcaaagccttattcaccttgatgatcagaggttgtctacgagctggcagcagaaagctttgacaaagcttcttggtttgcaatacaagattatctaccatcaagggaccaacaaccgagtagccgatgctttgtcacgccgaccggggctggaacgggatgcaccacatcttcaactgaatctagtggcaacttcaatggtggttcccagttggttacaacaagtagttcaggggtatgagcaagaccccagtgctcaaaaactgttgcaggtattagccactgggacggaccagggtcggtatactctgacaaatggagtgatcagataaaagggtcgtatttgg

SEQ ID NO: 7223 - DNA, 535 bp, Zea Mays
gatggacgtgtttctgttggactgcatgtttctcggggcgtcgcgtcgtgcctataaaaagcgtgtttccggcttgcgtttgcgcagtagaaaccctagcttttgtaaacttctcgcgtgccctccttgctctcctgcttcggaaatctggcccgcatcaagcagaccacgcgccgccgccgacagtacgttgcaatgtcttcttcttcgtctgctgcgagtgcgtcgccgaccgtgccgtcgtccgaggagacattgagtgatttggcagtgatggagttgcagcctggccataccgtggagtttggtaattcaaggatttcctcggtccgcgtgctggagatgcagcgacttggttactttggtggcagtgtcgggcgggcaccaggtgcagaggaggtcctcgagcctgaaggcgagttagtggtttttgaggccttttttgtcgccggtcttcacctcccgacacatcgattcatggcggaggtgttgcaaaggttcgaagtgcaggtccaccagttgacgcctaacgccg

SEQ ID NO: 7224 - DNA, 377 bp, Zea Mays
gaccgaggggccttcaccggcatcgaagggcagcaccggattgacctccgcagcctcgggcggcgcgtcgaccagacctccaaggtcctcgacgtcctcggcatgctccatctgcagcaacaacacattcactcagcaaaaactacacatacccacacgcaaccaaccacacaaaaataataaccttcacctgctctctcgcccggtcggattgctccttgacaacctcccgaccatgcgccccccacatcctatcaaaaagtgcccccgctgactgcttcacaacagggtcttcggtcttgaagatctcgcgttcaaagctctcgtctgattggtcgaagacctcgtagtgtctgcagccctcgcgggacaacgca

SEQ ID NO: 7225 - DNA, 568 bp, Zea Mays
atggcagaccacgagttcctcgcctctaatgccatagagcgcgtcggagccagagctgatgtctcaaggacgtaaggattgcaagctcctcgcctccggtgccatagagcatgtcgaagccgaagatgatgtcgcagggctgtagggaccgctcctcttacgcgtgcaggtgtcgtacatgatgcttgtggtggccgtcgaagaaggatatgatgtcgcagagccaccgaagagggacgattctccccccgttgctgcttgtggtggcgcgccgatggaggaagggggaggggaagttgtggacggcgaggtccttaggctcctgctcgctccgctcggctactgcccgctcaactgctccttctcggttgatgcttgaccgagatagtccatatgcaaagttgtcaacgccgtgccgatggaggaagggtggaggggaggttgtggactacgaggtcttttgtctctcgatgaaggaaggaggaaggggaggggagtttgtggacaactctggcgtcggcaaagtgcgggagaggaaccgagacacacatcaatttatcttcatcga

SEQ ID NO: 7226 - DNA, 511 bp, Zea Mays
taggggcctaggcattaggttttcgcttgatcccttgcccaagcatgatggtgcagatcattgagcaccgcgccgagacttcggttaactttgcggtggaaggagaagctgcttcctccacactgtaggttcccagtcacccggcaccagtcactcctgctgtgcacgctgcgcggcagcacacggtagcgcaaacgtcccggactccatcaagggcgtctccggggacgttatcagcagccagggagttgttgtgacaccctccaagctccatggcttcaccaggagccatgaagcaatgacgggacgacgtcgaccgactgctcagtatggcgcattctacctcgaccaggtcgaagacgcggtcatcccggcgccaacacgaggcatcagcatcggtacgctcaccctcagtaaggggcacaaagaccaacgacctccgggcagagctcaaccgcaggcgtgcgggagaggacgcccgggtatccttggaaagggcgcgcgagcgccg

SEQ ID NO: 7227 - DNA, 526 bp, Zea Mays
tccaaacttgttgtaggacgtgctgcatgcactgggaacctactttcgacctctctatgacacaaggcgagtgtctaagcctccatgggcttgttactatatcacttgcatgcatatgagagtgttggatgcaggagatacaagttttaggactctatcatcacctgagtctctgacgccgctatccacctacgctattttggttagcaatgatactcggagagctctatggtccctcagccatacctatcagtggtagctacacgacacgacgtacagacaccttcccctacgtcctcgtggtgaaagccagacaagtgttgttctaggtcaagctggagaagatcgcctcaacacccttgtaggtgtggtggcaggtcttaacaccgatctggacagtgttaccctagatctttcaagggtacatgaagaacttgaatacgcacatgcaaggattgcagccctccaagctcaattcgaaggaaggaatccatctgaagcccaagtccctaccatagctgtgtcc

SEQ ID NO: 7228 - DNA, 591 bp, Zea Mays
cttgatgtaaaaaatgcgttccttcatggcaccttgaatgagatcgtctactgtgcacagccgactggttttgctgacacctccagactcgacttggtttgccgcttgcacaagtctctgtatggattgaagcaagctccccacgcctggcaccatcggtttgcctctcacctcaccactcttggttttattgaggcaaagtcagatacttcagtcttcatctatcgtcacggctcagacatgtctattttgctcctttatgttgatggcattgttttgacaacctcttccctgagtcttcttcagcggattattgcagctctctgccgggaattctctatgacagacatgggacctctccatcattttcttggagtcagcgttcagcactgccatgacagtttgttcctctcacagcgtcagtatacgctggatattctagaccgtgctggtatgcttaattgtaagccttgcagtacccctgtggacactcacgccaagctatctgccagtggtgttgccatagccgaccccacctcataccgcagcatcgctggagccctacagtacctcactttcacacgcccagat

SEQ ID NO: 7229 - DNA, 319 bp, Zea Mays
accagatatacaccaggatttcgtcatcttctgtgatgcttcaaggcaaggcttagggtgtgtcttaatgcaaaatgagaaagttattgcttatgcatcccgcttactcaagctgcatgagcagaattaccccacccacgacttggacttggcagccatagtgcatgccctaaaaatatggaggcactatctgattgggaacaaatgccacatcttcactgatcacaagagtctgaagtatatcttcactccgccagacctcaacctccgtcaaagaagatggcttgaactgatcaaagattatgacctcaagatccat

SEQ ID NO: 7230 - DNA, 865 bp, Zea Mays
cggtatcatcagcagagggcaaaactctgtcatcaggagcgctggcctctaaggcgacttcctgacccgaagcttgagctgctgccatgcaaccagaatgcggaggagaagaccctacgtgaacgtccatggaagtgtgagagggagaaccgactcggacaccctcgggggctgggtcatagctcgcgctacccatccgagccgggtcatccccggcaacaccctcgggggctgggcaaacgctagtgccatccttgagggccgagctctctgtaacagtcacctctaaggctgaaggaccttcacccacttccatgggagcagaacaatccagaccagcctcctgacccttaagacggcgctctaaggtcgatgaggcacgggacgccgctcgagataactctagcccagcatcaggcacatcaacacaaatatccatcattccaccatctgccggctccgacaacagatcttctgggaccatgtcttcaagagtctgattaaagtttgctagagacaattcttgcagaccaatgagagcagacaaggctagagaaggaacaccactactttccccgctgactatgtagcgtcggctgttcttccgaactagagggatttcatcctcctcttcttcatcttcatcaacaatgcggacgacacacccattggggtcagcttcagcttggtcacacccattgggttcagcgtcatctaggtcacacccattgggttcagcatcagtcgggtcacacccattggggtcagcttcaacaaaaactggcacgggcactccctcagcagcaggagcagaaggaccagcatcctgatccaagcttgacattcagcgaagatgtctcttttt

SEQ ID NO: 7231 - DNA, 498 bp, Zea Mays
gcatagagaagcttgtgcgtctcaaggtacctggtctttgcctcatggaggaccttgctgacgtagtagaccggcctctggatggtccggaccccgacagtcggtcccgagtccttaggttcctggccttcttgtgccgtccttttgactaccagcaccatgctcaccgcttcagcatctgccgcgatgtttaggtacaacggttccctaggctctgggctaccagtattggtagggacatcaggtgctgcttcaactcttggaaggcttgttccgcctcttcggtccaagagaatggaccggacttccgcaacagcttgaagaagggtagcgccctctcagccagccttgaaatgaagcggctaagggcggctaatgatcctataagcttctggatgtctttgatccgggccggaggcctcattgcctcaatcgccttgattttctctgggtttgcttcaatgccccagtacgaaaccaggaaccccagcaacttcc

SEQ ID NO: 7232 - DNA, 751 bp, Zea Mays
catcatgtggaaagagatcgcaacgcggcagcagacgcgttgtcgaaactaggatccagttgaactcaggtcccactcaaagttttcatccaggaggtgccacgcccgagcatttccccagatcaagcattaagagtgcaatgttttgagccagccagagtcagactctaatgacttgagggagcccatcatcagatatataaagaatgaagaggaaccggatgataaagccgcagcagaacgcatcacaaggcagtcagcccactacaccctcattggggatgcactgtacagaagggcgcaacaggagtcctcataaagtgcattccttcggttactgggaagcaactgctagatgagatccacgtcggacagtgtgggatacacgcagcatccaggactctagttgggaaggtcttaaggtctggtttctactggccgacagcaaagagtgatgcagccgagttagtccagaggtgtgaagcttgccaattcttatcaaagcaacagcatttaccaacacagcaactgtagaccatacccgtaacatggccatttgcgtgctggggactggacatgattggacccttcaagaaagctcagggaggatgcactcacgtgttggtcgccattgagaaattcaccaaatggatagaatacaaacccattgcttctctaacttcagccaaggcagtggaattcatacgagatataatattcaggtttgggataccgaataacatcataaccg

SEQ ID NO: 7233 - DNA, 705 bp, Zea Mays
agtcatcattaaacaaatgtaccttgtctccttttgccatgaggcaagttggagtgtaggagttgtcgtgaaggttggtgaagagttgtgagcttgaagtagattggatggtgatgtttgccacctcttcctcttcttcggagctagaactttcttcatcggagttccattcttcaccaatgtgggcttggccatatttcttcttcttgaagtatcctttgttcttgccccccttttgaacttatcctttttgtactccttcttggcttcttgttcctttttgtttggacaatccgctatgaaatgaccggtttggccacattcataacatgctctcttctttccttttctttgatacttatcatttttcctcacaaacttattgaaggttttgatgaacatagttgtgtcttcatcacttgaactatcttcatcacttgatgtttcgaccactttctttgtcttatgatctttgttcttcttagaggaatcttgttcatttgagatcaaggcatgggtgtctcttgtattgattggggcttcttcggactcatgttattgaatctttgcaaatagttggtgaggtgtcatttcctcatagtcatcacggtcccttatcattcttgctagacttttatccttttctttgtatgctctcataaatagtctagtgaccttggaatcactccaatcttcacttccaag

SEQ ID NO: 7234 - DNA, 331 bp, Zea Mays
gccggcccaacatttgatcagctattatctaaatatgtacaaaaggccggccccaaggaccggccagcaaagcgaccacgctcacctgcccaagatggacaagcaagatcaattaggttttctcatcaagcagggccgaataaatcggcccaagacattgcccagctaacaccaccaccaccaacatcatggacacctccaccaccatatccatatatgtcgtatcattatgcatacccgccaccaccgtatgtccaaaatcaaatgtggggcatgccaccatatccatatgggatgccgcagtaccccgcttggggggcaccccaaactt

SEQ ID NO: 7235 - DNA, 775 bp, Zea Mays
taagaaccctctctaacttctttacctcactgttgagccctttggccattcagattcatcccagcgcataattctcagttcaggcgctcaggtcccttatgcttagttgctctattttttttggcattatccatcagctgccgacctgctgtaattatgcgtacatattcccccttaactctatggaccagttgcaccagaaatgacattatatgtcttgggactaatgaccatcccatggtatcaattgttgagttattactattatgaacctgccattcataattggaagctgtttacactttcatctgcctctggaactgtgtcattgttaatcaacttttagttttaaacaataagcttcatggtaaccaaaagaatttccccctatcactctgttcttttgttggctacaggaaattacatgtcttcttatgtttgattctgatgtgatacttagctgatctgctgatagtctagggcagtaagctattaagttcctccctaataggctttaatcgtgaactctgttggaactatggaatttttatcatgactccaaacaccatcctgtttctatattttagagttttgctttgtaaacattctttgaactctcagcatcattgtcgtcgaaaactggccattttaaaaagttttaggaaaaatatattgtagttgcaacacatgtgtgcacaaagcttcacctcaagttaataatctaaatttaagactcctttatctgtcaacaaccaaagtcaaaaatcattttttt

SEQ ID NO: 7236 - DNA, 670 bp, Zea Mays
ggaagacttcgtgtgaagttgtggaaatcgttgtcgtgtgccaagaacaagtgggggaattggtaggatttttggttttatgtggcgatgaaggatgacgagggggttccaaggctgcctctaatgatcttgtgctagcactgctacgtcaccttcccccagtttaaagtaaagaagggggatgcgaacaaaggtgcccttcgttgtgtgtagaaaacaatcagtggtcgtgatctggtggtagaggtcattgattgtggagtgtggtcgtttgtgcacagttgggaataagggtgaaaatggccagtaacggtcagaaaaacctctcaccgttttcacccacataaatttttgttcagtccgaatcggtaaacgggaaagtcagaaatggataacggccgataaattccagtatatcgaaaacggataaatccgagcaaaatagctcgaaattgatcggtaaacggtaactataatcggaaaagctcacaataaacaaatcctaaccacacagatgttcattcacatccacatacaagtctcattcacaaaagtacacaaaacacaatcttgtccacatataattagtcatacactcatacatgtccactcttaaattttaacacacaacacataagtcttaaaacacgattattcattcacattcaca

SEQ ID NO: 7237 - DNA, 469 bp, Zea Mays
ccaagctttctgcagtaaccacctctaaggttgacaggctttcagccacttccatgggaccaggacaatccaagtcagcattctgaccctcgagatcgcgctctaaggtcgacgaggcacgggatgacctcaacccagcatcaggcacggcagcacaagcccctgtcgcatcatcatccataggctctgacaacaagtcctctgggatgatatcttctagagtttgatcaaagttggccaaggacagttcttgcagaccaataagggcagacaatgcaggagaaggaactccactactctcaccgccggcgatgagctgctgactatttttccgagtcaaaggaacttcatcctcttcctcctcatcctccacagtgacaacgcaagcagcacccccattgggatcagtagcagtttgggcacacccattgggttcagtgtcagtaaggccagttgcagtcacttcttc

SEQ ID NO: 7238 - DNA, 322 bp, Zea Mays
cgtcgcagtaagccgctttagatagctggttcgtcgccggtaagcctgccacggtgaaagccacacatctcttgcgccagtgctctcccctctctccggccgccagcgcgccattccaaattcaagagccaccgccctcaggccctataaattaagcgtgacatcagctccgctaagtaattacacacccaacgcaccagcccgtgcctcagattgtccaccagagcgctccaattttgaaatccccccaaatcagtcaaaactctgtcgtgtgtgagctcgccgtggccagctctccacaggtctcttatgtgctcttgat

SEQ ID NO: 7239 - DNA, 603 bp, Zea Mays
ggggctatggtgcaagactcaacagactcagtgaatagcgcccccaggactgcgggttggtttcctgaaaactgaggggcctaaatgcaaaacgcgcgcagcgaaggggtatcgggtgttatgagccgtccgatcgaaaatatatgtcctagattagatccatatcattataaaccggtattcgatctgagccgcagctatccggatcaacggtcacgattttaaataaccctgatctaatccgacgcacacgatacgggatcgacagcacagatcaacgcggcgaaggaggtaagtcacgttctaatcttagccgctgaaatcgggatccacggccacggtaccaccaccatccatcctcaacgcgcaggcacagccgcgacccgcacagacggcggcgccatggccggagttgccgtccacggtataagcaccctaaactccaatgctaatcggttcgacgcgttacgggaaggaaagtaaacataaaggcgcggttcataccggaattcgccgggcagagatatccccacacgacgaagcgcggatcctcgctggaacacgccccggcgagcaattcacgccaagctggagcacttcttt

SEQ ID NO: 7240 - DNA, 726 bp, Zea Mays
ttttctaggtggcatcaaactcctgctgctgtgtagtacaaaggtggcaaggagggcactagaatcgaaggtagaggccttgtcaaccatggtgagctcctcaagtagaagctcattacgaatggtctaaaacagtgggaacgatgtggtgcacttgatgaaggtcttcatgtgctcgaaccacttattgagactatgaaagaggttgaggacaagcgtatgatcgggcatgacttcgacaaggttctctagggcattatccatgcccttcatcttgtggaagtagtcactgatggagatatcaccttggatacaggcgcaaaaagtgtgttgagatggagggcatgagtctcctggttgcctaggaagtggtgctcggtggcgaactaggcatcctaggccatgccatcatcaaggagaaccatatcttgtatctcaaaggtgattgtgccaaagagtaaagatagtacaatgttctccatgcaccataatacaggagtggaggccttagcagtgtcaaagtggatgtggttgtcaagggcataacgttttagggtgaggaggacgaggtcgcgccattgagggtagttggtggagaggggttcaggacgacaacgacctcaaactttaggacaatagtggtagattgttccttctctagggctttggctatggcgaggatatagccatgggcgtcagcagaagatttggcaaccaagttgacgc

SEQ ID NO: 7241 - DNA, 492 bp, Zea Mays
cagggtcagaccttctatgccacctcaaatgctcccaagtcaggattcttttaagtggggtagtgttcgtggcagacttggccgtcttgccatcccacggaattgatgtgatcttagggatggattggttaaccaagcataatggcatcataagttgcacagataagaccattcttctcactgaccaccaaggaaagtcagtttcatgtaaggctcagccacccgcccaagatccaatggtgtttaatctagcagcagaaagcatatctgtagtagaataattcatggatgtattcctagaagaattgccaggaatgctgctagaaagagaagtggagttctatattgatctaattcccggcaccgcaccaatcacgaaaagaccataccgcatggctcccactgaattggcagagctaaaactccagatcgcagaacttcaacagaaagggtacattcgtcccagttcatctccttggggagcaccagtcc

SEQ ID NO: 7242 - DNA, 2382 bp, Zea Mays
cgaagatagagccaccacacgttgtttctgtgaactccaggtagttgggcatttgccgatgaagaaaatgacacccgacgtgcttcttccatcgtctggatcacctcccatgtcactgtcactatagcctgtgagcctcatttcttccccagttcctttagaatacagcaacccgtggtcagttgtgccagcgatataccgaagcaaacgcttgactgcagccaaatgatcctccctaggtgactccataaaccgactcaaataactgacactgaaggttagctcaggtctagtatgtagcagatacctcaaacttccaattagactccggtattcagttgaatccacttaggatgaatcaccggtcttcgacagcttgagtttcgcttccatcggagtcttgcttgggttgcactggctcagtccaaccttctcaagcagctgctttgcatatttagtttgacacaaactgatccctttgtcatcttggtgcacttcaattcctagatagtatgatagagcccctaaatcagtcatcttgaacaccttcttcatttcagccttgaaagcactaagctcaattctggactcccccatgataataaggtcatccacatacactcctaccaccaatctgcaggaatttctgacccttgtgtacagaccatgttcaaccttgcacttgatgaaacctagatcattcaacacagtgtacaattttgagttccatgctctaggagcctgccttaaaccatacaaagccttgtgcagtctcaacaccttctgctcctcacccttcttgacaaagccaggtggctgacacacatagacctcttctgccagatcaccattcaggaaggcagacttcacatccatatggtgaacactccagttcagatgtgctgcaagaataagtatgactctgacagactccattctggcaactggagcaaagacttcatcaaaatctactccatgcctttgaacatacccttttgccaccaatctggccttatacttcacaatgtcacccctttcatcatgcttcagcttgtaaacccattttaaacctattggtcgatgtccctttggcaaagtcacaagtgaccaggtcttgttctccttgatggactgcagttcctccagcatagctgcacgccaaagtgggttctggacagcttcttcacttgtagcaggctcattccccatgacagccaagagctcctcaacaagtcccatgtcattttgcacttgtacattgcctgaattcataatgctttcaagagttctgtaacgacatggtgcatcaccatgatctgcatcaaggtcgggggtcactgttggtggtgttgcaaactccacagttctggtactgctggggtctgcattgactgtgtaccacctggagtatctgctgaagattgcactggcatgtgctgtgctgtgggtggcgacctggatggcccagccaagtctgtctccatgaatggagtattgtccagctgaaaatcaccatcactctgtataaaatcaacacagaagggattctcaccatctatcttctcggcatcactccagtcacatgcccggctttcttcaaacacagcatcacgagacaccactacccgctttgtagcagggttgtaaaacctccaagccttgctcccatgctcatagccgatgaacaccatcggcgtgcttctgtcctccagcttcggcaagtgtttggccccctgtttgacatgtgccacgcatccaaacgtacgaaagtcttcaacagagggcttaaatccataccatacttcatgaggcgtgcgaccttcaacactctgagttagagatcgattcaatatgtagaccgctgttgatactgcttacccccagagccattctggcaacctcatagccttgagcatacttcttaccattcccatgacagtttggttccggcgttcaaccacgccgttctgttccggagtgtgtggcgcagtcaggtgtcgctgtataccctccctggtacagtgctcgatgaacgaacgcgtcgtgaactcgccaccacgatcggtgcgaagagttcccagcttcgttcctgcctcagattgcgccagtgcctgaaaggctatgaaggccctcatggcttggtccttcgtcgacatcagagtcacccacataaaccggcttagatcatccacaaggagaaagaaatactggctaccactcggcgtcgctggcgtcatcggaccacagagatccccgtgaacaagctcgatcttgcgcgccgctctgtacttcgcttcagtcgggaacggacgtcgacgttgcttcccgacgaggcagctgtcacagacctgatcaatgtgatcaatctgtggcagccctttc

SEQ ID NO: 7243 - DNA, 287 bp, Zea Mays
gtgtttttgggagaaaggagttgacatatctaggacatataatatcagcaacaggggtatatacagacccaacgaaaacagcaaccatgaaggaatggcaacaacctacaaatgtgactgagcttcgtggtttcttggggttaacaggttactacaggagatttgtcaaaaattatggaatcattgtgagacttttgacgaatttgctttaaaagggagagtttcattggaccaaagaagctactacaacttttaatgcactgaagacagccatgagcactactctg

SEQ ID NO: 7244 - DNA, 531 bp, Zea Mays
ggaatatcactgctctctccactgactatataacgccgactgtttttccgaattaaggggatttcctcctcttcttcctcatcctcatcaataatacgaacaacacacccattgggatcagctctggccggattgcacccattgggtttagcatcatcaaggtcacacccattggggtcagcatcagccgggtcacacccattgggatcagctccagtaaaaatctccactggcacttcctcggcagcaggagcagaagggtcggcatcctgattcaagcatgacactcgccgaagccgtctctttttctttttcttcccctcagcaggagaaattggatgactggcctggcgaggatgcttcgggcgagtgctatcagatctttgagtgtccaaggtttttccaggctctgggatagttgctacagctagtgtttcagtagggaccgaatcagaggaatcctcagccaacatgtccagcatagcacttatttctgcatcgctcgggtttataggcatctcaaaatgaacc

SEQ ID NO: 7245 - DNA, 978 bp, Zea Mays
ggagccggctacaggagtatgcatggcaggccctaagcacgtacatgggcctggcccaaaactatcacaatctaacacgcccccgtagtctgagcgtcgatcatcagccacttggaagaacattcagactggaacaaaactcggtaaagattgtagacgtcagaccctttgtgaagatgtctgcatactgagaggtagtcggcgcatgaagaacacgaacagcccctgtggcgaccttgtcacgaacaaagtgcaaatcgatctcgatgtgcttagtgcgttgatgttgcactgggtccgtcgagagataaatagcactaatgttgtcacaatagaccagagtagcacgacgtattgggtggcgtagttcatccaacagctggcgtaaccaagtccgtaacaggagagcggtacaactgaaggccatgatccaaggtgccacgaatataccgaagaatgcgtttgaccaaggcgagatgaggctcacgagggtcatgcatgaagagacacacctgctgcacagcatatgcaatatctggacgagtgaaagtcaagtactacagcgcaccggccaggccacgataatgagtagcatcaacaacaggagcaccatcagaagagagcttagcgcatgtatcaaccggagtactgcatgacttgcagtcagacatccctgcgcgctcaagaatgtcctgcatatattgtctctgtgacaaaaataaacctccgttgtgctgggtgacagatacacctagaaaatgatggagattgcccagatccttcatagagaactccgttgtgagagcatcaataatacgacgaagtagcagtgtagaagaagcagtcaacacaatgtcatccacatagagcagaaggtatgttgtgtccgtgccgtgtctgtatataaacaaagatgtatctgaacgagcaccaacaaaaccaagagtccaaatgtgagaggcaaaccgactgtaccag

SEQ ID NO: 7246 - DNA, 617 bp, Zea Mays
ccgttagtagggcatagtggtcaccccgagttaagtatgcgtgagcatgtcgcaccgccttaagtcattgccgacttacgccgattgctccgttagtagggcatagtggtcacctcgagttaagtatgcgtgagcatgtcgcaccgccttaagtcattgccgacttaagccgattgctccgttagtagggcatagtggtcaccccaagttaagtatgtgtgagcatgtcgcaccgccttaagtatttgccgacttaagccgattgctccgttagtagggcatagtggtcaccccgagttaagtatgcgtgccaattggcagtgaacaatccgagtgcctttgaaacctttttattgatgatattttctcaatttacagaatacatcgtcgttccgagagcctccgtgatgtagctacgggtagaacttcctgagatgttctatgttccatgagttcccaatttctgttccgtccatctgagtgaggcgatatgatcccggtcgagtgacttctgttactatgaatggtccttcccatagaggtgacaatttatgccgtccctcccccgttagaattcggcagaggacgagatctcccactgcgaaggatcgatgccg

SEQ ID NO: 7247 - DNA, 307 bp, Zea Mays
tatgatcgaccatggaaaaatcttcatcttggatgagctcagaaccctatagctgctctatcacctatccactcgcgctggcgacgtggccgagcggccgctgtcgtgatgtacgttgttcgccatgataatgccacaccgtgaccatttcaccacctcactgctagccgtaacaactcactagtgattgccatggtagatcgccgcggtgactcctcccctctctccagccgccagcgcacctttgtgaaattggacaccaccgctcaaaaactctataaattgagcatggcgtgagctccgctag

SEQ ID NO: 7248 - DNA, 423 bp, Zea Mays
ttgatcaggctctcgaggatatggttcctgaagatctgctgtccgagccaacagatggtggtatgatggacgtttgtactgacattctggatgtggggttagagttatcccgagcagcgtctcgtgcctcgtcgaccttggagtgcggtcttcagagtcaagaagctggtctaggttgctccattcccatggaggtgactgagaatccttcagccttagaggtggctgctggagagaacctggtccccaaggatggcgccagcgcttacccagcccccgaggtgttgccggtaatgatccggctcgagtgggcagcgcgagctacaacccaacccccgagggtgctaccgatggtgatccggctccgatgggcaatgcgggctgcgacccagcccccgagggtgttcgagcgggctccccttt

SEQ ID NO: 7249 - DNA, 576 bp, Zea Mays
aaattatcatatcacacgaaggcgattgggaaagaacaataccacaacaactttggctgctacagcttcgtgccccgctcagaggccagttatttggtgccgacatttcggaaaaaatagccaggctcttggatgcaggaatggttttatgtgaagattgacctgagtcaaagggaggatataaaagggattattcagcgccctatatggtcttgcttcggcattaggaggccactcattgcacttgggaatgacgtgcaagcgtgccagaaagctttcaacatagtgtgcacttatatcggcacagaagacttggtccaagagcatattgcttatagagtgtggccacttgccaacggatgggaaatgctgaaggaggctgccgctagctccagccaaaatggcttagtctatctgaagtatacctttcgatacaaaagccagtttgatgaacctaatgatgactgtctagatgctatagaggcaactagcgatgaactgcttggagcgtactcgaaggctgaagacgaagctatgacaactgccttcggtgctcggggcaagaagagattgaac

SEQ ID NO: 7250 - DNA, 446 bp, Zea Mays
cttttcttgatcctcccatatcaatcgatgtacttgcatttgagcatgatgctttgttcttcgaattgtggattgttattgatctcaattggctagaaaatgttgaatacctatagttgtgatgtgttttgtgatgatggtactgtaggtgcatctacattgccgcccctgccaaatagacagtgaacaatgacaattattgttatatcatatgaggtactatacttctctgaaaaagaggttgataacacactataatttgctgatgtagattaatggtgaatcactatatcctaaatggctagataaagataggtagcacaatagagaaaagagcaacctaattaatttaggggtcctactaacaacccctctcaaccttacctgaaaacaagtagagatccttcgcaactaaaccataccttgcatactcaagttactccttc

SEQ ID NO: 7251 - DNA, 379 bp, Zea Mays
cttctccctctttttctcattcgctttcatgtaaaaccattcattagtccatctagtcagccacttggtacgatagccaataaccggggccttcgtatccttccgatacgcaaaattgtagcagccaaaattcctgtgaaggccatctgctctagccttcgtctggtagtgaagttcgtgcacccgacagaaagcttcggcattcgcatccattccctggctttggagagcccatatgtagacactaagtctaacaatagcattgggggttagctgatgaaggtatatttcaaagttcttttgaacctcccctatcatgtcatttagcgggaaccgaagccctgctctgaagaagctcttaaagacgataacttcgtca

SEQ ID NO: 7252 - DNA, 619 bp, Zea Mays
agcatatggattttgttaagtatttcaatgtaccaagcaggaaagatggttcaattcaatggcagagctacgtgtgggccatgcccccccatcccctgcttttgtagttctcctgaactcgataggctattcagaccaactccgcctatgttgtctcaacatagcaggtcccaagctctggtaaagtagggctgtcatagccttgacgagacaacgttaaacctagccattctaagggagacaaaaccgaacaaaatatgttgggtgtgactcgcttagcgatgcgccatattggaacctgggtatggtgttaaacagacaagggtcgggtcaaccccccttggtgacacaccatgtcgtgatctgggcattatgtcaagtgagcaaggatcaggtcgcttcttccggcacgctacataggcgatcacgtgtagtgaaaaatatgtgagggtcttcacatcattgacgggtgtgaagggtaaataagctagttgaaccaactagaatatgtttaggtagttgaattgtagggtcacttataggtaagataagggagtcagttgagacaacaactaggagacatgtaagtatcttatgtgttcatcgcccccactgccgc

SEQ ID NO: 7253 - DNA, 557 bp, Zea Mays
ctaagttccataacatcatcgacctattccgttcaataagctcatcgaccaataacattgcaaacacttcctggaccatgaaagtgtagcagcagaggagctgaacttccgagaatggagggtcaacactgagggtgatggggttcagagaatctatggctccaccagccctcacttcagtcttgtcgctgagactgtacacgcacacgtcgaaccaaggttcctccacgacgtagtatacgcagttggcttccaccgacgcgaacttgtcagcatccacggacaggcacctgcagtccccgacgaagagggctcggctgcctaagttctttaccagttcgagctgaccggtcccggtgtcgatcttgaagacaacgacgccatgaatcagcttgacaacgatcagaatctcccctccagattccacgagaaaaaaccgttggttcccgccggagaaatactcagcgagcagcttagctgctatatccaataccttgctggcatcaggaacgaagaacaacaccaacggtccaccctctcgtgcagcagcatagact

SEQ ID NO: 7254 - DNA, 712 bp, Zea Mays
actataccctgctaacaagaacaatcggcttaagtcggaaacgccttaagtcaacgcgacataggggtgattgccataccctactagcaaaataatcaactcaaatcaggagcacctcaaagcaaagcaacccgctcacataccgagggtggcttcagcgccctgctaacagaacaaacagttcaagtgtagcacaattacatgaacatgaaatccatgatacactgtcttgctaaaaaaatactaactcattgaaaaatgtttttcatccgaacaaatcactatgcaggagcatttttgtaggaagcctcaatagcaggagtagcagaagaagaaggtctgctcatgacagcaggtgcagcaagaacatcgataacaatgtcctcaggcaccacaacaccaggcctccttatcaggattcacccggcacgaacagccttgtccatggttttgtcgcacatcgctttcataacaacacggtcatcctctaaggccttgatgttgaggcgagcggcctctagctcttgcatgacaagtttctttgaggcgcgcagttccttgatgacaaaatccttcgaagacaacagcttaccaaatcatgacacttcagtctgagatgccctcaattcatcccgatggtggtccaagtctgacatagtgaatcgatgactcctctccacgatagtcaaggaattgttggcatcgcgatata

SEQ ID NO: 7255 - DNA, 526 bp, Zea Mays
cggatcaggtccccaaaggtcttactcatcacccaaacaaatgttggcagggcatttttcagaccataaggcatcacaacataacagtacaacccatctaccgttacgacaagtaacccgctgattcctgcgaccgcgacccttgtttctctttttcttcttgacaccgtcctgggtgacggcgccgaaactgccggtctgggtgacctcagcttgcggcattgagtgccaagcacggccctcggcggccctggcacatttatcagccagggcgaagagtgtggtgacgttgtccacatcacgtgtggccagcttttccagcatcttttcgtcacgcaccccctggcggaaggcagtgatgatggaagcatctgagatacgaggtattgtcccacgtaccttggtgaagcgggaaatgaatgcccggagggtttccctgggtccctgccttactgcatggaggtgtgcttctacaccatgctgctggtaggcgctggcgaagttcgccatgaaccgcacgtagagc

SEQ ID NO: 7256 - DNA, 324 bp, Zea Mays
actggaggttggcccgtgcgactagaggcagcaggagccagagtcggcagtggagcagttgcagcacctggcgatagaaccacgcctcctgggtcggctccgctggcaatatcccctgacggggggacagcagggctgggctgatgagccggtggcgctggtgaagagcggtgtagaggaggcccgtcagcaccgaccgcgagcggtgatgcagcaggagtagcggcgagtggcccgctggtacgagcctcggacgatggcccagcaggggcactagcgagcggtctgctggcaccagatgtagtcgatggcccagcaggggca

SEQ ID NO: 7257 - DNA, 476 bp, Zea Mays
cccatacatgacatctctccccgcttggagaaacaacttgtcctcaagctggaaggaaggataaagccaccagaattcctccaagtcttcccaagaggcagtatccgcagagaggcccttccactggatgagaacctgcagcttaccacacattgttctagccttcaatgctacaactggttccgcacaagcacgcccatgatgaaccaccgggatccatgaaatggcttcagcagcccaacatggaaaacatcatgaatcttggctcctagtgagttgtagtatgtaggacacctcaccaatgagctcaagcacttagaaagggccatagaacttaggcccaagcttaccccccgccatgggtagaaatggaagccactggccggtgaagtagacaaagccaaacccactgaccaactgaatacatgacctccttgtggcgcttattaaactggtgcttgtggtactgctgggcc

SEQ ID NO: 7258 - DNA, 451 bp, Zea Mays
cggtggatagcaggtctctagcgaggtcatccagtcagcgaccctaatgcttactggagcattgttggtgccctccaatacctcacctgacattgcctatgcagtctagcaggtatgcctcacatgcatgatccctgggaaccacacttgataactgtcaagcacatcctctggtaccttcatggtacactcagctacaggtttcttcggcgctcctccatccacgagcagatcgtctacacttatgctgacaggccaggttgcctgaacacatgtcgatccacctccaactatgttgtgttcctttgagataacctcatctcctagttctacaagcatcaacatgtggtctcccgctctagtaccaaggttgagtatctcattgtcgccaatggcgtagcgaggcgagatggctctgaaaactcctttaggagctccacatcccgctcac

SEQ ID NO: 7259 - DNA, 519 bp, Zea Mays
atcgaacagactgggaacaacgccatgcgcgcaaggagcaaactggaccgacacaggggtgcgaggaggtgcaaaggtcagaaagcttctagagggggggaaggagacgggggctcgaacgcaagaatacggtaagcataaccaacccctggcaccctccttctctatttatgcaaaggaacagggagacagaacggcgtctgaaaggtgggcccaccgcaaatggcaccgaaggatccgccatcttgatcgccaaccacctcgggcatcgagcagggaggactgtatgccttgcaggttttacaccacttgggatagagcaccagagggacgcaccacaggggatacgccagtaacaagcaaggcggttaaccacgccatcacgccacctgtgcacgatgcagtggtcgggctgtttcgtgtcccatcaagccgcccacgcctaggcgatgccatgatgacccctcttttaccacgccgccacagcaactacctcacgccggccaggtaaaaaccaac

SEQ ID NO: 7260 - DNA, 294 bp, Zea Mays
gccccgtcgtcccgacgagcagcaaggcagcaaggttgtgccaccttcacgttgaggatgtaaagccgatttggactcctgcgtaccttggcaagaaggcgacgagaggggtcccagttcctcatgactccttgctcgaccgccacgcgcgaaccgttctcatccaactgtcccaagctgatgatagagtttatcaacgcagggatgtagtagactccggtgagcagcccgtgctcaccagacgcgacggtgaatacgactgagccggcgcccttgatctctacgtcggaggcg

SEQ ID NO: 7261 - DNA, 894 bp, Zea Mays
ctttgctgtgataaatgctgttgaactctctttctatgggatcaatccctttgagccaaacgatggaatctgaaagaatccggagtccccaccggcaaaaccgcaaagaatagcatgaggtttagggccattatataccgggcagtccatcggcatgtgatcatccccgcagatctcacagcagagcttcccgacgtctcttgcctttgtcatcagccaagggaatgatggctgcgtcagccaatcgcttcttttcagcatcttcgaatgaacaatccttgcttgtttcaggcacctctcgaccagcagctctgtacgaatcctgtgatgagcgccaaccagaacggccaccgcggccacgccaaactccgcggccgcgattttgcctaggcccccgaccacgaaagaaagggcgttccccagcgtggacgcgattcggaccgcagtctggattaacttgactacgacggtccacctgcctccaaactggggaacgtgcgcctccatttcccccatcacttacaccggccataagcacctcagcgtatgagcgcctagggagctcggtggcttgcggaggcggcgtgtgcgggggcaatcttggtttgcgaataggtctgacgaagagacgttgagaaagaagtctgagacctacgttgcggcttctggatgattcggaagatcggcccttggagaaaaaaggcagcccgtcccgagaaaaagacatgggcctgcactgaaccggttccaatccagatgtatttgaattcatcactggcaacaaatctggcgaataaatcggatctgggggcggtggtcgctcattgcaatcatcaccagaagaccccaaaacaaaatcaaacacatccttgatcgtccaccgaggtggcggcc

SEQ ID NO: 7262 - DNA, 323 bp, Zea Mays
agtacaaacaggattgctaatttgtttacctggcatagatatgacctagatgagtagattatattttcatgtccagcagttatgtggtttgcttctatggctagtggctagctggtataaaaacagaattatcaaagcatctaaattgcagtgggaaccaaagctcctcaactgcagtgggaacctgtgagactgtccttggtgttccgtcactgtccctacaacacaacccatccaatgttgcaatcagagatcacgaaagcccgatgattcagacataaacaaaagcacacagtccgcaattcttgtaccggagtacacca

SEQ ID NO: 7263 - DNA, 572 bp, Zea Mays
acagggttggatggagcgggctcttggatccgcagggctctacgttggttatgggtgaccaagtaggcctccatcaacttatggacgtgctcatccttggcttgcttcagggcttccacagcaatgacttcacgactttccaaggcagctacacgggcttgagctgtggtgagatccacatggagttgacggttgcgcttctctgcatcttctgcttgggcaatcatctgacggtggtgccgagccaagaaatcatactgtgcatcaagggtgagcaggtatgcagtgaggtacacgactgtggggtcgtcctcaagcagctgctgctcttccaatgcacgcatcctggccatccaagcaggacggtctctctgaaagggcggaaagaatctgagcggggtgtcggccacttcttcttcatagatctgacacagggccctcaatgccttgcgagcgacaacttggcaggtgtctttgaatctgtgcccagcagcagtgacactccattccacatggtgtggactggatccaatgtatacaatcacgacacacttctctatgccatgctcgac

SEQ ID NO: 7264 - DNA, 304 bp, Zea Mays
caacaaatactggtaagtaacttggctgtgaaaagtgaaaaccaagaatggtgcacatgcttgcatacgcatagttagagctaacgggatagggtcatttgatttatgaaattcactatcgacttgctgtcttcatactgtattgttctttttgttgaattttgaatgttcctgtttcatgtagaatttatttgttctcttgtaactggaaagttctggttcttaagagttaagagtgactttaatcatatgatgcatggcctttttttcctgcaatggaatttgattttagtggaaactatct

SEQ ID NO: 7265 - DNA, 425 bp, Zea Mays
ctaaaaagtgtaacagaagacactgattaatatagttcttgtttggtatacagaaatacattataccagttgctaagcattcaatcttattttcgtgaccttgatatcacaggtactctatggataaattacataatcatggatgttgatggctcagtggttcactcagcgaaggcttggaatggaattcaacagtcaagtgctatacgtattctctggaatagctaactggtagcaacgaaataaaaaagacaaatcagaataaccaggtaaaggagaaactggtcccaaaggtcatacatgtgactggacttttgactctctttcagttctgtttttcttatatgtgtttgcttcttgtcccccaaccattcccggatcccctttctcacttgagctttgacgtgaaccacagaatacagagt

SEQ ID NO: 7266 - DNA, 406 bp, Zea Mays
atcttatgcgccattattgacacatctctggatcaggaatagttggtggtggcgatggcagcgttcgcgaccggccggacagcacacttgttgcttatttgcatggtcctcgatcgccttctgactgtgtctgtcccatgctcctgctcgatcggtccggcggcgccctcggacgtgcgacggagcagaagcttcacgacccacacgagaagcacggcggcatgcatgcagaagtggccggacgaggggccaggaagacaaataatatggagtgatatgactgaattctatattcagccgtgttccacgtacgacatatggtttttcagatgttcatacgtatgtactccgatccagttggttagccaagatcacactccggtgaccccggcccatgcatgttttg

SEQ ID NO: 7267 - DNA, 772 bp, Zea Mays
cattcgtcgcctcctccgccgccgacgacgaccgcggccaccgctgccttcatcgactcacgcggttgctcctcctaggctgcctcgctctcttctctctgcggtctgcgcgggtgggtgaggggacgggcgttagtgcgttaccagcgtcgctgttgaaaaagagcggggcaacggcacggagcgtcggagcctgtgataaggggctgaacggcgtgtagtttcggagcggggaaagcgggcgtcaacttacaagctatctacgggagtgccattggcaaaggtggccagcagttgcgcggggatcttctgtggttgaagagcaacaacataaaccgtcctactcctgcagtttaactttggttggttccttttcctccttccctttcgtcctagtagtagtagtacgtgtggcaagtgagaagccggcggagaacgaaccgaaacgcgcgagcgtggaaccagagatccacgcacagggcacgggagacagcagcagccgtgctcagtttgttcacagaaacacagtaggaacaggcacaacacgtcgttagggtcacagacgatcccgacttggggtctaccgataaggctgccgccgcacgtgcggggcgggaatgagccgtgtgggggacagcatcggggggtccgcatgtcggtcttgaagtcgtgaccgagacgcctggcccagtctccttttttttttctcccttgctgaccccttcggcccttcccttcttttatgctgagcccgtgtggcctgagtgcgagg

SEQ ID NO: 7268 - DNA, 376 bp, Zea Mays
atggcgtgcacacagatcaaccctggtgcaacccgtactggtcatggcgggtgttgaatactacggctagcgatcgggaaggcattagcgactaacagggacctcagaacacccaacaatttggcacgaacaccctgagaacggcttgtccatgtgcacggcggaaaccgtgatcatgggcaaacgttcccgctcatccggggccggattgagtagtcgggtgtcacggtgagcatcacaagcttatggagttgcagaaacaacactcaatttaagcagagccttaccagagcggttcggccacggtggggtgggtttcacggcggcggagaccggtttggggagaactccaaattcgcaaatctcagcgaatggt

SEQ ID NO: 7269 - DNA, 421 bp, Zea Mays
gagggggctccctgctgcggaccggcactgctgcgcggatcggtagacgccgcactgggaaggccgagcacacgggtggatggcggccagatggggagctcacggctatgggggaaatggagctgcgcagggagaaaacagggggcgtccattacagggggatccggccatggcgagagcagtttggggggagggagatgttgctgctgggcgccggcaagaggtagaagaaaggggcgctagtctgcaacagagaggcgatgagctagaggtagaaggcagaggtccggccatggtgaagaagctctctactggaaaaatctgggcgtcacggaggaaagcagaggcgctgcgccatggctgggaggtgcctgagcgccgagtttttgaggagggagagggatggcgtgggagagggaaa

SEQ ID NO: 7270 - DNA, 277 bp, Zea Mays
actgtgtgcacttacattggtaccagggatttggtacaggagcatatttcttacaaggtatggtcgctcgttaatgactgggaaatgccgaaggaggctgctatcggttctagcgaaggtggtttgatttacctgagatatacctatcgtttcagaaatcagtttgatcagccgaatgatgactggcttgaggctgtcgaagctactagtgatgagttgttgggggcttacacaaaggatgaggatgaagctatgaccactgccttcggcgctcgcg

SEQ ID NO: 7271 - DNA, 772 bp, Zea Mays
ccggatgtctgttgaaagtttgatttgttctgcttcgggtaggggcagtctttgataaaatgcccagacttgccacaattaaagcaaccacttgaggaactaggaagggcagggaaacgagcaccaggggcactcggctagttgttctgggcggggacaggagtgggacgaatgaacacgggttgtctaaatggatatgtgggtgggcgaggagaagaacagtttgggttgaaaggtcggattaccaaccttgtcttcttttcaggccccggagttgatcattcacccgcatatctttttgactttacttgtcccgcatttttggcttcaactgatagtgttgtgctgacagccctgatatatgtgagatccagacacgtagccattttgcgctagagtctgtcatttaatcccctcatgaagaaatttttctttttcaagtctgtgtccacttgatcgatggcgtactaagagaggtgattaaatttgttgggatactgcatcatagaatccccccttgcttcagacgtatgaactcttccaacttcatctgtagcactccttccggaacataatgttccctaaatgccagtttgaactcttcccacgtgacctgatgtcctacaggttgaatgacggaaaagtttcccaccaggtcctggcagggcctctcaactattgggcggaaataggggcttcagcgaatcagtgcatcggattagcccaaacttttgttccatcacccacacccattcatcagcttccaggggtt

SEQ ID NO: 7272 - DNA, 458 bp, Zea Mays
ctaacatagaaatattccctagactcagattactgtcgccgaggacggcgggttctattctctaaaataataaggtctcttttgtaaaacgtactcgcaaaggggtacgtggtgatcctagccgcacgattaaggttatgtggcccagattagatccgagcccggtaggtacacgagccacaggatctacgatctacggctcaaaatcgatcaccgaaccggtatgcagatccgaccacacgatctccatccaaccgcccaggttacatgtctgccgattagtacacacattcaatcctggcctctcgtttctaaatcgatggctcactagtcctcttccccagccgagacgcacacccggcggcaccacgatttctagcgggcggacctcgccggaggattccctttcgccacgctagtggataatccacgcccgcatctacgtaaaaccaaattca

SEQ ID NO: 7273 - DNA, 402 bp, Zea Mays
ctgtagcaagttcgatgttgacgtagtggcacttggcgggtcccatagggtagactttcggtatgctttggggtcgtgcgtggtgcagcttcatctcccgtcatgagccttgcgtcacctttatgtgtgcgtaggcataacccgatatggtgtatcgtcccgtcctttccggtacgtgagttactgtagagattccagtgctgaggtcctcctatgactgaggttgattgatcccacaaggcagtggggatacgcttgagaccgtacatggcggtgtacagtcatgttgattgtgacctattggcaccccttcggtagtcgcgcctgtggtccagacgtgatttggtggtgacacgtcttgtcgtgctgacgtgggtcagcagtactggatcagccctttcg

SEQ ID NO: 7274 - DNA, 543 bp, Zea Mays
gttgtggatggggccatcattctatatgttttcctaatcccaggttgtcctctgatacgccctgggtcgggctttgtggaatttgtaagctcatcttcttcctcttcgactttgatttcatgtcccccaatccctcctcttcttcctcttagccttcttcttcggtattgtgagacgaccctgttccttcaccgaaaagcgtggctgagaaggatgtggccacgcaagggcagagcaacagaggagggaaaagataaccagggtcgataagaggcattgcaaggtcgagccttagatgcgtagggaccatggagactgcctcaactaatgaggaggaagacgatgatgtcgtgagtgcaagctctaattttttagccatttctatgggcgatgcttctctcgatgcgtcgatggttgatttcgccttgtccatctctggcgggcagtaaacatcttctccgccatgggggaggtagatttcttggagctcctcgtcctctcccctggccgatggcgccaactgtgttaccgagcctgctcctt

SEQ ID NO: 7275 - DNA, 861 bp, Zea Mays
acccaagccctcggtccaaccctggtcgaccacataaagcacctcctcctacccgtccgtgcaactcgacgcgcatacagtgagccaccattaccgtgagcagagagaaaaggaagaagaggggcggccgcacgaccatctaggcgtctaggccgcgggtgagctatagattgggttggtgatcgtcgctggttcacggtggtgctgtccgcgggcgtgccagggagagacggacggagaagcggcccaaattgctcgctgaaatctcgacttcgccccaatccgcgattggcctccactgtcatccatctctggtaaggaaaccctgcattgtactcacccggatcttgcggtagtgtagaacctgacgaattagggttttgggcgttggtgccgtagattggcttcctccagcgacgtctccgctgtggctggcactcgcgccgccagacttggctgcctgggaggaagaagagacgaccgtcgtcgatctattgatggagggcggagattagatgatagcgtacctatttgcgcattcgcgcgattgaatcatgagcgtagatctgggatccctcagttcggattaggtttggtgtcattaaattgtgaccgtagatcgcggatccgagggccccgtttgcgtaccggttcgggatgaaaccaatctaatccacaccgtgcagatctaagccaacggtccaaaccccaccgtaccccttcgcgataacgttttgcataagagaccccacagaagttagattcaacccgcggtccactgctattggcgcctgtgtcttggttcacttttcactaggtcccctgacctttctggttattgaggtgcaatctagagaagag

SEQ ID NO: 7276 - DNA, 283 bp, Zea Mays
taagataattgtgtcagtttagacttcagctctacacatggtgacatactgtgctgcactatatcttgtttttatttgataaggtattacagtttgttgcttgttaaagtctgctgcttagcctggtttagtttcatgtgtcttatacaccgtgttctgaatgcaattcatgaaagagttcagagatgcgtgttagcacaaccagcacctcctccacacaacacattactcacacacactgtttttaatgaagtgtgcagttgtttgatgaagtataatattt

SEQ ID NO: 7277 - DNA, 509 bp, Zea Mays
cccgaatagaccgaaccgaattaccctaatagaccgaatgtccagtcctatatatagctcatattaacgtaacgatcgtggagagaagttgatagcggcgacgggaggcgagggatttcatggtgagtaagggagaggggacggcaaggacacgagggaggtgggagggatgatctaaacaacatttttcattagatttgagtgagtaatgaaaataggacgatgatccaaactgcttgatagtgtgttaagtatgaatgcaacttatttggtggatttagtggagattatgagtgtgggataatttagttgagtcgtttttgcaaagtttaaacaagtgaattatacagtggtatagagtatagataagcggcactcaaatgcaagcaggtccacctccaagcatacaaaatattacacacaaaattcgcaggcaaaacgtaccgcaaaatattccaacataaagggctagtttgggaaagattttcatttaaaaaaatcactttatt

SEQ ID NO: 7278 - DNA, 400 bp, Zea Mays
ccaccgtacagagctcgccgcggtggattctgataagcacgccggtgaccgccgcctctcggccttgtgccgcatgtctatacctttccaccgcaacgccgtgacctgctctcgctctccgttgatcaccggagtaactgccacggcgtgggacacgaattcgttgcgccagtactcttcctcccctccggccgccagcactgctcggccaaattgagcaccaccgcttaagccctctataaattgaaggccgggtcagctgcgctatgttatcgcgaagccgaagcacccgttctcaccctcaattaaccaccgtagccggagaattcccttcttcccccaattcggtcgactgcgccgccgtgaatcgcctactcgcggctagctgattccatgtccg

SEQ ID NO: 7279 - DNA, 1287 bp, Zea Mays
gatgacatctcaaagtaagtctgcttctcaacctcaggaagattttggaggggagcaatcaagacctcaatgtcctctgaagagggtcgtactctatggcccgggctatcgtctcgaaccggaggattggaaacaaaattggagaagggactctgtggaggcaggttccaggcagagtaagataagggggcgccaacattcgaaaccctgcccattagcatcagatcaagtcatcttagcaggtcctcattgggaatccgtctgtttgtaactcgagtagaattgttgaccccagtgtacaagtaagcaggatagactctatccttcaaaggttggatgttcttgaagacaaagtaagcgaccacggcttccgcagttaggcctctgtccttcagcgagcaaattttagcaagcaacaccttggcttcggctgcctctgaataagtgggggactctacccagctgggcatgcgaacgacgagttgcctctctgatcaaggggggacttgttgtgattctccatggtgaaccactcgaggcgccatcccttgatgctgtccttgagagggatatcaaggtattccactttcctcccctggcgaagctccaaactggcaccaccgacaagctgatgttgtcctccagccataccgggccgacagtggtaaagatacctccaaagcccaaagtggggaaggattccaagaaaggcctcgcacatgagcacgaaaatggcaacttgaagaatgaagttaggatttaaatgtgtaagatttaaatcgtagaaatcaaagagaccgcggaaaaatggagaaataggaagagcaagccctcggatgaggaacgacacaaaaacgacagcctcgtgggtgtcctctgtcggaacagtgaccccgcgccagatccgccaagaacacagttctttcggcggcaaaaccccagtctccacaatatgcaaaagatctgattcagaaattatggacatgtgattaccagcgaatggaagctggttgttgggatcaatgggcggaatgatcggaacagtggcgctctgtctcttccacttgggagccatcacaatctctcgggtggaacgagcgggctcgagaattcagaaaacagaaaagctgcagaggaaaaagtaagatttagggttcaaaactcaaaaaggcacgttggcacgagtataagttggctccttaagtcgggcattacctctaaagtgccagatcataactcggaaaaataaggatcgcaaccgtcaatcgggaattacctctaaaatgc

SEQ ID NO: 7280 - DNA, 408 bp, Zea Mays
ggccattctcctcctcttgggagttgcagcagaagccttttgcaccttcgacagttttgtctctgtcggagggctcagaatttttggcacttttattatatcttcaatctttgacccttcagccctatcaaccttagcctcgactggctcgggtatgggtaccttcggcattacggtcgcctcttcagtgctctttgcaatcggagcagtttctgttgcttcggctgctgaggaggaccctcgccgaattcaggtactacgaccggttcaatatagcgcggccggtgggtcagaaccttcacctttttgctcttcggcacaggctcaactggggtgaccgaagcagcaatcttcctatttttctcttgccctcacaacgggtagcggtaatcggggtatatgaagctg

SEQ ID NO: 7281 - DNA, 708 bp, Zea Mays
tgctcacctcttctgttatttcagtgatctcgccttcctgcgtgcccgtctcccgtcctgcttggattctctctctctcgtgagatttccaggtagctttcactcaatttgatatcctattagctgctctctactcttgcttagattttcactcactcgtgcagcactgaggtcaggatggtgcagacgaagaatgtctcagcgttagggggaggagacgacgaggaccctcctcgccccttcaggcaggtcaaggggaagactgtttaccttgagcaacatgagggcaggaagaagcgccgtatggacagagccgcttgtgcagcactttccgcggcaacagcagctgagcaggcagagcgaggaggacagttgcagatctcttctgatcagatagcctacaaagttcgttgcctcgcatctcgacctcgctccactgctccctccacaccttctgccatagtgtcttatccacctctcacttcaccagctcctatcgctccagagccatccaccacttccgctatacccaccacctccaccactccagcttccactgttccccctcccgctcccatttctgctccgcccattcctcaacctcgcttcagggagcgtgacgagactgaggtgcgacccctagctactgatccccgtttgctcgacattcagcgtgccactgcagcccgggtacgttggttcagacac

SEQ ID NO: 7282 - DNA, 547 bp, Zea Mays
gtcgtgtttggcgggcttcgcgccatccgttacgcgacgcgcgtcctccgtcggtccgacgcacgcggacgtgagacctcactttcgacggacgcgaaatttccagccacacaccttctctcgccacagtacaaacgtacagtgcaggcatggtcgcagttgttcttagctaatggcgatgcgggacctactggagatgtctctgctccatgcaggcatggtcgcagctattcttagctgatggcgatgcgggacctactggagatgtctctgctccatgcctccattacttcatgccgtcctccctccttccacgctccttcccgcaagaggagcttccctcctccctttcccccaaacgctcccctcctcttctctcgcgctgaactcgacctggcgtccgactccctcgcggccccgtcgcagggtgtcgtcatgggtgatggtgtcgtcgtccctgccacagtccgtcggggtcggcttgtcctcagatctcgcatgatttaggagcagcgacatcagatgttacggacgcgaggccatcaac

SEQ ID NO: 7283 - DNA, 401 bp, Zea Mays
gccggacttcggccgcccgcctgcgcgcgtagaccgagcaatccggtgagtcgttcttcaattcctcacacacacaccttccttgatccctggtgaagctctctgacccatttgattgatcaattgtgccctggttaggccggactcctcgccgccgacgagctcccccacctgcacacatggatcgaccgactccgaccattcccgacggcgacccgcacatcgtcgtgaccctcaggacctcccctacaccctcgaacacctcaccggagcagtgtccccgccagtaaggccctccaccgcgggaactatttaattgggggaaggacctcgggttaggtttagtggaaccccagggggttttctgaactgtcagtggcacatttgaatagtaacccaag

SEQ ID NO: 7284 - DNA, 844 bp, Zea Mays
ctctggactgggcctcgattatcagagaagacagggtcacaagtgtaaaacaaccgagacacaaacagcacccccttggatggcgggtttactccctagaaactcaggggttcttttataaatgtacgaggccgaagggttacggttaactctcgtccactcgatccgctaaggacggcacagattagattggatcacatctaaaccggtatctaacactcaccatccgatctaaaatctacggtgccaggcgttccacaccaacttctaatctggagctcctggacacgatccaacggtcgaaaatgaatcggtaagccacatctaatctcgcccgctcagatcaagatcgacggccatgcgtgcttcttcccccgcggcagtctgcaagcgccggagcgcgctcgacgcggcggccgccatgacagagctgaccaaatcggcgcccctgtgccccaattcgtaagcccctacacgcaacgcagtacggagatcatggcgagtcggtagagggtttccttaccgggaatcatggtgtagagagtcccgtccacggtgacatatggccccgcgacggcagagcagctcctatgagaaattggtagaggtccaccggcgcgccgcggttatcaggtcgccaccactgtcgcgagcgccgagctatactccggtgcccaccagagcaccccgaaccgcaaccagtgcacgaatctctacggcggcggcggagctcggtctccctggtgtcgtgcctcctcggccgaatcgagaggtcgcaagtgtaagaagatggagggaggaggggactggacgcatggcttttatgcactgagaagcgagatga

SEQ ID NO: 7285 - DNA, 493 bp, Zea Mays
gcaggagcggcatcagaagagtcctcggccagcatatcaagcatagcacttatctctgcatcactaggatccaaaggcacctcaaagtggacctgccgttcatcatcaggaatttctccaagcgaagcaaccaaagcactaacttcttcggcagagggtcgcactctaaggcccaaaccgccatcagcagtaggaggattcgacacaaaatgagtaaaggccttggaaggaggcaggttccagaccgagtatgcgacaggggcgccaacatttgataccttgcctctaagtatcatttcaagccggttcaccaagtctacagcaggaattcttctgttggtgacccgggttgagtcagctagacctcggtacaaataggctgggtatgccctgtccttcagtggttaaatgttcttgaagacaaaatcagcaagcacagcctctgcagtcagacccctctccttcagcagtccaacttcagccagcaaagtcc

SEQ ID NO: 7286 - DNA, 587 bp, Zea Mays
gacgacccgtgaccatccaacgaccagtggtcatcgtccccatcctgaccccaatccgagcggtccaatcactgcgcacggcggtgggatcaccggaggtcactaatccggccaccacgagtgccaaacaccaattcactcggccctcgtgagattaacgattcctcgaacctatttctcccatcaatttctgctgccataccgtgcagacccctgacccacggtgcggtcaaacgcacgacggggaaaatcgcactggtgagcaattacaaaggttttatgattcgaacatgtgcgcggtgtgaactcctatcgaccaaggaaggttccgcaatcaagaaggggagttaccgtcaaggaaggcaaaggagagcatggttgcagcgtcggtcgtctcggcggcaatggcggtgctcttctcacactcagaggtgtcgctagggcggtctgggagaaggaggggcagaggagatgggtacgtctcaaggcttaataccggtagaggaaggaatggccggggcaagatggtagggaggactccgattcctctggcggcgaagtcggaccacgcctgcgtcgtggcgagg

SEQ ID NO: 7287 - DNA, 491 bp, Zea Mays
acggcgttcacgcgcggccgagctccgacgagctcgtaggccggccgattggggcaacagctagggttcccgagcggcggacatcaaattggacctattccgagcttttcccctaacctaatttcatctatggccaactaatgagctctggccacgacgatcgcgggcggtgctaagggttgatcgcgttcccggcgattaagggggacttagttcaattgggttggccggtgagcagcacaggtacacgagagcactcaaacgagggagcaattggtatgaactaacctgagctgagctagccgcagcgaggtgtgtttcacggcggcggagaccgaaattgggggaaattggaaattggtgagctctggaggacgattgagggtgggagtgggggctctggtttcacgatgaggtagcgcagctgcccgcgccatcaatttatagagggcatcgacggtggccgggaatttggagaaggacgcgcggcg

SEQ ID NO: 7288 - DNA, 680 bp, Zea Mays
cggagacccaacatggattaggataatgcagaggatcaactgaatactatggcaatctcatccgtcaccccaggctggctgttgcaggtaacccagggatgagagtgacgaaaataacaagaaattgttgaatcatttggccactggtggtagtaaggaacactacactttgtcccaagggatcatccgatttaaaggaagaatttggttggggaccaacaaggagatgcaacttaaagtcacctcagtgttacatgatagcgccgtggtaggtcattctggctttctggttacctatcgaagaatcaaagcgagttttgcatggccaggaatgaaacagcaagttcgatagtttgtcaggacctgccaaatatgccaacaggcaaagcccgaacatgtcaaataccccggtctcctactcccattaccgattcctgaacagtcatggcaaatagtcagtatggactttatttcaggtctcccaccgtctcgcaaaggtaagtgtatattggtggtggtggacaaactgtctaagtatgaacatttcataccaatgcttcaccctttcatagctttgacagttgccaaggtgtacatgtctgaggtttatcagttacatgggatgcctactgccattatttctgaccgagactgcattttcacaagcaaaatatggcagg

SEQ ID NO: 7289 - DNA, 490 bp, Zea Mays
ggggaaacgagtaccaggggcactcggctgatttgtagaagtgggggcagtggtaggacgaatgaaaataggctatatgaactggtaggagggtggacgaggcgaagaacgattctgattaaaaggtcggattaccaacctggttcgcttctcaggtccctgattagacctgtcagctccaaatcccttggattttccatggcctgtgttcttggcttctactgccagcgcagtgctgacagctctactgtaagtaaggtccaggcaagtggccattttccgttggagccggtcgttgagtccccacatgaagcaattctttctctttaggtcagtattcacttggtcgatagcgtactgagacagatggttaaacttgttgagatactgcattatagtatctcccccttgccttagtcgaatgaactcctcttgtttcatgtgtagcactccttcgagaacatagtgttcacataatgctagtttaaat

SEQ ID NO: 7290 - DNA, 504 bp, Zea Mays
ggaaactcgcgttgggcctcatctctactggcggcccatttcccttctctattgcgcggcccgctacccaaccttccccacggcgctgatgactgggcctttgtgggcagtctcaggtggcgtgctctggttgacttccctcgcttccacgtgggtccagagtgtcagaatcatctgctcccctccaacaaactcagccgagcacgtatcgatctcggattcaatgcctacgaccgattcttccgtgtcccaacgaccctggccgaaatctctgctacccgagtgttagccatcacgattcctctcttagccgtctacgggtggggctagataagcagtactgtcagcccaatctcaaccaccgtggccgagctggtcgcccgataatggcgccctggggcgcggacttggtgcggcttgtgtataaaccccgagcgccggacctcccctcgcccctcctatccgctccacgctaactcttgggagcttgggccgaagcttggc

SEQ ID NO: 7291 - DNA, 861 bp, Zea Mays
ggtttttgctaactgggaatgggttccttcactgttactcagagtcgctgacagtttgcgctaaggtccttcggtttttatttccttccacgtcgaagtccccgacggcgtcgcgcgcggccgagctccgacgagctcgtaggccggctgattggggcaacggctagggttcccgagcggcggacatcaaattggacctatcccgagcatttcccctaacctaatttcatctatggcgaactaatgagctctggccacgacgaccgcgagcggagctaagggttgatcgcgttcccagcggttaagggggacttagttcaattgggtaggtcggtgagcatcacaggtacacgagagcactcaaacgagggagcaatcggcatgaactaacctgagctgagctagccgcagcgaggtgtgcttcacggcggcggagaccgaaatttggggagaattggaaattcgcgcgtgctggtggatgatcgagggtgggagcgggtgctatagcttcgggatgacttagcgcaatagcccgagccatcaatttataggaagcttcgtcggtggcgcttgaattgaggatggtgcggtggcggccggagatgaagaagaacgagggtacggtgaatacgtgtccagtgtcgtggcagtaactccggtggtcgacgggaagttagagggagtcacggtgatgcggtggcgagattgggacacgcggcgcaagaccggagaacggcggtcaccggcgaagctatccgcgccagccgcaaagccgaaaaggaagacgacggtgagtcaccggagtgatgtccagcgcacgggcggtgaagatcttttaccccgcaaggttatccattagcc

SEQ ID NO: 7292 - DNA, 443 bp, Zea Mays
cacgaggtacgtgcggttgcaagacgttggtgttcttgccgttcgacggcggtgcaagtgcgagatccaccatttgctgacactcgcccgcttgctgacacgtttacatagggtcgtgattgcggcagtgcaacgctgtggtgggcctatatgggcggaagaatgcaccgatgcggagagccgctggtgcgcctcagcctccgaatgatacatgtgttgtcgagtcgaacactgggagagagaccaatgttgggaaaacatatgtccggttagtggtctaaattggtcctgcacgttagtgatctagtcgtagctatgttgtagttacgatctgaccgaatagctagacaactctctcaaatctcatggagcgaggtggggctccatgtgatggtgatgcgagatatgcgactacaagggagccatcactaaggcggtctcca

SEQ ID NO: 7293 - DNA, 316 bp, Zea Mays
acccgtagcctagtcctggacgttcgggagtgtacacggatcgcgctcgggggagaagctgggtgaacgaggcctcggcttgacgggaatcctttagcgttgttgggtctccgccacaggactgcaccacggtgtgagaccctgtttggttttggtaattgattgacaacttatatggactatgtcggtaccctagatcaggggtaccctcttctacagcatgaaggcgccgcacccgtgcaacacctcaaggcacacggagaatggcacccaaccctaccacatgggcaggtccaagggcgccacgtggcaagga

SEQ ID NO: 7294 - DNA, 663 bp, Zea Mays
gggggacgcctgaggtagaatacgccttcttcccattgactatgaggggataaaagaaggaaaacgaggcgaagggagagggcgtacctttttacgtgtaatgcaaaacgacgctcgttgtgttttctctcggagggggcacgatcatttaatgtgatgggacgtcatggcctgtcagcctgcatccgcgatcggtgccatcagggaagatcatttcttggatgggtctacgatgcgggggtgttgaagatgatggccaaggagtcatcgtgaatcaacgtctcatcccctacctagcacgcaagctattggtgtttttgacctgactacgcacgacggggtatcctaggtgatgcttttgggcaggacgacgtcgttgattgtgactcgatggtacgtgtggatgcatgtcagaacacaacatagtttatacaggtttgggccgttggaatgtgtaataccctatgtctttttgatgctgagtattgagcattgccggtattcaaaggttacatatgagttgttggcggtgatggatgaattctcctatcaatctaatgacgacgtggttgctttaagagggatgatgagatatgatatgggaatgagatgaggtggttttgtaggggtaccccatcatccttatatgggtgactggaggga

SEQ ID NO: 7295 - DNA, 427 bp, Zea Mays
cttctggccatctcccgacagacggataattctttgttgtctaggaggcagtacaaaaagtcatcttcatttgtaccattaaacactagggcccccttcggatactgcaattcccgggcataatgtttggcttcagaaatttcttcttcggatagtctttttcccgaagcatgtctaacgatataatcaaatcttttggagagtacttcaggagtaagggattcgacttctttggccacacttttctcaaaagctatattagtatctggagttattccttcagccctctgctcggttgtggcaagcttcgtctcagcaggcactttgggccctgcctcggtttcagcctaggttattgtagcttcaacttctatttgcttagtatcagctttgggttgcgttttgtcagcttcggcaaccttccctg

SEQ ID NO: 7296 - DNA, 688 bp, Zea Mays
gtgcgggccagaataaaattgtttttgcgaattacaagggcgagccggccctgatgagtcaaacaaaaaatttgcggagattatcgatgttccaggaatgctccaagtcttcgccgtttggcgttgcgagcctgtatgcgctgtgggaggccttcgtcttgacaatgaaagggccctcccacatgggctccagcttgcccctggactctgttcgggctgtccggacgagtacgaggtccccttcgctgaattcccttgggatgactgcgcggtcgcaccatgcttttgtctgggcttggtatttgtctagagcctgtagggcgaagacgcggtctccgtcgatgaggtccttcgaagttggctcgtctacgtcggggacggccgacgcggctgtctggggcgatccatgttttatttcttgcggagtcatggcctccgatccgtataataggcggaagggggtgaacccagtcgccctgcactcagttgtgttcagcgcccagaccacttcgggtaacaggtcgggccacttgccttttttgtcgtcgaggagcattttcttgacggctgtgaaaattttgccgttggcgcgctccacgactccgttgggctgggggtggtacacggaggcgaaggcaagcttggtgccgatggagaagcagaagtctttgaaatcttggttgtcgaa

SEQ ID NO: 7297 - DNA, 650 bp, Zea Mays
ataatgcattatctgcggccttcgggagccgaaaaaacaaaagactaaatagggtttttgacgctattggatttgtgtaccctgactatcggtacccgccgtgggggcagaaaagaaagggtgcaacttctgggaaggatgttgcttcaaccgcttcaagcgagcccgcgctgaagaggaaaaaggtgaaggttcttactcaccgatcgcactacattgaaccggccatagtgcctgaatttggtggtgagacctcttcggctattgaagccaaaggacctgctcttacgcagaggattgaagagccggctgcaatgccgaaggctgacaaaattgaagaaccgagaactgaagggacgaaaacatcagaagttctaaacccttcgacagaagtggaggcgccgaagacacaaaaagatctagcagcaacccccaagagaaaaaaggatggctagtgtattagatgtgatggagacgataaaaacttcaagctctactccaggaaaaattgccaacgcttcgaaaacacagattgaatccgagacaaagctgacagaagccgaagctatactgagccaggctgacgccgaagctgggccttcagtgcccgccaaggagaaatcctcggaaactggagaaaaggcagcaga

SEQ ID NO: 7298 - DNA, 532 bp, Zea Mays
gaagattgtgagtgatatatggggctatgagaacatcgttgagaaagaacggtccagggagcaccgaggcacctacagaggtgaccggaaaagtggaactgtttccaacgacgatcgaggtagggtgtgtgaggggaggtgagtgggagcgagatagcatgcctgtggtgggagtggtgtgataggatgctccggagtcgatgacctagtcagatggcggaggggccaacgccatggtgcgatagtatgtggcggcgagggcgatagggtcccagcctccagcgaacgaaggccacgtcgtcgtgggagacgacccctgtcggtacccagaatcaggggtaccctcttctacagtatgaaggtgttgtacatctacgacgtctccaggtcacacggagaacggctcccgaccccaccgcatgggcaggtctaaaggcaccacgtggcaaggaaaggtaatacatccaggatgtatcattgggtccgaacctccacagtaggacatcggacccctgtgcgtacaagcccggag

SEQ ID NO: 7299 - DNA, 850 bp, Zea Mays
gctagagtctatgcacacgattgaatttagacagaacgaggataggaaagcaggtcgacaaagagggtgttcgcggcggcattctacgggacgactgggtgttctggagtttgagctttagtaaagttcaattagccgacaccgtgagaaacacgaggctaaagacaagctaaaacaagagacaattgggtgagtactgacctgaggagggctgcccacgaaggggtccttcacggcggcgctaagaacggtgaggaggagattatggcctaactaagtccctcagtgaaattgggtggtttgcgcaagcactcgtgtgtgtgatgcagtgaagaagcagcgctcgtggtcaatttatagagggatggccggaggtggacgagattcaaagatcttccagtgcgctggcgagctcacccgcgcgggcagggccacgacgagcgtccggtgaacaccgattaactggacaacgccacctcatggtttatgcgccacgtcgcggaagatttttaccgcggccgcaagtccgatcctcagccgcggtggcattcttatctcctacgaggtttgctgaattacggtgaacagtatgcctgccaggccaaattcaaatggctattgcttcaaattttatgtggttgcttgcaaacgaatctgaatccaagttgtacctggaccaatgttctttcattttggtataatgaccatgtcgaaaatcctcacagattgatcaggccagggcgctcaagttggcacaataacactgaaccctaacccaaatcagatgcagtgaacatatacctatcaggccgactgattgtgctttttcaacatcatttatctctcattt

SEQ ID NO: 7300 - DNA, 362 bp, Zea Mays
caattgccccacttgttgcgagcacaagggactatttccacaacttccgccgaagtcttcccagtcctcggtgtgaaggtgcaagatccaaattgagcgatcttatttcctattttcttcttttgccagtgcagacaatagttcttggcgaagacttccacagacggctgaccgccgtacgacacaaccgcccacacatacttcgccagggcaacaacgacgttgggtgtcaactggtggacctgcacaccaaatctctgcaaaacctccaccacgaaacgatgcaccgggaggcgaaggctggcaagaaaaaatgcctcgaacacaactaattcgccctcaggctcggggatctcttcgac

SEQ ID NO: 7301 - DNA, 742 bp, Zea Mays
gcggggctcgagcccctcctaccaccgttgtcgtgcacatggagctccactagagcctcctcccctaagatttttagtgtacacatactttgtagaaaggggctcctatattgtagtggtttagttcagtccctcctaaaatttttttcctggctctgtcccatctggtaacagtaaccgagcacagggttggcacagggcttcatgatttgtcagtaacactgagcaagaagaacaggcatgtcaaatggcttcatgatttctcaggaacaccaatagcaaagcacaggcttaggaaatggctacatgatttctcactaacattaagcacagggttggggatataaatacctaacacattgtaccagtagagattcaggcaatatgttggtactagctaacggtgcgtgaaattggctttgaggtgtccaaggaaacttgcatatgacgagaaccaccgtagaacttgtattagcctatagcactactgtctacagtgtccaaccaacttgtgattgaaaacaactacattaagaaccttagcctcgcgcccagaatagagagacctctgcatcagtgattaccctctatacctgtactctctgagagagcaccaaacgagcatgacagcgatatccggaagagcccaattattcccagtgaacagcgcgagcgaccccgggatgaagcagagcaccccatttccaatctggttccgtgcaccccccgcaatagatccccg

SEQ ID NO: 7302 - DNA, 835 bp, Zea Mays
acggcggtctaccttgctctgtccatggtgacagcgcggacaatcaaaggaacaacatgttcccgatgatccatggcggtatagttcaatcagaggggtcgaggagcttgaggagaacttaaggatgctataacaaatgatcagggagcttgaattaacctggagtaagctgaccgcagtgagggtgtctctgcggtggtagaaacaggattgggggaagtaagaaattcgcggtctctggtgaatgatttgaggcaatagctggtgtgttggctgcgtgattacatggcgcatcagacccggccatcaatttataggattgctaagcggtggccgatgaatttgggcttgagacgcgcggctgtcggagaggtgggagatcactggtgctcgggttagtggctttcaccgtggcagtacaccttgcgatcactgtgcatgcgagacacgattcgcagcgacgtggtctaacactttagcacgtggtgcacggcggtaatcggccaatgacggcgaggtttatctcgatcggccgatgagcaagtggtccggggaacccagccgcggccggacccaaattgatccgggcgccaagatctttactcgttcaccgttatccacaaatcaccgcgcatgaatcacggcgaccgacgtgaattgcggcgtgacggtcgtcggcggcgaagggggatgaactgggtatcttcttcagttactgtaccatggcattcatcttcagttgacccgacagagcaacttgaagctcgatttcctcctgattccatgtaataacaggttcaactttctgtatgaaagttggagacttataaatcat

SEQ ID NO: 7303 - DNA, 868 bp, Zea Mays
gtgggctcaacttttgagccttgtagctctcaaaatatagggttttagccctaggtcaccacatcaattttgttaacctattataggagaacaactttgatatagatattctcttgagttgtgacacaaaaattagagaaaaacctgttacaagttgctctgtcagaacagtttcagaaaactgaaactgaacctaaggttaaaacaaggttccagtgaggtgaggtcaagtttgatgcgccatatcttcgaatcccctcggttttgacccaaatgtcctgtataaggattgaagactgttaaatcaagaacaaaccttattaaggaattttgcccggttattcacaagaatcatgagagctagtcggtggaagggggacggttcaggcgactgacgaagatgtgccatggtacagtgccccgatggatcagaccgccagctaagctcgtcgtcgatgatcgccgtccggattcatgcacggtatagaaggataacgccgggaaaagggtgaaccgtacgtggcgccatctcctgtgctcagccggagtgattcaccggcggccatcgcgtcaatcctttccgccgcggtgtcctcggcaccgtgattcttcctcactgtaccaaatctctacgtgcttggcatgcgcttgtgatggtattcgagccgtgaggtgatcgccggacctccgcggctataaatagcccatggttcgcggcgaggctcggtcatcacacacataccagtgaaccaaatcaagtcaaattcgcactgccctctccacctttgcccaaattgattgtgcacagtgaaagcacagcctcttacggtcctttagccctgatcccatctcccaatttcgctcagag

SEQ ID NO: 7304 - DNA, 316 bp, Zea Mays
caagtgttgtttaaggaccacacaagcccatttgatatcacttggtttcaactgaactaaaacaaatatatatcagcagcatcctcaagaacaatacaataattagcatcagcttcttcgcaacttatagtgcaatgctatatacaaggacatcatggtgtgtattacaataagctattatggtagtgttttctttctactcaaatcacataaagcagacaccccttttcattcatattccttaatgagcaatcactaaacaaacatacactggcattttgcatgtccagtaaaaaatggtgaagaagaacacaac

SEQ ID NO: 7305 - DNA, 377 bp, Zea Mays
catccttcgttgttccgctgtctgctgcaggggaccgttcatcagcaaggttcatggaaggaggggcctaaaaaggtccatctccctatcaagtccttcatttgctgttccatatggtccagctcccattgctgccacattaggtggcacgttcgactgcagccgatcatacagtacatgtatttcttcatgcaaggtgttgcagtacgcttgcagatttttgagggatgtgctaagttctgctacacgagctagagctttggcttcatagtcccaagcgaaagagcgtgagttgacaacccaatcaatggccgcatcacgttccgaaatttcgtactgcaggcgattaacttcggctgttagttcagcaatgcggc

SEQ ID NO: 7306 - DNA, 601 bp, Zea Mays
tcggtgtgacactatagtccttggtatcccatgcaaacgaactatctggtcaatgtagatttccgcatacttctccatcctgtgggtggtatgtactggcaagaaatgagcggtcttggtcaatctgtccacaataacccaaattgaatcatggtgcctggaggtgttgggcaatcccacgataaagtccatgcaaatgtcctcccgtttccaagatggtatgggaaggggttgtagaggacctgctgccttcaaatgactagctttgatcctttggcaggtgtcacactcggatatatacttggcaatttccctcttcatcctggtccaccagtataaagatctgagatcatggtacatcttgttgcttccagggtgcatggagaatttggaaaggtgagcttcatccagtatcttctttctgagctcagggtccttgggaacaaccagtcggtctccaaaccacaaaattcccttactatcctggcggaagcacttgtatttttctgccttttgcttgagcatgtctttgataacctgaacacctttatccccaatctgtgcttggactatttgctcttgcaatgtgggctccaccgag

SEQ ID NO: 7307 - DNA, 358 bp, Zea Mays
gtggactgcgggtttatataaataatgtacggggacccttttgtaaaacgtacccgcgaagggggtacgtaaggatcgcgaccgttggatcatctttaaagggaccagattagatctaaccccgccaacacacctgagccgcccgattaaatcctatggttccaattgtaaatgcccagatgtaatgacgcacactcgatccaaatcgaacggtcagaaacccgttgagcgaaggggtatagaatcacctaatcgtgaccgcagatctaaacgtgtgcggcccagatctcgtttgcacccgacaaaatcccagccctccatttcggatccgacgactcccacatgtccttcatcctcc

SEQ ID NO: 7308 - DNA, 702 bp, Zea Mays
gccgccgccgccgctccactgagcgctagcgctattgcgtcctcgccattacacgagtaatggggagagagaaggtagcagcagcagtacagtaccagaccaaagtagcaatcgagtgaggcccttcggcgtttccctccagaatcccttcgccgttttacccacgcgtcacaggacagaacggaagagcggagagatgaacacgggacgggacaggacactgacaccagtataaatagggctggagattacggtgctcggatgtctgagtgacaggtaggccatggtccactggacccgcggtcggtgggcgagtggggtgctgaccgtgctgttgggaatggaactgaaaattaatgcttgcgggccccgcgggattttggaggtgtacggatttcgtttgacgtgtgttgcgttcggccggtctcgtgatgctacggaatgtcgtatactcgcgttgtttttctgaacgaattttaaactctggcacgtagtagagattagaccaactttgatgaatgacacactgatcattagttaataattccgctggacattagatcccaaaccaatgtcgcccccgcatttcatgtgcaagcccggggatccaggtaaaagaggcccttcaggttaagcatgtgtaccagagcgacaaggttgtcagcggcaagtttatatacacatcaaaactcaaatgaagca

SEQ ID NO: 7309 - DNA, 516 bp, Zea Mays
gccgcatggtcaagaaccacaagactacacacgccccaccgccctgttgccggtcttgttgcgtgaatcaaaggataagaaataccagctggtggaccttatgggtgtgctgttaaggatacctggcctaggccgtgctcaagaagggtcccaatagggtttgccttttcggagtgatggcaccagtgccaccttaagaatcctggcatccgaccccgacatgtcgaggccatatcccagggggccaagtaccgggaaagaagctggcaacaatgcatacagcagaggaaaaaaaggggcatgcagataagttgtaatgtcactgacaagtagtacctaaagagtatcttacaaaatcaaagacatattggaacccgctccccagaggaaccctcgtttttctccatgcaggcctagctactcaccgtcaacaggatcccgctggaagcgcccaaccaccacgtccacagcatcctgtacgccctcccgggcagcatcttcagtgtcagccaccgg

SEQ ID NO: 7310 - DNA, 365 bp, Zea Mays
acgtggtaactcttctaagtatgtggcacgactacgaagggcgacgaattccagtgaggacacctcagtcaatcgcgcggcaagtggcacggtgaacaatccggtgataaggctccaactcttccctgcgatgagatctttcaccgccagccgttaacttcacaccagggcaaacgaatcgcgacgccggcgaggatcatggtgcagcgttcaccgacggcacgttcactgcatctgaagatcttttcattcactatatcatggctatcttcgtcagtctgtctgaccgagcaacttgtagggctttgttctcaattttttgtgtggcaactcactaatccatctatagcaaagttgatctccta

SEQ ID NO: 7311 - DNA, 531 bp, Zea Mays
ggtgacggatccgggctccccatagagaagccttttgcggggaggagacaacgccatggcggggacctgagcttcaggcagatcccgtccttgaagttgggcttctagggctgcaatcctggcatggacatcctccagctccaagtgcaccatagagatatccagggtggcactgtctatgtcggtgttgagtccggccactacaccagctagggtgttgaggtgatcctcaccagctgcacctggaatgatgctgttctggcttcctccactcagacgtagaggaagatgcctgaacctcgtgtcatgcagttgttgccggtaggtgtggctgagggaccacaaagtctgtctggcagcatcactgaccgaagtagcgtaggtggatagttgtgtcagggaatcatgagcagacagagtcctaaatcccctatcccctgcatccatcaccctgatgtagatgcgagtgatgtagtagcaagcccggggaggctcgctcactcgccttgttctgtacagggcggacgtagg

SEQ ID NO: 7312 - DNA, 307 bp, Zea Mays
acgcccgtgccaggtacatggcagtttgtagatcctgcgggtcgcgcagctcaacgtccacccgcaagtactcgggaaggccgcccacgaatagctccgtcttctgcatgggggagacgtcccgagctcgacacagcaacgcctggaagcggtccgagtactcctagaccgtggacaggaaggggaggcgtcccagttccgcaaggcgagaaccgcgcactgctggaccgaagcgaaggcgacacaactcggcgaagcgatcccaagacggcatgccctcgtcctgttccagggcatagtaccacgt

SEQ ID NO: 7313 - DNA, 687 bp, Zea Mays
ttagaaccagcagtaatgccacactgtcaggctcgatgccctccacctgcatgcttcaaaaacacctcgactgccccctggtatccggatgcctcatgtgcacgcaccccacgtccaccatcgcgtggacggcaccacatttcggtctgacatagcatcgaacagctcccgtgcgtgaaccaggtccccggccttcacatgcccgacgatcataattccttgacaaccatctcgtggaacacgctgcgtgtcggtcccatgtccccaactgcagtgcacctggacgaggctggcggagacgtgaacgtctgagaccatgtggcggatgcggatgagggagtggagctaagctcatgcgttcagctggaggcacacggaggccctgaggtatacagtgggtggggcacaaggtgaagggaggcgaggatgagcagaaagtcggcgcgggtggcgctgatcgacgcttgggacttgggaagaggaaggcgtgtgcctgtatgaggtgccacggtaggaaggagaggaggcaatgaagcataggcgacagaggcgaggactgcagcacgagggaaccgctgtggcctgtctggaagtgtccaggcgtttcaaaacgctgaaaggctgcactggatgcgtgtccgtctgatggcaatcctatggctgctgaaaaaagtgacgacgtggacg

SEQ ID NO: 7314 - DNA, 610 bp, Zea Mays
gccgaggaattggcttgggcctgtaacggaattgaagggtattacgtatagtaagtgcttttgccatctttattctttaggccaggccatgtttttagtttagtttagtttttgttgaggacgacgtcgcttggtgcgcccgtggaccatgcatcatcatacatatgattctgctcgctgctgcctcgtgtccagtccagtccagtccagtccagtcctgcctgctaccagcaaacacaacatgcatgtacaccatgcttggttgcttgctattggctatcgctaggctatagctttgctgcaaacaaaggaccatgcgtgctgctggtgtgtagtgtagtgtagtacgagacgatgagtgtgttgttggcttcattctttcatgctctccctctccaatgataatgatggtccgatctctgattggtccaaaaccgacatctctcctggtagtctgtctcatgcatctctctatgatcgatcaagcatatatggagccagcctgcagagtcagagccactactgctgctgctgcaccacatgaataatagtatcatgcaccattgcatcaatcatatatgaactgctaaagtagagatgtatgcatgta

SEQ ID NO: 7315 - DNA, 463 bp, Zea Mays
ccctcacatgcctagcttgcgcctctatagcgtaccgctgctccctctctttccgcgctgcctcagtggtaatgttgatcctctggcggacctccgccagccgagcttcctcttgagcacgtctttcaactaggtcaatcatctaacatacgttgaggatgtgtcagattatgtgaatttggaaagcaattagctgcatgtattgagaaacggtaactccaaacttacttgctgagaagcactggtagactcatcctgaacaagtttgcacactcctttcatatgttctagtttaatcctgagtttttcaagctcaaaattggcattatcctgtgtcggggaaataagaattatgggagttcagaaattggaaaagcatgcccttacttgcctattgaagatgttcaaagattaaacggagtttttttatgaacaacaaaaggctatggaagtcaattttgat

SEQ ID NO: 7316 - DNA, 347 bp, Zea Mays
gcagggttgcatcgtcgacggcggctccgtccgatggcccagcactggtggtggccacgggagcagacacctgttagaacgtaccagccaacagcgcgacagtgaagatcgtctagccttgccttctccgtgcaacatcgtcctcgtcagagtcgtacaccatagatatgaggtgctgcagtgggcgcaaaatgagaagtttccgagccacgacgggagcgaacggtcggaggtgacagcgaacggaagccggtgcgtcatatgtagcggacaagaaggacgctctatcttgtaggaaaccttttaccgtgccttgttgaacagatgcagcagttcaagaaacacta

SEQ ID NO: 7317 - DNA, 481 bp, Zea Mays
ggatggggccagggggtcctaggggcgaaggccgctgtgcagggagcagggggcgccgaggctagggttagggcaggggcggtggcttgcttgttgggcctaatgggcaaagggcggttagggttatgttaggttagatttgtaacaccccaggtgttacttaggattttcactcaagactacacaagtaagccatcatcacatgtgacttaagttgggaaaaagtacaccaaagttggagctcatgatcctaagtaagtgcaacccaccttaaaagtcataccttggcttgttatgcacatataatggggagaattgcccaagccctaattcaaaccccttttggacaagtggagcactagaagtaagcatgaacaaaagggtatgaaaaccacatgatcatgacttgggccaattataaaagatgtagcacacttgataccccacaaatgatagtaagaaagtgaccccaaaaagtatt

SEQ ID NO: 7318 - DNA, 818 bp, Zea Mays
gtgggtcactgacatgttgacccacctgctagactctccctcacggatgttgggtctcctagctggcgtaccccgcaacaacctcgccgggtttgtcgccgtcgcttctgctgggggcaatccaacctcctaggtataataccgagctggggtgcctggtttcgctcgcccatccgagcacttagtcgagcgaggtactaaccgaagcactcttcaccatagtagctagaacctaggggatgaaggtagttcggtcgccgttgtcaaccttggggattactatccccgaaccctccattcgtggggaggggtgattgtttctgtccgccgtgtgttccccgcacccattggagtgttgtggatgaccgtagtgcagcgaattgctcaccggagtcattgattccgcaaattactgtcgtgtgccatggacgggactcctgggagcttaatcctcggtaaggcttccaccattacgttcactacccttccctctctgttccgcgcgttatcatactaaggttgggcctctcggccccccatttgtggtttgtcagccatggcgtcgccgtcggtactctggcatcgctgtgtgcggtccctggttggagggcgaggatcgtcgggccatggatttccatagggacggctcagatcatgtcgggtgtaccggttcggtgtggccacatctcgatcgttggatcgtggatgtgagggcaagatctgaccgtacgctcattaaaccgtggcccttgatcacgaatctgatgaaccatgttgcataccggttcgccgaaggatgaatctaatcccgaccgttc

SEQ ID NO: 7319 - DNA, 272 bp, Zea Mays
acagaagaaaacgtccaacgcataagacataactcgagagaagctcaagcccgacagaaaaattatgtagataaacgacgtcaaccattgatttttcaagtcggagatcatgtgtacctaaaagtatcaccaatgaagggtgttaatcgattcggggttaaaggaaagttagcaccctgatacattagcctgttccccattcttgagcgatgttggcaagttgcgtacatacttcaattgccagaatcactatctgctctgcataatgtgtt

SEQ ID NO: 7320 - DNA, 573 bp, Zea Mays
atgccagttcctatcgaagcaacaatacttgtccacccaacatttgcaaattgttcctataacctggccctttgtatgttgggggctggatatgatcggaccattcaaaaaatctcaaggagggtatactcacatactcgtcgctattgacaagttcacaaaatggatagagtacaaaccaatcgcctctctaacttcaacaaaagcagtggagtttatttaggaaataatatttagatttgggatacccaacaacatcatcacagacttgggatctaatttcactagctcagagttctttgacttttacaaacagcagagcatcctaatcaagtatgtgtcggtagcacacccgagagccaatggacatgtagaaagagccaacgggatgatacttgatgcactcaggaagaaagtattcgacaagagcgaaaaacttaccaggaaatagattggagaactaccgtatgttgtttggagcctacgaacccaaccaagccgggccctgcatggaaacactccgttcttcatggtatatggattagaagcagtgttgccagtagatttgatctt

SEQ ID NO: 7321 - DNA, 736 bp, Zea Mays
aaatcgatggcacaacaggagcatgaagcagaggaggtggagcagactgaactagagaaactgagacaccagactgctgtagcataagagccatgaatgccctactctcagcccgatcctgaagtagctgctgctgaagcgcatcctgcctgtcctgcatgttctgaaacattgagagcatttgctcagataaccgggcctgcttggctgccaggtgagccagaatcgaagcaagagcagggtccatagccggaggggcagcaggggcagcactagaactcccagcctcatgatcatgtgagcgtggaggcataggaggcggaggcggaggaggaaccccaaaatcatcatcatcatcatcatcatcatcagctgctgtaccatgagtgtcgaactgacgaagagctgcatcctcggcctgagagtcaaaaacaggagcagaagctggcacaggaatctcaggcgctggacggtaggatccaaaaacgaggcgagaggcctcaagggtgccctgaaaccgaggaggctgaatcagctgcgcaaagatgtggcacaagtagtgagcatagggcaactgccgacgagcacgaatcccatccaaaacggtgtcctcgatctcacaaagcaggaagtccacaacgtcaaactcagagtgggagaccagggcaccaaggagccaaagctgaatatgtgtggtagcctccctgtatcccatcctcggcagaagagtccgtcg

SEQ ID NO: 7322 - DNA, 835 bp, Zea Mays
acggacaccaaatcggacctatcctaagcttttcccctaacttaattgcactaatgaccaactaaggagctctggccacggtgaccgagagcatggcggctagatcatcgtgttcccggcgattcctggcggtctggttcaattaaaggggtcggggagcatcaccatcatgtaaggatgctagaacaggagcaagaagggaataagcagacctgggaaggctggccacggtagggtgtggttctcggcggcggagagggatttggtggcagttggaaattggaactctctggtggatgatggctaacgattcttcgcagctgggttcgcgataatctaacgcagctgcccgggggctcaatttgtaggcagcttcgtcggtggtgcggttaggacacgcgacataaggccggaaggtggcggtgcaccggcgaggttatctgcccagccgcaaagtgaataagaaagccacagtgagtcaccggagtgacctccagctcaccgccggcaaggatctttcaccacacgtccttatccacccaccccgagcgcgagtcctaacgccggcggcacgaatcgcggcggaggagtgatcgacggcggggggataaacctgagattcttcttcagtcactgtaccatgtcgagtggtattcagacaacctgacagagcactttggagcttggttttctcttaatctctaatgacaacacaagtccaactctgcagcaaacttgtagagcattataccaactacaactttgctatatggtgttgtcacaaaaagtcattgaatcatgtctgaaattgggcttgaagtcggtggtagttcac

SEQ ID NO: 7323 - DNA, 429 bp, Zea Mays
gctcaaactgtatttgccctttgctgaaggtttgaatcctcgctaattcattgcaacactatgcagcacaaggtaacagaaactaaaaattcagactagaactcaccgaccttactggaccgaaacagtctagtcctgcaacgaaaaccctgaacaagagggcagtaaaagttgcaacttggagggtccccatggtcatggttgatcggtgctcatcacttatgagagcaaccatacagaaatttaagatttgtgtgtcaacaatatcatacagccctaggatagaatcgatccccatagatttgggctcaactgcactagcccttcaccacccaaaaaaactataaggttcaaaggcttgtggtttcattaaggccggaccagttgttgtcactaattcacttctccacagttaatacagcacgacag

SEQ ID NO: 7324 - DNA, 364 bp, Zea Mays
gcggtgcttaccacgtgagtcgtgctggagatatatagtagcaaatcttctgtcagttgaccgggcgtagctcggcgtggtggcttgagtactggcggagtggtcaagaatttcttcagtgcctctaaagcctcctgtgcttttgtggtccacttaaatttgtccaccttcttcagaaatttatacaatggcattcctttctcgcctagccttgatatgaatctccttagcgctggcatgcatccagtgagcctttgtacctttttctgagaccatggcggttccatcctcgtaatggcctcaatcttctccggatttgcttctattccccgatgactgacaataaacccatgtagctttccgg

SEQ ID NO: 7325 - DNA, 367 bp, Zea Mays
aggccccgacctatggtggggccagacacgccatgtgtcctttaggccccgtgacgaccccggtcaaagggggctccacacgcccctagcagagagggctctagacgcgtcacatggccagccgtgcaaactacagttggtcaaggagttagtggagttagaaaacgttccacgcctgtccaacagaacatgcgcgactgtagtaacattgtgcccactccctagctgtcaatcctccaacaatctggggcgtggcactatggtagtgtgcgcgacgtgtgccacgacctaccacgacccctatggagacgtggacggtacgcaccatgtgctgtcacgttctaggtcacccacaccatataccacg

SEQ ID NO: 7326 - DNA, 443 bp, Zea Mays
cgggacgattcaccaagacggcggaagacgacggatttttgtgggacttcacttgggactgggagttggattggagtttggacggccagagtcgagctagggtttttgtgcgcccgtcgtgacattgggttgggctggcagcggcaaatggcaagatgggctggggcgctgggcttgtggtctcactggtctgtggacgcggacgcggttagttttgcttttggctgcataacagtgtgtaacgggccttttcgtgcctagtaacgggccttttcgtgccttgttaaacgggccgggctcgtgcccgcccatgggcctcggcttcggcccaaacccggcccggtgcatcgtgccgggccggcccggcccgaaataatttcgtgccgtgccgtgcttgggccgtgcttttttttgcgtgcttcgtgccagcccaccaagcccgg

SEQ ID NO: 7327 - DNA, 461 bp, Zea Mays
cggcgggttctaatctctaaatctatgaggtttcatctgcaaattatccaggtgaacgggtatcggatagcactggccgctcgatcaacaacgtgcggcatagattagatctgatctcctctgaaccggtactcaatgtggagccttggatctagatcctacggctcatatttgctccgcaaacataaacgccagagcacgatctcacccgctcgtgctccgatcaatggctgagatgagcagggggcgaatcggtacgcacttgtaatcctaaccgtcgatgatcaatcagacgaccgagattatccaccatccctggcgacgaaacgcgacggcggcgcggacagcacccacgacggcaaggcatgcctggcgaccccaagctctcggtacaacgcctaacgccctattttgacggtgctacatgatgctctacatccaacaaatgcaatcaatgacca

SEQ ID NO: 7328 - DNA, 597 bp, Zea Mays
ttggggtggtgttcccgagcactcgagtgcattgagaaaaagagttaacggtcccgaaggtgcccatcgcaagcgagcatgccaaatggactcttaggctgagtttgtcgaggtaaataataagaagaaaaggcttcgtcgctcgtcagacctagagccaatgactgcccctatcatgtcgagccttaacaacaacgtaatgaatgttgatctggaggatgttgtggtgggctgcagtggtgtgagggctagcaggtacgtggtggaagaaggggatgacgatgatgttgaagaaatgctcccctggtccggtaggaatggcaaagtaaagctatcggcgatacttcaagccttgcttccgctgggataatgaatatccgaggcctgactatgtccgccattgatagcgtgctggaaaaagctattcccgaggatcttttgcttgaacttccagagatcagagttgtcgacgtccgtgtagagtgcccagacgacgcaccttctgctggcttgctggctgggccagagataagcctgcctgtctgccatggctctctagcccccgagggtgctctagtcctcgagggtgctccagcc

SEQ ID NO: 7329 - DNA, 294 bp, Zea Mays
acaggctacacgaaaatttcggttgttataacttcgcatatcgcagggatacgaaggctccggtgctcagttatcgtaccaagtggccaaccggcaggaagagcgaatggttttatttcaaggccgatgagaagaagagagagaagctgatgcaaatggttatgtgtccgatgactctaagcttcggactgactaggccagtgtgccacatgacgttggggtcaccatgccaacaagccgtagcagaatttagggtggtggctaaacatattagcactagagatctagtgcaag

SEQ ID NO: 7330 - DNA, 780 bp, Zea Mays
aaaaaactcgaaactcgataaatccgtgtagttttgtggttttagaaaccgggggacaattagttttgtgttcaattggggtgctagtgtggactcactctgaatggtgaaacactgggacttgagtgtagcggttgagatagatagtttatactaatttaggcttacaccatagtccagtgtagtgatgatcgtagtgttgctttgtagcgtgttacaattggtgtgcttgtgtgttcaaggaggaggagctatcatcttatagttcaagggaagaaccttacagaggtgtcccgcttttcaccaaagagagagctctactgccccgagcgctgaagtggtatccctaaggtccgtagggttgagtgtggttgtactcccggcatggcgcactgcatcattcgtccgatgtatgagttcctgtagcgagtctgatgttgtcgtagtggcgatggaactttgtcttttgtcacaaaccctgtgtcaccctcctgcgtgcgtaggcatacacccggttgagagcacctagagggggtgaataggtgatcctgtgaaaatcaactctaaacaacacaaacttagtttataaaatgttagtgaagtcaaaaccaaggtgctataaatatagagggagataactcttcacttgattgtacctttagaatgtgtattgaacttaggaacaatagtgcaagtgattaaatgagaactctaaggaagaaagcaatcacaatagaaagatgtgcaagtgacacggtgattttatcccgtggttcggcc

SEQ ID NO: 7331 - DNA, 566 bp, Zea Mays
tgaaggatatcttcgccggaggctcctactccggtgaagacaactagacggacctcgggggaactctgtgtcccacggtctacgaagttgaagcacaccttcctccggaggccctttcggacctcccatgggtccgagctgcagacaggtacatgcagaagtaatcacagccagagacaagggctcccgtgtcaaatgcggataggaaccctgggtcggcgcttagccccgcggcaagtgccataccaagaggtgctctgcaactctcccccagctgggaaggaccctccaaggtaacgggagtgcaccgacccaggggcaaccatctagctacgacaggaggagtaccttaccccgatgccaaatatctctgtaagttctatccatagagcaagactaaggggtcgagtctgtttccttttttaactaaataacacatacatgtatgataaccggtggggtctgcccccatgaacccggactattggtctgcacacatgcacgacaagttatgaagaagaaactacccccctcagccgtgctcttgtgatagttccatcttgctg

SEQ ID NO: 7332 - DNA, 733 bp, Zea Mays
ctcctggataaactccactgcttttgctgaggtcaaggaagcaattggcttgtactctatccacttcgtgaatttgtcaatggcgaccagtatatgagtataaccttcctgagcttttttgaaaggtccgatcatgtcgagcccccagcatgcaaacgactaggttacaggaatggtctgcagctgctgcacgggcaagtgttgctgttttgacaagaattggcatgcctcgcacttctggactaactcggtagcgtcactcttcatagttggctggtagaaactggatctgaaagcttttcccaccagagtccttgatgcaacatgcacaccacactgcccggcatgaatttcatctaatagctgtctcccgctggccaagtggatgcacttcatgaggactcctcccgcgcctcttctgaacagcaaaccccctatgatggtgtagtgggctgactgtcttgcaatgcgctctgctatagccttgtcatccaggtcctcttcattctttatgtacctgatgattggctctcttcaatcattgggatctgcctctggctaactcagggcgttgcattcttccatctggtccgtgatgatgcttggttgttgtatttcttggacgaaaatcccagttggagcttgggccctactggatcccactttcgataatgcatcggctgccgcattgcgatccctttgcacgtgatggaactccaatccttcgaacttg

SEQ ID NO: 7333 - DNA, 746 bp, Zea Mays
cgcggggtatcggccgtccgttctcagatctagggtctagattagatcggcgcggttgcgaacggtacgcgacgagaaccgttggatgcaaatacgacggggaggattttattattctagattcgtgtctatccgtccgatccagatcaacgtaccagaccgaaagccgcgaacgggtatgcgatcatctaatcttagccgttcactaacggatccacggcccccatgaccccgccgttattcgtgcccgtgaccgccggacttgggcggcggtgcccgttataatggcggcgagaccgccggagtttagccatacggtgctacggagacccattccctaccccgattagcgctacacaaagggaagacatcgcgaactgtatgggtagctactcacccggaataggcacggccagagcgggaatcctcggcaatggtggccgcagcggcggaggtaactccgatgacgaatccacgtgccaccagctactcacggatgaaatcgcgtggctgagcatgtcccgagcacgacaccatgcccctgagtccgcgctccgaggcccaacagtgacggaggagcggtctcctcagatgcggctctcccttcctctccagtaagcgatggaggcttggatttagggttatggcgtgaagaaatcaacgaggcaatggctacgaggctatggggtggagtcggtccgcctttgtagccaccgttggacggagtcatgccgcggggaaaccgg

SEQ ID NO: 7334 - DNA, 482 bp, Zea Mays
ctcggccatacccaacaacttgtcctacaaaacaggttacataactaatcccatctagcatatagctacctactaaaccctctatccatatgttacctacaaaactatcttaacctcctgtcctaaacccggaaggagacaccatagctcaagaaagaagagattaaaccctactagctaggtgttaacttaactcagtacagtagaccaactcagtcacatatatgagatctgacccaaccaatagagtcatgatgaaatgtataatctatctatccccgcctaacatcaaacaaacttttgacctatatcatgtagtccatctcacccataactatttcaaccatatgccccaactctgctgatatacattaacctcgaatcaatgagaccaagaccgaagaagaaaagatcaacctcaacaaggaaggagataacagtcaaagcgaatctcgagacgaatcaagacttaaacctttcgg

SEQ ID NO: 7335 - DNA, 337 bp, Zea Mays
cgagtctcgacgggcacggccacagagccgagcaacaccttgagccgtcggatcacacatccacgcttgtcaagtaccagccgccgcgttcatttatcccgtgctctgcgcctccgtgtccctttcccgaaaaaacaactacgccgtcgccgtgcccctcgcgctatagaggccccagcacttccctccctggcatccccgtccaaaatcctcgcaaaacccttgcttccacttccgccattctttccccccaatgcggcagtagcctccccgcagcacccgcgaagcgatggccctctccgctgcgcttcgcctcccgctcccgctccctcgcctt

SEQ ID NO: 7336 - DNA, 802 bp, Zea Mays
agatcacttggctgcacaaggaataagatgaggtaaagcgccgtctcgagaatctagaagcaaaaggaagaagggctcgtacctcgagtctgtcatcttttgccggagaggacgcgacaatgggggcactcttccaatgggtgctggcctcagtccatagggagaaacgaagaagtcacccctcagcaaagaaagtaaggcaatacatggcaaagtcgcccaagggagggaccatttatagaaaagcacaaggcgtgataaaatgggtcacataccaagtgttgcgtatggaaatgggtgatgtttcggcaccaaatacgcaaaaccgcggaagtacacactaggataaaaggcagcgcccgacccgaggaaagccttcaaggggaaatattctcctctcgggggcttgggggctactgtccgggatatgatcctcggtccctagggcccatctctcagcgagcaaactagggaaaaggactctgacaactaggaaccgctggttagttggaggaaatatgtaatgtataccatagacaaacccacccccgaacgatccctgtggcactgagctcggggttgggcgtggccgaaccagacagggggccccgggcatgccgaagggaaaccattcgagtggatcccgcgcctagcttgagagaaacccgtcataaatgactggccatattaactgcgtctagcgctgagctacaacggaggctccatttgagggagatagatatcccatgggtcatcgtcacatggacacgttccatgggccacttaaacaaaccccgataag

SEQ ID NO: 7337 - DNA, 671 bp, Zea Mays
ccttctgcatttccgtacattttgtcgttggttgctttatcctttcttcttcctcagagctccgaaagatgcattctcgggctgatgacgccaagaggacatctgaggagatgaaggcggtggctgaggcccggctgcgagagctctcgttggctcgcaatggtgccattgctacatcggtcgaggtggctaatgcgcttttcgagtgaagcgtcaagcttcaggggtttcgcctggttgtcagccaagtgtgctcccaccttttgccaccgcctacaattgatatgactttggtcgactggttgcggtcgctccctagccacgtggagcgcgtcgttgccgagagcgcattccatggcaatggcctagctctggggcaaatggtctctcacattgatgagattgaagttgttgtgatcgtcgaaggtttcaccatcggtcgaagcaatgagttggacgcaattgaagacaaagttcgcccccacgcaagagtgctcgtcgaaagggtagatgtgtagaccctgctaaccgacccctaaagtctagcgtcaccttgttggcgcctttcgtgttcgtagatttttgtggcggtggttcttcctgtgttaactgatgtgatttttggtaggtgtaaacctttttacttacttctcgcggggcgcagcggcctg

SEQ ID NO: 7338 - DNA, 785 bp, Zea Mays
atattttgctattctttttttaggttgccatacccctaactcatggattcactaatgcaagacacgctttagacctcaaaaaagatagtcaagtgttggcggttagacaatgctgctagcgctgctcaatgtcccatggtccaggctattggtccctcacaccgatccttgcagatatgttggccaatgctgctagtgctgctcaatgttccacgatctaggtcactggtggtctcacagaccaatttaggcgcggggaaagtgcgggagcaactcgcgctggagcaactcaaggaaataacctgataaatgatgaaaaaaatgaaggcgcggtaccaagcagggttgggggttggggccaaggacgagaccgaggtcgacacggctagcggtgtgcgctaggactttggccgataccatgtccatgcttaggttcagtgaccgacagcgtccgcgaaccggatgatgcaggaacaacgaccgacacaggtcaatcgacacgcgacatgagtggaaacgggcagcagtcgcaggcccaacaacagtacagcacgcaatgaccgagggaccgacaatacagtaagcaagctccaacaagcaagggcatagcaccgtggccggtgaaaggaagctacgcacggtcgaggatagagagaaacaagagagaagaggattagtataggtgagcgtcatgatctataatgctaagattggcgccacaatccatattattaaagcttggtgctataaatattggcatcgacgccacagatcttaacatcaag

SEQ ID NO: 7339 - DNA, 502 bp, Zea Mays
catgaacagtgagtcagtgacagacaaaaaagatggatttcgaaaggattgcatcagaaagttaaagactcactatttcgaccaccaattccatctccaccgcatgtagggtctgccaatctataggtcccagcaatgatgtccattatgagcccagctaattgtgacattaatgccattggatcaacaccagaatccatcagctctctcgaccttttgactgtttcagcagtgtttgatgacatggctatctccaataggtcaaggagtttctcctcagacacaaccccaacctgtaaagcataagtacagtttgtgtgactgatctaaatattgcattgccattataacttccaagtcgtgacagccagagagggaatcttatagggtgtttagtttgagaaatcactcaattctaaataaggtggtgcattatgaggtcattcctcagatttgaggaaatggctccatttctcatactagtactaaatattagcttgtg

SEQ ID NO: 7340 - DNA, 717 bp, Zea Mays
cgctcgtccgtttgagccgatcacgacgcgacgcgctcagcaagacaacaacttcctgcctcgttgtccgtttctaagtttctagcgcctgctctctcgtccctcaacaccacgacgcatttgcacatcgctgcacagcaaccgtgccacaaatatcatcgtatggacgagttcgccgttcgccatagtttttgctcaaaccaccgacgtccaggccactccttaggcgaggaatctccactggtgagtctcctttcgccttcttttctattctcggctagtgtcatgtccaaggctccaaatccctgtcgttgtcgcccccagccgcgttgttcctggtgagcaggccgagcagcctcgccccacgcctgtgttacctcatggcgctcggccgtgctgccccggagtgccgccgctgcctgctccatgtccgccagcgatccatctccggcgagcaccacacctcctcgaccctaagacgacgaccgaccgagccctgtgcctcctcgtccccatgacgcagctttccgtgctgttgcagctcgtctgcatcaggtgcggcttcatggccaggccagggccacggctgaccgtgggctcctctgcagcaggcggctgtgggccctgccccctaggtgtccgtctagccaaccctgccccacacctaggaaacccctatgcacgtccccacccccacggcgcgatttgccaaaccgt

SEQ ID NO: 7341 - DNA, 1312 bp, Zea Mays
aacgagaaaggcaatgaaaaattcggaagtgccaacacaggcgctgaaatcaaagcctccttgagagccacaaatgatgcttcatgagatggtgtccagataaacaaatttcctttcttaagtaaggtcgtcaaaggcttggctaacagtccaaaatgccgaacgaatcgtctgtaataaccagccaggcctaaaaaacttcgcagttccttcacattcttaggagtaacccactgagccacaacttcaattttcgcaggatctatagccacaccagccgcaaaaataacatgacccagatatgtcaactgtgattgagcaaacgaacacttcgaccacttaacttgccatttgtcccgaaccaatagctccaagacttggcgcacatgctgcaaatgctcctcaaagctggcactgtaaatcaagatgtcgtcgaagaaaaccagcacacaacgacgaagcaacggtgacaaagtagtattcattgcccgttgaaaggtagccggagcaccagtcaacccgaaagccatcacacgaaattcataatgacccgaatgagtttggaatgctgttttgtgagcatccgcaggaaggagacgtatctgatggtatcctgctgtcaaatccaaactggtgaaccacgatgcctgtcccaattcatccaaaagctcttcaataactggtactggaaaaatggacttcacagttagagcattcaagtgacggaaatccacacaaaacctccatgagttgtctttcttcttcaccatcaacacaggagaagagaactggctagaactgtggtgcactatactagcctgaagcatctctgatatttgatgttcaatttcatctttaatggccggtgggtaccgatatggacaaattttgacaggagttgccccatgcactaaaggaatggtgtggtcacattctcgagaaggtggcatcccaactggaggggcaaaaacagaagcaaattcagataataaggccttcatagccggtggaacatccagctgctcaaactgaatcggagtagtgtccaccatagccaactccactaccgaccctggaggaatcgtggctgacaatccatgcaacaacaccggggatcgttgatagggaataatcatccacttgtgctcccaatgaaccttcatgggactattggcacataaccagtccataaccagttcatgggactattggcacatgacaatatccatagtctgctagaaatgtgaatagtataatgtggtctcgtaaaatacgcatccacaacattttgcatgagttgctgaatatgttc

SEQ ID NO: 7342 - DNA, 370 bp, Zea Mays
gccgtgttgggcttcgaactattgcttcctagtcctcagcaagggtgtacatttgacgcgctaagcgcatctccaacaaatacttgtgtcgacgacggctaatgttctggaggaaaacagtcacattggtttacatgtgaagcacccagggccaaccaatacttgatctatgatccaaattagacggtctgatttgccaaaccgatacacttcctcactcaccggatccaaaatctacgaccgagaatccattacaacgcaatctagtcttgatcgttggtttcgtgaccgaccgtcctgattcaaagcgatgaaatggtatcccaccttttaatttgatcccttgactctcgatccaatgacctcttcg

SEQ ID NO: 7343 - DNA, 418 bp, Zea Mays
ctataccctacaaacggagcaatcggcttaagtcggcaacgacttaaggcggtgtgacatgctcacgcttacttaacccagggtgaccactataccctacaaacggagcaatcggcttaagtcggcgatgacttaaggcggagtgacatgctcacgcttacttaactcagggtgaccactatgccctactaatggagcaatcggcttaagtcggcaatgacttaaggcggtgttacatgctcacgtttacttaactcagggtgaccactagaccctaccaatggagcagtcggtttaagtcggtagtaacttaaatcggcatgacatgctcgcgactactcgattcagcataagcacgtttgcgaattgcttgtcttagggcaatctctatgccccacgaaataggaagaagtttcaa

SEQ ID NO: 7344 - DNA, 863 bp, Zea Mays
caaccctgtggaccaatttcacccacacatcgcgcccctgcccatcctgccgccgcagcaccgcctcaagctactcccctggcacacccgagcatcaacaattctctagtgcccacaacccacctctgattgagtggttgaccctggtgcttgtaagcacatgacgcccaatgctggtctcccttagttcttataattctccatctatcattcttggcaatggttctctccctatcattggtgtttgtcataaagctttgcctcataattttcatctaggaaatattcttgtggcacctaaatattaatataagtcttatctctattcaccagtttaccatcgacaactcttgttccatcaggcttgaccgttttgccctctcagtaaaagatctgctttctaggagactcatcatcaggtttaatagcctcaggccactctacaccatccagttactagcatccccatcatctcaccttgttgcttcatcacccacggtatcctggttgtgaaactcttcataggcttgctagttcatcatttatatcatgtagtaaaatacctagtcactcgatatgccactcatgtcaactaggtcatcactagattgccttttactagttattcatgtggagctctcaataactttgatttaattcattgtgatctgtggacctctctagcagtgaacatttctggttactaatattacttggttattcttgactctacgcctcaagtatgagacattttccaccctataacttctatggggctatgcagttcggatgcaccactatgagcgttcagagtgataacaagtgcgagtttgataactcccacatggtctttctttctctcg

SEQ ID NO: 7345 - DNA, 755 bp, Zea Mays
ggctcgcgccgccctttgacgtgtgggaccaactcgtaagaaccttctcccagcgctggttcgttgcaaaactgccaccgggtatcacggaagctccactctgccgtgtgaaaccaaccatggttgttaggattcgaccctgggtataaattggggccctcgtgactcttcccctcggcctaagtctgcgcctgcacctccaccatattgggagaacctgcagagagggagaggggggagaatccaagccgccgtgactgattcaagcgtgggtggtcgtcgggtccctgatggatggccgaggatgctcgcttgtgttacccgcacatctccatggtccttccgagcgaggatatcctccaggggtggtctaattgctcgccggagcacttcggttgagccagaaccgccgtgcgccatggtcgtagctttctgttgtgcgattcatggtgagactcatctccacgacttcacctgtttgtccttcacgtttagcatgggtctaatcggagattcgggcattggggactcaagtcgggggaacaacgatggtgccgctgtgagctccatccactggtgcgttcgacctggggaagatgcacgtgggccatcgatctgcgattgggcgcgcatgattagatctacggggaaacggtatcctaactgttggatctggctggagcggccgggattagatgccaggtaccggttcggggggcttgatttaatctctcgcgtccaagtcgaatccaacg

SEQ ID NO: 7346 - DNA, 447 bp, Zea Mays
gtacgtcgtcgccctttgtttttcccttcctataaaccgccgccatacacgcctcgcctgggaccggaggttttccgccgccactgtgaattcgcgttggcatccgtgtcgtgttccttgggctggggcagggagctatgcttcgtcttcctggggttgtcggtcgtcttcgcgacaagaagggaccactcggctgatggtaattcctcaccggaattgcagcaccgccgcgccatcgcactgctccgtgggctggggtctcgactggtcgtaccgaggtgattaaccacttcatagctctatttttccatctccttcgcgtagttttgcctgatttgaacttagaggtctgggtcgccgactttgggtgcgccggtgagctccacggccgcagggattccggcggctctgccctggcagcatcggggtagggagatgggtcgtgat

SEQ ID NO: 7347 - DNA, 518 bp, Zea Mays
gtgttttttaccatctgccatttctggactgagaggcaccaattaagagcaatcatttatcagtatgaaaaatcacactggccccatactaataattttattttctgacgcactaatttggtgaggatgatgcatgtctccatgtgtgttctgttctctctctttttttagcaaggattcttctctctgagaaaaaatcctggtgcatgctatcatgatgttcgatttgagcttcatttacgtccttttcttaccaaatttatactatctagctagagctttttatttttacgtgacatgtttagatgactattgccaattgcggtggtaaagcaaacaggcatatgtggcctgtcaatacgacattggtcaagtaaatggccacatcaatagaaaatatacatcgtggtgcataaaaattaattgaatggatgtattatcatatatttgtatcccatatttacgtctattttaaatatgaatgtgtaatcttttgtattccatattctactcagatg

SEQ ID NO: 7348 - DNA, 546 bp, Zea Mays
ctagttttaccatcacctgatggctctttcttgaggaagccaccacgggccgatcccccaccatagcctataaaaggaggaggtcgaccccaggacatgggatgttcttttcccctagagtgctcttggacatagtgacggatcccaaacaagatgacgcccagaagactgacgaacatgaggaggacccagaggccggagcccagccgccaagccaagacttagctatgacttcaccttgtaaccaactccaccacgaataagagactaaccctaaacaataaaccataaaccctaaacccaaaaccctagagcagggcgattatgaagtaggcaccacagcaacaagtaccctagagcacaagcgccaagggcacttttaaattgtgttcgagtcccacagaatgtctgactcatggtttaccgcagagagaggcaatgagccatcgaactcggtcgaatagggtcgacaattatatgagtcggaacctatgaatatgaagatggtccccagcggaccccgcgcctggatcctatgaaaggaac

SEQ ID NO: 7349 - DNA, 306 bp, Zea Mays
agaagaccctacgtgaacatccatggaagtgtgagagggagaaccaactcggacaccctcgggggctgggtcatagctcgcgctacccatccgagccggatcatccccagcaacaccctcgggggctgggtaagggctagcgccatccttgagggctgagctctctgtaacagccacctctaaggctgaaggaccttcacccacttccatgggagcagaacaatccagaccagcctcctgacccttaagaccacgctccaaggtcgatgaggcacgggacgccgctcgagataactccaacccggc

SEQ ID NO: 7350 - DNA, 614 bp, Zea Mays
ctcggtgtaagcatttctaagactcagatcacccctaatatggacggcgggttaattgtttaagaacttgaggactcatatgcaaacttacaggccgaaggggtatcgttcgtttctggccacccgattacaactgaacgggtcagatcggttctgacattaatacgaaccggaacatgctcctaaccgccagatctcgatctaacggccacgagttcagaactacgcgatccaatctaacgcgtgagatctcgatccaacggttcctatttggctacccccagatttaatccaaaccgcccaatcgttgatccgacggcaagcggtattcttccacttcctgccccgatcctaacagttccctagccgatcgacggctaaaacttcatcccctccgacaggacttcacgccgacgcgcggtggaccacgccccgccccgcggcggaggtcatctccggcaacccagtgcacagccccccggcaagactccagcatccatgaacacacgcacccatttccactggtatggccctacgcggcgacacgattcgagcgaggcaaacacgatagggtggaacataccaggaattggtgtcttccttgcctacggcga

SEQ ID NO: 7351 - DNA, 909 bp, Zea Mays
tgggcctcaatttctggaaagtccaggggtctcggggtagaattcctaagacatagggaacaaccgaggtggatggcgggttattttccagaaaggttatggactcatacgcaaaatggcatggcgaaggggtatagatcgatcttggccgcacaattggcaatccaaggtctggattagatctgcaaccatcagaaacgtggtgcaatataggcccttggatatggatcgaacagctatggctcctaagtcgcgtggatcgcacggtgaccgctcgattaaggatctacggcttggactaaatcgcccccaagccgaacatccatatgtgatcaatgccacacgctggtcatccaacggtcgacgctaaccaaagctttcccagctggccccgacggcaccgcccacaaactacggcggagcttcaccggcgaaccatgcgccccatgctctagtgctcggtttctcaatcttttaggtgctaaatgatgtgcgaggtgaaaccaatcgacgaggcagggtctgaccgggggtggcggcacagagaacccccaacgcgaccgactacggatccgcggcggcgctaaggttcccacgagcgattcacgtagctagggcgagcatctacctatgattctcggtgttgtgtaacaaggggtaacgagcgggaggtaggacagtttcttaccggcaatggcgcgacacagagctccaattgcggaacaatggcgtcagtggcggaatcgcacggcggcggatgagatccacgcggaattccgcccagtcctcactgcaacgaacgctcccgcaccgcgcataacctccacccacgcaaattgaaccgcgaccgagagttccgtggcccgaatcgaagtctcctcgccggtcgatggtggcggcagaatcgtc

SEQ ID NO: 7352 - DNA, 413 bp, Zea Mays
ggcggcgctggaggcacagtccaaggcgattgatgtccaatccaggacgatggcgacccaatcgaagcttctgcagcaactgtgcgaccgcttcgaacaccaggatcagcggtggagcagcatcgagaaggtggtcgatcagaacgcagccaacatcgccaatcttcaagggaggctcaacgacgaagaactgacgcgcgtattggggaacgcttggacggacagatggcggaattccagcaagaccaagcgtatcgtgtccaggaattgatggcaactacttccactcgcgtggcggtgctggaaaacgtgtcttccgtgtttgaggcatggcgaccacacatcgagggttccattgactccgtcaggtcttcagtcgacaccatgcggtcagagctcgcccgtctcactca

SEQ ID NO: 7353 - DNA, 535 bp, Zea Mays
catggctccgcctcgttaaaaacctcaccccccgggaggaaaagagtgcgggcctgaataatactgtttggtgaattacaagggcgcgtaggccctgaggatttaaacaaaaaatttgcggagattatcaatattccaggaatggtctaggtcttcgtcggatggcgttgttagcctatatgcgctgggggacgcctttgacttgacgatgaatggaccctcccactttggctccagcttgccccgtgactctatccgggtggttcggacgagtacgaggtctccttcgttgaattctcttgggatgactgcgtggtcgcgccaggacttcatttgagcttggtatttgttgagggcctgcagggtgaagacgcgatctccgtcgatgaggtctttggacattggttcgtctacatcggggacgactgatgcacttgttcgaggtgacccgtgctttatttcctgcggggtcatggcctctgatccatatagtagacgaaaaggagtgaatccaatcccccgattttcggtcgtg

SEQ ID NO: 7354 - DNA, 865 bp, Zea Mays
cacaagttcatggcatgattgaattgacgagttgcagcatccattttggagttatgatcctagaaaacgatgttatattcctaaatgattttgatggtgtttcggtggcgttggagaaagatgaatttgcaatcaaagataacatgggtggttttttgtgggagcgtgcccaagctttagctcttcgacacatttgctttaggtctgcagccagaccgctagccgcgccatagttagcgatgcatgtaggccaacccgacaggatattagggaagtaatcaggattgtggagtcaaacgttttcaaaacggaaaacaaatttcataggactggaggtgggaaggtacacaaggagggggcggcgatctgaggtggatctaggtagggtggttagggtggtgtccaggtagaggtcaccaaaggaggcgtcggtgaacgcccaatctaggctagcaagggttgggttaggccggtcattggaccaagtgaacgagcaccaatggatagggagttcttcgacacccatggcgtcaatggagtcgttgaaaagtttgtagagtctggaatcgactctcctggagctaatgtaatcgaggcaacacacaaggttgaaatcaccaaggagccatgggtcgtagatagatcaggaaatgtccgtgagctcatcaaggaacgagggggagtcctggtgatcagagggcgcatagacattggtgatggtgagggtgtgcgctatactgggacacgaatgaggaaaacttggtggtgagggagaagggcttggcagagtggtggtccaggacgagggctaaaagaaactgctttgacccaaaccccacacaaagctagtccacctcaaccaaac

SEQ ID NO: 7355 - DNA, 446 bp, Zea Mays
aatgcggcatgtactgtatgtactactatactcgcgaggaacgcgaatgcatgattgaggcggcagcgccccggcggccccatccctgacccttgccattcaataccgtgatggccacaaccacaacccccatatatgcgtcgacaaaccagacactcatcatgatgacaaagaagccccctcctctccccgtccccggttgcagcgaatgattaggggaatttccgagtcacgcatgcactcgcccatttttcgcctcatttaacccggtggatcgatatggcagcagatgtcgatcgagtactgcttctgctagcgttttccttcgatctcctgcttccagctttgctcccctggtgcctggtgactggtggcggtggcggtggcgcggcaggagtttgcttgggcattctgcatatcctatcccagagagacgtcaaatcgac

SEQ ID NO: 7356 - DNA, 324 bp, Zea Mays
aagagagcagaggacaagatcgaacctgaaacgagctagccacggcgaggacctttttacggtggcggaaactcgatttgggggaagtgagcaattcgggggctcaagtgaacaattaaaggcatgagtgggtgtgctgggtgcttgaatacctagcggagccgagggtgtgctcaatttatagggctcttgagcggtggctcgtcaatttgagctcgcgcgatggcggtcggagaggaagaggtgcactggcgcaagcgattggtggcatttaccgtggcaagctaaccggcgatcaccggatgggctaagatgactcacggc

SEQ ID NO: 7357 - DNA, 413 bp, Zea Mays
ggaccgggcccccgtgtcataggctgggttgccctggtgcgcatcggaggagatttcctgtggcgttttggggcatgagcgagagagtctgctttaaaaaggggttctcccttcgaggagcagctatgctttcgcttctctcccactcgttgtgcccctttgccttcaaagtctctgctttgcgccgccgtagttgccttagccttgttagttcatcccgagcgctttcagactgagtgggcgcttgacatggtgcatcgcctgcctggatggagtgcgccagcatgtggtggaaggatccgcgtcggtgccttccccctcggcgatctcgccgccggggagctcgtgctttttgtttcctgcgtgatggcgctgccgatctcgtcttcttcttgttgttgctggaggagcgc

SEQ ID NO: 7358 - DNA, 273 bp, Zea Mays
aaagaaccaagctagctagagatatggctagttgtgtagacctcacccttatttattgaggattttttctattttctaaactacacatagatacataaaacgtatccactcagttgggggcaaaatggaccaactgttgatacattgatctgatgaccatgttctcttaatgaagttgcttcgcctcgacgcaccctgagcgatggcaccacatgttgcctctaattcctccagaattgtgtcattgggttttgaggcacaaacctagcagaa

SEQ ID NO: 7359 - DNA, 555 bp, Zea Mays
acagcagtacatccctgcctcccttgtgtcttcaaacaaggggtggcagaaccggtggttttatctccggaatgacgactggatgcttccaccgtattctcaatgagtggtgaccgccgccggtgataactggcgctggggggccacacgcgagaaccaggagaagctccagcgcattctccatgccctgcaaaagttacaagccgaaggccttaccgctgcgggggtcgtcgccgctatccaccgccggagggtgctcccattggcagagcagtggttgtggctttcggagatgaagccggatgttgatttggagggttcacggatgtcctcgacccccctctccaccgacgacctcctcagacgggtagcgggcacggtagggaggctggacgctggcgtccttagccagcccccaatgcatcccgaccatgggtatgtgtccctagtaagtgtctgatccttcttctattttgcgccgtgtttcttacgtctttagctcttaccgttgggtttttcgttcgtccctaggggctgaggaactttaaaacctcc

SEQ ID NO: 7360 - DNA, 554 bp, Zea Mays
gctgatcaattgtcaggaattacaccgatgacaactcctgttcaagtgcaagtagccgatgggggcagattgtcttgttctcgtcaattattgggcgcgatttggacggtgcaacggtgttcctttgccactgattttcgtcttttggccctatcttcttatggtatgattattgggatggattggctttctcagcatagcccgatgaagacccattggctcgaaaagtggatggtcattccttatagatcagcaactgttttattatatggaatatctgttgtttgtccagccggatccgtagttgaagttactgcgttgcaatctgttcctccatcactgttggatttgcagctgccagatctgttgtcaacgttgttaactgaatttgctatgttgtttgatcctccaacaggacttccaccttcacgtcattgtaatcatgctattcctctcattagtggggcttctccagtgaaggtacggccataccgttatcccccagccatcaaggacgaaattgaacgtcaagttactgttatgctgcaaacagg

SEQ ID NO: 7361 - DNA, 476 bp, Zea Mays
ccagcaaggtgtccgcggtggcgacctgatgaacgcccgccggagggtggcccggagctgcgcctgcacagattgagagactcaagccaacggtttggttggtcgtttgcctcgtgaaggttgggattcggagaaacgtactcttagatcagatcgagcggccctgagccgagcttcgcggtgaatgatgcccgcggatgccggaagtcggagaagacgatctccatcggagttgctctggttgcacgaggcttggcctgcgtgccacagtcagtgccttagtcctagtgtaacatgatttttgtaaattcgatgcatttggaaagcttttgcctccaaattcagagccaatttttggaacaccgtgtgcgcttcaactgttcatgaattggttcgagtaaactgtacttgcttacttgtgttctctttctccacacatggctacaagggagaggggttacaactgctaagtggac

SEQ ID NO: 7362 - DNA, 710 bp, Zea Mays
atcacccgggaatgggggaaattagtaggcagggaactgtagcgtcttattatctatgtcccatccgtatatagtgcgggagtatttataggtaaccgacgggtaggtgggccccaagtaccgttaaaccccggttacctgctacatccccaaaatattcccctcaacagagtcattatagtacgtgaggtgaagcacactagcctggacataccacaaaatataccccatagaggggcttacaaatgggcctagatggtgatgcggcagaggctagaccccacggtaatctgttacaaccttcgctagcatattgcacccttgatcctgcgaagtcatgacccctgactccgtggacacttggacttcgctgtgtgaggaggagttcgagcctttgggatgcgtgagtggggctacagcgagccccctcccttaactatcgtggtccttcgcttcatcccctctgaaggccgtggtcgtagacctcgatgttgttacaagtcgatgtatccttcgtgacatgtgtctctgcactaaaacctgtttaatcgtagccggattagactgatggaggaagagctcggccttcgctccaacattgggcgtgtgcgttttccgcaatatataagacctaaaaccaaaatacgtatgcatacatgtggtttgatttcgagctgcaacggccatatccactgctcatgtttgattgc

SEQ ID NO: 7363 - DNA, 563 bp, Zea Mays
atgcgcgtaatcgaggtgatgatttctcctttgtgttcgcctggcttcccgggtcgtgtagcactcttcgcgtcaggatgtgtgtagagataggggattaggagttgcgggcggggcaggtccaccatcggtgctcatgcgactgtggctgagtgtcgcgaggaggaagacagggtcgcgaccgtagatctgggtttgggcggtggagatctagcgctgagtcgatgggaaatgtggtccgttgattttctggcgaacgactaggattagaattggtatatcgattcggtgaaatcaatctggggtctagatcttggatcggacggcaggtgttgatcggaacccgcatgagatccaaaccgcagatcagaaatccgatggctatttccgcgagctggtttaggatatcgacaatctaatatgggccctaggattttgatcggatgattccgatcctccggtaccccttcggccatccgatttgcaaaagaactctcggattactaggaaatcaacccgcagtacacccagggacgctctgtgtctaggaaattttacacccg

SEQ ID NO: 7364 - DNA, 705 bp, Zea Mays
caccgatgactgaaagtagggacattctacctgagctagtataaatcttgcgccctcaacgcacacccttgaacgtgtacaataaatttaattgtcggagcgaggtacgaaacaccgacaattggcgcaccatgtaggggacttgtgtgttccgcgatgagatcatccaagcttcggatggctagtaacaacagtggcgtggtctagacccctgggacgcccatttattttgggagtctggatttcgtcatcaacaaagaggcagagatgatgagggactcgatagacccgtctcccttggcaagcaacttgtcggacgtaccggaagtctcggcgaccttcaactcgacgcacctcaagagaaccatgggtcgcagggcttgccaccacccgatcatactgacgtactaggagtactagactgtgtccgggcattcctggatatgctctcgtcagggtcagaagacggactcacgtccctgcctagcaaggcaagctgcgaccctggtcaagaatgccttacaaccaacaccataggagatcattttccccacatgaggagccccagcgagaactcgcttagcatcatggagcgcaccgtgatgtccacctcgcatcagctcaatctgcctccccaggagctgtagttacgcccgaacctctcgcgaagcaaacaacaccccacgacaaacaaggaagcctgtg

SEQ ID NO: 7365 - DNA, 894 bp, Zea Mays
atttccgaagttatgaaacaatcaggtctagttgtggaagagggaaccatggacgaaggtacttctgccgccgaagctgaacataccattgccgaagaagatgttgccgaagaagaagatgttgaagaggatgaagaggattacaatattctgatctcaacaaaacccagccatctagattttgggaaatctactgtatccgaagctgacatgcccatgatggtgaagttgggctactttggggaggctgaaaagaaacttgtctgatttgccgaagaagaaaccaccccagtgccaaagtgatacgcccagcccaggtggggttggccgaggcccaacaagttagggttgcccggagcccaacagttcgttaagcacacccaactcaaggaaaggcccaatcgccccaaaagactagtccaatgggggaagggtggctctcccttttaaagtggcttcctcctcccaagttaagcaaggtgggataattctaaggctcacacagtcaccgtccgactacaattgggccaactaggccaattgcgtctttgccaacgggtaatagtggaggatgtcctcatcattcccaccttcttaaaatgggccctagctctgataccagatgatacacccagcctaggtggggttggccgaggcccaacaagttagggtttctcggagcccaacagttcgttaagcacacccaactcaggaaaggcccaaacgccccaaaagactagtccaatgggggaagggtggctctcccttttaaagtggcttcctcctcccaagttaagcaaggtgggataattctgaggctcatacggtcaccgtccgactacaattaggccaactaggccaattgcgtctttaccaacgggtaatagtggagga

SEQ ID NO: 7366 - DNA, 879 bp, Zea Mays
gttcgggaggggatgttaacacagattcactctggatggtgaatcgctagggactcagagagagggtcgagatagagggttatactagttaaggctttcaccctagtccagtgtagtgctgatcgtattattgctttgagagatgtgttaaagctgatgcatgtgtgggaaggagggggtcttgcccttttatagttcaagggtagggctttatacagatgacttgttttctactagtaaggacacaatttgtagtagtgttgtctttaattgcctcggcgtagccttcctgacgttgtcttcgggatcgtgcgtagttgttcaccagtcatggcgtaccgtcttctacacgggtccctgaagcgacgcccgttggtccccacaaggcagagacagggcaagtcttggtgtcgtgcgcgttgtgaccctgccttttgtcatttaaccatgtgtcatcctcctagcgtgcttaatcgtacactcgatatgatgtattgatgtgtcctactcgatatgcatgttactatggcaacgccgatgcttaggttccctaggactggtggtcatccgatcccaccaagcagagaccgtatgcggtgacgtaccgtcacgttgatagatacttcccgacacccctttggtaatgccgcgtcacatgtagtttgttaataccatgtcttatcgtggctgacgtgggtcaacagtaccggattggggtctccgcctcgctgagctgcttggtaaggatttggtcgacacctccacctcgcagggttgctcgacatacacttggtcggtacttcagcctcgtagggtaggattgctcgacagagacttggtcgctcgcttcgccccgcagggttgctcgatagagatttg

SEQ ID NO: 7367 - DNA, 655 bp, Zea Mays
tgccagctcggatagctcaacgccggtgatccgcgtgaccggagttgggttgggcgacgagattcgtgtcgcgggggagtggattttgctgatcttggaaagatctccttgccgatgggtatgaactactgtggcctcgctgtcttcaccttttacgccggcgacgtggcttcgtggccatcgccggagttgccattctgcgccgcgatggtgccacgtttccagccgttaaacacgtcgtcactagccgccctagctcgacgatgaccgccgtagcttctcaaccagtaagtgccactgtaagccgcgccgatgactcaccctgtcattccggccgtcgcgcgtcctcctcaaattcgtggccaccgctttgcccttctataaattgagggccaggccggttgtgccatgtaatccgcaagctatcgcacccactctcatccctgttcgttcaccgtagcgctgcaatttgggttttcccccaaattgaaactccacgccgccgagatagccctcccgtggccaggcgaacctggtatgattctgcgcctttgaatcattgttttagtagctctgggtacccgtggtgctcatcgtggcagcaaattgatctattcagatgagatcgactgggaacgtgagctcgacgccccgg

SEQ ID NO: 7368 - DNA, 344 bp, Zea Mays
cccacggtgatgaactgggtctgatgaaccctttctccaataaacctctactaattattaagtaagcaacagtagtctgcctttgacccgttctgcctctgactcgttctgcctctgacggtcgtacagcagtacagccccgcgcaaaaaaatcaccttgctgcggcaccagagacgttagtctgagcaacaaacaacacacaccaatgcttataagtcacgtttcgatgctctgggtggctggtatggcactaatcaaataacaccatagcagtgtctgtgtagcggtgtatgcggcccaacgattggcgcggcccattctgcagcccatcctacggcgcctg

SEQ ID NO: 7369 - DNA, 541 bp, Zea Mays
ccaagagcttccaaaaaagttgtttcccaaaacatcatattgggggctgctggcaaaacaaattcctctcaaaaaaatatcaacccacatcagaatgctaataacttgtccctaattttttttaaagaggccacatcatcattgggtaggcccaccgtatggtagcaggtagattatttgacaattcagtccgcagactgctaggtattggagttcatagtgtcaagtgtaattggaagtaggctaaacatgaaccatggtgttctttagaatgagaatactcgtagccatggtgttcttcaaaatgacaatgcttgtagcctgaacatgaacctgaactggagtatttcatacagaacctgaactgtcggcagtgttcagcttgaggttctaaactggagcaagtttcaggttcaggttactgttcacaacctggaagaactgaaacaatctgtaaccattttgtaacaatctgaacatatttatgcaaacaaacaaacaagactcctaggcctgcaaacttgtgacataattaaagagt

SEQ ID NO: 7370 - DNA, 594 bp, Zea Mays
ctggaaacttcaagtctacccatccacatcttttgcatgcaggtaggagctgctgcccggatacacgagtgccatccatgtctaccgcatgcacgcaggagctgctggccggatacacgcgcatgcacgcaggatctgctggatacacgcgtgtctaggtcaagccgtcgacggctgttctagcaccttccctgcagcaaggtgttgcatgtcagataagggagaaaaaaccatccaaagattagtggatcgtaagtaccatctgtcccaacttgtatataaatacattcaatgaatataacatggcatgattgagtaatcccttcaatttcttgtaactcacttgcaactaaacatagaggtatggtgtaatttctttagcaatatgtaatcacccccatgtaatcttctttcttttctttcccctccccttttttccctactcatatctccccctctcccaacatgtatctgtattagaactgatccttttctctttttaaaagaatcaggtgccccccgttgcattgtcaaaaaacatagagatattgcagctggtatggtaataacaagtcactcaacataaatattctg

SEQ ID NO: 7371 - DNA, 670 bp, Zea Mays
tcctcgtcctcgtcgtcgagctagggcatgagatcctcagggtggacctattgttagtggtcacgatggcgctgatgacccataaggcgtcatcgagacagaggcgcacgaggtaccaactcagcgactggaagacgaatggcacaacaacaacggctaaggcgagcgatggagtgaggggagccatgacgtagagtagacgccaggagcgcgggaagagcgccacaacacccaagagctccatgataccgtcggtgaagaagtagaaggtggacatcttgtgcttgagctctctaaacttcttgggtctgccattgatctatacccagcaccaccgactccacggccgtcatcgagcctgaacctagtctctctcgtcttctttgtctctaaacaacgtttgtgtactctaacactgtcatggtctatttcaacccatggaccacggacactaaccatacatgtggagttgagtttggtgccaaaaaccttgtagtgtcgtattgtccccccaatccacgaatcatgtatgacagtggtttcagtcagctagttatttcacaggagacatggtatgccttttgtcagcatcctttgatgtctcccttttgtcggcatcctttgatgttttgtcctctgatcgtgggcgtacggagtgtggctcgtgtcg

SEQ ID NO: 7372 - DNA, 894 bp, Zea Mays
gcttgagagcttgagttgtgtgtgaacgtgtcttggatgacttgggtctgagtcccctcaatgttgcatgcctccccttttatagttcaaggggggcatgtacaagggttctgagccccaacacgcgggcccagggacaaatggaaggatggaactactggttgccatgcccatctaatctccgtgcgccataatatccgtagtgcatacagtattgatatattgctgcagcgccctcggtaatgcgcgagtcatgatgggtgcggcgcatgccatgacacaggtgtactgttggccaacgggaatagtcagacacgccgcctgcaagatggcttgggcgccgcctgccagttgagtggacagggcgcattaaatgctgaaggggcacatcgcccgtcagcggggtagtcaggcggcgcgtcttctccacaataaatgcaagggcagcgtggcccagtggtcttacgtcaggcccatcccgcaagctcacgtcacgcatagtaggccgcttggctgcaccaggtcttcgcctggccagggaataggaacgttgtgtggacaggttcgcaccaagctgggtctagacacatgtcgcccccggaccccttcctgaacagggccgggtattttctgccccagaatcccgggatccggcggtgactagtccggaccccactcagaagggccgggacccatctcggaggtccgttcgtcatgtacgggggtctggtgctttccttgcagtaggtccggacccactgcgtgtatcctggagcacgtctctttccctagccacgtggcaatcccggggcgatcgatgtggcgcggttgagaactgttctccgcgcaacaagatacctttccgtcggcgtagtgccttcatattgtggcaag

SEQ ID NO: 7373 - DNA, 539 bp, Zea Mays
gtcacatgcttacgcttacaaacaaagggtgcatactataccctactaacggagcaatcgacttaagtcagcatcggcttaagacagtgtcacatgctaacgcttacaaacaaatggtacatatcgtaccatactaacggagcagtcgtcttaagtcggcatcgacttaagacggtgtcacatgctcacgcttacatacaaagggtgcatattataccctactaaacggagcaattggcttaagtcaggacgactaaagtcggtgtcatttgctcgtgctaaaaataaaaggtacactcaatgccctactgatgaggttaccagttcaaattgggaagtggtttagttagcacctcatgctggtttgactatataaggtcgaggacaggagctgaaacaccctcagggactagcaagcttacctctggctcggccaacaaactagcagaattaacctcgtccgggcaatttatacggacatcaataactctgatcttaggtaattcaagcagtagatcatcaggaacgacatcttcgag

SEQ ID NO: 7374 - DNA, 298 bp, Zea Mays
tggagctcgtcgagcagctcgtcgatgactggaatgggaaaggcgtccttgatggtgatggcgttcagggcacggtagtcgacgcagaaccgccacgagccctcaggcttcttgaccaacagaacgggagaagagaacgccgaggaactccggcggatgagcccctgggagagcatcgttgtgcactggcgttccagctcgtccttgtgagtcgcggggtagcggtacggccgcacggcgacgacctgggcacctggttggagggtgatgcggtggtcgcgagagcgcggtggaggca

SEQ ID NO: 7375 - DNA, 538 bp, Zea Mays
ctcaatccagagaaatgtgttttcagagtaccagcagggaagttactcggattcattgtcagctaccgaggaatcgaagccaacccaaaaaaattgaggccatcatgagaatggaagcaccgtgatcacagaagaaagtgcagaggcttactggatgcatggcagccttgagtaggttcatatcaaggttaggtgagaaaggcatgccattctacaaatttctcaggaaggtggacaagtttcagtggaccacagaagcacaggaagctctagaagcattgaataagttcctaactatgccaccagtactcaagccaccgcgccgagccacgccgaaccagccggcagaagatctgttgttatacatctcctgcatgactcacgtggtgagcaccgcgctagtagtcgagcgggtggaggaaggacatacatatccagtacaacatccggtctacttcatcagcgaagttcttggaccctctaagaagaagtatccccaagttcaaaagctactgtacgcggtactgagagcacctag

SEQ ID NO: 7376 - DNA, 1030 bp, Zea Mays
aaggaagttaggccccgacaggtgggcccagggatacaataatatgaagcgcggagcgtttcatagagctagtgggctaaggtctttatccatggtgggaaggaatcctctcttggtcaccgtgtaggctcctctagccaaactcgttttcgccacgtcttgtcagcgtgtgggagaaggctctaacataggttgcggcgtaggctggctcgtcgacttatgtaggggagtaggtgggtggtgtcatcctgtcccatctgtctatcattgcatctggtgctgtatcgggaataacaagagtcgttatgggagttacccacgtgcggcgcactggttcaatggtcttcgcctcagtaacgtgcgggttattggcacaccccaggccttgtggactacacacgctacttgcaattaatatggggcatacgctacctaccactggtgtggacaggtgcacatcctgcctttatttaatgcgggtggccctcacgtccgaggccatcgtcaagaagtgtctggcagcttccgtgataagcctcaagccacaaggcagcactgcacctccgccttgacggagagtagtggttgggaatgcacgtagacatggcagctctagacctcccctgactaggggttcgaaatgcgattgttgaggtccaagtcccatttgtgatggctcagacttgtggtggcactagaaatcccctggtcggaggttcaaatagcacacataggggttcaggaccatcccacagggatacagcccaaaatgtagatgccgagcaatctcactgtcgaagtgcgtgatggcactggtggcccagaggctagtggtcccgccaagcccaaactctaagttggagtagactgctcatcatcccaaggcttgggtggccacaggggtctcgcctagacccagcaggagtgtgtacccatatttggggtgacaacagaggccctaggcccaccttgggtgaggtggcaaacccacatgtggggccatacctgcaccttcctctagacacatgtt

SEQ ID NO: 7377 - DNA, 285 bp, Zea Mays
ctcacaaccaagaaggctgttctgtttgttttgtggagaagataaggggcacacaactaggacatgccaagttacaatacagaagcaaaagaagatagctgaggccgaagcacggcagaattagtcgaagcaagtgctacatattgcttcatgctattccccgtacattcttgagtatgtgggcaatcaacaaccattttcacaacccacaatgtcagtagcttcggcgagccactccccagctgcatgggccttgccaccaccatcggtcatggctccaacttc

SEQ ID NO: 7378 - DNA, 496 bp, Zea Mays
gggcagggcggtggtatggacggggtggaagcgagcggaagtggaagcgcgtcccgtagcttctccgtgctagctgtaacggacgcgcgctgttgtctgtgcatgggcgccgccctccccgctggatctgcagccaccccactccccgtcgcgccgattccatgagaggtctctcgctcgatctctttctcactgctttgagttgctcggatttatctcgtgttttctgggttgagttgcccgctggatcttgagttgcccggatttatcctcgcccaggggtgcgtctccgagcagcacccagacacgccgtaccagcagatggcgcacaggttccaggagtgggggctggagaaagaatggggcgacattgacagagcgtgcgggttctgggtgcccgaggacgacgacgagggtcttaacaccgtacccactcgaaggcttccaccatggcctccacctgtttgggaattctggatgtcaatgaagattactg

SEQ ID NO: 7379 - DNA, 438 bp, Zea Mays
agatcacatcaatccctttggatggcaagacagttaggtctgccaagaatactaccccacttaaaaggatcctgacttgggagcatttgagctggcatagaaggtcggaccctggggttcgggtgaccaagggaatccctagaggagtagagggaatgccatgtttctccacaaaactagtggctatgaaagagtgggatgctccagaatcaaaaagtacggtagcgggagtaaattcaacaaggaactcaccgaggactactcccggagcttgctgagcctcctaggcatcgacgtgattcactcgtgcccttccttgatactgggtcttgttctgctggctgatggaggagggcgccttgggggcggatgccgaggcattcttggggccattcaccgagttggagtaggcgggtcctggtggcttcagctggggac

SEQ ID NO: 7380 - DNA, 929 bp, Zea Mays
cagagaaccagctcgatggtccggtgccccacgagcttggcggcatcggaggcctccagtccctttacctcttcgcgaacagcctgtcgggtgtgctcccacggtccctgtacaacctgtcctcgctcaagaacttcggggtagaatacaacatgctgtctggaactctccctgccgacatcggcgacaggttccccagcatggaaactcttagcttctctggcaaccggttcagcggagctatcccgccttcggtctccaacctctccgctctcacgaagcttgacctctccggaaatggcttcatcgggcacgtgcctcctgccctggggaagctgcaaggcctcgctgtcctgaacttgggcaacaaccggctagaagccaacgatagccacgggtgggagttcatcacttccctggcaaactgtagccagcttcagaacctgatccttggcaacaactccttcggtggtaagctgccagcttcaatcgccaacctatcgacggctctcgaaactctctatctgggagacaacaggatctctgggcctattccatcggacatcggcaatctggttggtctgaaactacttgagatggcaaacatctccatctccggagagatcccggagagcattgggaggctgaaaaacctggttgaactgggcctttacaacaccagcttgtcaggcctcatacctccctcgctcggaaaccttacacagctcaacaggctctacgcatactacggaaacctagagggacccattccgagcagcctcggaaacctgaagaacgtgttcgtctttgatctgtcaacaaatgcactcaacggttcgattcccagaggggtgctgaagcttcctcggctttcctggtacttagacctgtcatacaactcgctatctggtccactcccagtggaagtc

SEQ ID NO: 7381 - DNA, 1105 bp, Zea Mays
tgttatcttgtatcagtagcagcgaactttgttaccttggtgaatggaatgccacctaagaatgtgcagcaactagtgaaacccatgcccatttggatgtcatttttgaaatacgaaataggtcatccaatctttggattctgaaatgaatcaacagttcgccaaaaactagtgttcttttctgtcttccacaaagctgttgtttcggaatttgaagccacaaactggtgctgcattatctgttttatgtctctacaccaagcactacgcctggagactggagtaatgttatgagcactaaacaagaaattgctgtattaacatcttgagggacaatgcacaatattagagtgaaacctgagacctatcaaggggaaatcctgatggattctacagactacatgtatctgccattcccattatgtatccgtatatcgactcctcgccaggtgggatctcagagtccagctcctccttggacacaccctcattccagtcatcagtataatgcagacatggagactgtttggatgataccaacatggcaggcacaggccacctgcagttcagtgtagtacgtattagtttatccaaaacacattaactagcttaatagcatgtctcaggatgcctacttgtttaaccgagctctgcgatctgtgtccattttccaacttccccagcctcgatgtcaaacaccgcaaatagatctatcacacaacattatgcttgactcttaacgattggaatcacctcattactgcccaatggatgtggtgcagcatggactcaggatcatcaacagctccccattgccccaggacggaacccgagagcttacctctgtcttgtagctcttggttgtctgggaacacaccactagttgcagccacaaaacggtcaagcaaaaccctcataaatggcataggcgccagtgccacagccagctttgccacgattgtgtttgcacagctccattgacagtcatcgatcctcacgctgaaggtaccatcattttgttctccttgacgacccaatgctgaactgagagagcagtctttcaatccaggtgttcgccttcctgacataggcacaccgatcactc

SEQ ID NO: 7382 - DNA, 501 bp, Zea Mays
ggagatttagaggaaggaggaagccatggagagggaagaggacggctgcccaagggaaagagaggaagagggagggggcagcggccaaaggggtggaaaggttggggggcggctgcaacaattgggaggagagggggtcgactagggttgggaggagggggggctcccatccatcggatcgagatcaaaaggcccgaacacgctctcccactgagctcccaaccccagcagaaaaaatgccaaaagtctactgtttccctgagtaatgcctcctaaaaccccaaaccccaacgccacagaacatgaatgaaatagaaaaagaaatttaacttcttttcagaaaattgggatatcacactctacccccccttcaaaagaatttgaccactccaagcaaagcatccaaggtaccccatatagcaccaccattcaaaacatgggtccattattggtcttaattaacataagaacttctacctcggactaattgtctaaggaaac

SEQ ID NO: 7383 - DNA, 369 bp, Zea Mays
gaagaagaaccatgggccgttgatctatccacagatgaccaagattaaaagatgcgcttaccctttcatgtgatcgaatctgtgtcgtcgatgtcaatcgaacggttagagtcgggtcttgagcaaatagcatccgggcgatcgatctcagatccaacgttcagtattgagtcgggttttagggttggagttgggtctcagatttaatttgggccatgggaatcaaatcggatggttcatgttggctcgtacccgttcgcgctcgctgttttgtaaaagaacccctcaccttttagcgaatcaacctgccgtccaccgcgggtaggtgttgagtcttgggtactttttgcgctagcccctggttttctg

SEQ ID NO: 7384 - DNA, 478 bp, Zea Mays
aagagattggtatggatttcatcactaggctgcctcgcacccagaatggttatgattctatatgggtcattgtggatagattgactacttataagtgatctcaattggctgagttatatatggcttggattgtgtctctacacggtgtaccgaagaagatcattttggatagaggatcacagtttacctccaaaatttggaaaagttttcatgagaatatggatacgaagttgaattttagtttgccctaccatcctcagactgatggacagaatgaaaggactaatcaagtattggaagacatgttaagagcttgtgcccttcagcatggtagtagttggacaagagtctaccttatgctgagttctcatataataatagttaccacgcaagtctgaagatgttaccgttcgaggctttatatggcaggaagtgcaggacccttctatattgggatcagactggagaaagacagttc

SEQ ID NO: 7385 - DNA, 420 bp, Zea Mays
ggaggtggcccggaaggagaagaggctggccaagaaggaggagcacttggaccagagggaggaggtcgtcacggagctccaggccaagctaaatgccttcaacaaaatccgggaggagtagcgggtctagcagaccgcggctgtggagagcctgcaaaggctgcagtgagagttggatgacaggcccagcagcattgccctggccaaggagaacctcaaggagaaggatgcttccctggataagcggacgacggatctcgcctggcaggagaaggacctcgccttcagggaggaaatgtttgaaaggcggtagaagctgctggccaatcatgagctcgaggcggaagagaaggagcgggcgctggaggagcgggtccgccagttactggcggcgcaggcagcaccggccccccaagcggc

SEQ ID NO: 7386 - DNA, 293 bp, Zea Mays
cgcagtaagtataactagatggatggggttctcaccggaggttctggcgttgtggtctgttcggtgtcgaagttcctgcctggtgaggaatcggcctcgctcgatctcttcgcacacacggtactctctctttctgagtgcgacagtgaacaccgcctcccttgctggattgcaagcgcagcagcgaccccgtggtcggctttcttccttggtgcgccaagaacatgaggtaagcgcggcgggtgcaatgattacctctccatatcagttcacgttggtggcatctatggctc

SEQ ID NO: 7387 - DNA, 532 bp, Zea Mays
gtgtttggccagggctagcgtccagagcgtggtcgaacacgcgcccgcgctcgcccccacgcactgtcggcatagccatgcccgctcacaccccgcacctataaagtcgacccggaccctcggtctcactctccgcactctctcgaactgtgcccgagccttgcccgctagtgaccgcctaagcacagtgagctccaccacctaccatttgtcctcgagtagtggccactgtggttcgcccactccagcccctctccacccgatcgagccccaccattggcttccccagaggccagtcaaactcctcgaagctagaacccgaactctacctcgccggaacagcgcaaccaccctcgtcagcgcacgtggccaaaaccatcaagtgaactaatgttcgattaattctgtacatagcatctgtaacacctagtgaagctccatttaattgaatgctaccatcgtgtataggacagagcagacgctgacgacgaccaccaccgcttgcgctcgtggctagagcgattacaaaatc

SEQ ID NO: 7388 - DNA, 432 bp, Zea Mays
atccggaataggattttggagcgttacaccctctaataggaggattggtgaagtcgtcttcttgctttaggggtaggggtggtggccggtgggcttgctgatttgcttggggaggcggtgggggtgatagtgacaatctttcttggtaatggagttgtgggtgtagcggagcctctgattgtagttttactgttgtggatggtattggtgttcgcttccatagtgaggattatggtattgatggggatggtaagtatggccgatggctctttgattatttgcgggggctaccctggccatgcgctctttggtttcttttgtctccgggcagtccctggtatggtggtttgagtcctcgccatggaaaagatagcagaacttcctgggctgctaagggcctctgcccgccctctacctcttggtgcgccgccg

SEQ ID NO: 7389 - DNA, 407 bp, Zea Mays
aaacgtgccaccggaggttgcggcgatgggaggtggtgcagcaggagcggatgacagaggaccttatggggagttgtatccctttggagcccctccttgcatgaacatcgcggatgatcgtcctcccgaagctagcagtggagcgagagcagacaaggatgtagaggactagattagtatagtagtaggttgtttccttatgtagtctaaataaggaaaaatgagttgtataagttgagtatgtataattagaacaagtttggaataatgtaacaaaggttgtgtagttttgatgtgtaataatcaagtatgttttcttctccagatgccatcaagaactcatggtcatgatggggctagaacttctcgaggtggggaggaaactccgatcccactgcctgtacctc

SEQ ID NO: 7390 - DNA, 851 bp, Zea Mays
gtgcgctgttgcctcttccccttacgacttcaacagacctcgcgcactccccgtattcaccgctgcttcttcggaaatccgttgcaacggcgcgagctgccgcatccgttggtcagcgcggactcctttcccccgtgctatacaaatcgggcgtcgtgtttcccctgcgccttccctcttcatcggtgctcccctacattttccaagcgggaacgtatctcatgctcacgcgatgtccgtgctcatgtgagcactttaaatcgtgagtgttccttcttaatccaacgattagtgttttttattcacttaagccctcccacctcaacgatgagtgttcctggccagcagcctgatcattggattaagaagaaacactcacgatttaaattgctcacatgagcacggatgtcgcgtgagcacgagatacgttccctttccaagccgtgcggaggccgacgccaccagagaatcgaattaccgagtgagagagggagggtaacgcggttgccgccatcaacgcgtgcgcgtagtgcttggcgcgggaggctggtaggggagtccttcactgacatcgatttggacaacgctggcctcatcacctggtgatttctcgccgaagctttgggctccgccgcgctccgtgggtagagttatgcgtcgcgctaatcaaggtaatgatgcctacctagagttctccatgtcctccttcacgtgtctacccatcgaatcaacgtttagggcagaattgtgtgtggtcagaccgcgcggctatggcgccgccgtgccggagctggcgcgccgccgctgactgatgtcgggggtagaggatcgcatctggatcattgatgcaa

SEQ ID NO: 7391 - DNA, 1143 bp, Zea Mays
aaaataatctcgtccccgagatttaggaagatctaggaaaaaggtgaggaaaatctatacgaagctcttcttctctttcccaaattgcttcatcttcaccgtggtgactccattgcactttgcacatctttataaccttattcctagtgactcgagtcaaagtatccaaaatcttgatggggtactcagtataagttagatcctcttgaacactaaggtcctccattggtaattgttcctcaggtaccctgagacatttcttcagctgagatacatgaaatacatcatgaacctccgcaagatggtccggtaactccaattgatatgcaacttctcccactcgctttaagattaagatgggtccaataaagcgaggggacaactttcctttgactttgaatcttctcataccccggagtggtgacaccttcaaatagacataatctccctctttaaactcaagcagtcttctccgggtgtcagcataacttttctgcctggattgtgcagttctcaaattctcccgaattatacagacttgttcttctgcctcttgaataagttcaggtccaaagaactatcttcccctagtttgatccaatatagaggagtcatgcatttcctgccatatagagtctcgaacggtaacatctttagactggcctggtagctattattataagagaactctgcatatggtaagctcttatcccaacttccaccatgtttaagagtgcaagctcttaacatatcctccaacacttgatttgtcctctctgtctgcccatccgtctgaggatggtaggctgaactaaaattcaactttgtatccaagctctcatgcaacttcttccaaaatcgagaagtgaactgcgatcctcgatcagacacgatcttcttaggtactccatgtagacaaactattcgagtcatatacaattctgctaatttggctcccgtataattagtcctcacaggtatgaaatgagccacttttgtcaatctgtccacaattacccaaatagagtcatacccagcaggggtgcggggtagtccaacaataaaatccataccaatttcttcccatttccactcaggaatcttaagcgggtgcaatagtccagtgggtctttgatgttcggc

SEQ ID NO: 7392 - DNA, 675 bp, Zea Mays
aggggttgatatgcaacttgtgttcaatgatactccggctaactccgaccaggtccgatgacgaccaggcgaagacatttgattctgcgtagacagtcgagcaagttggtctcctcttgtggggctaggccttcacctattaacaccgcatggttggggagggttgtgtcgaggggtaattttttggactctttgtcactctgaatcaggatttgttgcttatttgccttcagcgagggatctgggttactggctagtgcgttagcgcctagacaatgtacattttgatgccctaggatgaagtctcttcctatgttatgggccatctgctgatcactgaagattgtgatgaccccgccgggtcttgggattttcatgctcaagtacagtccatgaattgccgcttcgaaggcattgatggccacatcccaataattgtgttgtatgggtacaccatgtcaatgacgtcgaaggtgatgtgttctgttcttgcgtttgcaccagtgccgaaggacaatggcaaaacagtttttccaagaggtagggtggtcttcccctgaatccgaatagtgtgttatctatcggttgtagctgtttcgggtttatgcccatcctctcaaaggcatgaaggaaaatgatatcatcctgactgcgttgtccatgagggctttgtga

SEQ ID NO: 7393 - DNA, 578 bp, Zea Mays
tacaaagaaaaggacaagagtctagcaaggatgataagggaccgtgatgactatgaggaaatgatgcctcaccaactatttgcaaagattcaacaacatgaatctgatgaagccccaatcaagacaagagactctcatgccttgatctcaaatgaacaagacaccccaagaagaacaaagaccacaaggcaaagaaaatggtcgaaacatcaagtgatgaagatagttcgagtgatgaagacacagctatgttcatcaaaaccttcaagaagtttgtgaggaaaaatgataagtttcaaaggaaaggaaagaagagggcatgctatgaatgtggccaaaccggtcatttcatagcggattgtcctaacaaaaaagaacaagaagcaaagaaggaatacaaaaaggacaagttcaaaaagggggcaagaacaagggatatttcaagaagaagaaatatggtcaagcccacattggtgaagaatggaacttcgatgaagaaagttctagctccgaagaagaggaagtggcggcaaacgtcgccatccaatctacttcaagctcgcaactcttcaccaacc

SEQ ID NO: 7394 - DNA, 533 bp, Zea Mays
atctcggtcatcctccgtgcagaggttgagatcaaggctgtccaacatcgtgacaggtgaagacgagaaagcttttggggaggagaaggagaaactaccgaacagaggaagaagaatagcaaggtatggaggtgtctattctccttttctattccgtttgttacaaggcagtctcgccaatatatgccattcgaatgggtcacacacataatcatgtattacagccaaatcggtccaacaagcctaaactcaagcttcaaatatccagcacgccagccaccagaactactctgcattctcctgttgttcttcagtcacaattgtgacaggaccccccatcgaagaaccatctgcccccaagatcgatactgcagaaaccatgccttcaggacattgaaatcctcccatgatgccatctctggtggtagcctagtccatttgactaaaatttgaacaatagcagaattgcccttcttaacaagttgacgctgcaatatctgcggtgatacaactgcatgctcttcgaagacatt

SEQ ID NO: 7395 - DNA, 403 bp, Zea Mays
ggagggtgaacagctgcgggcggtgccgctcctcctcgcgacggtgaagtcaccggagttggggcaggcgcgtgctagggtggttccggggtcgccgggattgagcagagagggagagaatgacatggcgaactcagtggcggggaaaaggccacgaatccgaggtcagagagggagaaatggtgggggaaaagcctcgggcggaccggaggaactctggtgagggaaaaagcccattgcgacgtggtcggaccgttggtgtcgccgtggaaactcttgtgacctcggttgtgccacgacgtggcttgttaatgtgtggtagtgaccgtggcgcacttaagagtacaatcgtggagccattgcgccggtgaacgccacgaattctttgcaccggtgctcttcc

SEQ ID NO: 7396 - DNA, 1067 bp, Zea Mays
ccctgtttggcaagcctgctacttagggtttgattgtatgtgtatgaactctgtcacacacttcctacaagcacaaacaaccacacccgagaacacaagcggaaatacaaatacatatgcagtatgaataagcacgaggcaaaccaatcaggagacgcaaggatttgtttgactagagaacgggccaccacaactccacaaggcgccctacgtctccattgtggaagtcagtgagggacccatcaaggtctactcttggtcagacttgaaataacctctttccaccaatccactaagaagtcttctttccactttcagtgggaagactagcctttcttacaagaccaacgcaaacagcctacacaccctcgggtcctgctggtgacattttcccacctaagaacaaagttccaagagaaagatagcaacgaaccaaagatcttcgacttgctcaagttctcgaggatgggataactctcaaagcttcccaagctctgtattgccacaaaggcaagctcacgaagtttgggacaccccctaatcaaggtttaagctttctctattcaaacactcacaaagagagggagaggaatgcccaaggactattctggtcgttgataagagtggggaggatcaacaacatgaaatggtgagtggaagaggtatttatagccatcacgccaaaactagttgtttgagtttgagttgacaaatccgacctagccgggtattcaaaccgactagccgttggcccagaagttggtctggtcgggtttgtggttggggctaaaattttgagtggagttttacttactctctcttactcttgggtttatctgaagcaccattttgcatgcctcgatcttggtgaaacatccctcttgatagtgtggcaatactcaactcacaaaaaataaaaggatctgaaccaccatttgagtttttcttcaattcaatcttggttgccatttttactattgttattttgagggtcttcattacttcaacttcttgagcttgtccatcttgagcatgtgagttgtgtcgaaggtttcaagtcactttga

SEQ ID NO: 7397 - DNA, 301 bp, Zea Mays
tttatataggtgaatatgagtgaagtgtgtgtttggtttgaatttaggcgaagaaaatgagatttgggcactcgactcggaaacgatcgctcgaaacggggaatttggtaaaattaaagcctggaatatcggatgggcgtgaaatttggcgaatatgttactggaggtgttgtgaaagtgcctgaaaaatttgggttcaattggagcattttggctagtttaggcatttcaccgagcatgtggtgtgcgaggattttagggttttggagaaatggttatttgaggctgtgaaaccctccct

SEQ ID NO: 7398 - DNA, 709 bp, Zea Mays
tagaggacagcgtgcacaactgtatgcacgatctgctggacacaagcttagccaatatagaatacacaaactcaacttatgtcctaaaccctaaacaccatcttactttaatgatgacaatttttctaaggtctattcctttgcttaaataaaagattgcatgcaaaataaattgcagttttattatcaaacacgtaaaaggctaccaccacactttctgcttctctggttgctaggtgtgttgggactgacaatgagaaaaaagataactcatgttgttctttcccgcacatctatatcgccggcgaaatcgtcgtcactgagcccaaccagatgagcttgttccttcttcctcccatactactgcctccaatacttgattcctgcggaatatgcttcacctcagcaaggtgatctttatacgaccctacaaaacggctcacatagccagcaaagaatgcaatatcatgacgggtgttaaccaagtacatgagacttgctgcagtgatgtcagtggtttctcgtttgcatcctccaccgccctgagccgaccggtaaggccttcgacagtgagtgtccacacatcaaggagggtcgtgatcgcttccacgatctgcttcaaatgttttggcgcactacaaatgatcttgttaaccatagtctcctccaatttttcgcccaaggtagctagagttgcgaccatcccttt

SEQ ID NO: 7399 - DNA, 397 bp, Zea Mays
aggagtggactgtttctcggctctcgtctcgtcgaccgcgtgctgggggttttgccgagccgttacgaggagtgaggtgaggggagtggggagcgcgagtgcgtgcgagggcggcgctttgattttccccaggcgggtgtgggatgggtaggtaggcaggcaggcgagagtggtcgctggctcgctgccccgcgtcggacgcgcgcggccgggggaagagaagaaacaggaaacccgcgggcgtgtgatgaacaaaacaaacgcgtcgccagcgccccacgacgacgaggcggaggcggtggtggtggggcagggttcgtccctgggcctgacggccgtccctatctggatctgggattttataagtgtgtgtgtgagtctgagaggagctcgcgtg

SEQ ID NO: 7400 - DNA, 599 bp, Zea Mays
gggcgtcgcagcatgaggcagtagggttttgtggtgccgtctcatggcaggagagcagcgccacgctggtgaagtcaagcccgcaactcaacgaggagcaagcaggtgacggaggcaacagcagcagcaacatgatggtgacgagcagcgaaacggagggtgaggccatcgataactctagtatgtactagtgggtagggtagtggcgattgtgacgcgaccgttcctatcgattgaggtagtggtccattttatagcccatgcaaatagtcgggcgctgctacgtctatgtaggccatccctctctcgtttgatcggggacgcagagcagagcagagcaacgcagagtagctagctagcgccactctcatcactagtagtactatcgtacaaccagcccagcaacagcagactctcatcattatcgtaccactaccagcctagcagcagcactgcccgccggctacgctactactgcattcccgcatgcttgatcaagttgtagctgtagggagggggaataacatcacaggagagctgaggtggagcgccgagacgagtggatacacgtcatctccatttcaccagtgctgatttaa

SEQ ID NO: 7401 - DNA, 399 bp, Zea Mays
ccaattctaccactcataatcgggttttgcaacatgtacttgatcacatcagtttgatgacaatggtgcaatgactagacagtaaataacatctacacttggtgcatgcataaaacagacataagcataacttctcgataaaagtgtacctcgtttcagcatccaccagcctccgacttaggtaggttaccacatgctcctttcctccggtttcttgcgtcagaacatctccaataaccttatcttcaactgcaatgcataatatgaacggtactccaacctatggcgcttttaacacggcaaccgaagacaaatactttcaaatgagatcaaatgcttcccgttgttctgctcccaagtgaattcgacatcattttaagccgaaggataggagtgaag

SEQ ID NO: 7402 - DNA, 510 bp, Zea Mays
gacggtcctggacatcgccagacagtccggaccattccagtggacggtccggcaatgcccaggaaccacgacgaccgcgtaccttcaaaccacgacgaccagaaataggtacgtggaaaactaacacggtaaaggcagcttgccgactggtcagattagatccggcatttgaccaattattgtctaaatatgtaaaaaagaaggccggcccaagtaaccggccagcaaaacgacctcgctcacccactcaagagggatagcaggcaagaccaattgggccacctcacgaatcggaaagaatgagatgtcataatgtccagttacgacccaacatacctgcatggacacctccacccccatatccacctatgccatatcaatatacatacatgtcatcgccatatgccccaaatcaaatgtggggcatgccaccacacccatttgggatgccccagtaccccgcttgggggacaccccaagcatctgtattcaacagggtgacacctccag

SEQ ID NO: 7403 - DNA, 449 bp, Zea Mays
tcgagattgaaaaggaaagaagagttgtcagtagcttgtgaacccccattcagatctgaaactaactcgagttgtgattccctattagcagaagtcttcctagatcctatattgtgggccaagagcaccatcagggctgcgataacagtgagaatggaccaaaactatggtgggcaagagctatttgcccagaacccaatttgcaaaattgtgaatgcatatggaagcatgaaacatgtatgaatatgcacgtcgtacctgcgaacacatcgaagaagctaatgtccctcctgcaagaactcgatgacgcattgcctatggtcaggttttcactaaaccccatgcccatggccccctccctctttattagtgatgttcatgttctcctcccacctttcatactttgatatagcattcagatgtgccgcctactccctcttcaatatctc

SEQ ID NO: 7404 - DNA, 312 bp, Zea Mays
tctgggctcagcagcaagatcggcaccagaaaactcgatcctttggatttccacccaagggaccaagcttcagtagaccagctggacccaccccatcgtggttcagtcagcagagtcagagctcttttcatgccccctcagttgcaagcaaccaacccccggcgaatgcatgttggcactgcggagatcctagtcacttcaagaacaactgtccccagctgaagccatcaggacctgcctactccaactcgatgaatggccccaagaatacctctgcatccgcccccaaggcgccctcctccatcagccaac

SEQ ID NO: 7405 - DNA, 479 bp, Zea Mays
tgattcagttaaaacgatggttatttgtggtgcctggtccttatggtctggaaggaatgctagaaggtttgggcgtgaccgctggaatccatacgctgcagtgagttatgtggcgaaaatgctggaggatcttgtttgtttaaaagtgccggggccgcaagcctctctgcgttgccgggttaaatggaaagcgccattggagggttgggtgaaaattaacttggatgctgcttttgttgctgagacgggcaaaggggctgggggtgtggtgatgaggaactcgcagggagaggttttggcggcagcaacacaactatatgaacacatccctgatgcgctaaccagtgaagctttggctgctcgtgacggcgtggtgctggcccagatgcttagcgtggaaaaagcgattctagaagtggataactctgtcctggtggctcttctccggtctgaggagggaagaaggagtgctatcgcag

SEQ ID NO: 7406 - DNA, 694 bp, Zea Mays
gtcgagaagcatcacaagcacacaaggatgctaaaacaagaacaaggagggcgtgataggacctgtgaagggctgaacgtggcgagctcacacacgcggtgttcttgaccgattttggggaaatctcaaattggggcacgctggtggacgatctggggcacgggttggtgtattgggtgtgtgactacctagcggagccgctggcacgctcaatttataggacccgagggaggtggcccatgaatttgagatggcgcggtggtggccggagagagggactgaatcactggcgcggtgaccgtggctgttaccgtggcaaggccttaggcaatagaagggctgtgtattgtgatcaattgcgacgtgataagatggctgacggcgtggcataaccacgaggaacgatggcacgacggtgagggtcgcgtggccatgtcgccggtaagtggatgagcgacagagtggctactgtgctccaagttcatccacggcggaatcttttcacccggggatcgttatctccgtttaactgggcgtgaatcgcggcgccggcgtgaatccgagcgcaagatcatcaacggcgagggggggctgaacctgagatatttctacggcattgtaccatcagaaccccattgagtcagtctgacaaggtcatttgtagggcactaatctctgatttctatgtagcaac

SEQ ID NO: 7407 - DNA, 323 bp, Zea Mays
ttgccgttttgaggggaggtgcaaggatatgacatccgcagctacatgtcgtgcaagagaaagaaggcatgagacatggagttatcgaactcctgcccgttgtcacactgaacaccccagatggtgcaaccgaactgagtcaacacccatgcgaagaagtgagataaggtggggaaggtgtcagacttacgacggaggggaagagtccagaggtagtgagagaagtcatccatgatgaccagatagtattggttaccggaaaagctcggtatcaaaggggtgagcattgtgggacatggaagaggtgaagggtaagtgattgt

SEQ ID NO: 7408 - DNA, 635 bp, Zea Mays
taaaacaggcaacggcaacaaatgaaacaacaacgagcaaaaacattgggacagcacaactgcatatgccataatcatgtaccccccccccccctccttatgattcaacaataattcgaagaagaaaaaaaaggattccaaggagacatacaagcctgaaatagatttagattgtctatataacgtactcatctacaacaggcaataatatggtctaataatatgatgcaaaacatgccttccagtaggaatagtcattttgtaatgtcaattggcattcaagaaggaaaccattgtggcggagcatgacaaatagtggggaagaactcaaagaaattggtcacaggtacctgagttgttttcccacatccagtttctccactaacaacaactacatcgttctctttcagcaactgtaggaagtgttgcctctgtctagctattggtagagaagctcttgcttccagcattttctaaattcaaggtcaaaacaaaaaaccattagtaacaatacagaagaagcagtgcttgattctgaacaaacaaatattcttattagtttgcaaatccattgcttaccaagtaatttggtagcttccttttatcttccaactgctttttcaaaattgcactct

SEQ ID NO: 7409 - DNA, 406 bp, Zea Mays
gcgggatcaatggacatcatgaagtgttcccgatgatctaaggggttctagcctaatcggtcgagtcgagaagcatcaggggcacataagggtgctaaaacaagagagcagaggatatgatcggacctgaagcgcactggccacggtgagacccttcttacggcggcggaaaaccgatttgggggaagtgagcaattcgggggctctagtgagtaattggaggcacgagtgggtgtgttgggtgcataattacatagcagagccgagggtgtgctcaatttataggacccctgaacggtggcccatgaatttgagatggcgcggtggcggctggagagaagggggtgcactagcgcaagcaattggtggctttcaccgtggcgagctcactggcgatcaccggacg

SEQ ID NO: 7410 - DNA, 760 bp, Zea Mays
tgatacccgttaacagctatgtcaccaaagtaaaacattccttcagacaacattggacgccatattgagagcttttttggtgaagaggtcccactatttgaccaaattagtttaaagcttgccacagcatcaaatagccgacctgaggtcaattctgatctctctagttgagagaaatcatttctactatcttgccttctagagacagtcttggaagatgagtctgcactgtcgaacagcatatgtcgaagatcataagcattcccatccacactcatgcttgcaggatctccaggtaaaaaggaaccaaaagcattatcaactcgccagaatatcatgttagtgttatccctgaaaaattcagttaaaggacataatgcatgagtgtgaaatatcaaatatctatagccatacatcaaatacagaaacaggttcaggtaatatatatttgacctcagtgcaatgcaatcccttagattacatgatgaaaccaaagaagcagttaaacagaaagctgaagacaaaggtggttcagcagttccagatgaagcaacacaacccattgcaacataacccgcaggtgccacaggtaaccaaacagagcagagctggtcaatattagagatcttatcctccaagtccttctgatgaaaaatgtttgttcttggagaaccagattgccacactagtttgtacgataaaggccttttgaccctaacaatgtttgtgttcagagcaagaactcctttagtaggaggct

SEQ ID NO: 7411 - DNA, 1100 bp, Zea Mays
tccgagtttttgtttttgcgggggcttttgctggtatattacatggctcggcctcattaaaaacctcaccccccaggaggaaaagagtgcgggccggaataacattgtttgctggattacaagggcgcgtgggccctgatggttaaacaaaaaatttgcagagattttcaatgttccaggagtgctctaagtcttcaccggaaggcgttactagcctgtacgcgctggggggatgcctttgacttgacgatgaatggaccctcccatttcggctccagcttgccccatgattctgtccgggtggtccagacgagtacgaggtctcctttgttgaaatctcttgggacaaccgcgttgtagcaccaggccttggtttgagcctgatatttgttgagggcctgtagggcgaggacacggtctctgtcgatgagatctttggacgttggttcatcgacatcggggactgctgacgtgcttgttcggggtgacccatgctttatctcttgcggcgtcatggcctcggatccatacaatagacgaaaaggtgtgaatccggttgcctgacattctgtcgtgtttagggccctgaccacttcaggtagttggtcgacccatttgcccttcttgtcatcgagaagtcttttcttgatggcagtgaaaatcttgccgttggcacgctcgatgacgtagttggattgcgggtggtataccgaggcgaagacaggcttggtgccgatggagaaacagaaatccctgaagtcttggctgtcaaactgtttgccgttgtcgactgtgagttcggacgggactccgaatcgacagacaatgttttgctagaagaacttttgggctgtcttcgacgttattgtggatactgctctggccttgatccacttggtgaagtactcgacggcaacaaaggtgaatttgaggttcccttgagccgtaggcagtggtccgacaatatccagcccccagcattgaagtggccatgtgtgggtgatcagcttggtgaactgtgaagggttgctcgagcggggggggggggggggggaacttctagcatgcttcgcaagaccttgtgacttgattcgcagtac

SEQ ID NO: 7412 - DNA, 1138 bp, Zea Mays
ccggcgcctcaagaggtctcctttagacatgtccaaaccatctcaaccgatgttgaatcaatttctcctcaattggtgccaccacgaccctatcggctatcctgaatatctacgtttcggactctatcccttcttgtgtgccgaccaaaccaatgtaacatgcgcatctctgctacactcagttgttggacatgtcgcctttttgtcgaccaacattcagcaccatatagcatcgtcgagcgaatcgatgtcctatagaagtagtttcatagcatataattgaacatacacataatacaattagtaaactagatcataactcaagctggtcgcttagtctctgttgccgcaccgagaatagggtagggaaactgggaaagtcggtcgtcgtcgcacaaaccaacatccggaggaggcagacgctggcacgcagcctagcatgttgtcatgctcgccaatgaagcaatgatgggcatgctggatttgtgcgttgtgcgttaggagggtgttgtcaacatcatcacaatttgccaatattttcacgaatggcctcccctcaacgatgttttcggagcttcgatctagctcaacatctcttgtgactagatttttgactgcgggggtgttagaatactaattgttgcctatatgtgtattagggtttatatatattgggcccgaccaatctcgtgcgtgaggttgggtctagctcattggcgcatagggtttccctagccgcccacctctacgatcatatatatactcccctacacatgaatatatgcacctaattctgcagcaatacctcctctgacacaacattcaaatgatatactcataatgattaacctggaacaaggactggtagaacatatagcttcgacattttttccgccacggacgaaccgaatttctatacttgaaagcaatgaaattacaatagtttgtaacagcaaaataaaaccgtaccaaacctaagatgaggccatgctaaaatgaacacggagggttcacccaacatacatgcgtcaacatgagattgctattttaagtacccgacatcttgtcatagctagatagaacagaatagaccagagaacaaagtaaactatagctacagaggacatgttgcagcata

SEQ ID NO: 7413 - DNA, 506 bp, Zea Mays
gcggtgagggtgtctctgcggtggcggaaacttagtttgggggaaatccaaaattggagctctcgggtatacgattgaaggcacagtttgggtggcttggtgcttgactatcctacgaagctcacggtggcctcaatttatagtaggcaagagtggtggccattgaatcagacgacgacgcgcagcagtcggaggagtgggaggtcactagcgcaaggaattcgtggcatctaccgcggcagccctcaccggcgatgatcagacggccaaagtgagtcacgacgatgtggtgaatgtgcctaggtacgtggcgcaaggccgtgaatcggctgtcaccggcgagctcatccgaagcggccgtggcaacacggtacggtggccggagtaaactattggttggaagatatctacgacgacgatatttactcaaccccgagcgttatccagtcgatccgatcacgaatcacggcggcgagggcacgaatctacgcgcggctcgtcggcgg

SEQ ID NO: 7414 - DNA, 444 bp, Zea Mays
tgtggaggtatccaagaactaagaattcaagaaatttgatgttacttcaacaggtaggagttattcttgaggtcctcttcctcttccaccgccacctatcaccaatatggtcacaccagtgttgcctgcccagaaatcaataccccccaaacgtccaattatggaagattgtttgtcctcacccttcatggaggccgccgtcgacgacaccaagtactcagtggagtcccttcacacggattttgccaagtggtcgtctccaaccttctgtccaatgcctggtccagtacatcctgtggtcggtgtgctcgacccctcaccttcagttgcagagcgtccaccggctgccgcgtttcggaatgatggccccaatgggcaccgccttgtcaacaatcgttgggagaatgggtttgggcatgtatttacccacactcacctcctgcc

SEQ ID NO: 7415 - DNA, 754 bp, Zea Mays
cggctgtgctgcgcgtgttcctcccatcaccggtggtcaccgcgttcgtccctctgcaacgaacatccggccaacgatccaggcgcgttcgtccctcggacatccggccaaccaacatcaccgcgttcgtgagagaccctggatcgagtctgcgtgccgccatcgaactgctccctccctctgcaacgccgtcggccaagttctctccatcgacggtgagtcccccttctcgctccgttgcatttttttggtggtgcgcgagacaacgatccaggcgctgtcggggagggagacttgccgctgggaggcgcgcagactcgggcggatggtagaagaaggctgggtgccgacctgggaagacgaagacagggagtttggggagaagaagggtttgcgccgtttatcgggggctcgaacggcgagctcgggtggtcgctgccgtgtctttggcgctcggccgcggcgggttggctggagaaagaaaagagagagaaccggtgaggttgaagacgccagagcgaccatagatccgtaaatggacggtggcgattggtttgagccataccgttttagtgtgtccatctaagccgttaaattcgatccagaccgccctggtgggatcacggttccttaaaattctgagccttcggatttacatcggacgggttgaattgcataccggttcataccccttcgccatctaatctcatccgctataattagatcgtgcatgtcaccagtcggctaggattag

SEQ ID NO: 7416 - DNA, 271 bp, Zea Mays
cccaggttgtcagcctcgctctgccttcgcgcgcgctcgcccgcgtattccttctctcgctgacatgtgggcgctcctcgtcaggtccatctccctcacaaacaactcccgctcgttacgctgagaactccgagctccgccgcccgaacgcttagcgagctcgccgcggaatccgcgattcgatcctctaactaaccggccgaaatcctcgttgcctgcccgcccctatttaaagcaccggttgaggcattgccctcaccccaagccgacc

SEQ ID NO: 7417 - DNA, 594 bp, Zea Mays
gtgggtccttgccgacagatctatcctctccacggagatctcgctcgccgctgccagctcgccccggtaaaccctccaacgcctccgtgcatggcgcacccgcccaccgttgaccgtaccctggccatatataccgagcacccctatctccgctccatggtgccaagtccttgcatccacaccaccgtcccagcagaacgaaaccgagagagagagagggaagcggctgcgctgatttccgtcgtggttgaagcacgcaagcgtcgtcgtcgagctgacctgagccatcgagagagcttcgcctcaacacctggaggatatccgtagactcgccgcgcagaatttgaggccggagtggcgtgaattggccgtcagaggataggctccgccgtgccctcgcactcctctgtggccaaccctcctgtgcgcgccatcttcggtaagtattcgccctccatgttcgcgcagtcgtctgcttcattttgaaccagtagaatcggcatggggcgctcgggtttgccggattggagttcgccggtgtcgctccgtcgcgttcaggacggcgccgccgtgcttcggcgagggaggtagggg

SEQ ID NO: 7418 - DNA, 830 bp, Zea Mays
ccattagcagaactaaccaaaattgggtgacccaacctctgcaccgaaagaccagcccgcgacacaaaatcctccgaaacaaacgaatagctagcgccagagtgaaaaagagcatgggccacaaacgaatcaactgaaatcgtacctctcaccacgtctcctttctctctgccatccgcagcgggtagcacataagccccagaaatacccgcagaagaggaatctcccggagtgaaattaacagaagaaccccactgagccgccgggtgaggcagacgcggagctccaaactgagacggcataggagtagtcggtgcaggagtaggcgtagctaggtactgaggaaaaccatgcattggcacgaactgagaagtcccaggcacataaaactgctgcgaaggaagtggaactgaaaactgctgctcagcacttgacatcatgttgatagtgccctgagaagaggaggaagtcaccggctcccatctgagcttcccattaggattcctcctacacaccacatccttgtggtcctgactgcagatagaacacctgccactccactggcactctgcacggcgatgcgcatcaccacaacggaaactcaccagccccagcccgggcttaggaatagctcgaaacctctaagtacttcctcccgaagtacccgagtcagaagatttgccacggtaaggatggtggcgctgatgctgagacttgcccctcttgtgggctggacctccagtgttgcccctcctcgcgtcctggccacgaggctgatcaacacccgaagacttctgcgactccatggtatactgatgctacatctccac

SEQ ID NO: 7419 - DNA, 748 bp, Zea Mays
ccataattgtaattccatacgaagttgcatgttatgctgccctgtaaatagggaacaatgctcatacaccttttcaccttttttgacgtcttgcacatttgtgcaaacctaaattgctcctcatctgaagctatggggcgctagcaccttcgatcgacctttgaacatttcgaaggtacatttgtaatcatctgtaatcaaaaggaaaataattaaaagggatgaacttacgatatgttatcatgatcctctttcctaacgacatgttatacattcacgtatgtttgaaccttctacagtgctttgctctttatgtttggtgccatttattttccaaggacaattaagactagacttgcaaaaacacttattcctctttttatctgacttctctgtccctaaagtaaactcctcattgatggcaaattgtcgtactgccatcttgaactcctccattgttggatagattgtaccaatatccattatagggtggtccttatcatacgaaataaccatctcacttggtagaacatcactagtacaaatgcaatcaacatcattatcaaccccatgttcaacatattcagattcatttgtagtcccctcttctcttaaacctaaaagtgcatacatctgattttcgctcaaatgtgcaattcgaccttcgtcatcatgtgtttccactatatgtaagctattccaatcaactcttggcatattttccacaggttcaacattggacctaaac

SEQ ID NO: 7420 - DNA, 366 bp, Zea Mays
ggaaccgctattttaggagtatttacattttgggatagttgtcgtgtcgcacgaggttgcataaaaccgttttaaaaaaagcgtaaaatggtgtataactcaacgcaaactcctaccaacgttatagcaatcaaattatcccactatttcaggcgtaaaaaacgcacacgacttggagtagttgccatatagcttgctaaacacggggttgtcataaaacacatcatggagtgtcgtagattggcgtaaaatgcaccaagtcttgtaaattggcgtaaaaacacaacaataggtgattgtaggtaattgtagtgtaaatcatagcaaggtgtcgtaaaatttcatttgagagatgtataaatcaca

SEQ ID NO: 7421 - DNA, 636 bp, Zea Mays
tattaggaaggatcactagacataaaaaattatttaaccaaacattgaacctaacatcgattaatctacaatgaacaagaaattatgcatcaattgtaacaactacccaaatatcctgcatcaaattttaactaacaaactaattctaataatatgcatcaaagaaagaagaaaaatacctacacggagaccgtcgaggtggtgagggtcgaggagacgcgggccggcctgcagttagagtggagagggagaccagagactagagtcaaatgggcctacaattagatggaaacatggctttaggtttcataaaaaatgcaacagtcaatgcaaggaggtggggtattgcttgatgcttgttttccaacagagattttatagtgaaacaccaaggatttgcaagtgagaataaacacaagaacgagaagggttaaactgccatggttaaactgccactaccacctttggaatatgtagttctatcaaatatttcatgttattgcataagtaaatagtggtgtattatttggctggtctgctatttgggaaaacaaaataaaatgatactctaacacctttggaatatatagttctatcaaacaaaataacagggataatttggctggtctactattt

SEQ ID NO: 7422 - DNA, 1110 bp, Zea Mays
attctcttcctaagcctagtgtggtgccttctaagttctaaggaatttgaaccatcccaattctggctcgaagcttctgaaatttgaccctcccaagtgacttggtgagaaaatcagcgagctagtcctaagtgctgatgtggttggccttgacactcccattgtccaagcagcttctgataaagcagtacttgacccagatgtgcttgttgtgctcatgaaaaatagggttctttgccaatgctaaggcaaacttgttgtataccttgagctccactgcttctacatctctaccaaggagatcatccagctgagtcagccaaagagtctgagtagaggtaggagtggcggcaatgtactctgcctcgcaattggacaggtccacaagctgtcgcttgaacgattgctagctgattaagcatttgccgagaaagaacggagtctcgttcgtgctcttgcttgtatcgatgtcgccggcatggttgttgtcactatagtcgatgaagtgtgcagcaccacgacaccttgggtagtgcaagccatagtcagaggtactcgcgacgtagattatgatccttttgatggtttgtcggtgctctgtcgtcagttgctacatgaactgacttccataaactatggcaaatgctaagtccggacgcatgtggatgaggtagcgaaggctggccacaatgtgctgccattgcattgcgcccacctctgtcgtgctatcacgactcaacttcagcctctcctccatgggagtgtaagctaggttgcagtcggtgagcctgcccaactcattgatgcgcttggcgtaggcggtctggcgaagtgagacgctggagctgtcctggtgacctcgatcttcaggtaggtggtggctccaagtcgctcatttggaatgaggctttcatctcagccttgaacgtttccacctcttctttcttggtgctagcaatcaccaaatcatcaatttaacagcaaggcacaaccttccttggcccgtcgatagaaatcaacctcgtgagtgttttgttggaaccctatctgcttgagggtagaatctagcttggcgttccaagctcgtaatacctaccacaggctgtatag

SEQ ID NO: 7423 - DNA, 551 bp, Zea Mays
tggccgcggtggggtggattttacggtggcggagatcgatttgggggaaactccgaattcgcggatctcagcgaacggttggggctaattcgaggtggctggttagcttatgactttacggaactggtgggggctcaatttatagggagcgacagcggcgacggtcaattcgagcaggatgtgcttgcggccggaggggagagagttcactggtgcgtgcggtaggtggcgaacatcgtggcgcttcctccggtgatcaccggttaataagctacggcggccaccgatgagttggtgcggctagagacgacgtggtagaaagcttggagcgtggcgcagccgcagtaacacacggcgactccggtgacggccaggaggccacgtcgccggtgaaaaaggacagggagcgacgagtctacggtagctcatacatatccgcaaagagatctttacctggtgaacaaaacccatacggacgtagcacgaatcccgacgaagaggtcgccggcggtgagatttttctgccgcgaccgatctgatccatacacgac

SEQ ID NO: 7424 - DNA, 362 bp, Zea Mays
agtacactagacaaacatgtgtgcatcgaatatggcgctagacatgacactcagataggtttataacgtgtttggggaagtccataacacactggatatgtccggtgtagcactgggtatcccatcgaaaatggtactccaagatgttgcaaaacaaccttatgggggttacgatagaacagtcttgtatggcttcacattggtgataacactatataacccaagcttaatggttgacaatggctagttccaatggctagctcacatggacacacaccagactatctgatgggtgcacaggaatgcccactgagtttgcagaatatttatactacttacaacaactagttttggactttgat

SEQ ID NO: 7425 - DNA, 1599 bp, Zea Mays
ccggaagcagcccaagcggcccaattccaggggaatgcgcgcgcccgcgcccacgctgcagactttgcacgaaggtccctggcgttctggttaactcaaagtgggttcttttactgttgccctgagtcactaacggtttctaaaaagacccccaggttctattcccttccaagtcgaggtccccgacggtgcaccgcacagggagccaagctccggcgagctagactggccggagggagccaagaccggtgctcccgagtgactgacaccaaattgaacccctcccgagcatttcccccaacttaattccaagaatggcgacctaatttgctctggccacggtgacagcgcggatgatcaaaggaacagcgtgttcccgacgatccatggcggtctaattcaatcagaggagtcgaggagcttgagggggaccttagaacgctagaacaaacgatcaaggcgctgggactgacctggaataggctgaccgcagtgaggtctctcctacgatgttcttgagcagattttggggaagttcaaaattcacgctccctggtgaacaattgaggctgattcttggtggctagatgcttgactaccttacggatctcacggtggcttcaatttatactgagcgagagcggtggccgggaattgaaacgatgacgcgcgacggtcagaggagggggagtttcactagcgcagtggattggtgtcctataccgtggcattcactccggtgatcaacggagagttaaagcaggtcacggcgatgcggtggagatgcctagacacacggcacaaggccggaaggcggcggtcaccggtgaattcatcctaatccaccgcggcgagctcggtacggtggccgaaataatttactggccggagcttatccacggcggcgtgacttcgagcgttatccgatcaacccgagcacgaatcgatacggcagcggcacgaatcgcggtgaagagatcgtcagcggcgagaaaaaactgagctggcggcctgatccatttcagatcactgtaccatggcgaaggatcttcagagcgtttgacagtccattttcaggtccagatttctccaaatttcatatggtaccaagcccaaacacctatagcaaagttgttcctctacaatggctctataactttgctatattgactcgggacaaattctttgaagttcttgatctacagagctcccaagatgactcagtaccacagttagtctaaattttagacatcaaacagccagacagcccgactttgtgtttgattatctccaatttttgtgtaacaaccaaagaggatgtctgcatcaaagctgttctcctacaataggcctacaaaattgatgtggtgacctagggcaaaatcctccttgtttgaaagttacaaggtcacaaagatgagctcaaaacactgaatttcagacttagctttagaactcaaatagggtccttttgcaaataggtccaaaattcagggtttagcttgcaaatcttcatgattgtgaaccatatgacttaagataccttactttcacagtttttgcactttagtccaaaagtgcactaattttgcacttagc

SEQ ID NO: 7426 - DNA, 357 bp, Zea Mays
gacgaattcctcgatctgcaacgacctaatccaattcccgtcattgatctcaatggcaactgacttgttctttcttgagactagctcgaagaggtgtggtgctaagtttcttggcgccatgccatcaagccaactgtcatgccagaatttggctgtcttgccatctccaacggtgacgatggtggaggcgctaaagaggagcctgtctgcaaggttacaaggcacatcaaaccctttccaagggtgatcctctgtcgtccagctcttccaaagccatcttagccggagggcacaactgaatttgtcaaggttgaggatgcccagaccgcctagggttttgggcttgctgactagtgg

SEQ ID NO: 7427 - DNA, 583 bp, Zea Mays
ggaccgtgtgcatatcctaactagctacgttcagttgatggacatggcatctacgtgtgaacactttggagacttatgtctcttgtgtcgaaggttaatgggatgtgagaccacttagtttatatgattggcccggtggctacaacgtgattgacttggcattaataatctttgtgttgccttttatttttgaagtctaagctggagttgctagatatcatgtttattattccatggacagatagttgtggatattgatctttgtctttggaaggtggaggggacggttggtgagcaggggtatgatttgtggggaggggtagttgtagcctttcttggtagggtggttgtggaaggtagtttgggggaaatgtgggtagagcagctaaatattttggtagtgagggggtattcctagtatgaggtgtgtgcaatggtctccggtacctggtcttgattgaatttgtcattctctccttagtctcattagtgatggggaaatccttggttaaatgtttgatatccttgccatgaaaaatgtagtatggcttacagtccttcccacctctgccatgaatgtggc

SEQ ID NO: 7428 - DNA, 451 bp, Zea Mays
ggctgacactatggcggatatgcgtgctcagatgcagcaagaacgccaggagatgcgccaggaacgagaagagatacgtcgagagctgcgccaagagcgagaagagatacgccaggaaaggagggcgcaacaacaacagcagcaacatcaacaagtaccattgcctcctccaccaccaccagttccaccctgagataagcaccgggagttcatgagccataagccaccgacatttgctagttctcctgatccactggacgcagatgattggctgaagtccatagagaatatgctgaacattgctcagtgcactgaccaagagaaggtgttatatgcttctggtcgtctgacaggtcctgctactgattggtgggattcatatactactgcccacgacgctgctgacactattacatgggtggagttttctacgcagttcaggaactatcac

SEQ ID NO: 7429 - DNA, 996 bp, Zea Mays
aaattattgaagggtggaaatatagagagagctatttctattcaaatggctctataaatgatatgatttagagagtgtgtttaaaaaaagaatcttggagatcctctttataagcataagttgtgttttactaattgtaaaatatgaagtacttccagcaaaatatgaagtactggtcctagattaccagcaggtgaattcgtcatttcttaatctgtattaccatccgaataggtaaatatttctgtgtatgattataggacctctgaggaaatctgtaatattttcagttatcttataatgtaaattttcaggtcttactgcacatgcatttggagaaagtcgacaggatgcagcgcaacaaagattttgcagccgaacagcaatgatcccaacacattgtttgtcatgtacatctcaaagcacaaccatggattctccaatgaaccacaccttgaatcgtctagtccacctggaacaggtcgtaaacgaaaggaatatgatgtgtccagtgttgaaaacacatctaaaaagcaactgcatgactctttggagtgagttgtcaggtatgtgttggtatagtgcccacattgcgccaaggtccaattatttctcatgtactacatggtatatttatatttcacctttgtttagcataagttcgtagatttacagtaagctgccgattgttgtggaacaaacaatatactcgtgtgaaattacatctgaattcatcatctaaaaaatcagtagcacacgaagcatgtggttatgtgcagtctctgatctccctatgcggtatgtcatgtgctggtggtgtgggaaacattttatcgcctaccagtttctctagttcgtcttgttttgttttgttcttgctttctccagtcagttcggtgcatagttccagacagggtttaccttttcatttgaagctaatttttcggaggtcaccaaagacgaaaaatcgagagaatttcactatttttgaccgag

SEQ ID NO: 7430 - DNA, 613 bp, Zea Mays
gattcagtcgagcactagcagttcagggcttgtccaaaagatctgaagaaaagatgtccctccactacctattcctagggattctaggtaagttgcggataagaataacttgatcatggggggaattactgtggatggtttagggtttagggaagtaaatgaagcaaacttgaagcctatctaaaaggttgacttgatgcaggatggaggcctggagaataaacttgaagcctatctataggagatccaactcaattccccacagaacagccacaaaagggtccctccactacctattccaaaagatgggaaataaacttgatgcaggatcgaggtcttcgtcttgacgggaagggaggctcgaatgggtcaatatatatagcccagttataggtcctggcggcgtgcatatgcgtgcgatgcccacggtttctgttaccggcgtccgtgctggttttgcgggggagatacatctgacaagtgggtccacgcgccagccagaggaacaaagcacactagggaggtgagagcaatagagcatgacattatggccccacggtgcagtgacgggcgcaagtgtcagtgtaggcacgagatgtggccgacatgtggg

SEQ ID NO: 7431 - DNA, 1092 bp, Zea Mays
aaactatcaatagtcaataaccatttagaactgctagctaccaactgtggtgacatttacccacagaagataactgaaaaatagaatggtctaccacctgcaaaattttggcaggctatggttctctgcaaattaatagtcagaaatttatcgaatatatttttaaactaaagttggccagtttggcactgttcaggggcggaaccagggcccagcaaccatgggtgcttggccccgttctgctttgatgaccacttgacaaactgaagggcagtgtcagtgcaccactgcacgtttgtcgagtatgtcttagttactggactccagcaaatcaatcacttggttcactacttctcaagtctcacgagagacaagcaacccaaattcagcggaaatcacttgataaatgactcttaatttttactcaacagttaaattaccattccgacagtttcagaagagagaggatgtgatagtgaagggcccaaaacagagggtgccgttagtatttgaacctaataagaaaattaaataacagaaatgccaaccagaagataacctaggctggccagggccatacagcacattagaagtcagaaggaacagaggacttgggattcccctgccactgctgatcagatgccgcctctgcacactaattacctccaagtgtgctttcgactctagtggaactagtactgcgttttagaaattgcaattttgcaagcaatgtttgactaattagtcagtgccaagtgtcaactgtattatttcaaacacagcaggcataagacaacaatgagcagtgatataagatcatcagtagtaataataactctgttgatgaaatggacataataatttcacaatactactactttcatgtcttgaaaataaaacgacagcatggttgcatgcaaaagaattaaaaattattaatattcatccacctgacagttttaccttgcctaattcatgattcacacgatgatttaacactactaaggtcaacagcgcagtaatctacaagcagtaagaataaattctagtaatatgacctttagactttagtgtcctattgagtctaatagg

SEQ ID NO: 7432 - DNA, 500 bp, Zea Mays
ctttgtttcacggggactctttagcaaaattgacccgtgaaggggtagtgcaaatactggccgtcggattagaactaagggcacagattagatccagcgcccaccaatgacgcgagttaatctaggtcgtccgatcgggcgccaacgctctagattaaatctcatcgaagtggtatactagttctgatctggctcacccatagcgagatcaacggcccaaaataacccatcgaaggaggcactctggtgatctaatctaaaccgtgagcctcgcatccaacggccacgaagcggtcttctccctcccaagcgcacgcacggcggcgcccgcacagcccacggtagtgctccccggcgagccaccaacccagcacacacgcaatcctacgcatcgcatgacaggtaaaaacccaaattaggggttcggcggagacatgggaaaggttattaccttcaatggctatgtggagaacccggaccacggcaaaggggcggcttgg

SEQ ID NO: 7433 - DNA, 311 bp, Zea Mays
gtcctcttggtctgtccatcagtttgaggatggtaggccgagctgaaattcaactgtgtgtccaagcactcatgtaacttctaccaaaaccgagaagtaaactgtgatccccggtctgacatgatcttcttacgcactccatgcagacaaactacctaagccatatacaattctgctagcttggctcctgtgtaattagtcctcataggaatgaagtgagccacttttgtcattcagtccacaatcacccaaatggagtcatgccttacaggagtgtggggtagatcaacaatgaaatccatgccaatttc

SEQ ID NO: 7434 - DNA, 605 bp, Zea Mays
atggtgaaacaaactaaagggtgtttaggatggttacatgttacatttctaacgtgaaactgtagtttataatattaatttaattagttttattttatataataaataaaatgacttatctaaatgtcttctaaaagcttactattctagtttcacaattttatggaacacataactaactccactgaattacacaggtctacgaaggaaactcacgaatatccggcgattcacgattctggctcggttaggcaggtccaccaatccacagtggtcgctcaagcggcgtccagtgagtgaaaccagagttgcagctggcccacacgatcagaggtctatcagagcttggtacaactacaggctttatcacgaagaaacaggcaccaaacaacaatctcaatccgacaccacaggctgcacaagatgaaccagctctctcttctccaccgcgccttccacctgcatctcctctctcccgaacgcggtcatggcctcacagccgccgtcatccgagttcgactgccctcctctcaacacaccccacgacagcacgcaaagcgcctcctcgcagtagcacctcacgaaagcatcgcggcagccacgga

SEQ ID NO: 7435 - DNA, 504 bp, Zea Mays
gttggtcgtctttcccactacttctttgttgtagagtatgtctcctatcgggaagtttgtaaccactacgattttgtgatcgtctaaatagtggcgcaactttcgtgtggtgaggagcactgcatatagcaacttttggacttgagggtatttgatcttggagggcccgatgactttgttgatgaagtacatggggtgctggactggatgtgcatgcacttcttccgtccgttcaaccactaatgcggtacttaccatgtgtactttgtggtggggcggtggaagttgttcgaatggtcgaccgtggtcgaataagttcttgaagtccctacaattatgcagggtatggcgcatgtccttgtggtatgggcactgggcgtcgtggatctcatccaacgttcatatgttgcatcgtggcacgccgcggggccgactcaccggggcctagcgcatgcactttgtctcttggcctcttgtcctagcgcttgtccagctgctggtttc

SEQ ID NO: 7436 - DNA, 697 bp, Zea Mays
catataaacctattgagatgatatgcaccatattattgtcaataacatgactttcaacacatccaatggcactttgttacagaggaggtaaaatagaattacaaggaacaaatgaataaagacacatatataaagcaagcacaagatcaaaatcaacataaaaagaaatttcatattagtatggcatcacatagagatatgtttgagtggagcagtattatttatcctctgcaggtatcaacttttgcagtgtagtatatgttgctttagcagttggctgtcatcaaagcaaggtggcacgtgtcaatgggtaagacctcttaacaccgttcgcatcatgcatgatttattgaccaaaagaagacttgcagcagatgattcaaggcactcaaagtcaaagtagaagcaaagtgtcaacaagaatagaatgttaagagttgtgcaaggtagcaggtgtcaatgggtcagacttgttaacatcgtttgcattatgcatgatttagtgagcaaaagacttgcagcaaataattgaaggagctcaaatagaagcaaagtgacaataaatacttgagtatcacttcttatccagatttagttgtcaaattttaaaaaaacagtgaggtgaaatagagttaagaaagaggcattcctgccaattttagagagcacacacaatgaagaagtcaccacagaaagg

SEQ ID NO: 7437 - DNA, 700 bp, Zea Mays
gggggacggttaccagctccttctcttagaaggagctatcgagtcgtagtaaacaaggagttaccccgataaatcgtgcttgtcggcttgcgtcctagtcgtctgggctttagcgactgtgtcatttatgtcaggcggcatgggcgacttggagccctagcgccattattactgcctctacgccacgccgacccttggccctctgtagcatgggtctcggtgtggcttatcgtattatgggtcttgtagacgacctgtgcacttaggcctaggctcgataggtcgtgagtgtgccactggccgaggggttcgtaggtcatgagcacgttgcaggtggaggggctcatatgtcatgagtgcatcgcaggcccaggagctcgcaagtcatgagtggtaggcggaccgactctcctattgtggcattatgccaggcctagttaatgcagccggacatttatggtggttcagtcttgggccaggtgaggaatccacttgagtggcttcctatctgtctgtcccctctctctagctccgcctaacccaagctcgggctcggtgcctcggggtttattcgagggcgggtgcttctagggtagacggttcccttgcccttctgctgactagtgggtgtcggtagtccgaagacctttttcccaatactctctctaactagtgggcctcaggggcccgaggatctttc

SEQ ID NO: 7438 - DNA, 1013 bp, Zea Mays
tggcctgcttccgtatcaaatcagagaaacttgattttttttatttgacaccccatgacacagaatttcaacttccaccgtttaactcaccgttttatacatatgtgcggattacaattgtatttatcatgatgccgacttcaacaacatgaatggaagaacatagctcttccaatatatgaggtcgtgtatgcgcgtggaggttatcaaactcgaaggtaaagaagacaaggaacagtgcagcgatataaggggcttttcttaccttgcagtagacctttccgttaggccacaacggcgtatatgcccttgcagtgtgatctctctcaagggtatgcccttgagattgtataatccggtgacgcgatcttcctcaagggtatgctcttgaggtctttggaaccagtttctctctaaggtatgccttagagagaggtgattgctgaagaatttgttgttgatgaaacgctatagcaggttgatggagctcttctcgcgatgtgacggtgcctttttttgtagctggagaacgcagcagcctgagcggaaacgatgtgagcagcagactagtctatcagcctgacgtcgattcctgatctcagcagcctggcggtccttttttttgtctaccccatgtagcctgacggtgacctcttatttataggcgcagacgtgctgcagacatcgtggccgtgcagtgcagttggcgtgcggcgtgcgcggagacgtgctgtcaaatcgcggtcgtgtcttcgtgacttgagcggaagaagggaatatatgaatttaaattttatctggtgtacatgcggagtggaggagtgcgcaaaatggcaacagctcattcacgtacatgagacatgacggatcatgcgcgtgaaaatgggtgcaagccgcctgacgtaagttgaatgtgagccaactgaaccgtgctctaatttgcttcttctttcttttcgtttcttttttgtttcttttttatgtatttttgttttatttctgttttctttggc

SEQ ID NO: 7439 - DNA, 1108 bp, Zea Mays
gtttcactttcctctctaatggcttccccttcagctcttaggggaaaccctgctccaatcccggaggcggtaggcgtggttttatccaaagccatctaccagggaagagagtcactattatgcacatgcaaattgttttcaaccaagttattttattcattacaccagcacattacaagcataagactactacaggtggaactacacgtgagcgttcctcgaggtgctaccgaactctttctctaaggtatccccaaattccttgagaagatcatcaaggcttgctagggatatatcctcggcgtcggaccaatcatctattctagggggaggtggggctggaggggtcttcttcttctctgtttggcatccttggttggtggtcttcttctggattttcttcttgggagcgagcttccttagcttcttgtcatagtccatctttaaggttcgataggcctcacgggtgttggcttcctcgccttctgctatgtcgagactctcctggagagatgccttctcttgcttaagctctttgacctgctgctctaggctttccactcgggagtttaggtgggtgcagtgggaggagagatcatcgtagtggttgtcgagggtgtggaggtatccggccatgtagacgatggtggggtcatcttctgtggggtctcctcctgacagagcctggagtcttttcctccaggtgggggtatttttgttgctgggcggaaaatatcgaaggggggtctcagagatctctcggctgtagttttggcacagctgtttaagggcttttcgggcaacaccctggcaagtgtctggaaagcggtgcccgatgaaggtgatttggaagggagggtggtttggctagtttcggctttctcccaggtagactgccatagagcatttttctaatccaattttgcggtattccttccagacatattcgggcttcttgcagatccccatgcgtagcgcgcaacttcgtagaaggtgaggaaagccttcctcctctgagcaataggatgtcctaataatccaggggccttccatctggtagaagaaaagaagggtttgttaatatcggggaaaggagggagagtgtttc

SEQ ID NO: 7440 - DNA, 379 bp, Zea Mays
cctctcggtttgttgcggttttcaggaaatctaatcatattgaaatcaccaagaaagatccagagcttgtcatcatcaacttcaaggttagagaaccaggagaggaaggcctctcgcccttgaggagagcatggggcataaatgttggttagccaccagacttgacttgttaatttagaccggaaagaatcatgtgcccaaacaaattcttctcaattatctcagcatcaaaatgagcccctttccaaattgtaataaaacctccagaagctccaatagaaggaccaaaagcgaacttatctaaagatttgttgcaaaaataacgaatatacgagtcatcgaaggactccttttttgtctcctggatgcatataatgtc

SEQ ID NO: 7441 - DNA, 372 bp, Zea Mays
tatgcctgctgaactgtaaccggacacctgaggttctgaatcagtgaaaatctaaacttgtgtgccctgttctttcagggcaaggacgagtgcgggcgggctactgtcgaggagtgtgtgtcgatagctggcgacgacagattcttggatcacatccattggtaagtggtaatctctagccttaacttttccatattctatttattagaactatcttcactaggaaatctacttaattcggtttttatctttgatacttgtaatgattcccccttttccaccatttttccacctattttatgaagctgggaagggtacaatccatcttattatttattaaggtacaacatggataaaatatggatgaatgaa

SEQ ID NO: 7442 - DNA, 533 bp, Zea Mays
ctccgtatcacttaatctttatatctacacttcaatacttatctgtggtacaagttatatttgaagtgcagggcattctgagacaggatcttctattctgctgcaacctactcgaagggtcttttcattccactgcgatctagtcttcgagtagagtaagaatttcagttgtatagtgataatttttatccgcctattcacccccctctaggcgacatccagatcctgttcccgggcaaagggaactttcaattatgcactaacatttgatcaaataatttgttaatttgtttgccgtcgcaacgcacgggcactcacctagtttcccttaaatctgtgtcctaagtgtcggtactgttctggaataaactaaacagtgaagaagcattaaaatatcagtctaaacagttctcttttctttccccggatattcagatagcactctccacaggttgcgggccagtatatgccatgattatgagtttctgactcagcttcctatgtcattgtagttgtggcaggtaaactgtggg

SEQ ID NO: 7443 - DNA, 662 bp, Zea Mays
gtcaagctcaatgggtcgagcagatgacgatcgcaagcatgtgtaggtgctgaaacatggactagaagagcgagggtggacctggaagcggctggtcacagcccgacgtctcacggtggcgcagatagatgatttgggggaagaatgaaattctccgtctatggtggctaattgaaggtgggaatgggtgctctggcttcgtgataacctggcgcaacagaccagaccatcaatttataagggcgctaagcggtggtgtccaattttgaaaggggagaccggcggccgagaggagaggtgagtcactggcgtgaactatcgtggtgtgaactatcgtggtgttccccggggtaatgcctctggcgacgaactgacctcctacgaacatctactgcgacgtggtagatcttctaagcacgtggcgcgactacgatcgatggcgaactccgacaaggacacctctgtccaatgcgcggcaagtgtcacggtgaacagtccgacgataagtctctatccctttcccgagttgagatctttccttgtccatggttatgcgcaagtcacggcgcacgaatcacgacgatcgacgtcaatcacagcgaagggtcaccggcggagagatgctctgtatcagagatatttctgctactataccattggaa

SEQ ID NO: 7444 - DNA, 547 bp, Zea Mays
taagaatcttggcgtttccacgaatctaagcatggtgggagaagtgtaaccaaacagggcctatgccatgttcatttttttgtgttgtttattcaaaacctgtttgtttcagagcctaagggaagtagtgaggaactggatcctgttttaaaagggtactatgacgcaatccttggtaaagctcctgtcaagaaaggcagaggtggttcaaaacaaatagcgaagaatcgagtgacaaaaaaatcatcacaggaatcagtgaaagcaggagctgctcttcttgcagtttgccgtgggaaggtgctactttattaccgaaagtttatattaatttatgggcatgtttaaaccctactttgaatttcttatgcataatgctgtgcgtatgccagctaccattagcttatgttttgctggtgcctgattttatttctaggtatctgaagggattgacttcgctgatgacaatgctagagttgtggtatcctttgtttcagtttgatatttaaactgtatgctctagaaagttcagtatcaaacactcgcc

SEQ ID NO: 7445 - DNA, 655 bp, Zea Mays
gagccagccagagttagattctaatgactagagggagccaatcatcagatatataaagaatgaagaggaaccggatgacaaagctgcagcagaacgcatcgcaaggtagtaagctcactacaccctcattggggaggcactatacagaaggggcacaataggagtcctcatgaagtgcattctttcggctactgggaagcaactgctagatgagatccacgccagacaatgcgggatacacgcagcatataggactctggttgggaaggtcttcaggtctggtttctactggccgacagcaaagagtgatgcagccgagttagtccagaggtgtgaagcttgccaatacttatcaaagcagcaacatttaccagcacagcaactgcaaaccatacccgtaacatggccatttgcgtgctagggactggacatgattggacccttcaagaaagctctgggagaatacactcacgtgctggtcgccattgacaagttcactaaatggatagagtagaaacccattgcttctctgacctcagctaaggcagtggaattcatacaagatataatattcaggtttggaataccaaatagcattataactgacttgggatccaatttcactagctctgaattcttttacttctacgaacaa

SEQ ID NO: 7446 - DNA, 278 bp, Zea Mays
gtaaatcatacatatacaacctatagcacagtttctgtgaagctaaaacttcctcaatctattatggtgaagaatagagcgtgaaaaggaaaattcatgaatgatacttaaaattgtcatgacatgtcattgaggtccataagctttgaaactgcacattagggtccataaataaacctgttaaatgtgtcatcgaggtccaatatgccttttcaaagttcttggaccttgatagcactcaataagttcaaggtcatgtatgtatgttttactttatg

SEQ ID NO: 7447 - DNA, 285 bp, Zea Mays
gagaaaggcacttatcctaatccttaccatagtgtaacacacatgccctcaacatgtcttcaagaatctgattcactctttccgtttggccgtcagtttgaggatggtacactgaacttcttatcacggtggttccaagtgacttttgcagctgctcccagaaacgtgtcacaaacaatgctcctctatcagacacaatagtcctcgggattccatgcaaacacactatttggtcaatatagatttctgcatatttttctgcgttgtgggtggtatgcactggca

SEQ ID NO: 7448 - DNA, 439 bp, Zea Mays
tcacgctgtcgaaccgttatcctgggatctaatcccagccgcacatagccgatctaatggcccggggccgttcttcttcctttctccaaccagacacggcggcgctccaagcatggtcacaatttcacatcgacgagcccccagacccgtgcgctcgtctcgccggcgtacctggcaaatgcgccagtccctccgcagccctaagcgcgacacactaatctagaaagggctgagatgtgagcccgtgttcgacaccgcacggcgccaaagtggcaacccgcatcgttccaatttaccgcgcccccaacccaatgctatgctatggaggagcaaagattcgtaggggaatcttatcgggttacgccgcccaagctctaccgaagcacgccgccggcttggtgagcccgagacatgacaccagtcgccctcggatccctgg

SEQ ID NO: 7449 - DNA, 585 bp, Zea Mays
tatccctacctgtatctcaaaagctagcgggacgacaatgtactctgtaaactgggaaatatatcatcaataaaaagacctcaagaatactcaaattgttcatggtcgacatgcattcttactcaactcggggtgaccactatgccttgctaacagagcaatcggcttaagtcggcaacgacttaagacggtgcaacatgctcacgcttacttaactcggggtgaccactatgccctgctaacagagcaatcagcttaagtcggcaacgacttaagacggtgcaacatgctcgcgtttacttaactcggggtgaacactatgccctgctaacagagcaatcgacttaagtcggcgatgacttaagacggtgccacatgctcgcgcttgcttaactcggggtggccactaaaaagagcgatcggtttgagttaatactaagttaaattggcgcagcacactcggcgcgcgtacaattactcatctagggccggcctctgtgtcccatgaagaagtctcgaaatcatcacacaacattttacttctgcaaatttagatactgctgaattctaaacaataggagaata

SEQ ID NO: 7450 - DNA, 358 bp, Zea Mays
atggagcttgtctataagcggtggacggatatcagaaaaaatatattcaaaccagcatccttgaaagagaaggcgacagcgacagctctcttttatttgagaaagaagccaaaagtttgctgtttccctcctgcctcttgcttcgataaggatggcttatgcagtctaacattgtggtgctgtttgtttcacataattataacgtgatagatagtagataatgtcaaaccatgtttatttaagtttaatcacaattacatatcacactagaatttgatactggcctattcaaacttatcgcctcactttaagtgtaaattattatcgttgctatttacgttataatttgcgaagatgc

SEQ ID NO: 7451 - DNA, 704 bp, Zea Mays
aaaggaatcgaagcagccgtcgcatcttcaccatatggtggccgccggggagaccacgtcgtcggggactctgggttctccattgccgagcgccagtactggcgggaggctcctcgcctctacctcgcaccggcggatctcgtgctgttgggcgcgacctggatgatggtgttgaagtcggagttcggcgcacggccgtgacctgcactctagggtcggtcgtccctcctccatcggcggtgagtacctcgccctctcccatgctgcctgtaccggtgtgttgtctccttgcaccggcgtcggatacgtgggttgatgtgggcggcggcgtaagaaagaagaagcgtgagagccttcggatccgagatgaagggtggagattagatcgggctcataccctctgcatttttatctcggtcgtagatacggaatctggcggccaggattggacgcagggtttaatcgattcatggccatcgatcacggatccggcggtccctggggcataccgcttggtcagggatccgatctaatctgcgccgtgcgaagacaatccaacggtccacatgtcatggtaccccttcgaccaaccctttttgcatatgagcccctatagaatacagaaaccaacccgccatccctcgcgtctgtgcattgtgtcttaggaataattgcgtgttagcccctgcgcttctcagattttg

SEQ ID NO: 7452 - DNA, 346 bp, Zea Mays
tacagaaatcaatttggtgagccagacgatgattggtttgatgccatcgaagcaacaagtgatgagttgttaggggcctacaccaaggctgaggatgaagctatgaatgccgcctttggtgcccgaggaagaagcagattaaataaggtttttgatgctattgggttcatttaccatgattactgtttccctacccaaaaaagggggctaaagtgtagcgaaagcttcttttgctgcgctgaagtaggaaaaaagtaaagatcctgactcatcggccaaggtcatattatacggaaagggcattagagttgactgctttgctagttatagagattgtgagtgtttt

SEQ ID NO: 7453 - DNA, 646 bp, Zea Mays
cattccctagtgtgatgaccatccaaaccacatttctggcaaaaaaccctacgcaccaaatcattctcggattttagaatgggaggcgaggggggttttgaggatacatggctgaccggcatcaccgggagtggagacaggaatgtcttctttgatatcaggttttccggatccggacttcaaacgccagctgaggttccgattcttcccccacgactgagaaccttgcggcacctccttcggaccccatcgatccaagttagggtttcgattcttcgaatccatcggagccgacacacctgagcgacccggaagaggccactcctcaccaagcgaaggcggacgaagcggagaggagatccaccccccacagaagctttcgcgcgatgaactcgaaagagaccagaggcgagaaagacgcgaagcaagatggggaaaagagtgcgaacctaagaaatctactggaaaccctaaccgcgtacctgaaagaagccgtccagagcaagccacgccgctctcctgtagctgtgggccgcacgcaaacgcaaccacgcgcacgggacgcggaggagacggcccagaagccacgtctccaacagtacgggccgacaggggacgatggatggcggaaggagaagcatggcgt

SEQ ID NO: 7454 - DNA, 596 bp, Zea Mays
aagatgaccagatccagatgaaaagagaggtagtcaaacaagatcagctaggatgatcaatagaaatgttatgaagttttaggggggcaaggatttatggaaagaaacatggccttgatagggtttgagcaactagacacaatgcaaaaaatttttttggacacaacaagtgcacaaggagacttgggttggtctagcggtcaagctatggggttctgtaagttgtgcaggtgtcacttcaatggtaagatacacaagggttagaaaataccaactcaagcaggatttttttaagaggtttcacttgctaaactcaaggttgtttggagggggggggtcttctcatgagcagaacaaacaacatttttttgcaaaaagggtaggacaattaccataccacctagatagcaaggcaaaagaaacacataacacgacccaacaagacttagcaatctgacacgaggtaagacatttctaacatagcagtacattacattattaacaagttcttattattggaataaaggtgagaagagcatgttggtgcacaagagacaatgatgcgacaatcatgatgcatgctcattctagtcgtc

SEQ ID NO: 7455 - DNA, 492 bp, Zea Mays
caacaaacactgtccgaaggatcccttcggacttcctagaatagaccaggtggtagactcgaccgcagggtgttctgtgttgtccttcttggattgctactccgggtatcatcagatcagctaggcaaaagaagacgaggaaaaaaccgcatggcgtatcagagtggaccgagcaacaagtgtcagataacccggagactgcagaagtatggcggatgtatttcgatggctcgttgaagctgcagggggcagacggagggatcctcttcattgcacctggaggtgaacaactcaaatatgctctttagttgttattctcagcatccaataatgcagcagaatatgaagctctgattcacggattgaacattgccatatcgctgggcattaagagattgatggtatatggagattcactggtggtcataagtcagataaataaagaatgagattgctcgaatgactctatgggcaagtactgcacagccgtcc

SEQ ID NO: 7456 - DNA, 339 bp, Zea Mays
caagcagcttccaagttctttttaatgactctgactttctcctcggcttcaagtactaggtcaggtccaaaaatttctctttctccggcttgtgaccaatttagcggtgttaggcaccttctcccatacaaggcttcgaaaggtgccatcttcagactggattgatagctattattgtaagagaattcaaccaaggaaaggcacttatcccaattcttaccatagtgtaacacacaggctcgcaacatgtcctcaagaatctgatttactctttccgtctgcccatctgtttgaggatggtacgctgagcttctaatcacagtggttcccagtgacttt

SEQ ID NO: 7457 - DNA, 696 bp, Zea Mays
aatgagcaaggtctctatagtcgaattgtagttgatatataacaacaactttgttacggaaggattatcaggttgtcacacaaaaattggagaaccaaggcctttaatctactctgtcaagcgatctgataacggttccaatggtacagtgactggatagaatcagattccatgaacttcgccgccaacgacctccatgcaaggattcacgctgatcgcactgattcgtgtagaacccaggcaggatagtaccgggaggatgaaaagattagaaagggagtggatttgatcgcggattgaagcttatcaaccgcacctatagccacgcaacatggacggatcaccggtatcaccgtggtacgctgtcgaccccaaatatgccatgacgtagtcctttaccatgctgtagtaatcgtggcgcatctggatttaccacctcaagagcaattgcaccggcaagcgccacgactgagcaaccagaaactcttccccctctccggccgccgcgcgtcttctccaaattagccgccaccgctcatgaatcctataaattgagtgtgctctcagctccgataggtattcaagcacctagcgcacccactcatgtctcaaatcattcaccagagaacttcaatttgggatttcccccaaatcaatcaaaaacaccgtgcggtgtgagctcaccgtggctagctc

SEQ ID NO: 7458 - DNA, 531 bp, Zea Mays
ataaaagactgattaacgcacttgttgtgctattccggctgtacccttaggcgacttttgcgcggagtgtcgcacgcgagggtagtctgtgctgcctctcgcggtgacttcggagtggtcgaatgccgaagaccatcgatgcggtcttttttgacatgttgcatcttagtttttgcgggggatttttgtaggtatattacatggctctgcctcattaaaaacctcaccccccgggaggaaaagagtgcgggccgggaaaaatactgtttggtgagttaggagggcgcgtggggcctgaggatttaaacaaaaaatttgcggagattgtcaatattccaggaatgctctaggtcttcgccggatggcgttgttagcccgtacgcgctgggggacgccttcgacttgacgatgaatggatcttcccactttggctctagcttgccccgtgactctgttcgggtggttcagacgagtacgaggtctccttcattgaattctcttgggacgactgtgtggtcgcgccaggccttt

SEQ ID NO: 7459 - DNA, 695 bp, Zea Mays
ttcgatcacgccgtttatcacagttcatctcagcaccaacaagtcatgatcggttgatcctatatatggtaaaaaaatcggagataatattgccctccaaaaggtgctaccctaaactaatcatcaatgcaaaatgtgtataggcaacactgtcgatgtaaaatatatatttattgtagctaattctttcttgtaagtatctatctgtctcctgtatactactggtatagctttcataaaaggattgggcacttaactattagttcataggcattcatctttgcatgaatgaatatatttgaaattttggccaccatgcatggcctttcctttattgtactggttcacttgaatctctctttttaatataatgatgatatgcagttctcctgcatgttcgagaaacaattaccatggttaaaaatgatattgtggttttctaactcatttctatacgtatggaaactaatcattgtattcatttgtcagaacagtcagttgcatcttggaaaaaaaggagaccaactagaatataatgctactatagtatactatgaggttctacggcatagaccaatgcaactcgaatcaaatatcaccaggagtgtgcggtcaacgagttagctagtgtacactgtacactcgtaaacaacaagttccttggatttactacacccgtaggaagctcaaatatt

SEQ ID NO: 7460 - DNA, 347 bp, Zea Mays
gaaggatgggatgtttaccatggttttcgctgcgccaagcttcggccacggtgaggtgtggccacggtgaccgcccaacccggtgaggaatcctcggttgattcgagcttcgctttatgccgcggcgatgccaattttgtccacgaggatgccacgaaagtggtagggcagtcgcacgcccccaatttaccacgtcggtgaagaacggctgcaacagagctccccctttctcccgccctttacggcaatggcgcgcccgaccttcggatcgcgagtgtggcgagtatggtggggagtttgcgggtggatgagaggggcaaggaggggcggctcaaatacccacggac

SEQ ID NO: 7461 - DNA, 368 bp, Zea Mays
tagatggtgatcacaacttataaagggataactctctggtcatgtataaaaggtcgagggggacccctacaaaatcatctcatctcaccccgtctcacttgacaaccatcctcatcgacaacacctgggcattcacaaagctcacttgtaatctacatactccacaaaaaacccaatatacagccacaacaggaagttgggtgttatgcaattcaaagcggcctgaacccgtataaacctctatgcaatatcaacatgctcctgcacgtaccatccaatcgtagtcaacgatgtcgtcctacccaaaagcataacgtgggtaactccatggtacgcaatcgagtcacaaataatgacaactagcgcca

SEQ ID NO: 7462 - DNA, 554 bp, Zea Mays
tttgcgagccacgcgtctggcgaggacgcgcgcgggagccatcttagaacaccgcaagcggaaggtcggacgcaacaaagagctggacaagggtgtcagtcgccaactcaacataaaggggagagaaaacctacgacagtgagccagcatgttgatagctgcgacaagtcaaacggaaagaaggcctccaaccgaggagaccaccgaccacttcaagaagctccttgaagccccatgtctaaaccatcggtacctagttcgacacgcctataaggattgtgggttacttaagaaattcctaagcaaggagataccgtctgagaggggacctgagccccgtagagacagaaagccaagagaaaggagatcgctttccccgccgagactggctgctgactgatctttgaggggcggcatcactgcgccttgaggaggcgccaaaaaaactcgaacaacataaggtgttcgacacccggccagcggccctgacctctttaagtgatccaactacgccattgtgttcaatcaaactacccactccgagtgcattcccc

SEQ ID NO: 7463 - DNA, 584 bp, Zea Mays
tttcagaccaccgcttccgaggggcaggggaggaagaagttttggtggaggacgatttggcaattaacctagaaagttgtattgtcttttttgtggcaaagacaagggccacacaacaagaacatgacaggttacaattcagaagcagaaggaaattgccaaagctgaggcgcggcagagtcagccgaagcaagtcctccacactgcttcgtgttattccctatacatcctagaatacgtaggcaatcaacaacctacaacttttgttgctttggcaagccattccctagcttcctggccctagttgccaccaccaccaccactgatccacaatcaacagccagaagggcacaatcatattcatcaacagcgtgaccttcgggaggagtccgaagttcgcacagtcaacaacactatgtctgagtctaagcatatatactaaaaggaatacagtgccccagccaaggaatatgatgatttgatgtatcttaactctttctgctttttatattttcttgaaagaaaaacaatacaagagggataaattttcaacttgatgtaataatattgtcgttacatcatcg

SEQ ID NO: 7464 - DNA, 752 bp, Zea Mays
aaactcaggtaccacggccggttcaatgtaacgcggccggtgggtaaaaaccttcatctttttgcccttcggcacaggctcaactggggcgaccgaagcagcagttttcctctttttcctctgtccccgcagcgggtagcggtaatcggggtagacgaagccaatggcgtcaaaaactctgttcagtctcttttttccccgaccgccgaaggctgcagacagcgcattatcttctgccttggaatacgttccaagtagttcatcacttgtagtttcgatacactttagccagtcgtcgtttggttcatcaaacttctccctgaatctgaaggtatacttcagccggaccagtccaccatcgctagagtcggtggtggtctccttcagcatttcctagctgtctataagcggccataccctgaaagctatatgttcttgaattaaatctcttgtcccaataaaggagcaaacagtgctgaaggccctctgacacgcttcaactgtctcatcagtttctatctttggccttcgaaagccgaagagggaccaaatgggacgcataatgactttcttaatgtcttccctcactgtcaaatcattctttacataaaatcattcttccatccaagccccgggccaccttttctgaaatgttggcaccgggtggcttgcattggggcgagcgataaatccataacaaccgaagttgttgtggtactgttccttacccatggccttcgtctcatatagaa

SEQ ID NO: 7465 - DNA, 822 bp, Zea Mays
gtgcgtcgagctcgacatcgatctttcgtggttcacctagtttggacatgaagattgcaatcttctactgctcagacaaattgtctcaacaagggggcattgatagaaggcgtcaatgtaaccatcgagggatcctaggacacggtggttacatagcttctcaagggggttgctacatgtcgaggggagaagtggtcgttggtaagattagagaaacagttctaggatgtggtgctttagtcacattgttgaggacaacatcgaaggtgatggtgaggttttggatttgggtgacaacgtccttgtgactactttatagcggttgtctgataccatggtggtggcgcaagtgatggagatgtggttctggtgatggcgcagggagtggtggtgatcggggaatggcacaaaaagagggagggtgggctggaagatccttagatgccaaaattgttggttctgagtacaaagatgttatggctgcagattgaattggatgactggaagaatattacaatagataggaggtgatgaggagctcttgcgccttctctaaatctagaggtccttctctaccaatacaatatagtgcacccctgattttttagtcatcaggggtaccgaccattcctggggtgcaagtccaatctattaggagcaacaaactactaatacttatccctatgaccctatcccaacaaaatttcatttttattcgtatctccaagcccatggcggtagctgatttctaggtgtcggtctccttgtgcagtagggactgcagtgctagcttgatccttttcctgcctgatccggtgttgg

SEQ ID NO: 7466 - DNA, 285 bp, Zea Mays
ccggactagcacaccgagtgcgaaaaatcgaagtcttccgcgaagactatccgtgcgaaagtcgcctaagggtgcagccggactagcacaacaagtgcgaaaaatcgaagtcttccgcgaagactatccatgcaaaagtcgcctaagggtgcagccggaccaagcacaacaagtgcgaaaaagactacaccaaactgtctgtgcaaagaccgactacatacgcgccagaccgacataacaaatacaccagaccaagtgtgcaacgccttcgtgagcatagccgaa

SEQ ID NO: 7467 - DNA, 717 bp, Zea Mays
cgcgcgagcatgttgcaccgtcttaagtcgttgccgacttaagccgattgctccgttagcagggcatagtggtcaccctgagttaagtaagaatgtaggtcgatcatgaacaaactgagtattcttgaagccctttttattgatgacatatttcccattttacagagtacattgtcgtcccgatagcttttgaaatgcagctagggataaaacttcctgaggtgttctatattccatgagttcccaatttccgtgccgtccatctgagtgagacgatatgatcccggccgagtgacttctgctactatgaatggtccttcccataggggtgacaacttgtgccgtccctcccccgttagaatttggcagaggacgaaatctcccactgcaaaggatcgacgtcgcatggccttatcgtggtaacgcctcagagtttgttggtaccgtgctgattgaattaccgtgttcagccgttcttcttcgagtacatcaaaatcctctagcctagtagcctcggcttctgctatgctttcaaagatcaaccttggcgccccaaacttgaggtcagcaggtagtactgcctctgacccgtagaccatgaagaaaggagtatttccatgcaaagctcgactaggttgagttcttaggctccaaacaacgttgggcaactcccttatccactttcctgcaaactttttgtttttatcgaagactttc

SEQ ID NO: 7468 - DNA, 475 bp, Zea Mays
tggattaagtgaccgaagaggtatgctccctgtctaatcacagccacacatccgcctctcaacgacaccagtctcatccccatcccactcatcttcctcggccagcagagcggcggccagacagtacacgacgacacgctcatggccggcaatcccgcgctgggccccgatgaacggagtaacacgcgaaagagctataagcatacagaggacattgcgaatcaattgtaggagttcttgcctcaaacggtggcgactgcagtgctatcctcgacgaagtgcggggccatggcgaggttctgcgtgggtgagcaattcccaaaccacccgatcacccattttcccccgattgagcagcggacatcatcggtgactcgcctaggtccttcctcaaccctccaaatggcgctaatcacggcggcggacccgtcgtcttcctccatcctacgacggcggctgacttcctctatggcgg

SEQ ID NO: 7469 - DNA, 599 bp, Zea Mays
ggcgacctgaggaccctgggcacaaatctctggactgacaggggttaaactgttaaaaacagggcccatatgtaatgttctttgaactatagcggatggcgggttgattccacaaaacactagggactctttagcaaaataccttgcccgaaggggtatggctactcgtgagccgcccgatcagattctgaaggtccagatcagatcgcgcgaaggggtaaatccgggcctgatctacaccgtcgatttcgtcatccacgaacacggtttcttgaagggaaagggtatggctgttttaatctcgaccatccatctcgatccaacggcgagggcatgttcttcttcccttactcctccgaatcaacagccgacgatgcatcattttcccccaccacgctccccagccgtggcggcgcgttcacttcacacggcagagctcgcctgagaagcgctacccggcggtccagtgctcgattccccacatcaactgcatctacaagatcctgcgttcaaagctaatccacgggaagggtccttaccagatcttatcgcatggagaccaccgcccatggcggagtgcggcctgatggtggtgccca

SEQ ID NO: 7470 - DNA, 289 bp, Zea Mays
tagaattctagggtctctttagcaaatgatacaccgcaaagaggtatcgtaggatctgagccgcccgatctcacaccgacgggttagattagaaaccaacccccacgaatcggtacgcgaccacggacgttcgatcagcgttcgacgatcaggatttaaatactcacaatctaatctatcccatgcgattccaatctaacggctctggtcaagttaaacgaatgagtatgcgatgttctaatcggagtcctccatctatggatcgacggccaggagccatccacatccg

SEQ ID NO: 7471 - DNA, 1014 bp, Zea Mays
tcgaaatataggtggtatatagctctccaaatttgctgcagagtttgggttgtattaccacaggaatctgggagaaaatcaagctccaacttggtctgtcagacaagccttttactgaatctggcgcactgttcaccgtcttcagaaatatcgcgctgtggataagggtcagcccctcgccggcgataagaacgccaccgcaacgcggatggtcgtcggtggccgcggtaaatatcctcggcgtcgtggcagatggtcactgaggtggtaggctccgattaaacggcgacccccgtgccatcaccagaatccgccgcgcggaaagcttgccagcacatctgaaatccacacttcttccccaactccggtcaacggcctataaattgagctcggactccgcttcttctccacattacgcacctcagtgcttaagcaattgacccaatttcgccaaagaacttgcgcagccccaaatcccctcctcctttgttcttgctccgccgcatgggactccaccgtggacaacactcttcgggttggtagtttctcaattactctctgttctagctcgtgtatagtctcctattgctctctgtactgagcaattggaatttggccgaagtccatcaccagaacgcgcccttgccttgtaaaacgctgccgtgaccccctcaccatagacccgctcttcgggtcttgttctgcccaaaccaaagtatgtccatggaccctggtgaaaccgtgaacctttacccagcctcaatttggccatccccgtcgctgtttgatcggaacatgttcatcctcctgtccatccgctcggtcaccgtgaactgattgattcagtgtcccctaggtgaaattgatggaggggaaatgatcggggtggatctaattgtgtccctgtcgcttgggagctccagccgtggcgtcatctggccggaataggctcgccggagtgcggcgaggactgttcctcgtcgtggactttgctctgcgaaagtatagaacgta

SEQ ID NO: 7472 - DNA, 461 bp, Zea Mays
taagaccaatgcaatgcaaatccaatacaagatgaagttttgaacaacatgcatctagccacaggttagagtcctattctagtatgtatcactgaagaacatatgccatgattgttgcataaatattcgagttgcatgacattgtaacctgcaacttacaaacattgtttgctagtaatgaaaactatataacagaaaagtaagccaaagtatcttagctagcaggagccagtttgtagataggagtgtggatgcatgcactcatttgttcatttcttctgtgagtccacggtccaggaggcttgagtcgtcacaccaattgttaaaactagaataaactgttcatttgtctaagggattgcttgcttacagccagaacatagggtgatgatgaaattttgttcctgttgactctaatgcccaattgattattcacccttggatgtgttatacttgcatat

SEQ ID NO: 7473 - DNA, 342 bp, Zea Mays
attacatttaaggggacaacacacccaaaaagttggcttgcaattgcagcatcttctcaatggcaccagaggctagagtgggctacatggttcaacgtcatcttaggggttgctcgcggccttaagtttctccatgacaaggggattattcaccgggacctcaagccacacaatgtacttctcgaccataacttcaacccaaagatcgccgattttgatctcttgaggatgtatgatcaacagaaaactcatgagagcaccgagaaggccgctggaacattgtaagtagacgagcaatccgtgttacaaccaaactacgtttatgctttcgaacataagtaa

SEQ ID NO: 7474 - DNA, 346 bp, Zea Mays
caaacctttcacccaaatgtcttgtacttgctttctttcttgtgtttgcctttgctccacttcttccaaaagcatcatccttacctggatcttgagaactcccattagatgtccacgtcatgcctcccatctccagctcttgtgcactgagtttttctagcctcttgtgccagattgataacccgagtgggcttctcggttgtttgggcacattgggcttctcaagttcagatttagtgcctggactatcactagctgatttctctattgtttgggtactgctagctgaagtatctaatacttcctccggctctgtaatgcatgaatttagatctgaacttttgcc

SEQ ID NO: 7475 - DNA, 718 bp, Zea Mays
aggcgctaccaccggtgtttcagcaggggccgcatcagaggaatcttcagctaacatatccagcatggcacttatctctgcatcactgggattcaaaggcacctcaaaatgaacctgcctctcgtcgtcaggaatttcttccagtgaggcaaccaaagcattaacttcttcgggagagggtcgcactctaaggcccaaaccgctatcaccggcaggaggattcgacacaaaactggtaaaggccttggaaggaggcagattccaggccgagtacgcaacaggaacaccgatgttcgacaccttgtctctgagtatcatttcgagccggctcaccaagtccacagcaggaattcttctgttggttacccgggttgaatcagccaagcctcggtacagataggccggatatgctctgtctttcagcagctgaatgttcttgaaaacaaagtcagcgaccacaacttctacaatcagacccctatctttcaacaatccaacttcagctagcaaagcccctgcctcagccattcctggtctgtgggggattcggtccagctcggagtgcgaacatccggctgtctccctgattctccacgatgaaccactccaggcgccatcccttgatgctgtccttgagtgggatgtcgaggtagtcagtcttcctcccacggcgcatctccaagctcgcgccccccactagctggtgctgcactccggc

SEQ ID NO: 7476 - DNA, 295 bp, Zea Mays
cccctccaaagcaaccaattgggcgaggcagcctgtctccagtttcggtcgaggatcgaagactactactctactaggaaggcatcccgacgctcctttaccatgcgactacacttcctcccccgcaccagtaggcacaacttttcatcgccagccttcctggttgcctctgcatcgacgtcgagctctactgcccaacctacctataactagccctagccctgccccgagcatacgagcagcgcacccagcccacagatggtcacccttcatgcccacctacgcgcccgctgag

SEQ ID NO: 7477 - DNA, 422 bp, Zea Mays
cggtggcgccaccaacccaggcggcagcgagttcaccgacgtgaatgaatccggcgcccgagcaacaatcccggtcccccgcgactcccacacgatgcccaagcccacccgaactcaccaatctaacaatgaccgggaatcgcacaacgcagcaacccaccctcggtgagcaacagtcgtcgccggtgagccgttgctaccatcgacccagcacgtggtttcaagcgtaatttaatatctacacgtggatcatataacgaggattggaggggagtccttaccgtggttggaccgcaccgatggcgacaccacggcggattgcggccccgtgtagatgtcccacgatggcgagcaatcgccgatcacccgatgccaattctgcacaacaatgcgactcacacgaacggcgaagactccacgac

SEQ ID NO: 7478 - DNA, 1127 bp, Zea Mays
agcttctagtgccaaagtggctctagccaaggtaatacctggggtgttacacctatctgtaccgaggcctaactgactccacccgggtcaccaatagaagaattcctgctgtggatttggtgagccggctcgaaatgatactcagaggcaaggtatcaaatgttggtgcccctgttgcctactcggcctggaacttgcctccttccaaggcctttacccatttcgtgtcaaatcctcctgctggtgatggcggtttgggccttagagtgcaaccctctgtcgaagaagttagtgctttggttgctttgcttgaagaaattcctgatgatgaacggcaggttcactttgaggtgcctttggatcccagtgatgcagagataagtgtcatgcttgatatgttagccgaggattcttttgatgccgctcctgctggaacattagtggtggcgcctctcccggaagctagtaaagccttggatattcagaggcctgtcagtgttcgcccgaagcgcccttgccgagccaatcagcctgcttctcctgccgatgagcaaaaaaagaacaagagacgtcttcggcgagtatctagcttggatcgggatgctggtccttcggctcctgctgttgaggaagtgcccgtgcctgaatttaccgacgctgaccccaatgggtgtgatgtccgtgttgctgatgaaaatgaggaggaggaagaagatgagatccctctgactcggaagaacagtcggcgctacgtagctagtggggaaagtagtggagttccttctcctgctctgtctgccctcattggtctacaagaattatctctggtgaactttgatcaaactcttgaagatatggttccagaggatctgttatcagaaccggcggatggtgacgcgatggatgtttgtgctgatgtgttcgatgccgggttggggtcatcccgggcagcgtcccgcgcctcatcgaccttggagcgcggtcttgagggtcaggaaactgacttggattgtcctgctcccatggaagtgactgagggaccttcagccttagaggtggctgctgcagagaactcggccctcaaggatggtgttggtgctcacccagcccccgagggtgttgccggg

SEQ ID NO: 7479 - DNA, 685 bp, Zea Mays
ctggtaatgaaattcggtttgactgctgtagacaaaaaattgggaacaaaaacaagcattactccaaaccttccatgtttataccattatccagtgtagacaagaactggatataaaacaggcatctaaactatcttgaaacaacttaactcttttatgtagctatccagaaattctttcgaaatgacaggcctcaaagttgctgttttgttattttttgaaacacaactcggaacggatcaacactggtgggaatatagtttccttctcttttattcttctctaatacaatcgtacattctgactgaccaactaactggctgggcccttagcattgactgcatgctttgcaccaacctccaaatacaaccatggagctgataattgcttttttcgctgtctgctctttgagttctggaagagaaaatagcacagttactgtgtttttttttgttaacttgttatctattgcactcgtgcaggggtttgcactgtcatgtttgcatgccagctaagatacaagttgttacttgttaggggtagctcaatgccaagaattgctgatcatgagtttactactactgtggtggatgaatcaccactatgcaagttattttcactaatgtatctgattggatggctgccttttcggtcataatggcatgtgatgggcacatgaaggcct

SEQ ID NO: 7480 - DNA, 435 bp, Zea Mays
cttatttctattcttgattgtacctagattcctggtttttatgcacatttacctcttcctttatatccttgcctattatcacctttgacccttgacctctctccacatttaccatgatgtttacctattcttttagcctcacttattccatttcaatccgagagtgttgttttccctatcccgctcttgttcgtttccttgtcgctttgcaagtcttgtcttaccttaacttcatcgcttcatcctttgttgaacttttgtttgatatcatccttacctttgtaatctgtagatcttgccttgatacttatcttaggtctgcttgttgaaatcccctctcctctatctcaattcgagagctatgttttacttatctcacccttgactatatcctcttctttactgcgtgtaggcctagacttaactccattcgtt

SEQ ID NO: 7481 - DNA, 1703 bp, Zea Mays
agtgcttcgaccatcgatacgacattagggcactgtgggttaccatcaggacctatcggttggtgagcttctgctgccttttgctctcttaggacccatggccctcaaagatgacattgacctccctatcaatgtgcgggaaggcgccaccaccagcaccattctgttgcggcagttgttcttgtataactagttctctttgtggtgggggcgatggcagtggttggaatggtcgatcgtggatgactgtgttcttgatgtccctacaattacgcagagtgtggcgcatctccttgtggtacgagcactaggtgtcgaggatcttgttcagtgtctgtacgctgcctcgtggcacattgtgggactaagttgccgagggcccagtgacctgcccttcgtctctcggcctcctgtccgagcgcatgtccggctattgatttccctcctttggtgtctggggtgcagcttcgtgtggccgatgaggtcctaggcccatttgtcagtagtgaagtagatgtccgcctctcagaaaagttgttccaaggtggctagagctttctagaggatggctcggacgaaagtcgagccgttagacccgcggtagaaatcctcgatcacggcagccttcgtgacatcagggatgtgattcctcatagtttgaaaatgcattaggaacgagcagagagactcatcactttggcgtttgatggatttgaggtcccagggttgtgccggtttatcaaaaagggattggaaattcgcgacaaactggtggcaaaagtcatcccattcgtcgatgcaatggtgaggaagatgttggagccactgcagtgcatcatacccaataacaatgggcaaatacgctatcatgatgtcctccattgccccggcgcgctcgggcggtggtcgtatagacgaccaaccaaccgctcggatcttgcttgggtcgtacttgtcgatgttcaagaccttgaagttaggtggccattgaattgctcggagccggggggagggccgagactctgaacgtcccctagtccttccggtgatctcttcgagcgtggtcgcagtgatggtccctaggaggcgaccgacgacgtgcattgtgtcgcctctcccgagccgatcgacctagtgctaggctgttcgtagaggatgctgtcgactctgtcctagttgcgaggttgtgtgctggtgcgccaagatcttgatcatactcttcccaccgcctcatctctctttcattccagcgatcgcgtgaagcattaatgttgctccacgtgtctcaccaacttttgatgacgtagctcatgtctggtaccggatgggcagggggaagaagatggttcaccagctgggtaaggatctgtcggtagccttccacgtccagggtacatggcaggccattagagatctaagatagagccccgccgacttcactcgacgtgttcagggatcaagcaaagtcgggcagtagattccagggaaggtgtgggttctcacatcggagcctggcatcatgctctgcttgttccctcgcgctcctgggtgtggcgacgatcgggaattgcggtgtcgcggagtgccctatcgttaggagtctctcctgcatcagatgcctcatcctgagatatgggctgagcgggatctcgttccccgacctcatggtgacgacgaatgttacgacacttgttttgatgttg

SEQ ID NO: 7482 - DNA, 663 bp, Zea Mays
atgagcgtgcactacacatgtcaaacatcaccacattgcagactgagtacgccaccttgctagatgagcatgttgaattgagatctaggtctagcttgttgggtgtgtgtactgcttgtcctggattacagactgagctatagcatagaagaacactaggataaccttgcttgagaaggctagctcagtgagtgcatctacacctgcgcaatgtgcaccgtatgagggtttgcagtctgcccttaagttctacatacacgacaagactaggattgaagaggaaaacacataccttcaatcagtcttgagtttggtgtctagcagtgagccctagttgggcatgatggccagttagttcaaaagggaactggcttatcgaggttaggcttgatgctagcgctagagtgacactcatcttgtgaaggttggtgagtggagtggtttgagtcaatcagaaaaacatccagccacctccaagcttgtcaaagtcactccaccaaaatctaccacccctattgtgagacatggagtgcctgtggagcctatgagagatccacctcagaaacaagtgtggtctcctaaacctaaccatctcaggatttaggaacacacttgacacccctacctgacatcactagtgatcccctttatagagcccctcag

SEQ ID NO: 7483 - DNA, 674 bp, Zea Mays
gtcgtatgcaacaggcgaaccctggggctctccgtggagaaggtgccaggcacgccaggtaaaacgccgtactgagtttgcagtccgggatatagtgcgttctctgatccgatggtggggaaacagagagcgatgactgtcgccgctggtgcggagctctgctgcgctcagctatcagcggtggaagacgaccgatggaccgttagatcttggtgcacggctctgatcgagtctagacgtaagttgacgggccgttgatcccatagcaaacgactaggattagatctagacgaaataaatcctgagcgacggattagatatgggtggccacgatttgatttggcgtaccctttcgtctcaatgaatcgtggtcgtgtgtcgtggatcggatggatccagggggatctcgacttctttaaatccctacccttgattttagatccaagggttcctgctgcgtaccgattcgggagcgtaagattctaatccgagccatgtgttgccgatcggacgactcagatctattgataccccttcaccgagcaagacttgcaaaagagaccttatacttttaccaaatatacccgccatccctccattataggaagacttaacagttaggcccataactttatgcagagccccctaggctttgttcaaatagtgtccatagc

SEQ ID NO: 7484 - DNA, 1044 bp, Zea Mays
caacaattggattgttgatgtcacggctcttccaattgtttacatgcttgagggcattagaactaaggtctgggtaggatgcaacacaacaggcctaaatctgtcagtttaacttcaaggatttgtccaaacattcttaagaagctccacaactgcatcaatctagcccggaaatgtactgccgtttggaatggaaggctttgaggtgaaagaatgggacaagaggtacaaggttgacacagataagagaacatgttcttataggtaccggcaactagcaggtaacccttgtgctcatgccaccactgccttatatctaagctccaagtctcctgaatatgtagaatgttattctatttagcattagaataagatctatgatcattgcataatgccaatgacggagctgcaccaatggcaaaaggatcaacgcaaaacaaagcctcctgcatatgtgaagatgacaggcaggctaaggaaagagagaagggaacaaggcgaacctgccaaggccaaaaagcaggtgggcatcaaaattacatgcagtaagtgctataaaataggtcacaactcaaggacatgcggcaagagtaatccaaaagcaggcaagtgccaatatactatggaaccgatgtaaactgaaccattgcttatggtgtaaagtgaaaataaattattgtgttacctactaaaacttgcaggtactagatggaagggcacaaaagaagacacaaataattgaagatggtgttgtaggtgtgcgttcccagagcagaactcatggtgatgttgcaactgttcttttccaaagcagcctgatgaccactccagagcaggactcagggtgatgttgctactgttcttctccacagcagcctgataatcactcctgttaggatagagaaagtatatcccactaggacaagaaattctccaaggctcgaaggttcttgcaagccagtgaattgatgagtactcaattctgtgttcagcttagcagctcagttttgctgttcttttgattaaaaaaatgataggaactta

SEQ ID NO: 7485 - DNA, 1548 bp, Zea Mays
tgaaagtttgtgatgattggtgacagaggtgttgggatcgcaggcacaatcaaagatacgaaggtgctcataggagggggtggtgctgaagagggtgaagaacggagtgggatggggttgtgttgaagtggtaggtggttgtgttgagcgcctcaacccaataacggaccagaagataagcctaggataaaaggcaacacaacatgttagtggtggtacgaatcatgcgctcgactcgaccattctgtggggagttgtgagggcattgacatccgcagctgcacgtcgtgggagagaaagaaagtgcgagacatggagttatcaaactcacgtccattatcgcaccgaacagcccggatgatgtgaccaaactgagtcgacacccacacaaagaggtgagaaatactggtgaaggtgtcagacttgcggcggaggggaaaggtccacatgtagtgagaaaaatcatccaggatgaccaaatagtactggtaaacggagatgcttggaatatggggtgtccaaatgtcacagtggatgaggtcaaagggatgagtagctcgggacatggaagaagagaagggtaagctagtatgacacccaagctgacaggcatggcaaagcaaggtggcggtgtcgcgggggcaagggatggttgaagtgccgagagtcgagggaggacgtcgtggccagggtggccaagacgacgatgccaagtggaggcagaggcagtggaggccatggcatacggtgtgacaatatgggcggaggaaggtgggtggggacgcgaatgggatatagggggggcagagctatcacatcgagcaaccacaacatgagtggtaagatcccgtatggtgagcccctagatattgaactccatagaacagtggttgtcagtgaagcgacggactaagagaaggttctggatgatgttgggggtaacaaggatgttggtgaggtacaaaggaccaggaaggaccgtgtcacctactaaggtgacatgcatggtcgacccattaccgataatgatggagaaagggaaggtggggctatggggacgaggtaaagagacaattctaggtcgagggtggtgtggaacgtggcaccagagtcggcaacctagtcggtgagaagagggggcgacaaagacatggggtgcgcgaagagagccaaggaaggcaccccatagaaccaccgggacgggggttggggccgggcgtggcgagcatgttgacgacgatcatgggtggcgtagacgataaggtctcgatcgtaatggagacaatcgcggcactgcagaatacaaatggcctagtagcgtggtggccctcccgagggtggatggaggcccgggggggggggggtggaagagcacgacacggtcacagagaaccgggttcatgaccagatcgaagcccacgaagatgccccgtagaaactagtcgtcgtgaagggagacacacacacggtagggaggcatctggaccgcggcatggcgaaggacgaacatcaagagagcaagggcgggagttgacaggccaccgatag

SEQ ID NO: 7486 - DNA, 452 bp, Zea Mays
ccgtggtgggcgcgcgtaggtagcacgtcatttgggctacgcacgctgaggcggaagggaggcgcgtggaagcgggtctaaccatgcagaaaagagaggcccacgcccgggaaagaatggcgggagctatgcgtgggaaagattgagtaaaagggaaagaggcgggagctgttgtgcgcaggagagtgaaacagagtgagagctactgtgcgcaggagagtgaaacagagcgggagctgctgttgttgcgtatttttgtgggagaggagggaaacagggccaccactactggtcctcttccctagctgtccaggccaccggtgtccttcccattctggtcaagtcgtatagggtcattgccgccgtccaaggtctgtgcctctctgctccttttcctagtgcactagtcatctagacgtgctctccctctccctcctttgctcttgctctac

SEQ ID NO: 7487 - DNA, 332 bp, Zea Mays
gctgggcgtagacggcgaagggtggttgcgaagcgtagagtgagtgaggtggatggcggtcgtcttcgtgtgggcagggctggcagacatgaattgttgtcttcgccggccggggcgagtgtaggtgagggggagttgcgaagtctttttgagggtgaggagcttaggataatgctatttaactatagggagatgggaatcattccgaaggttgaaccgatgtgagatgtgacgccctcgctgtaagtgtgttattatgatttgtatgatgaggctgtgtgcattcgcgtatccggctatgtctataggggcgttgcgcgcttggcctggct

SEQ ID NO: 7488 - DNA, 447 bp, Zea Mays
tttttcttaagagtgtgagctcagttgttaagagaaattttgagataatggagcttgaagttggactgtcaggttattaggtctgaattttcagacaaacagtgcaactcttgagactttgagcatggattcaattatgatccagcatggatctgcccatggcagctatgacaaacttgtagctggttaatagctctccaactttactgcagagcatggagtatgttaccatagggatttgtgagcaaatcgagcctaaatattgattgccaggccaactgaatgagttagcctatggtacagtaacctgcttgggttcagaacacttcaccgtcgtcgatcactcctccgccgcgattcgtgtcgccggcgttaggattcgcgctcggggtgggtggataacgtcacgagatgaaagatctttgtcgtcggtgagatggaggtcac

SEQ ID NO: 7489 - DNA, 630 bp, Zea Mays
ctagtcgagctctgcatggaaatactcctttcttcatggtctacggttcagaagcagtactacttgctgatctcaagtttggggcgccaaggttgatctttgaaaacatagcagaagccgaggctactaggctggaggatgttgatgtactcgaagaagaacggctgaatacggtaattcaatcagcacggtaccaacaaactctgaggcactatcacgataagaccatgtgacatcgatccttcacagtaggagatctcgtcctccgccgaattctaacaggggaaggacggcacaagttgtcacctctatgggaaggaccgttcatagtagcagaagtcactcggacgggatcatatcgcctcactcagatggacgacacggaaattgggaactcatggaacatagaacacctcaggaagttttacccctagccgtatttaaaaagctattgggacgacaatgtactctgtaaactgggaaatatatcatcaataaaaagacttcaagagcgctcaaattattcattgtcgacctgcattcctacttaactcagggtgaccactataccctactaacggagcaatcggcaagtcggcgatgacttaagacggtgcaacatgctcgcgc

SEQ ID NO: 7490 - DNA, 368 bp, Zea Mays
taattcttgaagcttgtcgagaactcaactcaagtgatggtgtcagtggcagcatgtgctacgcaataagcatcccaccaatcagcagcggggccaatgaggcgactcgatgcataaaggaccttttcccgatcagtgcattgcgcgatattaagcattttttcaacatatttaatctagtcatcagcttgaagcgtggcttatggctcatgaatttgcggtgtttgtctctaggtggtggttggtgtgggtgatgttgattattgttgagctgagcctgcatattggccattgtattagccatttgctgtagtaactgtgtctgtgccgtgaagaatgcttttgaccctactggtagaggatttggt

SEQ ID NO: 7491 - DNA, 717 bp, Zea Mays
gtcctagctcggtgatgcgtcagccgtgcactagcagcccgaagcggagacaacacagctcggcgaagcggtcccaaggaggcatgccctcgtcatgctccagggtgtagtaccacgtctgtgcaagtcccttgaggtgatatgacgctagccatgtgcgattggaggtcggagtgcgctgtcccctaaagaattgctccggagccgtcatacgtggcgaactctagcttataaaaacgtgggggggagagcgtcggcgcccctgtaagcagtagcctccatgccagcatcacgggtgtgcacatgttagggtgaccacgcagtcactacgtggagacgtgtggcagcaggttgctgcgaccttggaagagcagcccatcaacccccaccgtacagtgtaccactagttgtgggacctccatgcccctagcagcgctgcccgacaaagaagtgatcgtcggtcacgaagaggccaacgagtagacggggcggccaccgtggtagtgccataggcccacgacggaattggagaaggcgacgacagaaacttgatgtggtggattgcagcggcgctgtggacgacgagttcggcttgatgggcatgtcgtaggggtaggaggtgggttgtagtggtgcagattatagcggtgcagatgggtgagtgagaaccgatagaggagcaaatggcggcggcacggatagggttggcggcggtgg

SEQ ID NO: 7492 - DNA, 420 bp, Zea Mays
ggagattatccaaagtcccatctggtttcgcttcggcctacgaaggccgagagtaacaattgaaaatgatgccgaaacgtgtcaaaaggctttcagcaatatctgtgctttcattggcacaagagacataatccaagagcacatagcctacagagtgtggccacttgttgatagttgggagatgccgaaggagactgctgctgggtccagcgaaggtggattagttcgattgaaatataccttcagatacagagaaaggttcgacgaaccgaatgacgactggttgaaatgcattgaggctactagtgacgagttgcttggggcatataccaaggccgaagatgatgctttgtatcctgattagctttcgggggtcggagcaagaaaagattaaacagagttttcgacacaattggtttt

SEQ ID NO: 7493 - DNA, 369 bp, Zea Mays
ggggtggttttcggggtactaggccatcagcgagtgctcaccggtgagcgcgccgcggaactctgctcctggccgctcggatgaccggggggagaagacggtgttcgggtcgtggatcgtgtatcgttcggttcagattaggtgtagcgcttgatgaagattgggtcgtccgatcgggatctgtgggcttgagttaagagtagacgcggaccactgggtgccgttgatccttgatccatcgggtcagagcatggtccgattgtgctgagggtaagatctaatccgggccatccaggagggatccgatggcccaagattcgtggtaccccttcggtatacacatttacataagaaaccccctgttttcgc

SEQ ID NO: 7494 - DNA, 340 bp, Zea Mays
atcagagtcgcacaattgaagatctacgaactccaatcatcactccatcaagaaatcggcgacggtggcgcaaacgaccccgcggtgaggcctcgccgatgcgacggtctttggctgtacacggaccctacacccaaattagatcgcaactacgcatagcaggaacgatggcggacatgtggatagagatctcaccatgaatcaggaacgtggaggtcgctgcccaccgtgtttggcggagctaccgcggcgttgggtctccgacgagggaataacactgaccctgatcacccaggcttggcgaagcccttagatacgatccaattcaccggcactgcac

SEQ ID NO: 7495 - DNA, 644 bp, Zea Mays
gaatttcctaagttctctgttcattaaaaagaataatcagaaatggttaaatggaaactaactttgcatcggggtccctggcgattgttttaaaattcccttacagactagtcctcgggtcactattcaaatgtgccactgacagttcagaaaaccccctggggttttgctaaacctaacccgaggtccttctcccaaataaacagtacccgcggtagaggaaagggcggaggggcttaccggcggcgagattgctccggtgaggtggtcgagggcgtaggggaggtcgtgacggtcacgccgatgtgtggatcgtctccggggatggtcggagtacgccggtccacgtgcgcgggcggtggagctcgtcggcggcgagggctccggcctatccagggcggtagagttcaattaaactggtcagtgagcttcactaggtgctagggaaggcatgcgcgcgaggaattggagaatggctcaccggatagctcggcctacacgcggtggcgggcggctgaagtccgactacagtgatcttgttgttccggtgaggcagggcttcgatccttgcttggagaagcttcatggctccttggggaagctgtccaagggctcagttgaggctgagggtctctggaaatggc

SEQ ID NO: 7496 - DNA, 377 bp, Zea Mays
atcctgcagacggtgtgcctgtccaatccattgtcaaacagtgcgcccgtgttgcggggtgcactgtgtccatcatcacttatacgagaagcttcccctgcacgccgatactacgcagatctcggatgtcaggacgcaagaagattgctccagcagcgaacattagtagctccaagtactacatccgttatgttcctaggcccacatgtcggggctcagtacccttgtacgtgccccccttaagtataaaaggggaggcatgcagcgtaacatggggacgcactccgacattcatggacagaccagacttagacactcagctctcaagcttccacatcaatccaacgcacagtggagtagggtattacgctccggcg

SEQ ID NO: 7497 - DNA, 551 bp, Zea Mays
atttgcaatcaattacattaagacccggtctaggcggaataaggtgccaggtcttgtttttgagaagggcatgaaattcatcattcatagcttggcgccatagagggtgtttcatagcagcaatatgggaagtaggttcacttgatgaagaacgaatagctgaataggtcactgtaccatccgtccgtacctttggttgacgcagattgtggcgaagtctggtgccatatggatgagcatggcctgtgttagcatcagatggcatagatgatggaaccatatcatcctctatacgtggagatgtagctggtgcatgcatgttctcagtccacgttggctgttgcatggggtacacgttctggtggagtttggcctgccagctgttgaggaagaacattaggatgaagcacgtatgttggcagagactccaaggccaccgacccagcgggttctgcggttccggagacggattctgtttgaacaccgggtctcgacacgcttttcagagacgtgtcagccatattagtagaagaatcgccagaatgttcagg

SEQ ID NO: 7498 - DNA, 551 bp, Zea Mays
tctcgcgtagcggggtcggagtcggacttgatgggaaggctgcatccacaacacgttctgggttctcgcctctccgtgtcgtcgttctataactcccccgtcgtctcttgcagcgcccactcgaactcgatctaatcctttagcgtttctcctctctattgccacgccgctctacgcccgttaacaatccctagcgagccgccgccaacgggagcaatactgcaatagagtcagtgagtcaccgtccatggccgccgtggagcttggtcttcctcctggcttccatttcgtacccactgacgaggaggtgccgaggtggtcaagcttcacctactcccttgcatcctataccttcctcaaccggcaaccgcggaacaacatcatggtcgggcatgctctcctctcctcgagaagcatggacgaaagcatgaggctttcttcttcgcggtcgggcaggccatgaacgccaacaccaatcactagaagcggacctacgagggacacaggacctggcaaggatatgacaggaagaagggctaggaagaaggcga

SEQ ID NO: 7499 - DNA, 621 bp, Zea Mays
ctggaagagtgtgatcagcatgtacgcgggaaatgcctcacggtcgagtatataaggccaagggggatccccatcactttcatctcattagcacctcaccactcggaagaaaccacttataaacacctccctcatacaaattcaccccaggaagtagggcattacgatcctcaagcggcccaaactttctgaaaatcgcccgactccatctttctcgtgcccccggcacgaaccatcgagttacgatctatgacaccgtcctacccaaaagcaccacgggggtacccccgggtgtgcggtcggacactaaacaccgacactttcaaagtggaaaatttgctccttctttactaagcaagttgtgtatttaaaatacagcatcgcggaccaccgtgcatcaagatgtctcttttgtatgtatgtacgtttgatttgagtatggtgcttataaggttttagaattcgagattgttattacatctcgctttcacgccggaaaccacgcagaggagttccattatcctatggctttgcacctgcacgcatttgatgctgataaatgaggtccacgtctcaagtcttggtttttcttggtgctcccaactctatcctgaccatgag

SEQ ID NO: 7500 - DNA, 679 bp, Zea Mays
cctagccacgctacaaccatgggagactgaaccacttggaggctgaagcagtttagaaaacccccggcatgatagtaggtatgtttccagtcgactcccatattgcagaagtgttatttgatactggagctacgcattatcatgggtagaagcacataatcttccaataactaccatgtcaacacccattcaaattgattcagtcggtggtagaattcgagctgatagtgtttgcttgaatgtaagtgtggaaataagggggatagcatttcccgctaacctcatagtaatgagtactcggggaatagatgttatcctagggataaactggttagataagtatcagacaactatcagttgtgataagaggacaatcaagttcatgtccccactaggagaggaagtgatgactgagttagtcccacctgagccaaggaaaggaagttgttatcagatggctattgatagcagtgaagcagatccactcgagattatcaaagtggtgtcagaatttccggatgtgttcccgaaggatctacctggtatgccacccgagcgaaaagttgagtttgccatagagcttcttcctggaaccgcccccatctttaagagagcctacagagtatctagaccagagttagttgaacttaagaagcagattgatgagctgttagagaaa

SEQ ID NO: 7501 - DNA, 392 bp, Zea Mays
ggtggacgaggcaaagaacgattctgattaaaaggtcggattaccaacctggttcgcttctcaggtccttgattagacctatcacctccatggcctgtattcttagcttctactgccaatgccgtactgacggctctgctgtaagtaaggtccagacaagtggccattttcctttggagcctatagttgagtcctcgcatgaagcaattctttttcttcagatcagtgttcacttgatcgatgacgtacttcgataaatgattgaacttgttgagatactgcattacagtatctcccccttgctttagtcaaatgaactcctcttgtttcatgtgaagcaccccttctggaacatagtgttcacggaatgctatcttgaattcatcccaggt

SEQ ID NO: 7502 - DNA, 827 bp, Zea Mays
caaagagctccgcagttttttgggtttagctggttactacagaaaatttgtaaaaaattttggcatcatatcccgccctcttacgaatttgttgaaaaagggagaactttacatctggcattccgatcatgaccaagcttttcagctgctcaaacaagctctggtgaccgccccagtccttgcccttcccaactttactcaaccatttgagattgaaaccgacgcttgtgagcgaggagtgggtgcagttttacaccaagctggacatcctattgcttttatcagcaaagccttgggacctcgtcataggggtctttccacttatgaaaaagaatgcctagctatccttatggcagtggatcagtggcgatcatatctaattggtgatgagttcattattcggactaaccatcgcagcttaattcatttggatgatcaacgcctgacaacaccatggcaacagaaagccttgaccaagatgctgggccttaggtacaaaatttgttacaagcaaggacagaccaatcaggtagctgatgctctctcgagattaccatctgatcaccttctagcagtgactgtggttcagccggattggcttcatagtttatctgcaagctattcccaacactcggacactgcatccttgctgcaaactctctcagtacagtctccttcgggtccttacaccatcaaagatgggctcattctctacaaaaaacgagtattggtaccagctcaatcagaattccctaagaaaatttttctcactttccacacatcccctatcggaggtcactcaggatttgctgtcacctaccacaaag

SEQ ID NO: 7503 - DNA, 518 bp, Zea Mays
gaagaaagagatagctcagtatgtggcccggtgtgacacttgccagcgaactaaggtagagcatcagaggcatgtaggtctactgcaacccctgcccgtgcccaaatggaagtgggaagaaataggcatggatttcgtaatcgaactgtctcggacccaaaaagggaatgattctatctgggttataatcgaccgtcttaccaaagtagctcacttcattccagtaaaaactaccttcggaggagccacccttgcccggatatatcttaaagaagtagtcagactccatggtattccacggaagatagtgtcagacagaggaacacagttcacctaaaaattctggatgagtcttcagcaagctatgggcaccaagctagacttcagcatcgcctatcacccccggtcagatgaacagacagaaagagtcaacaaagtcctcgaggatttatcgagagcttgtgtcttgacctttaacaagagttgggagtctagtttgtcgtatgcagagttttctt

SEQ ID NO: 7504 - DNA, 559 bp, Zea Mays
taaagttgaacatgaattcttgtcgttgaattttgattagctgaatattgtttatcgattgaaaaaataaagcaagaatcagacgtccgtaatttaggagtaatagagagtatgaggcacccaatcagcgccgtatacatcctacctggcagtacctcgtcgctcggtcgctgtcacgtttctcggtgtaccgtgtatccatacagtccagaccgtctccggagagcttgtttatctgttcctcacatgagatgaacagtgttcacgaggtacaagtataacaaaacagcaggttgccagtttgtacgtacaccacacatacacataccgcggttttttttctatgtgaccgagactctatacactttcaagtacacagttgccaagtgtgatccggacttgtatgttgccaatttgttgcactgatcgtcacgtcgatttcgacgtcgcaacgcacgctagccagggagggctctgctcggcagctaccaccaccgattgttgtttatatatatgctacgcagcgcgttgctgcaacatcaacctacctatcaactcg

SEQ ID NO: 7505 - DNA, 630 bp, Zea Mays
agcagtttccgccgccagggcgtgcagcttctccacaaccgcaagcgcagcggcacggtcgccctgcactgtgaggaccccggccggagacagcatcttgaggaccaaatacccgtaatgggcaatggccatgaaccggtatagggccgacctgccgatgatggcgtggaaggggaggttaacctccgcgacgtcaaactcgacgttctctgtgcggaagttctcctcggtcccgaatgttaccgggagtgtgatactcccaaggggatacaccggttgtggtcccactctggagaatgggcgagagggtcccaaccgggaccctgggatctgcagtagcttgaatgcaacatgactgatgatgttgaggccgacccctccatcaatcagaacatggtgcagccgcatgttggcgatgacagggcggtgatgagcagtagtataccggcccctgccatgttgtagtggcagtcggatgccccgaaggagatggtggtgctcctccaccgctgatgtggagcagccttcgggacccccgggaccgccgaaaggacctctcggcgtagggacttgacgttcctgcgggaggtgagctctcagctcccaccgtacatgacgtacagcttcttg

SEQ ID NO: 7506 - DNA, 408 bp, Zea Mays
cccgagcggatgaggctggcacacgcggcaggagaagatttttctttcagagatttttttactgtgcgagacgatgaggatcggctggatattttccctctcccatttctttacacaaagttaaatgcaattatcaattactcgctttcagttctaatcacactggtctggtctgtttcggactgaaaaccattttcgtcgagttccaattaatttgttcaggataaaatcgtaagagtgggtcgagcttccaaattcgtattctcttaatctataaattttaaacggacacaagactcgacatatcgcgaaataaatacgcaagatcgatgcgactttgaaagtgtgatcctttcggaagcgacgtcacgcatcgctcacgcgggcgagaggctgtgcactgtccag

SEQ ID NO: 7507 - DNA, 336 bp, Zea Mays
ggcaaattgggcgatgtgaagtcgatggttgtgcatgttgatgtcccacgggagggagaggcataacggggtggctacaatagcgacagtatgtggcaggtttgcgcagtgggtgtgggatgcaaaagcatgaggtaccaggtgcaggtgccacggtgggggcagggctacatggtgcggcacgacgatggtagccagcgtagtagcaggggtgtgcagcgtggggcgggcaaagcatggcgcgagcagtgtggggtgggtgaggagcaggggcgcgactcgtggtggatgacgactaagcagtacggctggacgaaatgctcgtggctcgttggc

SEQ ID NO: 7508 - DNA, 372 bp, Zea Mays
tgaacattgaacctctcagtagactttgccacaccaaaggattggtaattggaggcgggacacagatggtgagcttgccagagcaatggcttctacagaaccacaaagaactgcagtcactaaaggtgttatgtgccagttcattggagtctctgccaccaagtatgcgagccctgagagcgctcaacttcttcttgttgtcaggagctgggaaacttacatcacttccagacatgccctcctccctacaatggctccatgtcataggctgctgtccagagctggtgacccagattagagtgaaggacaaccctgaatggagaaagatctccacagttcccaaggtgcacatagctgctgccaagactgtcc

SEQ ID NO: 7509 - DNA, 768 bp, Zea Mays
ctcatgttgtgtcatgtggactaactgaggcattagtatgcattgtgcaaccatgtctctttacttgtggtatgtaggtgtggagcacaaggatggtggtcaacggcaaaggtgaagatcatgcgggttagtgtcgatgggccgggagaggcaaaggacgagcgttgggccttgaccaagggactggagaagcctgcagtggctaacacttgggaacgcataggtgcgagaacatggcagagaagatcgtgtcgtcgacgccatcgaggactagtggggcacgtgtccaggacgtggtggacgcacatacggtgtgctactcacggtggtttcagtggttgagcctcaaaacctcctagcactatggagggctggattcaatgagtttgggcctcaaaatcaacgttgtggttccagtgggaaccagaggcgacacatggcatcatcgctaagggtgcgtcaatgcaaagtaacttcatgtggagtgtgtggtcgtcagatgaaaaacctaggagttggtttattttgcccccggttaagtggatgagctttatgtatcaaggatctaggggtagttgagacttgtgggggacagatatcccccgggtccactagaaagcgaaaggtccttgtgcgaggcctcgggcccgttaccccgcaaggccatctcttcgtgggccgggcaaaagctaccggtggaatggaccgatccgagaagtcgatggatccgagcctagatggtctgtcgaatcgtgcgctaccccaaga

SEQ ID NO: 7510 - DNA, 792 bp, Zea Mays
ttaactaacacattaatggtgccgctaacacatcatagcttttctattaccaaatattggtgcaagtgtgacaaggtttgttcgattgcaatcaatagttacaatagtagtcagctatagaattattcttttttgattgaacgtagaagtatgcttcgtcactggccacaatcaattttggttgagagaatacagatacacggtgcaagggggaactaatattcttggcttacatatttgcatattaaaaaagaaaggaaaatgtttaatcaacttgaatttgatgttttccttttttgacataatatgggggcagacaataatacacatttgaaaggcatcaaaacataataacctaaatatatggccatgttttaaaattttccactgttatattatgcactgggatttgtaataccaccattaccctacttagttctgaatatgagaatactttctgactttttaggtcatggtacctcaaaaacagttacaactaccatctccttcaaaattttcactcctcaacctagatcaccgagtctatgttttttgtttcttattatatactaaatggtcaactacttttcaggattatcaacaactagtttggaagtcttgcaagttgtatttaccacaggcttttcaacatcatcaacagctggtttggaaaccttgcaagttcaatctgcgacaggtacaccacaaatatttaagttttaccaatcattagttgctattttcccactccttccccacctacatacaatacaactgattttttgtttctta

SEQ ID NO: 7511 - DNA, 327 bp, Zea Mays
aggctacggtggttaggggtcaacgtggcacaaagatgacaatgatggtgccagaactcttcatagctcgctataaagaacgtgaccagggaagccaagacgaatgatgcacatacagacaaacacatctttaccaaagtagaacaccctgttttaccacatcatagtagatccttcccgaggtcagccagaacacggatagaaggaggaggtcgacctataaaaggaggagatcggccagaacatggatactagtagcaaacccccaccttggcttataaaaggaggaggtcggccaaaacatggatagaaggacacaggatgacg

SEQ ID NO: 7512 - DNA, 694 bp, Zea Mays
ctagtgaggaggatatctttaagcttttgccatgacgaaatagaccctggtcgaagagaagagtactatgtctgcgctacattcttgactgccataataaaagattttgtcatgactactgcattgccatcgtatgaagatatagtagcttcataactcataaggaactgttttggatctgacagaccaacgtagattgggagttgaggtggcctgtagagtggtggccatggtgcagcttgcaactcacctgctaaaagagaggagtcattgtatagtgaagcatcatagttgtgttcttcgaagtgaaggtttatttgatggtatgaacactggaattgctcctcttgctatgtcatatgacacaattcttttgatgcttcatcaatttatcgttgcagttgagagacccaaagcattttcttccgatgcttctcgacttgttgatggatagctttgagatttccaatttccatatttcgttcatcttgcgatggaggatccacaacctttattttccccttccgcacttcaagaagatgtggtcgttcaacctggttatgatcaatgggagaaagaactaaagtgggagttgtagacttcttctgaggcatgatgagaaaattcttgtagtcgtgagttcaccgaaggtgggcgccaatgttggtcacctgctctgattccaagaatgaac

SEQ ID NO: 7513 - DNA, 440 bp, Zea Mays
caagaatggacctggagacggcggtccacggcgcggcgtttacggtggcgcgggaacccgattttggagatatttcaaattgaggagctatggtgaacgattggtggtgagggctgattcactgggtgcataacaagctaaaggagcacgttgagcactcaatttatagagggcgaccgcgagtacgatgaatttggacggataagagcttgcggtgagaagagaatgagtcaccggagctatctgtattggcgctcaacggcacaatcactcgaggatggtaattctaggcttgccacggttacggttacatggtaaaaggaccacggcgtggcgcaaccctggaggacgacgtccacttcggcgatggccgctcggccatgtcgccggcaagtgggttcggggactgggcagaaacattgtcccaagttcatcccccg

SEQ ID NO: 7514 - DNA, 497 bp, Zea Mays
gctctgcaatggatagattgacagcacttgtccatgatcgatacacacggtagatttatatttaattgtataatactgtaatcatattttagacctatctatctttattgtacagcaatttctatttaacaaactcaaaagacattacaattgttggctatgagctattatcagctcaggggcattcaggtcgttttacagctataatcaggatagcaaaaaactcagcttattgaggcagcagattctctggacagcaaaattatcagacaagcctgctacccagagaatcgagttcctaaaaagcgactacaaacagggcctaactctatcgttcataagcctattgcttatctttcactaagtagcctgcatgatacattactgttctggttggataaataagatgctctccccgtagtgaaattctaatgctaacaagattaaagtgaagaacttgcatacatgcagcaatacgtgtgcaaccagcaaaaaat

SEQ ID NO: 7515 - DNA, 833 bp, Zea Mays
caggaacacgacatgtgtacacgacgtgtaatgtagttttcaatgaagggcgaggatgggcatgggacaaggcagtggacgaagacttgactccaatgtacgatgacttcactgtcgaatacgcccatttgagggagccgagtgagtaggcaactcttcttcaccaagcaggtataccctagtcccaagtctccatcgacttcagcgccatgctctccagccatgactttggctacaatgagctcttcaccattatgcactccaacaccaacggtaacccctctgggcacgtcccctcctacaccagctaatgtcgatcatgacctggttgggcttgttaccccactctcccacgacgaggagcgcatcgacatgtgccatgatggtgagtcattgcggtatcgtacggtgaaggaccttctcaatgactagttagtgctaggtcaggtgcctcgcaatctggaggcagagttgcatcttgcatgcgacgatgacgagccccagtctttcacagaggttgagagacataaggcatggcgtgctacgatgaagtcggagatggatgtgattgagacgaaccacacctacgagctcactgacctccctcgtggtcatcgcgcgatcacccttaagtgggtgttcaagctaaagaggtatgaagccggcgcaattgtcaagcacaaggctgtcttggtggcacgtgatttcttgcagcaggaggggattgacttcgatgatgccttcacccctgtggcatggatggaatctgtgtgactctttgcgttggcaactcgggagggttggtgtgttcaccacatggtcgtcaagtcagc

SEQ ID NO: 7516 - DNA, 776 bp, Zea Mays
gtatgaagttgaactgttgtcgtaaggagtgaaaccatcagtggacaagcctagacgaacactcctagcgtctcttgaaatttttgggtcaaaacgatccaaagccttccaagcatcgccatctgatggatgcatcataatgtctgggtcttggctctcacggtctccttccttatgccacaacattagcttcgcagtttctggggttaaaaacaaacgtttaagccttggggtgatggacatatatcgaagttgtttaactccacttttgtagcaaaagtagctccatcctcttttagtacctccgcatatcttgatttaccgcatttctgacaatgggtgtccgcttcatattccttccagaacaacatgcaattatcttcgcacacatcaatcttcttatacttcatgccaagaccggacacgatcttttagactggtataagtcttttggcatcttatggttcaatgggatgagatcaataattagattgattatatcgttatagcaattattcgagaagttatactttgccttcattgccataagacgtgtaaccacctgcaacacagtcacagtggtgtcgtcatgctctttttcctctgatgcgtgaagaagcttataaaactcctgcacttcctatggtgtagcctgttccgaggccaatgttggatactctctactaatatcagccaccaagtcatccattcgatcctcctcctcgtcatcaattctttctgactctgtgatattcttctctacttctccatgtgag

SEQ ID NO: 7517 - DNA, 628 bp, Zea Mays
ctggtggagagggatgaagaaagagataacacagtatgtgacccggtgtgacacttgccaacaaacaaaagccgagcaccagaagcctgcaggcctattgcaaccgcttccagtgcccgaatggaagtgggaggaaataggcatggattttgtaaccggactgccccggacgcaaaaagggaacgactctatctgggtaatcatagaccgtcttaccaaggtagcccacttcatcccagtgaaaactacctttggaggagccaccgttgcctggatatatcttaaagagatagtctgactccatggcattccaaggaagatagtgtcagacaggggaacccagttcacctccaaattttggatgagccttcagcaagctatgggcaccaagctagactttagcaccgcctatcacccccagtcagatggtcagccagaaagggtcaacaaggtacttgaagatttattaagagcatgtgtgttaacattcgacagaaactgggagtccagtttgccttatgtagagttctcgtataacaacagccatcaggccagtatcaagatgtcaccgttcgaagcattgtatggacgaaagtgccagaccgctctcatgtggtccaatgtaggg

SEQ ID NO: 7518 - DNA, 345 bp, Zea Mays
tgctgctaaactactttctttgggtagtgattcgcctagtgactgtgttccccacaatggaaacatccacgacctcctccttgcactggggttgcctggatgctggggcaggaaggcaaggtgtctggttgctctgccgccggtattaatttccttcttgttggttgttctggcgatactactgctgctgagggaattgtctgtgatactgctactagtgctgacgctgatgctgatgctaatgtccttgagggtgattctgcttgaattgttgggtgaattgcctgagtaacggtgacggctgctactcctggcctaagatccaccgatcttgcgtttcctgtc

SEQ ID NO: 7519 - DNA, 499 bp, Zea Mays
tggattattttgttgcgttggatgtagctgcggcggagacttcgccgcgtgtggagggtgtcggggatcttgctagtgcgagtactgggtatatgcggcgaagggtggtgggaaaacgtagtgtgggtgaatttttgcgaagtggtaggcaccgtcgtatggggatggagcgtggccgtctccgagtagaccgggttggtaaacgagaattgttgtcctcgccgattggggcgagcataggcgagggggatcttcgggatctttttaagggtgaggaattgaggataatgttgttcaattacagggagatgtgtatcatcctgaaggttgagccgatgtaatatgtgatgccctcgccgtgtgtatgtaactgtaatttgtatggaaatgtggcctgtacgccgtattcgtacgcctgtgttgattcggctacgcccgtgggcgactttgcgcggagtgtctttttaatgagagacttcgattaacgcacttgttgtgc

SEQ ID NO: 7520 - DNA, 686 bp, Zea Mays
gcatattgtagacattcattagagaagattaccttcaggtgcaacgagaccattctgcctttgtaaggcattagctagaacgacgacatcatgtgccgaaccctcccaaccagctagcacatatgttaagcgaaggtcaaagtctaccgcggccatcacattttgggttgtgaaactctttctacctcgaaaagctacctcacgagacttggggacactagctcgtatgtgtgtaccatcaattgcgccaatacaattctacattataattttgacttgatgagaaataagaataccattatgtgcaggtcaaaaataattttagtgtgcctagaccatacctcaaagtaaggataccatcaaggatttccaaggattttgactgaagtttcaagagatggaggcctaataaggtcatcacgaagttcaccgatagcacgaagtactaagttaaagtagcgactgacagtttcccctgatctcttgaaattttttcctacaacaacattcctctcgttgtgaccaattgtgtgaaggaacattgctacttgttcctcaacacaacaatggatactatcaaaaagaaggcttctttgtttcagtgtatcacacaataaaaagaatggtgctctcctcaatcttagcatgcgcaaacaactcgtgtcatctttatggtaaatactaga

SEQ ID NO: 7521 - DNA, 515 bp, Zea Mays
gtggcctcaagaggttagggagggtgtagggactcgctggcgagggccaaaccatggtggaagcaccgaaggtcggagatccacgacgaggtggcatggtggcgacgctagcaactccgacgagcaattgcgcaatgcagagagcgagggtgcaatcagagtgggtagggggggttccttacctcaaggtgagactcgggatcccctctgaggcagcgacgacacgacgacgacttcaaacgatggccacagttctagggctgcacggggaacgacgattgaacgcgggcagagtgaagtagagggatagagagaaattgagggtgagttccaggctattggcaccgagacaaagcttaccgtggcaagaaaaacgacagggcctcgacatcggtgagagaatgggtgtggggcgatgatgagcggtggcggttctccctcagcgtgtgtgcaatgtggaattgggagggtgagagctctcagagtgtatgagtgagagagggggagagcaggtg

SEQ ID NO: 7522 - DNA, 274 bp, Zea Mays
gccatagttgacatctcgcttttaatctcatccgcttgaatctatttgaacggctacaaggctgtcttccacccgccggcgagtgacacggcgagcagaaccatttgcgcggtggcgctaccgccggggtacgccccaacgctcccccagtgagtctcctatccaaccgacagctgctacgcaaggaggggatgaaggcgaactcgattagagcacgtaccgctgatggaggtcaatgggacgaagaggcgacgaccaatggcagcttggtcgg

SEQ ID NO: 7523 - DNA, 543 bp, Zea Mays
gtggtcaatctttgtggacttgagcttgctgaagagctcatccatggtgagagtctcgtagttgggcgactcgatgatcaccaagaccttcacctccaaaaccctctgatctagagcatgtagtaatttcagcgctctctcatgatcactatagggtagctgtgccttgttggcacacatcttgttcacaattgactggaacctggagaacatggaatcaatggtctctccagccaactgtgtgaagttctcgtactctcgcttgtacgtctcaaacagtctggtcttcacatgatcattgccctcatggaatctctcaaggatagaccagatctgatgagccatagtcagatgtccaactcgctcaaactcaccaagcaagagacacgagaacaaagcgtttcaagctttgttgttcgaatcatggaaatccatttgaattggagtgatccggtcacttgtagcatcgaaaatcgcatcgaggcaaatttcccaaacccggtaactgatgctctgaagatacgcagacatgcgaatcttcca

SEQ ID NO: 7524 - DNA, 752 bp, Zea Mays
gcctgactcaaatgaactcatgttcaacactgagcaacctacttataattttggagcctataaaaattctaagctaagaaaggtaataaaaaggaatgctattatagtcacatcatctgaacaacagtgaagggaagggagggatagatggtctgaatgcctataaatgtcgttcccttggtctgcttcttaaatttgaaaccaagatactatagtcaaatacttctaaacttgaagcctataaattggaataaccaagttaaataagaacaggggtaactattcatagctcagatggttgtcatccaatacgtgcgctaaggcacagacaggtgaggttgcatattcaatcccctagacagtaaaccattgaggcatattaaaacacattttccatgaggtttcctaagtgatcctttaggtaaacagaaccatacctagctccatatgaaactatttcccggttttaagtacacctaagttaaggttcatacattggagctctggcagtaaaacaatagtccttaccttgagacagcttagattaggatggggtggatggtaatatggcatgagcaacataccgcatttcatgcatggaggaaatcatttttactttctttcctagccatggtagctatgttgctccttaccaaggcactacatggagcatcatatggttcatgatgtaaacatggttttagatctgtctatactcacactcaagaaccagccaaaatgtgatattccac

SEQ ID NO: 7525 - DNA, 589 bp, Zea Mays
gacgcttcttacatgagagagagagaaagagagttcttcagctaaggccctcagctatagtgcatagtgggcccctctggggtaaatcttggggcgtgcttgcacgcggcatggctccttctgacaggtcatgtgttgtcgtattcctcgcatagcgttttgtcgcatccttctatcgtgtgagtccctgtagcttgctctacgcccaggctaccataccagatgggtcccgcagaatgtttcttggtaaggttgaggttcgtgtacaatgtggcttcgtcttctatcaatgtccttatgtcacccttcagcatatgctaccacgcacttagtgtgccgtcccatcctttccggtacatgggtgaagactttgttatcatgatccccccttggtattgtacgcatggcgtggacatggtttggtggcgacatgtcatgttacaattgtcgtggaccaacaacgtcggcctggcctccctccttgcggatccgttcggtcgtttgctccgcctcgcagacttgctcggcgggggtttggtcgttcgccccgcctctcagacttgctcggtagagacttggtcgctcgtct

SEQ ID NO: 7526 - DNA, 772 bp, Zea Mays
caactgatcttctttcttggtataattaccaagtatttcattgcacatggtctcgatcatctccagccattctttgcaagttttttgaattgtttctcaaatttaaagcgataggggagccgtacaagctcattcttctttcccacttcttttctctttggcattccctaaccactagaagttggatatgttctgttttataagtactcttgcactaagtccctagtactgatgtgcccagccaccactctaaattctacttcggccaattggcaaggggaccctaactgcatgttgcacaagggtcgagtcatgccgaagttcagcttcaagggactcattaccatactcatgagtttttccctcttcttctcatcatatttcatgtaaaaccattcattagtccacccagttggccacttgatgcgatagccaataactggggccttcgtatcctttcgatacgcaaaattataacaaccaaagttcttgtgaagggcatctgctctatccttcgtctggtagtgtagctcgtgcacccgacaaaaagcttcggcattagcatccattccttggcttcggagagcccatatgaagacgctaagtctaacaatagcattgggggtcaactgatgaaggtatatttcaaagttctttagaaccttccctatcatgtcatttagggggaaccgaagccctgctctaaataagctcttaaagatgataacttcgtcctccctcggctccggaattacctcttccccagcaaatc

SEQ ID NO: 7527 - DNA, 591 bp, Zea Mays
ataccacacctcgccgtgggcagagctccgtgctccatcaatcaccgtagaagttagccggactaagtcaccctcgcgatctccctctgaatcaccacgcacgggaagtaatgggatcctgggtgttaggccacgtttgcgccagcgatgcaccgctgcattagctctggcgccgtcgtgcttagctgagggaaataggggagaattgtgtgggccgttgattggctattggacggtcagatttgatcctgagtgtagcgccctcacgtgtaatatatgccctccgatcgggatctggtggttagggtttgggtgctcttcatcacgatccggaccgttggatggggatcgggcgcattcgatgccaccttgggtattttaaatccgatccgtagatctcggatcgggcggccaccaacgcttaccggttcgcttaaagttcagaatctaatccgggcccttaatcattcatcgggcggccccagttggcccgtaccctttcagccgtgcgatgttgcaaataggcccctcggcttttcctaaactaacacgccgtcccccgcggttgtgctttgagtcttgcggattctt

SEQ ID NO: 7528 - DNA, 976 bp, Zea Mays
cttaagtcattgccgacttaagccgattgctctgttagtagggtatagtggtcaccctaagtcgagtaagcgcgagcatgttgcaccgtcttaagtcattgccaacttaagtcgattgctctgttagtagggtatagtggtcaccccaagtcgagcaagcgtgagcatgttgcaccgtcttaagtcattgccaacttaagtcgattgctctgttagtagggtatagtggtcaccctaagtcgagtaagcgcgagcatgttgcaccggcttaagtcattgcctacttaagctgattgctccattagtagggtatagtggccaccctaagtcgagtaagtgtgttgattccaagtctagtcgaagtcaattgataaccaatagtgtgaatgcctttgagaaggaaatcttttattgatgacgtattttccaattacagagtacaacattgctccgatagctttttgagtcttgctaaggataaaactttctgaggtgctctatattccatgagttccccacttccttgccatccatttgagtaaaccaatatgatcctggctgagtgacctccaacaccatgaatggtccttcccatagcagcgacaatttgtgccatccttctcccgttagaattcgacgaaggaccaagtctcccactatgaaggatcgatgtcgtatagccttatcatgatagcgcctcagggtctactggtatctagctgactgaattactgtattcaatcactcttcttccagtacgtcaatatcttctagcctggtagcttctgcttcagctatgctttcaaagaccagccttggtgccccaaacctgaggtcggcaggtagcactgcctccgaaccatagaccatgaagaagggggtgtttccatgcagagctcgactgggttgagttcttaggctccaaaccacataaggtaactctctgatccacttccctgcgaacttttcattcttg

SEQ ID NO: 7529 - DNA, 364 bp, Zea Mays
gttcgggacgcgcgcgacgctgagatgccgtgtgacggtggcctcggcgagaagaaggtgaagtgtgccatgaccatcgaggtgacaacatccatctagggttagggtttgtggtggggtgcgactcaagatagaggggagaagggcgcgggactgggatcgtacggtggagtgggggtagggttgtggggcatagcgggagtggggctgcgtgattgggatcgtacggtgggggcggggaacacacgatagagacgtgggaggtgtggatggtgacgttaaggtcttaatggagtagtatagatttactcgcgccacacctctctcaccctgtcacagcgcacagctcccaacctgctcggag

SEQ ID NO: 7530 - DNA, 715 bp, Zea Mays
gctaattttgtggcggcttcgaccgtggttgcggaaaatgattcgggtgattctgtgtctaagttttttgagtctgatgattctgggagttcggtgatgtggacggaagagtcttcggatgatgatttggattattttgcggcattggatgtggctgctcggaggcctctccgcgtgtggtgggtgctgaagttcccggtccaagtgttgggtgtaggcgtcgaagggcggtggtgaagcgtagagtgagtgaggtggagggtggtcgacttcgtgtggacaggactggcaagcgggaattgttgtcctcgccagctggggtgagtgtaggtgagggggaattgtgaagtctttttgagggtgaggagctgaggataatgctgtttaactatagggagatgggtattatcccgaaggttgaaccaatgtaaggtgtgatgccctcgttgtacgtatgcaactataatttgtatgaagaggctatgtgccttcgctgatccggccttgtccgtaggggacttgtgcactaagtcttagcgcgtttattatgtcggtccggctgcacctgtagtcggtcgttgcacgggtagtctttgagagagacttcgattttgcgcacttgttgtgctagtccggctgcacccttaggcgacttctgcacggatagtctttggaggaagacttcggttttgcgcacttgttgtgctagtccggc

SEQ ID NO: 7531 - DNA, 388 bp, Zea Mays
tttgaattgtttcttgaacttgaagtgatagggcaatcgaacaagttcattctttttcttttctcctttcagcttcggcatattccattcactcaacctcggaaataccccataggctaagaattcttgcaccagatctctagtgtcgatctgctcagtcacaactctaaattctgccacatcctgttggcatggtgaccccgacgacatacggcacaagggcctagtcaacccgtagctcaaactcagcgggctcagtactaacatcttcaacttctcccttttcttctcatcagctttaacatagaaccactcacttttccagccagttggccacttggtgcggtagcttagcaccggggccttcatatccttgcggtaagcgaag

SEQ ID NO: 7532 - DNA, 391 bp, Zea Mays
gttcgggccgctttgagaggcgtaataccctacttcctggggtggctttgtatgtgtggtgtgtttacaagtggtgtttcccgaatggagaggtgctaataagatgaaaatgatggagttcccgctaggccttatatacacgaccatggggcactccctacgcacacactgatcacactcttctggcttatctcctagcaaatagcgaaatgaccttgcttatcttaaggaaaacatggtggcttcgtcctaatctatctccggcgtttaagggcgtcgggcgtgggaaagacggacgactccctcaagattacgcataatctgcggacaatctgggcgcgagccattgccttcttgggtcggcccatttcaattgtagtccttgcccgac

SEQ ID NO: 7533 - DNA, 764 bp, Zea Mays
tgctactattgttttcccattgtttagaattcaacagtgtctacatttgtagaagtaaatgcagtgtgatggttttgaaatttcatcatggggcacagaagttgccctaagatgggtgattgcgaacgtgccaagcgtgtcgtgccaatttaaatcagtgtcaaattaaaccgactgctccactagtagggcatagtggtcaccccgagtttagtaagcgtgagcatgtcgcaccgccttaagtcattgccgacttaagccgattgctccgttagtagggcatagtggtcacctcgagttagataagcgtgagcatgtcgcgccgccttaagtcattgccgacttaagccgattgctccgttagtagggcatagtggtcaccccgagtttagtaagcgcgagcatgtcgcaccgccttaagtcattgtcgacttaagccgattgctctgttagtagggcatagtggtcaccccgattttagataagcgtgagcatgtcgcaccgccttaaatcattaccgacttaagccgattgctccgttagtagggcatagtggtcaccccgagtttagtaagcacgagcatgtcgcactgccttaagtcattgtcgacttaagccaattgctccgttagtagggtatagtggtcaccccgagtttagtaagcgtgagcatgtcgcactgccttaagtcattgccgacttaagccgattgctccgttagtagggcatagtggtcaccccgagttgagtaagtatgccaattg

SEQ ID NO: 7534 - DNA, 621 bp, Zea Mays
ccacacattggtgacaatcattacaaagatccaacttcattacatgaccatcataacaagcattccatcatacgataagcaaactaactctaactaagactgactagactaagacactgaattaagcattattacagactctgactctgtcgatctagggatccaaatctatccgggttctgcagtctggggtaacatagtcgaagcgaccacggggcgatgaacggtaagggtgctgaatcccaacaggggctggagaaccaccatcaagatagtggcgtgccgcgcattcaacaagcaattccgcaacctccgcctgaaccttgcccaactcgtcaagggtgtggtccaactctgtgttgagcacaacgaccaagttgaccatgctgctcagcctgggattgccctcaccaactggcaagacaatcacacctccagcactgccggtcgaatggcgagggtagtacttcaggtcaaggccatcagctaccctgctgaacaacgagcaatactgggaaagtgtctgtcgtgctgcatcttacattgctgcctcggcagtatccctctcagtgatagaatagtgctatgagaaggcctctgcaccccggagatcatcgtccg

SEQ ID NO: 7535 - DNA, 463 bp, Zea Mays
gatttatgtagctgcagcaagcttgtttttaatctgtattgcctctcaaccgaacattattgttgttcagttatggtttatggaagatgctcatcattggagataatttggtctataaaactatttgatatttctctaattgccaacttttatatctaacaccaaaccttgaattccattctttcttgacatgataaatttatctaataaccttgcactcgttttttctccatagattctagaagagtggtcgttgtttataggtgaccagtgaccacatattaactgcagtttctctataggcattgtaatctaaacaaaaacaagacttttgcaaaaatctcccaatattttttaatcaacttgagtggtcattgtttataggtgaccattgaccacatattaactgcagtgtctctataggcattgtaatctaaacaaaaacaagacttttgcaaaaatc

SEQ ID NO: 7536 - DNA, 645 bp, Zea Mays
aatttcgaatcaattaaagggatgtagaaggggcggggcgaacctgatggacattagcgacagaactatgtaaaagaatggggggaactcgaaagaatgagaggggaaacaaaccagggaaggagaacgacggcggtgaatcgatgaagcgcggagattacgacggtggaagaggtgggggcggtcgtcgatggcgatcgcaggagcgaatgacggcgacggggaggaactgattattttagggtttgggtggacccgagctgaattaattgaaaggggtatgatttgtctggctcgttgaccatattagctcggttggcccgcgggggagcggcgagggactgtgggtccactagtcagcgcacagtcagtgtgaaggtttggttactgcgtgttcataataagcataaatagctgtgcaaagtatcgtaaacagtttacaaaaaagaattaatcaagacccacgccaaagtacgtaatataataaatcccaattgatatgtagttgttaacatcgaattatacaatgataaatcccaaatactacaccacaccgaccaggccgcatcgacgtgtcaatttatgtaaccgttggagtcataatatgcaagtataaacgcggtcaattccaacgcgggacgtgac

SEQ ID NO: 7537 - DNA, 579 bp, Zea Mays
gtctgggcctacgcaagcaacccctactgatgatactaattttgtggcggcttcaaacgcagtgcctgttagtgatagtttgtctggttctgaattggggtcttggtcatctgatggtggtgagtttgggagcccgttttcctagactgaagagtcttcggatgaagatttggattattttgctgcgttagatgtgtccgcggcggagtcctcaccgcagctggaggtgggcgaagcgtctgatcccccggctggtgtgaggaccaagcgtcgtcgacgaaaagtggtgtcgaagcatagcgttggcgagatgtcgcgaagtggtacgcacagtcggatggggatggaacaaacccgccttcgggtagatcggggtgggcaacgagattggttgtcctcatcgtgtgggacgagtattggtgagggggatctgtgaaatctttttgagggtgaggagttgaaaatgatgttgtttaattttcaggaggcgggccatatcccgaaggctgagccgatgtagcatgtttgctgccctcactcttgtcttgcggtagtgagtaaaaacgctgccctccccgg

SEQ ID NO: 7538 - DNA, 571 bp, Zea Mays
gaattaaacaatttctaggggtttatttttacattaaaaatctttttctatttacttttccctgattttataattctctagactgggcgcattaaaacggggaacagaggggccaaactacaaaaattcctgtgactcagagcgttattgtactggacggcgggtttattattaacaagcccaaggactcttttgtgaaacagacaggccgaaggggtatctggtaattggagctgtctgattacaaactagcggcctagattaaaactatgattccacgaatcagttactcacatccaacgtccgatccatgatcgaaggccgaggattgcttgcgatcccgacaccctcccggccgcgcgatccctgatcaacgcgccagatccaaaacgacgacgaggtatctagaatctaatcgtggccacccgtccgaggaacaacggccgagacgcttcccttagaaatctaatctcgctcgtcggttactagatcaacgacaccgggcccttcccctacctccggtccaacaccggcgacctacagtgatgtcgcggcggggacgccataatcg

SEQ ID NO: 7539 - DNA, 776 bp, Zea Mays
ctgaattgcgctggccacggcgagggtgttcttgcggtgggttagagcagatttggggaaaattcgaaattcaagctctcggttgcaagattggaggaaatactgggtggtgtggtgcgtgatgatcttgcggagcttacggagggctcaatttatactaagcgagagcggtggccgggaattggaatgatgacgcgcggcggtcggaggaggggggtttcactggcgcagtggattggtgtcctataccgtggcattcactctggtgatcaacagagagctaaagcaggtcatggcgatgcagtagagatgcctagacacgcggcacaaggccggaaggcggcggtcaccggcgaactcatccgattccaccgtggcgagtgcggtacgatggctagaatagtttactggccggagttatccacggcgacgacatttacgcgaccttgagcgctatccgatcaacccgagcacgaatcgaaatggcagcggcacgaattgcggcggagaggtcgttggcggcgagaaactatgctggcggtctgatctacttcagatactgtaccatggccattcctcattcagtgcacctgacagtcaaagtttagggcaaattttctcttaattttatttagtaacatgatcgacactctttagcaaagttatagatctaggatccagctataatcttggtatagcaaccctaggaaaattcttgctcgatcatgcctgaattcgtgcccaaagttcttgcagttgcactgttagtctgaaat

SEQ ID NO: 7540 - DNA, 697 bp, Zea Mays
ggccaggttgccattcctgattgatcatgaaattcatctctaaattctggaaatggttattgtttggatccccaacatgggcctgaagcggcaaatcagcaataccaggaacatggtccacttgaagcgtcggtccatcaacctcctgaggtccattgaatgcagcaatattaacagcaagcccatcccctagcaaaacaggtccctcctcaacaacatggccattctgaagaggtgcaacttgaccagcgccaaaggaactatccgacgacaagcctgagtgctgattactgagttgaagctcatccggttgaacgggttgcaaatcaggcgggaagggctgcggaatatgttgattgggttgtacgttttcgatccactggtcccaatccccatgggtgttgtcatcctgaggagctggcaaatcaccacccataggccccggtgggaaatttaggtcaagcccagccgggggcattggctggcccagaccgaagaaaaccaatggaagctgctgaccatcttccggggcaggaggaatagggtcctcatcctgagcctgcccccaagcatgttttgctgaataatctcacactgaacagtccaagaatcaccaacgaagccctcagcctccaaaaaaacaatgaattgagggacttcctcaagggaagtgacacggacacgaagcagggttctg

SEQ ID NO: 7541 - DNA, 806 bp, Zea Mays
caagcaggcatgttgtccgtatttaatgtaggtggtttcagtgttagaggcctgcgctaagcgacgcctagcaactttcgtgatacgccttgggacatgtggtcagcgtcgcacccgacatgtgcggagagcggcaactaggagcgtatgcgaacgtggcagccccggacatccctagttggggttatggaaaagacttaaggaagtctggatccttctattaatggcttggacatgtggcgggccggacatccctagttaggatctcactcagctagggagcaggcgttgaaccgatcttttcttggttatgaggcttcagacttgagtgacttagaaacccccttttctgaggatgaaataaacaaagttattcgggcaataccttcccaaaaagctccaggacctgatggctacattggattgttctataaaaaatgctggagtattgttaagacagatttggtcaatgctctcattggattctataatcaccgcacttctaagctccatcttgcaaatgaagcaaacattgttctccttccaaaaaaagagggggcactctgccttgctgatttcaggccgattagtttgataaacagcttagcgaaggttctaacaaagctactagcagaaagattagcacctaggcttgagcagctggtgtccagatcgcagaatgccttcatcaaagggaggagtatacatgacaactttctatatgtacagagagtcatccaaaaattgcacaagaataaatgtgaagcacttttcatcaagcttgatatttccaaggcgtttgattc

SEQ ID NO: 7542 - DNA, 296 bp, Zea Mays
ccaaattagaatgaaattaggcgatgaatggaaaactgcttttaaaaccaagttcggcttgtatgagtggttagtgatgccttttggattaactaatgcccctagtacttttatgcgtttgatgaacaaggttttgtgcccatttattggaaaatttgtggtggtttattttgatgatatcttgatctacaagacttgtttatctgaacatcttgaccatctacatgctgtttttgatgctttgcgcgccgcacgcttatttgctaaccttgagaaatgcaccttttgcaccgaac

SEQ ID NO: 7543 - DNA, 402 bp, Zea Mays
taaacagctatgccaaaactacaacagagaggtctttgaaaccccccttcgttacttcccacctagcaacaaaaatacccccacctggaggaagacttcaggcccagtcagggagagatcctaccaaggatgaccccaccatcgtctacatggtcggatatctccacactctcgataaccactacgacgacctttcctcccactgcacccacctaaactcccgggtggaaagcttagagcagcaggtcaaggaacttaaaaaggagaaggcgtccctccaagagtgtctcgatatagcagaaggcgaggaggccaacactcgtgaagcctaccgaaccctgaagatggattacgataagaagctaaagaagctcacgcccacgaagaaaatccaaaagaaga

SEQ ID NO: 7544 - DNA, 313 bp, Zea Mays
ttatcatcagttaagttgtcaccgtaataaaattgtttcttagtttctcaaaagcttcatatgtatacattaccaaagtagtcgttctatgtacggaatgaaataaggatctctccaaatccagataaatttcttctttttatgtttcatcggaatgaaaagtgcttccttgatatacttttctctatcttctgagtgggccatattcttgatacatatttgcgttggtattatgggttcttgtcttttatttatcaggctgatttacttccttgatatgcttttctctatcttatgaagtttttatcctgag

SEQ ID NO: 7545 - DNA, 343 bp, Zea Mays
ggggtagcctgcaattctatggctagggggaagcatcatcaaaagaaatgttatcgtgatgaaaatcatcatatcatacgtcatcatagcttgggctttcctgacgaagctctctcagttgtggcttacgcccttgcttgttgtcttgtactataatgtgacacatctcttcggctgcttcatcaatcttcttctagagttcagccagccgaagcatcttctcccttcttctctccagttgttggtggatagcttctagatctctgatttcttggtccagcttttcttcctgtggtgttgggctaatgaatttccttttctggcttcgagcctcccttagaag

SEQ ID NO: 7546 - DNA, 1094 bp, Zea Mays
tcttgctctatgaccatgtgccatgaccatgtcttcattttcaggcttcaacctccgcaagttctcatcgtccttatttctcttgatatgagaatcgtccaaactttcacggcgattcaaaaccacatcaccacgctctctttgccgagatcccctccactcgccatcatccaaacgcttccgtgaaagatcttcatctctatcattcctatcaatgggcctcatcttatttctatgccttgcaccaccttcaacattgtactccagcctcaaatcttcttctttagctcgtcggctgtgaacaccatcatctctccttggcaaaatttctgtctctcttaccttatcataactcctaccccgcatgtcaacacgatctctgtttacataagattggtggatatcttccctgcctctggagggtaaatgtgatctttccaaatctgattttacatctcgtgagtactcatctttccggcgaagattgtgttcttctgcgtcatgatgccttcttgcattatttactctccttgattgcctatcttgaagaacctcttcacccaattcaaggcgtttctgctgatctttgctgcttccagacatccctttactattttcattagttctcaattcaacaggttcactgccattgtgtccagtaggttgctcaaccccagctatatgtttctgctttttatcagagtgaaccaggtcatcatcctcatttgcatcactaggcatgttggggtctaaagtagcatcatcaccatccacttcaacactaccaaccaatgtggcatcatcatcatcaccaccaccaccatcaaaatgatcttctgtactcagtttatctgtcgtgttatcattagcagcaagtgatccttctgaatcgccctcaacaaggttctcattccgggaatcatggcgtctctctgaagatatttgatgaggtattatgtcgttagagctttcaatttcccgaatagaattctgactcagtgaacttcctttcaatgaccttaggaaaaatatttgggcaagtgttagaaatacaactccaacgaaaatgaaaggatgaaggcaccaatactaag

SEQ ID NO: 7547 - DNA, 363 bp, Zea Mays
ctgcaggccctaaacaaataccaagcccagaccaaagcatggcgcgaccgcgcagtcatcccaagggagttcagcgcaggggacctcgtactcatccgaacagctcggacggagtccaagggcaagttggagcccaagtgggaaggccccttcatagtcaaaacaaaagcttcccccagcgcttacaggctcacaacgccaaatggcgaggacctggagcactcctggaacatcgacaaccttcgcaaattttttgtttaatccatttagggctgagttcgcccttgtaagtcaccgcaaacaatcttgtaccggcccgcactcttttcctcccggggggtgaggtttttaacgaggcggagc

SEQ ID NO: 7548 - DNA, 507 bp, Zea Mays
cagcacgagtgtgatacacggtggcaccctcgccggtgcaagccatcgcaagcgcaagagcgtgccatgagccaagcgcgacactacacaaagagaagactatggcgaaccctgtcgtggcatccatttagtgaaccacaggtggactgggcccgaccacgacagcccgcggaaccacggcggaggcgcacaccgaccggaaatccctggcaccctacgaccccgtactatgccattacacagtaaccgcaacggaaggtaggagacaaatggaacacagagatccataccagcactagagtcctggagacgttcgtccgcagcgtgacgcgagatggccggacccgccctgctccagcgaggaattgacacccgatggcccgaatccgctccaaataccggtatgaacccgctttgtgcgcaacggcgaaccccgacagctggacacagggtcgcaattacggcgaactcctgagcacggcgacgacggcgctaatattcagctcc

SEQ ID NO: 7549 - DNA, 416 bp, Zea Mays
gttgtcgtcatcttcactatgtggtggatcggcactgagcacgaccggacagtccgtgcatgatcttagactattcggtcctccatcgaactgttcggcctctatgtcgaacaattcgaagtcatgtagagcccaccacaaggctcgcatgcgatgctcgacatgatcagacactccggatatagtaccagatcgtccggtcccttcgcagactatccaaccacataggtcagaccgtctgaaacactgaaaaccacctgtgaccgtcctagtgctgaaggtcgtcataaatatagccggacacatgagtcccataatatttttcatgacaatagtagctcaggggatagccaaaaaagttgtatgtcactgagcttgtttggcctagtaaggccaaatcttctgctcgctctcgc

SEQ ID NO: 7550 - DNA, 621 bp, Zea Mays
tggccacgaactccccagcccctggactagcgctgcctcgccggaattgctcgccggtgcccaagtttcgtcccgggccgcaccgtagcgtggacaggcgtctactggtagccattcttcccggtaagtctccgtgcgcgttcgccttttcctcccctttaattagtgcgaagtgcgttcgcagtggggtagtagaaagcggggtcgaagctcgcggcgatggcgccgtcgcgttctgcgtgcgccgccgtggggaagctcggctgcaggcggaggatagagaacgattcctggccgttgatctgatggtgggcggcctagattagaaggtagttacccccttagttcaatggaaccgtgaccgtagatctgtgcttcgacgggtgagagcatgcttgggtattttaaatccggaccgtagacagggatccaacggttgcgatctagtttctgtttgatccgcgcttgatctatttagaaccgttcgatgataatctggcggcccgaacttcgccataccctttcgcgctggtagttttgctaaagagtccccgaggaattcaccaatcaacccgccgtccagtggaactattccctgagtctaggttatcttgcactgag

SEQ ID NO: 7551 - DNA, 531 bp, Zea Mays
ggttgttgaggatgcaacaaggcacaattttgcaatgggtgctgtagatcatccattgatagatcttttgttgtgtatctttagattggttcttctgaatgattattaactgctttggttggtcattgaattcttgctcgctgcatatcatacttgctgagtgttttgagtctgtgtaacaaaacacttgcagaaattgacaggaggagtgctcttgtcaaggaacaaggagttcattgtcttctacaggggcaatgatttcatagctcctaaagtaaggcaggtcttggtggagaagcaagaacaagccattactcaacaggatgaggaagagctggctcggcttaaagcatcagcctcaattattactatccccaaggatataaagggtcctctagttgctggtactctggcagaaactacagaagcaaaatctagatggggaaagtcagttaatgataagcagagggaagaggagatgaagcatttgtctttgttgaagcatacctctcttttgaagaacttgaagag

SEQ ID NO: 7552 - DNA, 418 bp, Zea Mays
cattttacgctaccacgacacgctattcactcttccagcaggtcatagattccctcgtacaaaatgcacggtcaggcgcggtcacatatatccacgcttttccccctcctatgccaaagagaatgcgcatccgaatgtgcaagccgctggatgccatcacttttatgattgcgcaagcagacgtgggaccgcacaatttccgcattcgcatgggcaacccgcaaaagccggcctttgtagcggtttgcggaccacctagcagttgtgatgaggtactcgtgtgtctttacagtggccacatcgccaacgttgataatctctgtgtctctttcatgtggctccaactcaaacttcgtcggtagatctggcactgttaaacacctaacgtggtagcattcgtactacaggataatctgac

SEQ ID NO: 7553 - DNA, 467 bp, Zea Mays
gagaaggctaccgtccttaaggtcatcttcaccaaggctttcgttcaacgctttcaattgggacaccctgagagtagttctccatgctagaggcttgactgacctttggatctcctagacaatcaggcttctttcgatctctagaactattgtcgtcgttaacaacgtcatcttgggtccctggtttgaatgtaaaaggggttgtgtcaaggcgacctaatgtccccttacctctcctcctggtggccgacgatgtcctccaatccatgatcaaataagaggggcatcaatcaccctgcctccgtcggtttcccgtgcctagagttcgccaccttcgtgctgcctcctatgttgttggctgctttggagtttggaaacggagaaatgccgtgatctcaacggggtttactggcctccccatcggagctccttcgacaattcaaggatgaagctctcctctggcgctg

SEQ ID NO: 7554 - DNA, 283 bp, Zea Mays
acttccgaactccctttctaaagtgtccccaaattccttgagaaggtcatcaaggctagctagggacatatcctcgacgtcggacaagttctctatcctggagggaggtagtgctggaggggcttccttcttccgttcagtctggcatccttggctcttggtcctcttccagattttctttgtggggcgagcttctttagcttcttatcataatccatcttcagggttcggtaggcttcacgagtgttggcctcttcaccttctgctatttcgagactttctt

SEQ ID NO: 7555 - DNA, 354 bp, Zea Mays
gtccagtttgaggctgaggggcatatgaaattgaaaagccaaacaaccaatgcaatatggaaaacaaaggcacccaacaaacgcagattcttcatctgataagaataatgttacaaaatagaatttggacggcagcaaggctgcaattgagacaacatactacctatttgtggaatgctcttcctctaagcaggtttggagagagctccagtgagtcatcggtaacacaaaacatgtctgcaccgagcttcagagatctgtggccaggtttgtcacacgccgttgttccttgcgcgctcccaaacgcacgcggtctacctttctttgctcgactctcggcgcatctgctgcccc

SEQ ID NO: 7556 - DNA, 1155 bp, Zea Mays
tgccagtgtgccactcatcagttacaccggttcctgtccggtgaaaggtggagcactgccagccaagttcttggcataaaaccactcgcccttgtatcgaatggaggacaaaagtgggatcttgtggtactccgcctttcgactggaacagagctaaatggtgaccaagccaacgaacgcctacccaccacatcctggggacacccgggagttgaagagatattgccatagcttccaataggggtcgatgcccatgaaggcctcacaaagcataatgaagcacactatgtggaggatggtgttggggtggaggttctgtatctctagctttgtagtagtgaagcagcccccgaacaaagcgatgtagaggcaggccgaatccgcactcgtaaaaggatgcaagcacaaccacctctttgttcctcgtctgtgatgcttcaccctcatcttccaaccgccatcctgagactttcgttggtggatgaaccccttcttcaacccaagcaggcgtctctagcaaatcgagcaaatcaggaatgatgccatggatgtgggaaggaagtagttcgggcgcagaagcagacaaggagccataggggcaggaaggctttagagcagaagtgaaagtaggagtgcagggagacaataagcataattgacctcacaaactcctcctctgtttttatagacaaagcacaaagaagcagagcggtgctgagtgaacaggccaccatgacctcaacaagggaggatccgccactctggcccaccatgaccgaggcgtgaacggggccaccacttcaactcctaggcgtcgtgggcctcaggcaaggacccttcgcctaaatggcaacaccccttgggcagagcaaacagtcagggcaggaagcttggaaaaccacatccacgacatataggtcattccacgtcacctcaagtcgcccacgccaagcgatgtcatgatgagttcctcttttctcatgctaccacaatacctaaatccgcctcaagccaaccaggtaaaccgcaaagtctctccactccttacgtagaacgaggggtgaaccgagcaagcccccagcgtgcctcaagctaggtgaccgacacataagtcatttgctcatattcacatccaaggtcatacctcacattttc

SEQ ID NO: 7557 - DNA, 1318 bp, Zea Mays
acgagatcggatagtgttttgtcatgagcgatatggcacggggagcaggttgggaagtagcatacggccactacgcagtagaggcatgggccttgccgccccgagaatgaaccatcttttttggctgctgctttggtagataccactttctgctagtttatcttgctgctgctcgcttatttgttccgtgtggaatctggaaagctgtatgctctgttctgttttgccttttatgtgcttggttatgctgcaacgagcttttagtattgttcctctcggttcaactttcttgatttcaccttcctcgtgcttctatctgcggcagtgtggcatctctccttttggtcatgtgttttgtgcataacatctcatgtccgattaggatctataatatcatgttgctggttttacctaagatgtctgatcacctatatagcaagggtgctctgttttgaggttccttttgtgtagtgtcaccaggaaaggacaataagtagctagaccatgctctgctgtagagattgctaatactagaaatactaggtgcctctgctttcgtaattccttaatttttctcagaactgtatatattcttgattgcaaggaacaaattctattttgtgaaatacctaggggaccatgtttggttgattcctgtcaaactctgagctcatctgtcttcattcctttcatgatgctatggcagaccttgactttacaagtatgccattcatgttgagttgttgacactcctgcttgtctttgtacactttatatctgtttgactacttgtagttggcatcattgcctatagtgataagctttgagtgaacatttgctatttgcgtgttggaaaggaatgcctatatacttagctgtgtatgagtattgctgttgcaagtagatgcagtgtcgtggtctttagtgcatgtactttctagaacagcaacacttctatcttgcagaatgcaatctggtcatatgtgtggtagtttctacaagtagatgcagtgtcttagtctttgatacatgtattttgtagaacaacacacttctatcatgcagaatgcagtttggtcatatgtatggtagtttctataggaacaaataaacttacttgccctttggcattatagtgcagcaaatgcaatagatcatagtaattttatacctcactaacatttatgggctggttgttcatacaatgtatttaatgtgtaatgggtttgcattatcagaacagttgtcagttattatgtactccacaatacatatgcaaaaattttgctgaagcatggtcaccatttcagtattaaat

SEQ ID NO: 7558 - DNA, 319 bp, Zea Mays
agatgattggcttttgtttagtgtggacttaaccatgacatgagtttggtgttgtgtaacatgtctcttcgcttgtggttcatggatatagagaacaaaggtggtggtcgatggcaaaggtgaaggtcattcagatagactaggatcgatggtgacaaacacctaggcacatcgactagtgcaagagtacatggatgagtagaatgtgtttaccaagtgaagttgaggtgttggaagacttggtgattaggcggtcaagggctagtagtagcatgtgtagagaaaatggaaggagcatatccgatatgctactcacaag

SEQ ID NO: 7559 - DNA, 540 bp, Zea Mays
ctccgcgagtgggtcagccagcaattcgcgagcttgagatcttggatcattgaccctcaacaaatcctctgtcgtttactcaggaagcattggagtggaaagggcagggagggggctcgcctgtagcctgtagggttggcgagcggacggtggtggcactggcagtggcagtggacgagagggagggcgcgcggcagggtttcacggctgcaatcacttgacctctgactcctttattcgcgtcacttattaattaaggcgtgtgaatgaatgccagcaagtaagcatggagctgcagtctgaacacagacgaaaccaacagcataagggtttgtcccctttccatctctttgtgagcagtcggctagtacgtgcgactctattaccgatgaatgatactcggattgaaacgcgaactgaccaccggttgggactccggcacgtggccacgtaaaagggcatgtagtggagtccaagctcagaccgtgtcccattcccatccaaagcagcatgctccagatagcctttcttccaatcaat

SEQ ID NO: 7560 - DNA, 553 bp, Zea Mays
ccgacattgggatggaactcacggaaaggaaaaactccttcatcaaatatgacgtctcttgatatgtagactcgtcctgtactaacatcaaggcatttgtagcctttatgagatgaactatagcccaagaagacgcatcgcttggaacgaaaagcaagtttatgagtgttataaggacgaaggttgggccagcatgcacagccaaatactcgaaggaacttatagtcgggtttcttatgaaagagacgctcgtagggtgtcatgaagtcaatgactttggatggggttcgattaataagatatgctgccgtggcaaaagcttcatcccataattttaaaggtatagatgcatgtgcaagcaaggctagaccaacctcaacaatgtgcttgtgttttcgttcagctgggccattttgttggtgtgcgtgaggacacgatactaggtgtgctactccaatttttgtgaagaaggagctgagtttttggtactctccaccccaatctgtctgtacaacaataattttgctgtcaaacattcgttcaaccatatttt

SEQ ID NO: 7561 - DNA, 778 bp, Zea Mays
aacaggagcagcactggaactaccagcctcgtgatcatgtgagcgaggtggcacaggaggcagtggcaagatccccaggtcctcatcatcatcagaggaagagtatgcaatggcaccctgagtctcgaactatctgatagcctcatcctcagccctgatatctatgactggatctagcgctgaaaccgggtcctaaggagctggacgatagaagccaaactggaggcgagaggcctcgagggtggcttggaactgaggaggcctgatcagctgcgcaaagatgtgacaaaggtagtgggcgtatggcagctgacgccgagcacagagaccatccaacactgtatcctcgatctcacagataagaaaatcaaccatgtcgaactctgagtgtgaaatcagggtaccaattagccaaagctaaatatgtgtggtggcctccctgtatcccatcctaggtagcaaggtctatctcatcagctcataaagaaacttcgctgcaggagtgaagtcgacaggggaacgtcgcaacccatgtgtgaaaggaggtctgaacagggcagcgccgtgagttgtagctggtgcaactccaccgtgagggtgacggggaggatccaaagtgtcgtagcacaaactgtgaagcctggtcgatgactcaagaaatccaaagagctatctgatctgagtggcatgcaaagtatcatcatcgcgctcaaagcggaaccttagccactgatgatcagggtcaatccaaatggtggcatagaatactcggactcac

SEQ ID NO: 7562 - DNA, 565 bp, Zea Mays
ggccgggctgttccacaagttcttatctgttggagcaacatttgtcgtgactcggctacttgggaagacttgtatgtggtgcgccaacattttcctcagtccattgcttggggacaagcaaatgctcgagagggggcagatgtcatgcccgacaaccagggtgacagccaagaggagcactgatgaaggggagactgacagagtcaacgagagcctctggactcgagggcgtaaggtgtggtgtgccggttgaggaatactggccaggtgtgggcgtcttgggtgagttgtaagccgtggtgtcgagaggggctaaaagctgtaacagaactggtgatccgattatcaaacaacagaatgcactaccacgaacctcgacgttgtccctcacgacgacgacggcgattttctagcgctctcgtcccagtgatcaccatcgacggccacatgcataacaaaaggaaaaacagattttattttgggacggagggaatatataagtgatttgtttgtcttttttatggagcacaatctgtacctatgtcgggactgtatgcatggagaa

SEQ ID NO: 7563 - DNA, 335 bp, Zea Mays
gaagaagttccccaaaacactgaaagtcaggcgcaacttcccagtacattctaaagtgctatatacgatgtgtatgctctcaacatgttgcaactagtgatatgataccgtgtatgacgtatatcgtgcaatgctccaaacaacctcatgggtcagtactatgtgaattctacgtctgtgagtatctcagagcctacggcaaattcagcaccagctataggtcgttgaagaagtcactgaagtggtgggaaaaagaaaaagataacccatgcgaccatcactggaacagttagggacatctgtaagtttatcatggacagctgtgtgcatgaagg

SEQ ID NO: 7564 - DNA, 819 bp, Zea Mays
aggaaattgatcaagtgtcgacccctcctatctgtccaaccatcagacataagtgtgcaaccaaattcagtccaagccaactcatgagtctttttttatctcatctacactcttctttgccttctcaagcaatggcaccttaacatcatgatatgagggtttcacgtacccaggaccatattgcccaaccgcctcaagcatgatctcaaaggcccttgagttgatgacattaagtggtaagccgctctcataaataaaatcagcaacatacatatatgttatttccttctcctccttgctctttcgctgcaatgtagtttgagtgttgcccttacaatgcctctcgcgaaccacatcttcaggtgctttgcgaaacatggatgcaattgacttagaagacttcgacgcgtgttgattgttttggcttgcttcagctaagagccttctcttttgggttgttccggaactgagctgaacaactaaatgggatgctctactttccccttgtccaagtacttcaacttcatcatctttatcaccatctttatcatcatccaagtcaataggcttctgtctagcattcttcttcaaataatcactcatctctttgctaattgtcgatgttgtctttgggcacttagcaacatcaccatgaccaccaacaaggtgctgcctcaaccttctaacacctgcatgaacgattttgccacaaagtatgcacttcaccacatcttttttgttcaaatcaggccagtaacaatagttccatgtcgaatccttcgattttgcctttcttttaggatctttagctggatcgta

SEQ ID NO: 7565 - DNA, 464 bp, Zea Mays
gaacaacccgagcgcggatgggtctaattcgtgcgcaatgatgagacgaactggttcaagtgcttaccaagggtgtatgaggcgaagggtaggtcggccacggcgcggtgcggatccacggtggcgatgaactatgacgagcaattgccgcccactggcaatagaatccgacccggagtcggttcctacacctgcggtggaaccttacagtgctctcggtacacaccgccgcggccaaggaatcgacagcagcagcgtcgacggcggcggcgtgatttcacggttaaggctatggcgtcgggatgtcttgtgcttggctcaaggggacgagagggggaaatgtggtcgtgctatataggggcggagagagagttcgggcatgcacgaccaaatctgaggtccctgccggcgggattttaccggagcccaatgaatcacgcggagctcaaccgaagctgttcctg

SEQ ID NO: 7566 - DNA, 909 bp, Zea Mays
caacctcagagtccatgacattcgtctgccactgaacgaagatcagaagattgtacatatttcaaatgaaaggaagttatggattacatccaacatgcacaggtactatcgatacctaaaatctctatccagaatgacaattcttcctaagggcgggtatcaaatgaacgtccttggggagaatcgtgttctccttttacttctgagtcccaacaacactgcccaaatcaatgtgtttgatatgatctaagaggaaatactttgagcatcttggtcaccattgaaggggtgtctccttgcgccctttattatgaagatgattgaagctcacctagattccgtttgagaagcctgtgaagcattcccgctacgtaccttactagattgattccagtaacccagtagcaaggtccaagtgggctcccgcaggtttaggaggccatgcatcgtcagatgagccgccacctcagcctcctctccatgagacctctcgtgctgccactaccttgcgtccgatggatcgtggaggtcgaggcagaggttagggccaaggtcgaggtcatggtcggggcctatttgtgcgcctagctaaggggatcgccgaggtcttttccatgtgccacagtcgtgctgttgaggagcatgtgcactggtgccagactcaggcgcttcatgatgacatgtgaagcttcgcggcttccatggaccacccatgccttagcatcctcctcctcctccaactcctgcctatcctaagacactccatgaatggcactagtaggagtatggtgtgcccttcgtgactcctgaggatgaaggtgaggaatttgatgattccttttctagtctactcctgccgtcgctctaggacctatccctggtgaccccaggccttcaggctctggtcac

SEQ ID NO: 7567 - DNA, 447 bp, Zea Mays
caacacccttgaatgatgtgtcgcgggtcccaccgatcctccacgatcgttgccactataggatgcccgacagatcagtttgatcatgtcgttcctcgtcatcgttggtcgtcgtcatgctttactagatcagagatctcaccgccacgcctccaccgaccgatccgtgtcgtcccttcgccgccaagccacatggctctcccagatggtcgccttcgctgatctatcaacgtccctctgcgtcgtggcaaccgcaaggcatgccactcttcattaggctatggtgccgagacatgcatggtggccccaggaagcaagcccccatgccatggtggttgccactccacctgatctgcatcaccccttcgcccctaggtcacacggctctccccgacgatcgctcctgtcgatctatcggcatcccaccacatcgtcacgaccaagccg

SEQ ID NO: 7568 - DNA, 866 bp, Zea Mays
tgcaaatacaagggatgtgaggattgaattagtgcacgtatgtgtgtggtgacgtggtgtattatggtaatggtggcgtaagatgtttatttgaggtgtgcgggtatatgatgtaatatggttatactcgcaacgaggaaagatgtatgtattgtgtgacccgacgtttaggttgctattgtataatcgtgtgaaggatgctcccgatggtcatgtgactaaagggtggtgtagtggtaaagcgagaagtaagtttaatatttttaatgattagttgatagcatctgtcggtgtcgtcatgctttctgttgtatggcgggtcgatgccttgccttgtcaaatattgcattccgttcccattgggtaaaataaatatcttgttggttgattagaggtcttatataagcgttatcgcagcccaagaattattggaagcaagtagcattcataagtcggtcctggttaaaattgaagaacaatccgataacatatgcacctaagtgttttaggtcctttagtagcaagtaagtcttatggagttttatgccatatgttattgcctctatggtagacctcctaaaaaaatatggtgttttaagtgacttgtgtgttgtccagtttaagttgagaaaaggttaagaaacattaattaacctactcccacccatgttttgagttgcaatgtctaaatgggttgctaagtcttatgctgtgattagctaactaatgttaaggagtcaattgcgttaagtgattgttatgtatatgttgtgtctcggatttcgataataaaaggctagccgacgagtatgttgtatagcggcctagactgttgctctagttagccgacttgttagatggcttgg

SEQ ID NO: 7569 - DNA, 405 bp, Zea Mays
gtcgccccttgtcgtcgatcgaagaaggaaaaaaaagttgtgatccacgaggagcacacatctctgcatgcatggccaccagttctgcatatgatctaggacaggcatgcatgtctggttgctgtcccctaaagcccttggcatgttgttgtcgtcgagctacaagtataatgcatggtgtttcctcctgtctgtacgtaccgcaccgcgtggctcgtgaggacgtgaagtccagaagtaacgacgaagacgactagtagctagctccactgcacgcatgcacttttcgttggagtggtggtagctttgcctcgtggcccgccgccaatgcaagtaaacaactagctagtagcgtgtaggcgatcggcgtcgcgacgccatttgggagatctcgatgagatagac

SEQ ID NO: 7570 - DNA, 1347 bp, Zea Mays
gtaatatttatgaccctattaagtagcagaatcaagtttttgcggtaacaagacaaaataacacagacaaaaacattataaaacggaaggagcacatctctaggtctgaccgtcttagtgaccgagtctggtcaatttattttagtttccggtcccatataggaattgaatatatcgtaatgcacactagtgggtgaagcaacagcatcatcgcttccatattattgcatcttccgactccctcgattcaccagtcaacggcttcatttcttcgctgcaccattaggctccgttctacttctacctaataacaggtgcgttagtttttttttctgcttgcagtaggcggtacttgcaataattatttttggttacagcatttgttcataataagtcagctaggtttctcctagtctgattctgttgacttttctgaggtgtagtggggatctctgatacacagtgcttgtgtatctaggtcaaaccgaggtcaagatctgatcattttctcagcatttcaggctatatctagatgctagtttctagagggtttttttgggggttctcagcgtttgtgctgaagaaatcacttccctttcgaatgaaatcgtgcatctattcggggaatatgcacacaccgttggaacaaagggaaatagtgtttactgtcagatttcaaccatctcattggggggtgtgaagcacttttgctgtttatcatagttcttcagtctgacactctgactcatcgcttattatggacgttcttgcacatgatgtaatggcaagagcaaacgtctgtgctgctatagtggcaaatttcttgtgctctacactctgactcttgctgtttatcatagttcttcgcggccagagcaaacgtcagtgctgctaaagtggcaagtttcttgtgcatatattggggttcctgttttccttgtgctatagtgccaaagctgaactttaattgcaagttatcaggccaaatgtttgtagatactgctgataatcacgcactgcgggtcagctaagcttcaggaaacgataggcgaaacactggccacgagtccagaccatgttcctctcttccctgtaatggtcgccctttcctacacagggcggctagaatgcgcagcaagggtcgagaggcctgtcggcagtgcgccccttgcgaccgcgtgtgacagtgctgagccatcactacttgttctgatccgtatctatccttgtcactacagttctgcaaataatctttcatggttctgtctttcctggtcaaggaaatttactggttctggctttactaatgtattgtgcaactagtttgaagggtgtagttgtttaatt

SEQ ID NO: 7571 - DNA, 555 bp, Zea Mays
ctttattacattatgctgaactggtaataattatacatactcattagtacaactcaacttccttatttactttacataaggacactacttaaactacactactctaattatcttcgtccttggccgctccactgccagcttcgggtgaacgttcatctgcgaggttcatggaaggaggggctccaaaaagatccaactccctatcgggtcctccactagctgctccagatggttcggctcccattactgcaacctctggtggcacgttcggatgcaaccggtcgtataacacgtgcacctcttcatgcagggtgttacaatacgcttgtagattctccagggatgcgcttaattccgccacccgggctagaccatttgcctcacagtcccaggcgaaagagcgtgaatttacggcccagtcgatagccatacctcgttccacaatttcctgctgcaagcgattaacctccgctgacagttcagcaatgcggtggctatctcgtgcatgctccctatttccatggcgtagttctgacatgagtcgttccaccctgg

SEQ ID NO: 7572 - DNA, 400 bp, Zea Mays
ttcaaatgatgaaccgtttcaaacgagtaatagatggcttgcaattagtggaacaatgaggggtcgtcaatacacttggtcaaatgaacaggacacgcctactatgtctcgcatcgaccatgtattctgctctacagaatggcaggaccttttccccaattccgatctccaggctttggcgtccatgacttcagatcatgcccctttgctcctaagggggatgttaccttggatttctacaagggttttcgttttgaatcatattggacctccatgcccggcttcaaggaaatagtgcgaagcacttgggaccaaccagttcattcagacgacgccattctacgtttccatgtcaaaacgcgtcggacgactaaggcacttaagatttggcggaggcaaa

SEQ ID NO: 7573 - DNA, 413 bp, Zea Mays
cttcaaaaaaattttggttgttacaattttgcgtatcgcaaggatacgaaggcaccagtcctcagctaccacacaaagtggtcgactgactggaaaaatgaatggttttatatgaaggctgatgagaaaaacagagagaagctgatgaccatggtcatgagtccgttgtctttaagcttcggaatgaccaggcccctatgcaacatgcaactggggtcgccatgtcagctggccgaagtggagtttagagtggtagctgagcaaatcagtaccagggacctggtgcaggaatatctggccaaccggacatatccaacgtccagtggttggggaatgccaaagatgaaagaaacgaagaagaagcatgaacttgtttgactagcttatcgtttcaagtttgaaaaacagtttaa

SEQ ID NO: 7574 - DNA, 298 bp, Zea Mays
cgggtaggtgtggagttaccacaacattcattaccattgcactgttgtgctgtcaaaaaatttgaccacagccgaagcttgctcactgtattctaaaccgaaagatcatcttgctctagcttcatgacaagaaagagcttcggcaaagataaaacttttcaacttcgtcaaaacgcaaaaaattcaacatcaaatggctagggtacgctcgacagctagagttactcatgacggagatgaagccgaagctgctgaaactgctccgatctccaaaattatgaggcggtcgggattggtt

SEQ ID NO: 7575 - DNA, 459 bp, Zea Mays
atccgcccaaagctcaggtccccgccatggcgttgtctcctccccgcaagaggctgcgctatggggagcccgaatctttcactaggctgctttagctgttttgagacatgatgtaataagttatgcctcacgttagacgatgatactcttttaagttatcatattaataaataacaaccatgtgatggtgattggttgacatgcttgagttggatctttgtttgagtgcaatggtcttatggaatgatggccataagaatagataaaaaattttaaacataagctatttcccctcctagaatcttttctactcctcacttttctaaggacttcacttcctaaccaatcagatggtgaacgctcgtcaaggacccaacaacaaccggaaccagcgtggtcaacaagtaccaccaccaccaccgaatcccaacatggagcagttcattgccgcccagatgc

SEQ ID NO: 7576 - DNA, 483 bp, Zea Mays
tttcgttgtatcaactcaccaccccacggctccctatgaccctatctatccatctttatctcaaccgcaagcaaaaccccaagcccgcggcatccgcctgcaacactgtcgcttcaccgccacccatccctccgcacaacgcgccgctcctctcgtgcttgtcgccgtcaccagcattgtctcttccccattgccacgccttcgttgctcttcagaatgtcgtcccagccttagccgagctccataaacgaaacctcctcgacccaagcgtcgatcaagcccgcgtccggctccactagtggaatacctaggtctccaacatcgttccaacccatgtagggctccaccggcggaagcccctagacctcgacgaagctctccacccaacatgtcccctcgtcaggcaacgctctcccccaacctgttccccgcgtcacgcggagaagggtatgtgcctctcgccctccctgtctctcattttcc

SEQ ID NO: 7577 - DNA, 377 bp, Zea Mays
cagcatcgtgggcagtagtgtatgaatcccaccaatcagcagcaggacctgtcagacgaccagaggcatatagaaccttctcccggtcagagcattgtgcaatattcaacatcttttccacagacttcaaccaatcatcagcgtccagtggatcaggagaactagcaaatgtcgatggcttatggctcatgaactcccggtgcttgtcccggggtggaactggtggtggtggtagtggtgcttgctgatgttgctgttgttgttgcacccttctctcctggcgtatctcctctcgctcctagcgcatttcctagcgtatatcctctcgctcttggcgcatctcctagcgttcttgccgcatctgcgcatgcatatcc

SEQ ID NO: 7578 - DNA, 379 bp, Zea Mays
gcagctatcattttgttccttgaaccaggaggccgtcctcgcttacgtccagataggtttgccaatcaaaccctattatcctccacagttaaacacgtacggctgttgtgaccatcagctatgccacatttctggcacttcctgctcatcttcttagctcctttcgcacccaatttaaatacttgttgctcactacttttgattgttcttcccttaggcttggccttatctggtcttgctaagtttacaccttccatatgaaaatccagtttctacaaatcaaagatattaactcagtgtttatattcacgtatttcatcatatattgtggcaatgttattacctttctagcttccacatccgtagcactactatcaac

SEQ ID NO: 7579 - DNA, 405 bp, Zea Mays
attggatccagtccgcaccatgtggaatggagtgtcactgctgctgggcacagatttagagacacctgccaagtcgtcgcccgcaaggcattgagggccctatgtcagatctatgaagaagaagtggccgacaccccgctcagattctttccacccttttagagaggccgtcccgtttggatggccaggatgcgtgcattggaagggcagcagctgcttgaggacgaccccacagtcgtgtacctcactgcatacctgctcaccctggatgcgcagtatgatttattggctcggcaccaccgtcagatgattgcccgagcagaagatgcagagaagctcaaccgtaagctgcatgtggatctcacctcagcccaagcccgtgtagctgccttggaaagtcgtgaa

SEQ ID NO: 7580 - DNA, 761 bp, Zea Mays
gctattattatttttctgttgtttgaattcaacagttgttacaattgcagaagtaaatgcagtgtgatggttttgaaacttctttctatttcacgaggcatagaggtcgccctaagacgagtaatcgtaagcgtgcttatgctggatcgagtagacgtgagcatgtcgcaccgatttaagtcactaccgacttaaaccgactgctctgttagtagggtctagtggtcaccctgggttaagtaagcgtgagcatgtcacaccgccttaggtcatcgccgacttaagtcgattgctccgttagtagggtatagtggtcaccctgagttaagtaagcatgagcatgtcacaccaccttaagtcatcgccgacttaagccgattgctccgttggtagggcatagtggtcaccctgagttaagtaagcgtgagcatgtcacaccgccttaagtcatcgccgacttaagccaattgctccgttagtagggtatagtggtcaccctgagttaagtaagcatgagcatgtcacaccgcctttagtcatcgccgacttaagctgattgctccgttagtagggtatagtggtcaccctgggttaagtaggcgtgagcatgtcacaccgccttaagtcatcgacgacttaagccgattgctccgttggtagggtatagtggtcaccctgagtcgagtaagcatgcagattgacaataaacagttcgagtgcctttgagaatgaagtctttttattgatggtgtattatccaa

SEQ ID NO: 7581 - DNA, 515 bp, Zea Mays
ctaagggtgcagccggactagcacaacaagtgcgcaaaatcgaagtcttcctaaaaacactatccgggcaaagaccgactacaggtgcaaccggaccgacatcataaacacgctagatcaagtgcacaagtcccccacgggcacggccggatcagcgaaggcacacagcctcatcatacaaattatagttacatacgtacaacgagggcatcacaccttacattggttcaaccttcagaatgatacccatctccctatagttaaacagcattatcctcagctcctcaccctcaaaaagacttcgcaactaccccttacctacactcgccccagccgacgaggacaacaattcccgcttgccagccctatccacacgaagacgaccaccctccacctcactcactctacgcttcgccaccgcccttcgccgcctacgcccagcactcggaccaggaaaaacttcagcatccgtcacacgcggagaagcctccgccgcagccacatccaaggccgca

SEQ ID NO: 7582 - DNA, 657 bp, Zea Mays
cggtaggtgggcaggacgcatgctaggatatgatcacaaggctgtttagtaggttcgtatcatgtctacaagatagggctggtacttacaagataaggttgcagatgaccactctcatcaacaagcttaggaggccctagcgcgtggtgtgtggactatatgagaatgagatgacgcgcggcatgcatgatgcaaggtttgtcctggaatatgataccccgtttgtgtcgtccaatcttaatttacatccgtttccaatctttaattaccatctgagccatccaaatgaagttcatgtatgaggaggcttgaattcagaaactacgttcagttcagtactactgcccttgcttcccggtccatgagatcccaagatggcaaagtctataacaaactctgcccacgccggcataaaagacaagatacacttctagacgtgagaggtcccccacagcagccgctacagaaagtaggtccggccgtatcctactggccactgtcgcaaacccccaaacatgtcatgactcatgagccatgcaagagagcatgaactacattccagaaacgatggagacgatgaccctgttcttgatgaagacaattaggcctagctagaggtatcagactaaatatgcacttttatagaatatatgtccc

SEQ ID NO: 7583 - DNA, 1043 bp, Zea Mays
tgaaaatattttcttctgttctcatgaaatgtgcaagcacacaacccatctcgttggtgccaatattactgcagatttaggttttttccctctaaaaaggactgtcatactctggactacaggtgattaacactggcacagctacacatctccattaatcataagagcaaaatcagaaaatgatgcacccagaaaggctgtctaattagaatgtaaaattggtcaaaataggcaagctccttgcaatggaggtagtagtagtaagtgacaactttagtgaggactgaggagacagaaaattgtggactttccataagacctgtgtcatggctaaaaaacaggtaagaggggtacaagctagtaactccaaagaggacagaacacataaatttgcatgtcctccaaaatagaagactaataagaagattgttttagcccacacagttgctaactgaaaacatctagttgatctaagatcaaagatatgtcatacaagtaaaacatgcttaccttcacatttttcacaggcaatatagatatcctcttcattatagcatttttcacacaagcagcatactgggttgacttcagaaatttcagcatcttctgatggaaaaactactctttctttcctgaaacttcttgctcgttcatcatgtggattttgtgaccatcggaggccattcaaccagtatgaatactgtgaaacagtcctcttcctcttgctagagctagctgcattctcggatacatttgagttacttttcatgtatttatcatgtaatcgttttgatatacgtttcactggttcatttttggaaacatttgatggttcactttcatggatctttgatggttcattctttgacagatccgttgggttcttcctgggccggccacgcttaccctttttgccaattttcgttttgcatttcagaactatctgattcctcctggtctcaatcttgcgtgattgtttcttttgtttcttctgcttctttttgggagacagcttctttggtgcagtctttttctgaggagac

SEQ ID NO: 7584 - DNA, 468 bp, Zea Mays
ggcgtgggcggtggtccggggaagcggtgcggcgggagcggtagtcgtggcgcctaccacggtcgccgcggtacgaatcgttgccggggcgcgcgtctctgcgtccggagcccgctcctcttcctcgacctcttttacctccacctcccctgcctccgcctccgtgtcgcatggcgccggctaggtcgtagctacggcctgagagtagggatcgccgctaccgtgaccggtggaacggtgggtgaatggctgtgggatcgaggcgggtttcagatcaaggcctcagaatctcgtacgcgtcaagatggcggcggctgtggcaatagccgtcgccgtagtgaggatgggcgatggggttcggaggcggcgtgcggagggcggaggggagggggatcgcggtgggttcgagtgcggttgggggttgccacttttatgctcctgatgtggtggtgggcctgcattgcttgg

SEQ ID NO: 7585 - DNA, 715 bp, Zea Mays
cctgggtcctcataacatggatatattcaatggttgtctggcgggctctcgaaagaatcgtcgaacaagcatactattgggccacccccagacagaacagatttctccaaagaaggtgacactcggagctagaggcaatcccgaagaatgtggcgcaaggcagttatctgtgcatatccgacacaaaaaggattgctgataatccgagggcatactttgcgcacaacataatggcgagatacatggaggataactcggacgaccgaactccacggtagtcggcacacaatagaagcggaagtagatagactcatatatgattagataagctgttacgatctgtaaagggacgtcttcctagctggttatataaggccgagggggtacccctacaaaactctctcgacgttactctcaccgcaaccacaccaccattagactggtaggagatctcatccatcaccacccgcaaatcatatgtaatctgtgcaccaccagcaaactcaatactcagcaccaaacatgatgtagggtattacacattcaggcggcccgaacctgtattactcccttgtgtatcgacgtgctcctgcacgtaccatcgagtcgcgatcaatggcgctgtcctcccaaaagcactgcgtgggttaccctgtagtgcgcagtcggaacataaacaccgatagttgcctccccctccccaccgaccctgtcg

SEQ ID NO: 7586 - DNA, 449 bp, Zea Mays
ggaaatatgcatactatgttgaggcgggaaagcgagagccgattcaatgtgctttgtgccccaaacaaataaaaggaggtatcaagagggtgaaacaacatctagctggtggctatggagacattgtcaagtgtcctaacactactagagagattgctaaagagatgaatgaagctttgaatcatgggaagcgggctaggctgttgtacctagatgacgatgtaatggaagatgaagcaggacaagaagatgatgtccaagttatgggaagcaggtcaatgtcagcatcatccaaggcttccatgtgtactgtgccaagttctggaacagctgccaaaagaaacaaagcaaatttccaattgaagccccacccaattgcagctccaaagaagtctgttgcatctatggttcgacgtacacctcaagaggttgtagcagagagacatgca

SEQ ID NO: 7587 - DNA, 1124 bp, Zea Mays
caccctcaaaaaaaaatagcgtatactgctaattgtgacgagcacacggtactctttagtaaaaggcgaaagaatagctcgctttgtgctcgccacgcagcgcgtgcttcgtataggatgcattggcctctcactaataacggagcacataaccccacctctagcagctgcaagatatggcactaaatcatctgttcaaccctgctttcccttacccgtccagcgatccagcggtgggctgtgggccttggtccgtccagcaagccagccagcaatgtatccggtggacgggaggagtccggcccaccaacggttttacaagtgaagaaaccttttttgcatggctgggcactgccgcattgggctttgagcttgctggccgcgcatccgacgggtttacaacttggtagctttaaaataaacatgttgttaaaatataatagatggaagccatcattagttttttttctagttcaaattgttacatccgcgtcattgagatgactaacacaatgataaatctttcagcagttataaacagacttgttcgtatttccagccatataaaaacagtatgatgtaggaagatggaaagtctacgagtggatagtgatgttgccaaccgataactcacagttactaggtctttgtcgaacatgtacttctaggccttcctgtactggttaagggtttatgggctcttcgacgatgctttgaaaatatttgaattcatggtgtatgttcaccgaatatgcatgccgaggtttaatttcatgttcacgtttacatgtatgtttttggagaagtgactgaacaaacggtccctgccgtattcagcgtcagcaaatcaatctgaataatacctgttatacgagtttttttaaacttaaatgaacaatgtaaatgtgtgtgtggtggggttgggggggacacagtacaactaatgatgtgtttttagcattcgaattaataataatttaacgaccaataaaaatttgaatttattttgttaggagccctccttaataattaggaaagcattctccaaaaattagcgtatactgctaattatggtgagcacacggtattctttagtaaaaggcaaaagaatagttggctttgtg

SEQ ID NO: 7588 - DNA, 486 bp, Zea Mays
aggcgcagcattggcgtgagtggcggtgtagcttcttgcacgtcgtaaccagtgcgccggttatatgacatgcgggcccgcttcctttgcgctggtccaccggatgtgaacggagccgaaggggcacacagttgcggtgcagttggacgcttgtcgcatggcagtccaccctttcaaccaccggtttctgcgaagatgggagagcgcttgtaaccgcaggacggttacatgcctcgcgcgcggtggttcgccttcttcgtgcttcagatcagctcatatgacgtgtgggtcccaacccccgtgtcatggggggaagaaccctggaggatgtcagtggggacttcgcccgtgacgctaaggggtgcaagcgaggaggtctgcctataaaagggggatcgatcccctgggcagtggccatgcctttgtcctcccctcatgccttgcgcccttccgccttttgagcccccagatgagggtgccccagcg

SEQ ID NO: 7589 - DNA, 864 bp, Zea Mays
agccaggccctagtgcctagcgaagcagaatatacctctgtcaggagtaggcaatcatgttcagacgcgctacaaccaagggagactgaaccatttggaggctgaagcagtctaggaaacgccaggcacggtagtaggtatgtttccagtcgaatcccatcttgtagaagtgttatttgatactggagcaacacattcatttatcattgcatcatgggtagaagcgcataatcttccaataaccaccatgtcaacaccaattcaaattgagtcagccggtggaaaagttcgatccgatagtgtatgcttgaatgtaattgtggaaataagggggggggggtagaatttcctgctaacctcatagtgatgggtactcagggaatagatgttatcctagggataaattgactagataagtaccaagcagttattagctgtgataagaggacagtgaagttggtgtccccaataggagaagaagtggtgaccgagctagtctcacctgagccaaggaaaggaagttgtcaccagatggctattgatagcaaagatatcaatccacttgaagctatcaaggttgtgtcagatattcctgatgtgttccctaaagatctaccaggtatgccacctgagcagaaagttgagtttgccatatagcttattcctggaatcacccctatttataaaagagcctatagagtatttggactagaattggttgagctcaagaagaaaatagatgagctgtcagagaaaggttacatcagaccaagtacctcaccttgggccgcccctgtcctgttcgaggagaagaaagatggcactaggagaatgtgcatcgattaccgagctctgaatgaagtc

SEQ ID NO: 7590 - DNA, 635 bp, Zea Mays
ccaggctcttggatgcaagaatggttttatgtgaaggttgatctgagtgaaagggaagatataacaggggttattcagtgccctatatggtctcgcttcggcattaggaggccagtcattgcacttggaaacgatgtgcaggcatgctaggcagctttcaatacagtgtgtacttatatcggcacaagagattagtccaagagcacattgattacagagtgtggccacttgcaagcggatgggagatgccgaaggagactgccgctggctccagctaaaatggtttggtctatctgaaatatacttttcgatataggagccagtttgatgagtcgaatgatgactggctagatgctatagaggaaactagcaatgagctgcttggagcatattcaaaggtcgaagatgaagctatgacaactgccttcgatgcgtggggcaaaaagagattgaatagggtgtttgatgtcatcaggtttgtgtatccagactacaaaaaaggtcgaagatgaagctatgacaactgccttcacgaaagcaagggaagaagaggaaagctgctaccttggtgacttctagtgcgtcgaggtcaaaaaggctaaagttttgatgcgtcaacccagatgcattgaaac

SEQ ID NO: 7591 - DNA, 354 bp, Zea Mays
gtctacctcgcatgcattggaatgaccacgttaatagtcgatgtgactccatagtcgggggacgatgattgattgagcagttgtcgactgctctgctcacggacgggtggcgacaaaactgcagaggtgaggagggcggcaggatcctaggctagctctgctgtgctctgatcaggtcatgcatagatagatagaggtggactctatagttgtagcagccggatcagagacgtgctgtcggccaaagtccacaggttccggtcgcgattcgtggatgttggcaggtaggtgaggagcagcggcagcggcgcggacccagccgcccaagtgaagtgacaccactccaccactcct

SEQ ID NO: 7592 - DNA, 525 bp, Zea Mays
gtggggactaagagtgaggaagcataccaatcgaagcttgccaaagaacaaccatatcccttgaacttgacgacgagcacacccacagagaacacatccaagcaccataaaccgccatcctacgcccttaaaggggaagaaacctctatggagggagggcaagaacttgggtccacccagcataagattgattttaccaccaacatgagacagatgacgaagcagaggtgtcaattgtcacgcaatcaggagccacgactattaccagccgcaaggccaaggctagcaaaagaagaacacacataaacaaccatcaagcgagcagagatgatagtgcaaaggtagaacacctccccgcgtaccaagcgtgacacttttgctgcacaaatatcacctttgcacagatttcagatgacctcgagaaccactgctaagagcgaccatagacgataacacaagcatcccgacttcgcctcaaacaaggtgaatgacacagaagctccataaagttggggttagcagaaa

SEQ ID NO: 7593 - DNA, 271 bp, Zea Mays
ctcgggagaggcgttcggccgtgtgccgaccatggcgccatcgtgagcgtggcgcgtcgccgttgctgtgcgtaggagtggggttggcactcggtgaccgttgatgcttgatcatgcggccgagattaaaccgtgacataacccctcgtttcattaaactgtggtcgtggatcctgaatcgggcggccaggtcttgggtcggggtttaatcgaatcatgatcatcgatcttctatgaacacaacagattagatctcacacatacccctccg

SEQ ID NO: 7594 - DNA, 288 bp, Zea Mays
gcacgtcgaacacgtgtaggtttgtttctgctcttgttctatcctctgctgagcggccaaaacgtgtgaatcttgccctaagacctgtgagagatctcttccctgcacctagggctacctagttcatgtgagttccaagggtagatgtggtcgggtttgagagatatgggggtgagaagttgtctttgtcctagctgtccacaccgagacaaaacttgtgccaagtcgtgtcaaacgacttagggttgggttcaaacttttccagggtgttctaggggtccttaggcg

SEQ ID NO: 7595 - DNA, 1110 bp, Zea Mays
gtgacgagtagtttagagaatgctagtttgcgtagaggatgtatcgttgagacgtgagtgtcagagtccatttatattagtggtcgcgccacattgattgaagtgtctcgagtgcacgccataatatggttgtatgcgagacagagttatgcgcatgatgagtctagtaaaaatccatcggtgtcggcatgatttctgttgtatggcggatcgatgccttgccttgtcaatcattacattccatgccgcatgggataaataaatgtcttgttgatcgatcagaggtcttatatgagcgttatcgtggcccaataattattggaagcaagtagcgttcataagtaggtccttgttaaaattgaagaacaatccgataacatatgcacaaaaatgctttaggtccttcagtagcaaatgtatgtcttatggagttttacaccatgtgttgttagacccccaaaaacatgctattttagatgacttgggtgttaactaatttaagttgagcaatggttgagaaacactgatcaattggctccaacccatgttcttgagttacgatgtctaaaatgggttgctaagtcttatgctgtgatttgccaactaatgttaagtaggagtcaaattcgttaagtgattgttatatatgtgttgtctcggattgcgataataatatgcaagccgacgtgtaggatgtatagcggcctagattgttactctggctagccgacttgttagatggcttggttaagtttgtagtcgcgatgaattgcttgttgtggtctaaatgtgtatggttatggttgggaatgaaaagtattagtgctcatgtgatgtctaaattaaaacgcaaatggttgggtgcttatcagggagaatgtgtcgttgattggttgtagtagttttagtgcacgaaatgacttgaataaaaattagtaagtctacttgttagcccttatttgattaatttaactctaagaagtggtaaactgctagaatgattcaagtctctagaatgctgcaatttttgaattatatagaaactggaatttattgattgctgttttgggctgcacgcattgttttcgttgtgctgtttgtttgataaac

SEQ ID NO: 7596 - DNA, 525 bp, Zea Mays
ggagagcactagcgcaaaggattcgtggcgttcaccgtggcaaggtcaccagcgacaacggacatgcttaagatgagttactgcaacgtggtagagcacctaggcacgtggcgcacggtcgataggcggccaactccggcgaggaccactttgcccgactgcaacccaagtgggtacggcgagctcaccgtcgaccgggtctgagcctatccagtgtcaagatttttaccctggcatgataatctcctcaccagagagcacgaatcatggcgacagcgcagatcatggcacaagggtcaccggcggcgaggggggctgaatctgtgatctttgttaggtattgtaccattgggatcctatttagagcgcctaacagaccaatttgcagggcccaaatatcatatttttacatgacaacttgttaatccgcatgtaacaaagttgttgccctatgatccagctacaatcttgctatatcaatcacccttaaatacttactggatcatgctcaaaatagccctcaaa

SEQ ID NO: 7597 - DNA, 470 bp, Zea Mays
gtagtaagtagcagtagaataatgtagtgttagttagtagtgtggtgtagtgtaagtagtaaggtaatgtaatgtaatgtagtggcaagggtagaacactcataatgagtcggcttcgagtttgtgttactccctctattatgaatcaaggatgtagttgctccaaataatcactgttgttttgcttttcacttgcatgcttgaaagtttgtccatgcgcttgacatcgctggcattttagaggtagtattcgagtgacgactgaggcttttacttttctgagtggtaatctggcactttagaggtaatgcccgacccaaggagcccatttatactcgtgccgacgcgtctttttgatttttgagccctaacttcactttttgctctgttgcttctctgcttttctgaatttatgagctcgctcgttccgcccgagagattgcaatggctcccaagaggaagaggcagag

SEQ ID NO: 7598 - DNA, 475 bp, Zea Mays
aacaaacagaaagagacagcaaaaggaaaatgtgctaaataaaatggcttcacccaatgaacattgacaacatgtaaaatcacgcctctatacaatcttctgtggattaaatgctattgagacattcaaaagcaataagcagaagcaacacttacttttcaccatactggctgagggtgatagcacctagtgtcaaggaataaatagtttctactaaataatctgttcgttcattagaaccaacatactttacaagcttcttccagcacttgaacaatgaggaaaagcaattccaaccatccagagatggtgagttatggttagggtcactctcatctttttcaagaacatctttgttggaagtatgtatttgtgaaagtatcaaagttactgcacttctacaggtataagaataaaccaattccttgaacgccaacgaacatgctaacatttcccggccaacaggcaaaacctg

SEQ ID NO: 7599 - DNA, 541 bp, Zea Mays
ccggcaattcctggcggtctaattcaatccgaggggtcgaagagcttgaggaggacctaagaacgctagaacaaacgatcaaagcgctgggactgacctggaataagctggccgcggtgaggctaaaccgagtggagttcggaagtgaattggggagaattcaaaattagagttctcatgtggggggtttgggatgcaggtgggtgcagtagctgcgtgaatacttgacggagctgaggacgcgctcaatttatagaccccgaggtcggtagctctcaatttgaccgcgatgtgttggcggccggagatagggaagaacacggtggttgtaaccgtggcagtcaccggtgtaacgacgcaaggagaatactcctaagggtgccacgcttacaatcgcgtagtaacaagcttaggcgtggcgcagccaaggtcaccagcgcttccacggcgactacggtagtctggccacgtcgcagcgactatacccacgacgataaactccaattcgcgatcctatcccttccccgccgtgagatctttt

SEQ ID NO: 7600 - DNA, 715 bp, Zea Mays
aattggcttttttacacctgatatgtttatgtttatgcattaattatgatacttatttttctacttttatttccgggagtagatatttagcagaaaattattaaaacgcatgtaaagtctatattgtgcttatttaaatcgctctaaatatttatattatgttgagcttttggactcacatcgaatgattaaattgtatagtggatactcggacacaccgatcaggctgtgttgttaatcggttgagttatggcattgtctaagcattggctgcacccttacaacacaatatagtatttgtgtagtacgaacttggctacgtcatgtgattgctatgtcgaactctcgcttagtcggaccgctcccattgagtcggaccgccattgtcgaatcgcgtatttttcgcatgccctgcaggcactgtttgtctatcgtgaccagtgagccacaattgcgcttgttgcgcacgttacgtggacttatcctgtaccccgactatcgagccacaattgctcctgttgcacttgttacggaggcttatttgttgtcatagccctgatggccgcacacgcattaacgccagatacgctggagcttgtactcgcgtgaaatgtggtggattattcgagcccctgaagtcacatcataacgcaaccttcgtaaacaattttgtttagctctatattttacttgattgtgttgtgtggcatcatat

SEQ ID NO: 7601 - DNA, 543 bp, Zea Mays
attagttttgtattcttttcctaatatgtgttccaaacctttcaggtggcaggaatcattgtttcgatttaaacatatattcggcctgaatgatcaaagaacaaagcaacagatccctatctactaccttccaggaaatcatgatattggttactcagcatttcattcagtccatcctgaggtgattaaccacagttgcttccctcccctgcaagctttccatttactactttctgtaatctcatgctattatttattttgaaaggtattttattttagtagccatgcacctctagacaaagataggcttccttgcattaagattcgtagtttcttctcatctaaggaccacccagacttgatccctgttgctgaaactctgggtggcacactgactggcaccctttccatgttttgtactttttcaccgcctagttcattgctttgctaattgctgcaagtggtgcttcttggtgcgttttaaatcttcaagaagagatgtttgtagcaccctgctgaaccctttcagtttttttttctcag

SEQ ID NO: 7602 - DNA, 545 bp, Zea Mays
agtaagcgtgagcatgtcacaccgccttaagtcgttgccgacttaagtcgattgctccgttagtagggtataatggtcaccctgagttaagtaagcgtgagcatgtcacaccgccttaagttgttgccgacttaagtcgattgctccgttagtagggtatagtggtcaccctgagttaagtaagcatgcaggttgatagtaaacaatttgagcgcctttgagaatgaagtctttttattgatgatatattccccagtttacagaatacaaggccgtcccaatagcttttgaaatatagctaggggtaaaacttcctgagatgttctatattccatgagttcccaatttccgtgtcatccatttgagtaagacgatacgatccaggccgagtgacttccgctactatgaatggcccttcccaaagtggtgacaatttgtgccgtccctcccccgttagaattcggcgcaggacgagatctcccactgcgaaggatcaatgtcgtatggccttatcatgatagcgcctcagagtttgctgataccgg

SEQ ID NO: 7603 - DNA, 740 bp, Zea Mays
aagaatcaaaggcacagaaaactcggcgcaaaacaggagaaggaccgggcgcttaccagggacacatacccacggtcaggacgcatcgcttgctggctaagggcgccagcatccagcctccctaccgtacctactaccgcttgagaaggtcgtcggcggagagagaggtcgaggacatccgcgagccctccaaaacgacccctggcttcatatccgcaagctgcaaccaccgctctgccaaagggagcaccctccgacgatggatagcggcgacgacccccgcagcggtaaggccctcatctcgtaacttttgcaaggcctacagaataggctggagcttctcctggttctcgcgcgtggccccccagtgccagttattgccggcggcggtcaccactcgttgagaaaacggcggaagcatcccgcccgccgtcgttccggagataaaaccaccggttctgccaccccttgttcaaagacacaagggaggcagggatgtactgctgcacgcgccccggcctcagctggagggtgcagccaccggcccgcaccgccatatggaccttcttcgcctccgtcctcgcggcgaagaactccgcggagaagagatgggtccacaggtcccagtgagggtcaatccccaaaaaaccctcgcaaaccgccgcgaagatggccgcttgcgcgatagagttggggttgaagttatgcagctccaccccgtagtggtgcaggagcgctcg

SEQ ID NO: 7604 - DNA, 872 bp, Zea Mays
gatgaattgcgattgctagctggtccggccgtcctgtccacttgccgcacggtcggccaagcttatcatcaccggagctcgccgtttcactcaaccatgccacgccgcaatgcattctccacgtcgtaaggatcgtggaggatagttagttacccctcctgcaccgttttctcctcgtgcgccacgatgcacagatcactgtgaaatatctaggtcgccgtgagctgatccccaatccaaattcgtgataagttcgaccaaggcctttaaattgaaggtgcccccgatttcgtctctgtgttacgcgcccaacccactctcagccagctcgtttcattccccgtagcctgcagttactaggttttccccaaacacggttgtcaatgccgctgagtgtagctccatcgtggccagcgtgattccagtgaaatcctactcctttacgttttgttttagtactcttatggtctctggattctcacggacccgggcggttgaacgttatcgctaccagactccgtgaacacggcgttgtcatccgggaacgccgccgtgaacacccctcgcgtggaagagctctctagtgcttgctctgttcaaattcacgcgtgtatcgtacctcgggtgagccagtgatgctctccctactcttattctaaacgctaccacattcggctgctcggaacaaactcgccggagttctggttccgttggtgtcgtgagcaaataaactctaggagcgggctcgtcgaaatggtctcgggaacatgtccggggagcctcttggttggtgcctgtgcgcttgctactgttgttaggggtcaccggcagtgagcgcgtgtgattcggccaggtgttcgaccaaagtctgg

SEQ ID NO: 7605 - DNA, 1015 bp, Zea Mays
gctgcgtacccggaaccagtttgatttcaaaagcggcatcgcactgtggaggaatgcctagcagctctgctggaaacatgtcggcaaagtcacacaccacctggatgtcttgcacccgcaaggcagccacaccctccaccaccatggagaaaaagatccccgacttccttgaccgacgatccagaagcaattgcgacaataaggataacgtgaactttggagaaacttcccaagaataccacctccctacccgacagcgcctgcaataacactatcttccaaaaacaggatataactgcgcgatactgagataaccaatccatacccaagataacatcaaatgcccccaaggaaatcagaacaagattagctgaaaagacttcatcagcaagaatgacggaacaaccctgacaaactgaacagctactattggagccattagcagaactaaccataattgggtgacccaacctctgcaccgaaagaccagcctgcgacacaaaattctccgaaacaaacaaatagctagcgctagagtcaaaaagagcatgggccacaaatgaatccactgaaatcgtacctgtcaccacgtctccctgctccctgccatccacagaggatagcacatatgctccagaaatacccgcagaagaggaagctcccagagtgaagttaacagaagaaccccactgagtcgtcgggtgaggcaaacgcggagctccaaactgagacggtatagaagtagtcggtgcaggagtaggcgcggccagatactgaggaaaaccctgcatcgacacgaactgagaagtcctgggcacatagaactgctgcggagggagtggaactaaaaattgctgctcagcgcttgacatcaagttgaccgtgccctaagaagaggaggaagtcactgactcccatctgagcttcccattgggattcctcctacacatcacatccttatgatcttggctgtagatagagcatctgccactccactgacactcggcacggcgat

SEQ ID NO: 7606 - DNA, 317 bp, Zea Mays
ggccgccgcgagattctatgatgctcggttgaagatgggggggtgtgttattggtgttgttgtcctcgttgacaacgtcgaggtcgaccgtttgtgctctcgcctgcacgagccttttgtcggtgaccttctcgagctcgtgacgctcgtcgtcaagctggcgctgcacctcatcgagctcctgcagcctagctcgtcgagtgtcatcatgcggcgtgggtctctccccgtcgaactgtgggcatcccgtacgtccccatccggggtgcggcacatgaagcacttcctggatgggtcgtaaggtgccagtggaggct

SEQ ID NO: 7607 - DNA, 914 bp, Zea Mays
cgaggggacaactttcatttgactttgaatcttctcatacccctgagtggtgacaccttcaaatagacataatcaccctccttaaactcaagcagtctcctccgggtgtcagcatagcttttctgtcttgactgtgcagttatcaaattctcccttatttgctggacttgctcctctgcttcttgtataatctcaggcccaaacaactgcctttcaccagtttgatcccaatacaatggggtcctgcactttctgccatataaagcctcaaacggtgacatcttcaaactggcctgatagctattattatatgagaactccgcatacggtagactcttatcccaactaccaccatgcttaagggcacaagctcttaacatatcttctaacacttggttagtcctctctgtctgcccatcactttgggggtggtaagccgaactaaaattcaatctcgtatccaatgactcgtgtaacttcttccaataccgagaggtaaactgtgatcctcgatcagacacgattttctttggcaccatgcagacagacaatctgtgccatgtacaactctgccaacttggctcctgaatacgtggtcttcactggaataaagtgggctactttagttagtctgtccacaatcacccatatagaatcatatccggcagacgtgcggggtaatccaacaatgaagtccatgccaatctcttctcacttccactcgggtatcttaagtgggtgcagtagtccaacttgtctttggtgttcagccttaactctttagcacacatctcacatcgtcacatgtgcagccacatctctctttagaccataccaccaatacttctgctttaaatcctgatacatcttggcactaccaggatgaacagaataatccaagtcatgggcctcct

SEQ ID NO: 7608 - DNA, 568 bp, Zea Mays
gtacagtagagttgtgcatcattatattaagaagaaaaaaaattattcatagtagaccaaatacaggaacaatgaggaacaccaaacggtggcaaaacagtaaataaactacacaacaacctccataggcgatagactgataaaagaataggagagaaagactcttggcccctgccatctcccacaactccaatttcttctccagctttcctaatggtcgaagcaacatcaggaatgagcatctcagaaacgcagtcgttcttgtggttccaaagtgtccagaaccccacaatgataagggaattgagcccttccacaacaatgccctgcaactgatcagatatctttttccaccaatccatagtgctcctatcgccaggcttaggagtgaggccctgcatattgacgtgcccaagccacctccaccataattgtctaaaaaacacaccccactaacaagtgatcaatatcttcaaattcttggtcacaaagagggcaacattcagggtgtgggagtccccgtttctgcagcctctcaacaatccaacaccttttgtgagccacaagc

SEQ ID NO: 7609 - DNA, 931 bp, Zea Mays
ttggtatgctcatctccttgaaatctctcatactctcatcttttttatacctacctttatatcccagtaactgtttaggacatttcagttaacatgtccttgaccacccctatttctcaacggtccatgagcgatcattttatgttgcccatccttggtgatctcgttgttcctttataacttctatcgataatgaattcttacttcaaccattctattgcaccctcacctatcttacccttgattgttttctccacttcgccacttcacgagtcttgccttaactttatccttcgtcatgccttttgttataatcaccttcaccttagacacctctatatcttatttgatgtttgtctcatgcctgtcctttaaaatcacctctcttccgtctcattctgagagctatactttacctatctttaccttggtcgtatcctcttctttggcttgcgagtttgtaacttcgtcctttgttgtgcttttgtttgttattgcctccacctttctctcttgatcttgccttggtaattactccatgcccgttatctaaaacctccaatctcccaccttagttcaagcgtggtctcttacttatctcacccgtggttatatcttatactttaccacttgcaagacttatcttaactctattcttggttgtacctagattcctggtttttatgcacatttacctcttcttgatatccttgcctattatcacctttgacccttgacatctccccatatttaccatgatatctacctatttttattagcctcgcttattccatctcaatccgagagtgttgttttccctatcccgctcttactcgtttcctttccctttgttgctttgcaatcttgcctcaccttaacttcatcccttgttgagcttttgtttgatatcatccttacctttgtaatctgt

SEQ ID NO: 7610 - DNA, 622 bp, Zea Mays
ccagacgcggcggcgccacccgacttgcggttgcgcaccgccggaggacacacggtcttcgccctggtgcatgattccccgccgcggtgaatgatactcgatgagaatcaagtgtagaattcagtcaaggctacgtaccagtgtttgggggtgacggcgcacaacacacggcgaaattggatccacggctcaacaaggtctccggcgaggaattccggtaaccccggtgataaatccctcaacccaagagtatgtatggctccctagtgattctatgaacccccctgacccactttaaggtcctcgcgcggcagcatgacgcacgacggcgagagctgaccacgggtggcgcagaaatgctcctagcggcgatatagggtatgattgagtgactatggtggaacgcgagggtaagggaaggagagggacgtgactagcattcccttataacgactgagacaaggtggagggggtcggccggctactccaaggagagccgtcgcgcaatccgcgcggttcattgcaacggtgagctgcaagatgacaggtggggtcctcccgtcaccgacagtccagcagagacgcgtgcgcgggagacttatgaaccgggccccctgtcgac

SEQ ID NO: 7611 - DNA, 539 bp, Zea Mays
ctctattggggaaaccactgtaacagaggaagcaagtcacacagaccaacgaagcaacttgaaacgagaaggactagccccaggcccaaacaaaattgtcgagccgaccagacccactcaaaccaccaacaggctaacaaagagcgaacaagccatgaacactccgctacagccggaccaaattcaaacccaaaaaaggagacggggtatctgactactctcacatgcaacgagccttccaaaagaccccatagacgctcagatcaccccttcagaggcatctccgacacccatcatggaattatgcaaccacctctaacctcttcatggagtccagagtcctctccaacctcctctgatcctttggctttagcagcaatctctacctctgcatagatagaagaaatagaaccatacaggatcatttttgtactgttaaggaaattcttttctatcaccattttgtttcttttgcaccataaggaccaaatcaatcctgcagtcaagaacatgcgtaaagaatgagacataagaggaat

SEQ ID NO: 7612 - DNA, 555 bp, Zea Mays
ggtggttggggtggtggatgtttggctgttgcgggtgtggaggtgggagtgggggaggtacgatttgtacctcctggtggtgttggtatgcgtggttaggtggatgcggagcggggccgtggttgtatggttgtgggggttgttgatatgtgtgcgtgacaactcttgggttgtcggctggttgcgcctgagacatcttgtctctggtggccttcgtttccgggcagtcccttgttgggtgcgcgcagtcttcgtcgtggaacaagcagtaaaatctgtgcggctgctgcgcccgtcctcggccccgaccacaagttctgttgccgcggccctggggggataatcttggtggcgaggggcctcaccagcggggtgctggttggtgatgttgtgtacctgctaactgcggccgtcccgaccggagtatgactgtgaaggtctcgtccacgttcggctggactgcgaagggtctttgggtttcctctaggactcgaccttgcgctggtggagctcttcagatctggcatatttttcgaatagctgatacagctcctg

SEQ ID NO: 7613 - DNA, 467 bp, Zea Mays
gagaaggttctttatgcttttggtcgcctgactggtcctgctgctgactagtgggattcttatgttgctgcccatgatgctgctgacactattacttgggcggagttcagtactcagtttagaaactaccacattcctgctggtttgatgaagatcaagaagaagaagtttctgtcattgaagcaaggcaacatgtctgtcagcgagtacatagttaaactcatttagttgtccagatatgctcctgatgaggtggcagatgatgaaaggaagcaagagcacttcacagaaggactcaatggccccctacaatatgcattggttgctcacacatttccatcatttcagagactgctggataaggctcttgctattgaacacaagcgtgttcaactgggtgacttgaagaggaaggccatttactcaggggcagggtagcagcagtgttcgtcctcgctacgttctgc

SEQ ID NO: 7614 - DNA, 426 bp, Zea Mays
ggcgaggtgggagagagggtggttggaggcagagaggacgtcatcgggagggcaggagggcgaggtgggactgtgggagggaggctggtgggaagataagaatgtagggcgggtagaccagtgaggttaagaattagaggacggcaaaggtggggccctacacgtcctctgctgacactgaaggacggcctcgcccatgcccctcgactgctgtgacagaccagacgacatggcgagagttgtatgcgtacttgcgtcgtaagcgaatgactatcgggtacgtcatacgctggaacgtggcgtagaagagggagaggcgacgcgtcgaacggaaatctcaggtcaagctgcagcgcacgcgtcagcacgcgatcggctgaagatgcgccgaacgcggagagcgctgcaaaacgcttcaggttttaa

SEQ ID NO: 7615 - DNA, 539 bp, Zea Mays
aaggtcatgggtcggcatggaacaggatgtgtaattatgaaacttgagtcccgctacgcatacacactatcccaactgacttaaaggagcacgactagagagctcagacaacaaggacagataccgacagatggacttataccaagggtagaatacctcgttttaccatgacgcaacaactccttccacaagaactcacttgtaactgccccctccttagtttataaaagggggaggaccgacccaacccaaggaggaaaagaggggacaaagagtgagcagcgatacacgatgacttagctaggtagagaacacctgatacatagtcccttagaaccaacgtcgcatagagacctatgatccttccctctctcgccttcttgtaaccccaactacgagcgatcaacaacaaggtgctggaagagcgagcaaccaaagactagaagtagggacattttgcacgaaccattataaatcttacgcccactgagcacaccatctggacttagaacatgcatacacatatttggaagctcaac

SEQ ID NO: 7616 - DNA, 683 bp, Zea Mays
cgaagagcttgaggagagcctaaggatgctagaacaagcgacggagaaacttgaactgacctgaattgagcaggtcgcggtgaggctaaaccgagcggagtttggacgtgatttggggagaatccaaaattagagctctctggtggaggatttgaggtgcgggtgggtgcgttagctgcttgaatacatggcggagccgagggggtgctcaatttataggcctagtgagcagtggccaggaatttgagcgatgacgcgcggcggtcggaggagggggagtttcactagcgcagtggattggtgtcctataccggggcgttcactccggtgatcaacggagagctaaaacaggtcacagcgatgcggtggagatgcctagacacgcggcacaaggccaaaaggcggcagtcaccggtgatctcatcttaatccaccgcggcgagcgtggtacggtggccggaattatttactggccggagcttatccacagcggcgtgactccgagcgttatccgatcaacccgagcacgaatcgagacggcggcggcacgaatcgcggcggagatcgtcggcggcgaaaaactgagctagcggtctgatctatttcagatcactgtaccatggcttagcccattcagtcagtgtgtcagtctatgattagggcgaattttctctcaattttat

SEQ ID NO: 7617 - DNA, 308 bp, Zea Mays
cgatgcttgggtcgccgacggagatagaatcaatgaactaagaagggacatccgtcacctgcaggatcagcttgctgatcgggcacttgactgggcagtacagtcccgcttgctggcatgtgctaaggaagctagggctcaggcccgaattaaagaacttagctcaactgtcgacaacctacaggtttattgcaatacgttgcatgaggaagtccatgtactatactcacaattacaccctagtgcacctgcacaccctgctgaggcggaagccggaccctctcacgttgcgggacgcgtgctgggtg

SEQ ID NO: 7618 - DNA, 723 bp, Zea Mays
gggaggtgtttgagcactatctgaagatcaaccctgacgccaagccggtgagtcagaagcctcgcagacagtccgtcgagcggcaggacttcatctgaatggaggtctggaagctgctagacgtcggcttcatcgaagaggttcatcacccagtgtggctggccaacccggtcattgtccccaaggcgaatgggaagctttggatgtgcatcgactacactagccttaataaggcttgtcccaaggacccatatccacttccatgaatagatcaaatcgtggattctacctccgggtgtaaccttttgtctttcttagatgcttactctagtttccatcaaatccagatgtctagggaagataggaagcataccgcttttgtaacattggatgggatttactgctatgttgttatgccttacaatctgaaaaatgccttgccaacatttgtgcgggccatgagtaagactttcggggacctgattaggaacaaggtggaagtatacgtcgatgacatcgtagtcaagaccaagagagggtcgaccctggtggaagacttgaccctagtcttcgacaggctgcgggcaacccgcacaaagctgaacccggacaagtgcgtctttggtgtctccgcagggaagttgctggggttcctggtttcgtaccggggcattgaagcaaacccggagaaaatcaaggcgattgaggcaatgaggcctctgg

SEQ ID NO: 7619 - DNA, 442 bp, Zea Mays
ttatccagctcacctcacccgcaacgcacgcggcggcggaaccctagacatacccgccgtcgtcgccttcatcttctccaccgcagagagagcagaaatcggccggtcctcattccactccacacatcggtaagtccaccgccatctccttcattctctccgccgcattcgtgtcgtcgccttcatcttctccaccgctgtgagatcggaaatcggctggtcctcattcccctccacacaccggtcagtcctccattgccatctccttcattctctccgtcgcattcgtgacatcgagtcacttcgtccgttcgcccaacttcatttgaaggaagcactaaataatcgcattggaggagctgttatcagtaagttctaaatctctaacattctatttgattcgttgattttatcgtggttctacatttagttcggcagtttt

SEQ ID NO: 7620 - DNA, 414 bp, Zea Mays
gactgagtgtagggcgactgggttcacccctttccgccttctatatggatcgaaggccatgaccccgcaagaaataaaacatgggtccccacggacagcctcgtcagttgtccccgacgtggacgaacccacttcgaaggatctcatcgatggagagcgcgtcttcgccctacaggctttaaataaataccaagcccaaacaaaaacatggcgtgaccacacagtcatcccgagggaattcagcgaaggggacctcgtactcgtccgaacagctcggacagagtccaggggcaagctggagcccaagtgggagggccctttcatcgtcaagacgaaggcatcccccagcgcatacaggctcgcaacgccatccggcgaggacttggagcattcctggaacattgataatctccg

SEQ ID NO: 7621 - DNA, 710 bp, Zea Mays
caactttgctacagaacgatgaccttgtttccatgtgaaatcaagagaaaatccagcccaaacttgatctgtcagactgaatagggttcgccatggtacagtgtgctgatcagatcgccagctcagtgccctcgccgccgacgagccacgcgcggattcgtgctattgccgcggtgatttgcgctcggatcaattggatagcgccgggggtaagaaatatcgtcgtggaaatactccggccattaatttactccggccaccgtaccgagcggaccatggcggattcggatgagtttgccgaagatagccgcttcacggccttgcgccacgtgccttgacacattcaccgcatcaccgtgactcgcattagccgtctgttcattaccggggagcttgccacggtgaaagccactaagcttgagcgccagtgaccttcttcccctccggccgccagcacatcttcgtggaattagacgccaccgccctagaacctataaattgccgctcttgtccgctccgctatgtagttgtgtaaccagtgaagcaacatgtgcctcaaatcctcccctagaactccccaatttgggatttcccccaaatccctcaagaacactgggcagtttgacctcgccgtggccaacgcgtctcaggtccgctcataccctctgccctcccgttttagcgttcttgtgtgcccctgatactccccg

SEQ ID NO: 7622 - DNA, 437 bp, Zea Mays
gccggatgttcgcactccgagctggactgaatcccccacggaccaggaagtggctgaggcaggggttttgttagcagaagttggattgttgaaaggaaggggtctgactgcagaagctgtagtcgctgactttgttttcaagaacattcagccactaaaagacagagcatatccggcttatctataccgaggcttggctgactcaacccgggtaaccaacagaagaattcctgctgtggacttggtgagccggctcgagatgatactcagaggcaaggtgtcaaacatcggcgctcctgttgcatattcggcctggaatttgcctcctttccatacttttactagtttcgtgtcaaatcctcctgctggtgatagcggtttgggtcttagagtgtgaccctatcccgaagaagttagtactttggttgcctcgctca

SEQ ID NO: 7623 - DNA, 781 bp, Zea Mays
tgggcatgcatgtattggtggcatgctgataggtcgacacatcgtcttgtcgctacgggaagcggtgtcgccgcgttagtgcgtctcatgttggagtcaactatagttgggtacgagagctatggcgttgtggtagcttgcactccaatgggagaccgtggtgagcagcgagtggaggcgaactatcagctaggcgatgggctagcgccgacggggggtggatgattggacgttagagtagcgacggtgggtggacgacctagtgacaggctagcggtggacgcaacgctaggacgagcgcagagcagggtttgggcgttgtggttctgttgttggtgacttcctctattgtttttactcgacgtggggagtggtctgggatggtgggctagaccgtgtgggttagtggatggtatgacgtggtggaccggatgtttatctaatttggcctcatatacctgataattttttcgttttatagtatatacaaaaatagatataaagagttcaaaaaattgaggtggggccatggcctactattcccacattgtggatctgcccctggtgtcgacccacatgtacaccccacgacacaaattacgtcagtgacatgattggaaactcaagtcctctctaggatcagaggggattaagggaaaaaataaactaattttcctttcattcccatccaatctcgaaggagatttgagtttccaaactagcccttaattttgtttcatacgtgtgagtttccgagggcaacttattcacaacatttgga

SEQ ID NO: 7624 - DNA, 674 bp, Zea Mays
gaccatgaagaaaggagtgttcccatgcagagctcggctaggttgggttctcaggctccaaacaacataaggtaactctcttatccacttccctgcgaatttttcgttcttgtcgaagacctttttcctgagtgcctctaatatcatcctgttggctcgctcaacctgcccgttggctcttggatgtgctacagatgcgtacttgatctggatgctcttttgctcgcagaagtcaaagaattctgaactggtgaagttggatcccaaatcagtgatgatactatttggtatcccaaatctgaatattatgctttgtatgaattccacggctttagcagaagtcaatgaagcaatgggctggaactctatccacttagtgaatttgtcaatcgctaccaacacatgggtgtatcctccttgagctttcttgaaaggtccgatcatatccaatccccagcatgcgaaaggccaagttactggtatggtttgtagctgctgtgctggcatgtgttgttgctttgacaggtattggcaagcttcacatctctgaactagctcggctgcatcatccttcgtcgttggccaatagaatcctgacctgaaaacctttccaaccaatgttctggacgctgcatgtatcccacattgccctgcatggacttcctccagaagtt

SEQ ID NO: 7625 - DNA, 878 bp, Zea Mays
gcggagtgtcgcacacgagggtagccagcgctacccctcgcggtgacttttgtattggtcgaatgccgaagatcgttgatgcggtctttttcaacgtaatttttgcgggggatttttcgcgtgtatattacatggctccacctcgttaaaaacctcacccccgggaggaaaagagtgagggccggaataaaactgttttgcgaattacaagggcgagctggccctgaggagttaaacaaaaaatttgcgaagattggcaatgttccaagaatgctctaagtcttcgccggatggcgttgtgagcctgtacgcgctgggggacgccttcgtcttgatgatgaaagggccctcccactgtggttctagcttgccccgggactctgtctgagctgtccggacgagtacaaggtctccttcgctgaatttcttcgggatgactgtgtggtcgcgccatgcttttgtttgagcttggtatttgtttagagcctgtagggcgaagacgcggtcaccgtcgatgaggtccttcaaagtaggctcgtctacgtcggggacggctgatgtgactgtccgtggtgacccatattttatttcttgcggggtcatggcctctgatccatatagaaggcggaaaggggtgaacccagtcgccctgcactcagtcatgttcagcgcccagaccgcttcaggtaacaggtctgcccacttgccttttttgtcgtcgaggagcattttcttgacggctgtgaaaattttaccattggcgcgttccacgactccgttggattgcgggtggtacactgaggcgaaggtgagcttggtgccaatggagaagcagaaatccttaaagtcttggctgtcaaattgcttgccattgtcaa

SEQ ID NO: 7626 - DNA, 351 bp, Zea Mays
cgacgacggagaaacagacgccgaaacatgcgacgacttcatgaagccggagaacgggacccgactcaacccgtccctcgggacgaagcctcagagatgggggagacccctgatgaaagaacacaccgagaacatcgcaactcccgctgtcgcgaccgtcgtcaagcttaggaacgcgagcaggagctagttgaacaagacgctaggctccgacgggagaatccgctccttgcccgagacctgtaccccaacttcgcccgagcgttgaacacgctgagcaaagttggaggggtcctagcgcagatagccaatggcctcccgcgaaccccagacgtggagggctatcggcgg

SEQ ID NO: 7627 - DNA, 620 bp, Zea Mays
ccgggacctagtgctcagtccattctgatacgaagtcgaccagcgcttgagtctttattgtcgtgcggggccagaactctatgtcgtgagcttccagctcgcacgcccatttggctatccttccaatagcttctttgttgtgaagaatgtctcctatcggaaatcatgtgactactatgactttgtggtcgtcaaagtagtgacgaagcttgcgagcggttaggagtaccgcgtacaacagcttctggacttgaggataccttatctttgagggcccgaggacttcactaatgaagtagactggatgttgcaccgggtatgcatgtccttcctccactcgctcgactactaacgcggtgcttaccacacgagtcgtgcaggagatgtatagcagcagatcttccgccgactgactcggcgtagctcagtgcagtggcttgagtactggtggtgtggtcaagaacttcttcagtgcctctagagcttcctatgcctctgtggtccactgaaacttgtccacctttttgagcaatttgtaaaatggcatgcctttctcgcctagccttgatatgaacctgctcagggttgccatgcatccagtaagcctttgcacctttttc

SEQ ID NO: 7628 - DNA, 805 bp, Zea Mays
agaaataaagtttgttctgttttttctgctcctttgatctctttgctaaaattcatgcggtgatttgtgttccaggccaatcaagaggctgaacagagctgtgcaggtgagcatgcattcattatattcccacggttgatattctttgcggtactacatctatggtagatttagtcgctgctgccatacaccagatacccagatcttctttaggcccttcgtcggcgaggagtatcacaaggtacgccaatcgcttggtcttatcttcctgctctacgaaaacaagcacacaaacccaatttactatgttacacccttggcttccgacgaggtggacgaggcgtgaggctgacggtggcgctggtagtccgcaaggaaccggatttggacgcgctctccctcgtcgctaggtaagagacccaggtaaggaacatataagtggttgttctgattttggatattagccaatttccccctccaatctgttactgatttatatgcccttctagggatcagcagatcccacacctattacatgatttgtccttctagaatagaatccgctttctatcttctgaaccggcactgccttcttcaatatcggccaccggtcggtccacctcttcaataatcgtccttcacttcagttgtgagttgtgacatactatttatattcggatctgatctattacaagtatacatgcatattatagggtgtgcgtctgtatacccatgttctttacaaggttcgtccctaggtgatatgagtagtaagtctaaacttgcttcttaccaagagttaggt

SEQ ID NO: 7629 - DNA, 428 bp, Zea Mays
gtttgcgttgatgtgctcggcgtcgggttggggtcatcccgggcagcgtcccgcacctcatcgaccttggagcgcggtcttgagggtcaggaagctgacttggatcatcttgctcccatggaagtaaccgaggaaccttcagccttagaggtggctgccgcagagaactcagcccttaaggaaggtgttggccctcacccagcccccgagggtgttgccggggatgattcggctcgggtgggtagcgcaagctgcgacccagcccccgagggtgttgccggagacgatccggctcaaatgggtagcgcaaactatgacccagcccccgagggtgtccgagcggggtctccctctggtacttccatggatgttcacgtagggtctcctccacattctggttgcatggtggtagcccaagcctttggtca

SEQ ID NO: 7630 - DNA, 461 bp, Zea Mays
attctgggagttcgattgcgtggacggaggagtcttcagatgaggacttggattattttgcagcgttagatgtggctggagcggagccttcgccgcgcgtggagggttccgaggggctcccgggtgcgagtactgggtataggcgccgaagggcggtggcgaaacagagagtgagtgaattgttgcgaagtggtaggcgtcattgtagtgaaatggagagtggtcgtcttcgcgtggacgggactggtaagcgagaattgttgtcctcgccgattggggcgagtgtatgtgagggggagctgcgaaatctttttgagggtgagtaattgaggataatgttgttcaactacagggagatgggtatcatcccgaaggttgagccaatataatatatgatgccctcgctatgtgtatgtgactgtaatttgtatgataaggctgcgcaccttcgttgatccggc

SEQ ID NO: 7631 - DNA, 620 bp, Zea Mays
gcagtccaacaggatatgggttagaccgacgcagtctgaatccggcaggccaaaccgcaaccagcagccagtgaacaccattgccaaccaacccccactggagacacagctcatcgccaagagtaccccacacaacagggccacaacaccaaccccagaggtagaagcagaggctgagccccacaaccacaaaggttctaccgcctttttcacggtgaagactctacacatcccaccagggactgcccgtaaaccaaagccaccaaagacataatggctagaaatcaaccagccgacgacaaacgagttgttgcacacacctaccatcaccagcaataccaccagcaacaattccacaacgaaccaatccaccccaaccagcccaaccatacgtaccagcatcaccaagagatcaaagtcctccctccacctccacatcaccaaaatccacctcccccaccagcacccaaacaagaggacttcaccgaacagcctttctgtggggtcgtccacatgattaccggaggatcaagtgcagacttcgacactaaatggcagaagaaagatcactactatagagtcaatcacgtagccctcactgggccggtggttcaaacaaa

SEQ ID NO: 7632 - DNA, 608 bp, Zea Mays
gcctctcccagaagctggtacaaccttggatattcagatacctgtcagtgttcgcccgagacgcccttgccaagccaatcaacttgattctcctgctgatgagcagaaaaagagacgtcttcggcgagtatctagcttggatcgggacgttggtccttcggttcccgctgctgaggaagtgcatgtgcctgagtttactgacgctgaccccaatgggtgtgctccatctgctgctgatcccaatgggggtgctccatctgctgctgatcccaatgggggtgttgtttgtgttgctgatgaaaacgacggggaggaagaagatgaggtccctttgactcggaagaacagtcgacagtatgtcgccagtggggaaagtagtggagttccttctcctgctctgtctgccctcattggtctacaagaattgtccctggcgaactttgatcaaactcttgaagatatggtccagaggatctgttatcagagccagcggatgatggtgcgacggatgtttgtgctgatgtgctcgacgccgggttggggtcatctcgggcagcgtcccgcgcctcatcgaccttagagcgcggtcttgagggtcaggaaactga

SEQ ID NO: 7633 - DNA, 1028 bp, Zea Mays
aaaaattatcctacacacccacaaataacagtaaagcaatgttggatactataaaagatgtcataggaacgtatacttgctctagctaaagtttactccatgaaagctccctaaacaattctagtagcttggcctctagtatatataccatgtgtttggttgcccgcgtctgtcggtgcaaggcccatcgatgcaaaaataaaatgactccatgtgttcggttgactgagctcgtctctggctaggccacactcatgcaaatgatacagccaaaaggttcgttcctcgcgaaccaggatgcgctcggccttgactgcatcaattcgcgtagtcgcgctagggttcctctcatgtctcatctcgccctccatctctcatgtctcctctggctctctaggtgctctcctgtctcctctcgccctcaagctctccctcatttttctcctctcgtcctcgagctctcacaccctccactcccctcgctgttaaggatctagttccttccaggtttcgacaaaaggtatgaagtttgatattctctcttgcactcttcccctggccacaagatctttgtataatttggttgcctgtcttgtgaatgttttcttagatttgcgaatgttgagtaatattggtagttgtggttgtgtatatcatggtattgtgccacgtttctcgaatctggtgtagcttgaggttgatgttctcagatctagactgttggaactagatcctctctctatttttctaggttttttaagtttagttgtccccaagtgttgaactaaccacttgtttctagtccttccatgggaactaatcacgttcgtgcaagaaccataagtgaatttgtggtctagaaattgatttgataagtgaagctgcaactagttgatagattttattaattttactcacaagttgcttttggatgatgagttcatctgtacatcgtccgctctcttccttgtattttctatagtccatgtcgagttgtttcagtagcctactgtctagctcgatttcaa

SEQ ID NO: 7634 - DNA, 405 bp, Zea Mays
tggaccacccataaaatagatttagcagagaccaatacatgggaaaatggatttaaaaaatgtacccttgattccgagcatcgtattactgtgaattgtgtcttaaagtgatatgtactgaattttcttcatcgaccacgatcagactatcaaaatgtaactgtctgtattggttgggtccccacacccctggcagataaataataccatcagcaaagatataggtggcgaatcataccatcagccagtaggttctgaccagcaggcagcagtacgctagttccaatctcatatgctaattcacttcctgttctgttctacctgcctcatggaaatgcgtgatgcgtctgcaaaatcggacaaaccggttagcatcacaccgtgattttaggacttgaaatctgg

SEQ ID NO: 7635 - DNA, 541 bp, Zea Mays
tgctacgtgaatacgggaaccaggggagctagagttggggggctcactgcagttgcagaggtgagagggaggccggtcgaagacaccgtgtggcaccgaccagcaatgaagttaagaccgttcgcggcattctctgctgattgcccttgcaccaatacctaggtctaggccacgggcctgctcgactctgatagcaacgacgacgagcactaccctctcacgtcgtcggcgctcagtgatgctgggttcaatacgcaaccgcgacgaccaggaggagggcgatgtgttcgtggttcgacacttttatttaaccagggaaatcagaacaacttcccccgtgaccgacgagtctgttacaggtctgcgcatggctggctgtgaattgcacacggcggaaaattggctcgcaagggacccacatggcggttgcgtgggatgaggaagtggggaggtgggccagccgcaaggtgatgatgtgggccgaggtgagtagatttgagcctagatgtaggtagtctttccccctttttctttattttct

SEQ ID NO: 7636 - DNA, 496 bp, Zea Mays
aaaaaggccatccaagtggaagctctctagggaaaatctgaaattcagattgctgaatttcagccctcacctagaacttgagcacgttcaccttgatccctagctcaaatccttaagtccccattgacaaaattgttcgaaactaacccctctgcaatgtgtgtgaagatggcatcaagattcgtgccctagacacgtcaaatctgggatttcctctcggagttcagtagtgagacaaaccaaactttatcactccatacctttagctccagttagcaaaacccataagcctccacacacaaatgacaaaggaatgtcaagggaagagatctctcaatgggatcatggccataatcgcaaagatttggagccaatccgcgcttgaactttacctctctctatgttgcctcgcgctcgacgccgtaccaaggcgctagagcgcgcactggcgctcgcccacgcacaccctgagcgcgtgtcagagccacccctcagc

SEQ ID NO: 7637 - DNA, 829 bp, Zea Mays
cgaccggcggctctgggataagtactcgggcacacctgcgactctctcctctccccacgctgagcgttcccttgtccacgagtctgcaccatggaagggtcgattgccgccgagagcgcggaggagtgagaacgtgggggcatcgccgatcgtgggcatttgctcaccttcggttcgtggggccacgaaggggtccgggcgcagcgtgacttcctagtgcggtggcaacttggcgacttggcaacttggcggcacagtgtctggaatccctgtgcttccatcgagttgcgggctcggtagtctgcgcatcgacctcaccttcacctggattgaaggtacgatctggttcctccttcgtagcgtggtaggtagcgtgaggggttttagttaggcgtgagctagttgcggtttgggttgttcgccgtcgacgacgagctcgctgttggctggcgggaccggtcacctgtgtgttgcggtggggaagaagaacatgcaccctcgatcgggtagcgcgcggctaggattgggtctgggtgcggggctattgcgggccgtagatggacgatctagtgggcgcgatcgcgtagcaacttgtttaagcgatgactgctcctggcgcttggatgtagatcagacggttgaaaacacacgttagtttataagtgcgatatctaatccacaccgcccgagcgtgatccaacggcttggatccgaagataccccttcggctgcaagttttgcaaataagcccctgaactatgcagaaaacaacccgccgtccaccctgtcggtgctctgagtctgtggaaatcttgcgccagaccccctg

SEQ ID NO: 7638 - DNA, 799 bp, Zea Mays
tctctcctacggtgttcttgcgcggatttgggggaagttcaaaattcgcacaccctggtgaacgatcgaggctaatttttggtggctggatgcttgactaccttacggagctcgcggcggggtcaatttatactaagggagggtggtggccgggaattttagcggtgacgcgcggcggtcggaggagtaagagttcactggcgcgcgtgaatctgtggcatctaccgtggcagtcactccgacgagccacggagagtcacaagggttcacggcgatgcggtggaggtgcccaagtacatggcacaaggccggaaggcggctgtcgccgatgaacttatctgccacagccgcaaagcacggggggtacggcggtgagtcaccggagttatctccaggcgcatggcttttacctggcggccttatcgggtcatcggcgacgtgaatcacaacagcggtggcgcgaatcgtggcgaagatcggtcgtcggcggtgaagctgctacgctggcggtctgatcccctttgatctactgtaccatcgtgagctgccatcagtgcacctgacagtgcgacttcagggcaatttttctctcagatttctatagcaactcataccaagttctgtagaaaagttggagagctacaaatcagctacatctttgtcatagcaactatgggcagattctggcttgatcatacctgaattcatgctcaaagtttctgtggttgcactgtctgtctgaaattcagaccttatcagactgacagcccgactttaggcttaattatctcccatatct

SEQ ID NO: 7639 - DNA, 630 bp, Zea Mays
gcatccctatttggtcgacgtttccactaagacctcgtacatatcatgtacatctattggaattatgatgcatcacacgctcattcttatgctctcctccttgttgtgacctggtaaaacatagatcctagatcgttgttgcatttccctagagaggcttccacctccaatagacactgtcgaattgaagtgagaaggcgggcacgagcttgtacaacacaggctccatgctcgactctaccagcttctgttgttcctctaaaggactcctacattgctcgcttgaaaggtcccctgctaggcgctacagtctccacatgcacgtgtcttacctctattgtgttttgctgatccattgttgttttgtgttccttcagacaacaatccattcctttcttattatggtggcccgatgcacgaatgccctttttgtggcgccttcttttggttccaggagcatgtcaagagtgcttctgctgtaactcagcggaggattgtctacaacctttgttgtaagggtgggcagatcaggttggaaccttacaaaaaaccacctgaacctctatgaactcttctgaggtttgatggcgacgctcactcaaaacggtttttgcgccagatatgatatta

SEQ ID NO: 7640 - DNA, 736 bp, Zea Mays
tgcccttccttgatactgggtcttgttctgctggctgatggaggagggcgccttgggggcgggtgctgaggtattcttggggccattcaccgagttggagtaagcaggtcctgatgccttcaactgggggcaattgttcttgaagtgactggggtctccgcagtgccaacatgcatttgcaaccgagggggcatgaaaggagctctaactctgctgactgaactgtgacggagtgggtccagttggtctaatgaagcttggtcccttaggtggaaacccaaaggatcgagttctctggtgccggtcttgctgctgagctcggaggacttggaatttcctcttgaggtgacctttttcttattcccttgccctctccacttgtatggctttgtttgagaggtgcgagaagctgaggaaatcttggctggctaggatggtcttgagttctggtctgagccccttcaaaaagcgggccatcttcttgacttcggtgctgacgtcatccggcgcgtagcaggcgaattctgtgaatttgtgcatgtattcactgaccgatcttccatcttgagttagttcccagaattcatcttccttgagctgaacgatcccttggggcacatggtgctcttggaaagcagtttcaaactctgtccaggtagcatctctgatggcagtgttgaaggtatcccaccaagctaaggccatttcggaaagttgatgagcagccaattgaaca

SEQ ID NO: 7641 - DNA, 280 bp, Zea Mays
caataacaaaagttgtatcgtgtcttccatggcgaagacgttgagcactccaccaaggactacccaatgaccaaggatgacagagatcacatggcttggacgatgccagacaataacccgagagccatcgcacacacctatcaaacccactacccctcactatcaagacatacaaccacccttttgccactaccaccaaaactacaaccaacaccaagaaagacttcccccacctccccatcaataaatgcttcccctcccaccccaccacaaataattc

SEQ ID NO: 7642 - DNA, 447 bp, Zea Mays
tcgctttctcgcaatattgcacattatataattttgatcttatacactttgacctttggatgtcccatatgtctactgtttctggattcaaatattatcttgtcattctagatgactgctctcaccacttgtgaacatcccctatgcctgaaatccaacaagtttcattccattgaaaggttgttttgcctacattgcaactcattttggcaccattatcaaatccttttagtgagacaaaggccatgattttgacaatcccactaaagccttccctcacccatggcttcacccttcacatatcctagccctacacctcccaacagaatggtaaggttaattatatcttgcacaccaccaacaatattatacactccctccacttttagactcacctcccctcatatagtggctttaggctctccacactactacctacctcctcaa

SEQ ID NO: 7643 - DNA, 351 bp, Zea Mays
cgaaaacggccaacaggccatattacaaaacaagttccagttacatacacttagcgagggcacctcatatactacattggctccaccttcggaatgatgcccacctccctataattgaacaacattattttcaattcctcaccctcaaaaagattccgtagatccccctcactaatgctcgtcccaatcggcaaagacaatagctctcgtctaccaaatcggtctactcgaagactgtcccgctccatacccatgcgacggcgcctaccactccgcgaaaactcgcccacactatgcttcgacaccacccttcgtcgccgacacttggtcctcgcactaggaagaccagcc

SEQ ID NO: 7644 - DNA, 490 bp, Zea Mays
ctggatcatatcgcctcactcaaatggacggcacggaaattgggaactcatggaatatagaacatctcaggaagttttacccctagctatatttcaaaagctattgagatggcattgtattctgtaaactgggaaatatgtcatcaataaagagacttcaaaggcactcaaattgttcactgtcaaccggcatgcttacttaacttgggttgaccactataccctactaacggagcaatcggcttaagtcggcaacagcttaaggcggtgcgacatgctcacgcttacttaactcggggtgaccactataccctactaacggagaaatcggcttaagtcggcaatgacttaaggcggtgcgacatgctcacgcttacttaactcggggtgaccattataccctactaacagagcaatcggcttaagtcggcaacggcttaaggaggtgcgacatgctcatgcttacttaactcggggtgaccactattcc

SEQ ID NO: 7645 - DNA, 716 bp, Zea Mays
ctcagttacctccatgggaatggagcaacctagaccagcttcttgactctgaagaccgcactccaaggtcgatgaggctcgagacgctgctcaggataactctaaccccacatccgggatgtcagtgcaaacgtccatcataccaccatctgctggctcggacagcagatcttcaagaaccatatcctcgagagcctgatcaaaatttgctatggacaactcttgcagaccaacgagtgtagacaaggccggagaaggaatatcactactccccctactgaccaggtagcgccgactgtttttccgaattaaggggatttcctcctcctctccctcatcctcgtcaacaatacgaacaacacacccattggggtcagtgctggccggattacacccattgggattagcatcatcaaggtcacacccattgggatcagcatcatcaaggtcacacccattgggtcagcgtcagcagggtcacacccattgggatcagctccagtaacaagttccactggcacttcctcagcagcaggagcagaagggccgacatcctgattcaaacatgacactcgccgaagcctcctctttttcttcttcttcccctcggcaggagcagttagatgactggccgggcgaaggcgcttcgggtgagcaccatcaaatttttgagcagtcaaggtcttttcagtctcggggacagttgcaatagctat

SEQ ID NO: 7646 - DNA, 663 bp, Zea Mays
cggtgatctcgcacccgaattcatgccggcgtcgcgattcacgcctggtcgaacacggataacgatcctcggtgaaaaatcgggcgctgaggatgagcttgaaacactgttccgcctggccgccgtgtccgcttgtctcacggctgatccagaaaacttcgccggagttagcatctgccgctcgggtgccacgtgcctaaacgcagtacttcgtcgcagtgactcgccctagcgtgtccggtcatcgctggtggtcttgccacggtgaagtgccacggtaaccctgcgccactgaccacccctttctccggccgccagcacgccatgaccaaattaggagccaccgctctgggatactataaattgagcacagttctagctccattaagtcatcacgaagccaaagcacccgctactgcctccgattagccaccagagagctccaatttctttctcttcccaaatcagttttccgcacccgtgaacacctcgtcgtggccggacgccttcaggttagctcatgctcttctgggtgatgttctagcctctctcaagtcccctgatactcatagaccctttgaattgcattagatcaccctaggtaacccagaacacgtcggtgtgttcttagtttccgccgttgccgtgcacagtgaattccta

SEQ ID NO: 7647 - DNA, 803 bp, Zea Mays
gctttgtaggaaggttttattggtaacatccattgtgtgggatcagtggggtgttacagttggtatcagagtgataggctgtaggtcctagcaagtggagtaataataaattgacacactgcacatgtaggatgggttttctgctttactattgatatgttatgttattgtctgagctagtttgacattatctgaagagatactatgcccatcttatttaattattattctcatccctgtggctgcagctatgccgcctcgtagggctcggggtagtctgcaagttcctagtggggactcgatgagtccggcggcaatgttagccgcgatgcaggccatgcagtaggagttggccattctgaggcaagctattcctgttgcccctgtgggtgctgctcagggtgctggtggtggaggagtgcctgggggcgctgtccctgcgggtgctgctccaggtggcagggccgaggtgcctcttccagtcagtggtctttctctgatgcagtggatgggcatgaagttggattcttttgatggcagtggtactccggttgaggcggcatattggtaacttacgtggaggataaaatgaatgtcttcgagattgcgtatggagatcgggttcgctttggcacacagctactgaagggagaggctcaaatttggtggagaggcgtgcaggcagcgcactcctcctcaccaagagtcctgtcttgggatgtcttcatcaggcagtttgaaaggagattctacccggtcaccttcctggagaaaatgaagattgatttgcagtcctacaagaa

SEQ ID NO: 7648 - DNA, 534 bp, Zea Mays
cttgttagcattccatcttcctcacttgaaattgtaccagtgcctcctgtgaatgaacttgtgtcgtcggtggaatgtgcagcagagcttgtttcaacactgtccccacctaggaaattaaggagagctgtgaaaaagataactccaaaggagaagatccaagccatgtacaactgcaatttggttcctgaaatctgaaatgtgtgatcctgtgccatgcaacagcagttgattcactcaaaatgtgtggttttgtacttggataccattgggttcactccaaatgtgtgttgtcgtttttagtctaaatgtttgtagcaacctagctttattctaaatgtttgtagaagttagtcttggttatgtacttggatatcagttggttctggtcttggacagctaaaactgtcatcgtggcctgcattttggaaagcaagttctggtcttagcactgatactggtgttctctgatcatgcttgttaacaagttctgttaacttagcgaatgcttatatcatgttattttgctcaaaa

SEQ ID NO: 7649 - DNA, 869 bp, Zea Mays
gcgagcagaaaagcaggtagatccaatagtcggtgcgctcatagggcgatctgccctgacaactgtgcccaaaagaaggactcctgagtcatggtactgaatagagccaccgttgtagggtccctctgagcaggcaaccagaactccatgggtacgtgtctgaaccgacgtacccgggctgcagtggcacgctgaaggtcaagcagtcgaggatcagcagctaggggttgcacctctgtctcgtcacgctccttgaagtgaggtggaggaatgggcggagtggaaatgggagcgggaggaggaatagtggaagctggagtggtggatggctatagagcgagaggagctggtgaagtgggaggtggggtagaagatgtggtggagggtgtggagggagcagaggagtgagaccgagatgcgaggcgacgaactctataagcaatttgatcgcaggaaatctgcaactgtcctccccgctctgtctgctctgcagctgctgccgctgcaagtgctgcacgggtggctctgtctatacaccgcttcttccggccttcctgctgctctaggtacactgtctaccccttgacctgcctattgggttgaggagggtcctcgtcgtctcctcccctggcgctgagacattcttcgtccgcaccatcctgacatgagtgttgcataagtgagtgaaaggctaagcacgagcaggtagaagctgataagattggtaatgaaaggatagctacctggaaacctcacgagaaagagagaatccatgcaggacaagagacgggcgcacgggcaggcgagatcactgaaatgatagaagaggtgagcatgtattagtcacatagttataagtatatgaaatg

SEQ ID NO: 7650 - DNA, 637 bp, Zea Mays
tgttgcagtcagaaagaagcttcctcgttgacagaaaaataagataacaagtgacaacacagtactccatcctttccagtttattgggtcagtctgacctagcatggtctcttaagttacaatttgaccattcatttatcttatattatattgtttataactgtcaaattaaaattacaagaaagtaatgttatggtcggaaacccgtataggcacatcaggacagcctgaactagacaagcaagaatctaggagaactgtgctgtaatcttatcatcagtggtgaccaagggataaataagcaataacagccaattcctattctcatcccctttcaatactctctcatctccctgctccaccacaccagcaaccacaagtcaaagttgaggcacgttgatagctgttttccatgtgttagcaaaggtaactgcaggcgcctatggcatgtgcctggcgtacatggccagaggggatctgatcccactgattggggataggatagataggatcctaccaatctggtatagtgatcaatcagggagatctcacgggcactgtttctataaacctgagatctcccccttccctgtgcctatatatatgtatgtctggtcctcttttctatacatgaaac

SEQ ID NO: 7651 - DNA, 388 bp, Zea Mays
ctgtttctactaaaaaatgccttgattagattgatcaggtgaagcatgagatggagctttaccctggatatcttcaagaccatttcaacatccacaaactcaggtgaccatttcctatttcctgaatcaccgctgctctatatatgcgacttaaagagagaccattgcaatacaaagtggaaccttaaccatgcaattataattgatgcccacacgatagtaaaattcactacattgtggaatctaagctggtgtcgctagctagctagttctctagaagaccagtggactagctagtgcagcactccaaaaggctggggcttatgctctgcctttggaatcccgtctcgtggtgcagcatgagcgtcgcgtaaaacattatatagcc

SEQ ID NO: 7652 - DNA, 376 bp, Zea Mays
caaactgtctgacctgtcagcaagccaaggcagatcgtgctcgtttaccgggcttgttacaaccattgcctgttcccacatcgttatggcaaatgattactatggatttcattgaagctcttccttgttcccagtcatatacctgcatcatggtctttgtggatgccttcaccaagtatactcattttctgcccctgaaacaccaatgagcaatatctggcctggtgacagtaagataaactaagctgccaacaagatgtctatatcaagatggatcctccaaaggtgtcccatcagtcggacgaagagataagtgaagatccataggcgtggcaacagtgtgagtatcactaagaccagaacgatcaaggaggtc

SEQ ID NO: 7653 - DNA, 685 bp, Zea Mays
acctggttggcaaatttctcagcaatccagcctgttggacatcatattacctgggaggagttcaacttggcattccaggagcattatgttctagagggagtactccagatgaaactagaagagtttatccggttaaggcaaggaggagatacggtaatgcagtatctcaacaaattcaaccacctctctcagtatgccattgaccaggtggataccgatttgaataagaattgttttatgagggattgaacgacaggcttcaacgaaaaatggcaacatgcttggacctcacctacagtaaggctgtcagtatagcactagaagtggaagccaaaaatgcgggacatgaaaaatcaaaggggtttggaggtgaaaggtcaaatcaaaggcctgaaaagagaaccaggttggtgatccgaccttttaatcaaaatcgttctttgcctcgcccaccttcatatccattcaagcagtccgtctttattcgtcccactactgccctgttcctaacaatcagccgattgcccctggtactcgtttccctgcccttcccagttcttccagtgggtgctttaactgtggaaaagtccggacatttcatcaaggattgcccatatacgaagcaaaataaatccaactttcaacaaccctctaggaactcaaatcaaggaaaggggaacacgac

SEQ ID NO: 7654 - DNA, 345 bp, Zea Mays
gccgacgctgtcgagcgaggacgacgaccgggtattggtggtagatcctccagatcgaactcgtccgataccaaatgttaacggagtgctaggctagaagctctcggagaggaattggagaaggagaggaagacgagagaaggatacgaacgtgctttctgttgcttgcttccgccagccaacacggcggcgcctttaccagcgtctggaacacactccctcacgcgtccgattaccgctcattcacaagtttggtccatgccattacagagcccactgcggcccaacaaactttgagttaggacgacgctgccgcgcacgccgttgcgtcgtgccgagttcgct

SEQ ID NO: 7655 - DNA, 425 bp, Zea Mays
acgctgcatcgatcagcgatgctgctaggcgaactctatggtccctcagccacacctaccggcaacagctgcacaacacgaagtaaaggcatcttcctctgtgtattcatggagaaagccagaccaacattgttccaggtggagctggagaagattgcctcaacaccctagctggtgtagtggcaggtcttaacaccgacctggatagaccttggacctctctagggtacacttggagctggaggatgcacacgcaaggatcacagctctggaagctcagcttgatagaaggaatccccctgaagttcaagtcccttctatggcgttatcccctccccgcaagaggatccgatatggagaactaggatccatcactaggctgctttagattcttcaattatattgtaataagttagtttccgcgt

SEQ ID NO: 7656 - DNA, 880 bp, Zea Mays
atcatgactcaaaactcctaaagcagcctagtgacggatccgggctctccatagcgcagcctcttgcggggaggagacaacgccatggcggggtcctgagcttcgggcggatctagtccttgcagttgggcttccagggctgcaatcctggcgtgggcattctccagctccaagtgcaccctatagagatccagggtggcactgtccaggtcggtgttgagaccggccactacaccagctagggtgttgaggcgatcctcaccagcttctcctgggacgatgttggtctggcttcctccacgcagacgctgaggaagatgcctgaacctcgtgttctgcagctgctgccggtaggtgtggctgagcgaccacagggtccgacgggcagcatcgctgaccgaggcagcgtaggtcgatagtggtgtcagggactcatgagcagacagattcctgaatcccctgtcacctgtatccatcaccctgacgtggatgcgagtgatgtaatagcaagcccggggaggctcgctcactcgccttgtttcgtacagggggcggacgtaggtgcctagcgcgtgcagcacctcttgcagcaggttggggaagtgccccgtctcgaacattgatgtgtaatgttcgacaacaggaccaaaccccatgaagttgtcctgctgggcgtaatcagcttcctcatggacgtgtccgtcttctcctccttcgtcgtcgtcgtcatcctcgtcatcatcgtctccggagtcgtcgggatcgtctcctccgggtgcaggtgcttggaaggctggtgcagacgatgctgacgtcgatgatccagctgcgaaagccagggattcggccaacggagtgggggtcgacagctgttcctccg

SEQ ID NO: 7657 - DNA, 825 bp, Zea Mays
gccgaactgggccaggcggtctgaatctttactatattaaagcatcagtttcgacggtcgtcccgcgtcatatttttataaataatcccttctattgtttgaaatggcccacaagacacattctcttcacattgatcgcatctaatccaatttgtctatccactcaccgtcctcaacggatctatgccccacacgtcacgcgagcgtctcagtcaaccacacaatgacacaaacccacacacaccatgtcttacgttcatagcaacagccggtatggaaagtgggcacgcgccaaatgcaccacgacacgagcccaacaactcatgcacgctggttcgtaggggacggggaaatcagtttcagcagacccacacatgccgtgtcttccatgcatagaaacgtgggaaagcggtctcagcagacccacacacgtcgcgtcttccatgcatagaaacgcggggaaagaggtttcagtagctacggggtggagtcattttactcatcctaatgcgcccaccaacatggctacaaaaagtcgtactaagacctctcaagggctaggagtggtggatctactcgcagccgatggctgacgctctccagctaccccgactcgcctacgtcctccaaggtacccatgtacgtacatctgattttctggctcacttactccacgggcatatcttcacaggcctatccaccgagttcgtgttgcgtttgtgggacctaacggagaccgacgctgccgggatgggggtatcgatgactaggcacgggacacacggagggcatcggtggcaagtcaccaaccttaggcacgacgac

SEQ ID NO: 7658 - DNA, 410 bp, Zea Mays
ggaggatagggatgatgtctgggtcgcttgatccgaaagcaagggccaagattagatcaccgtgtaatgtactagcatcgttagatttgaattcgatgtaccggtttgcaggagatggggatcgaatctggtccgtgtgatcttgatccggagtatgtggatcgatttcagctacttaaaacctgggtcgtagatcttagatccatgggctagcagcttttgcggattcagatctaatcggatctgttgatttagaatctaacggcccagattggacgatacctcttcgctagggcagtttagcataagagcccctcggttagttcagaatgaacccgcggtccacagggactgttcacagagtcttagaaacttttacgctgttgcccttgtcttttacataatttgat

SEQ ID NO: 7659 - DNA, 503 bp, Zea Mays
gaactaatttgcaccatatggtattttgtgtgttgcactcggtttggccaagaattatggtgggaatttgatattcaaaccaaacttatgggcaaggaaaatggcaaaaaggggaaacgccttacctgggccatggagctctgatcggctcacccaaccggcttgggccagaaaccacatggccgcgcatacacgtgacgagctgccggaattgtttaatgtattcatgggtggtgaggtcatgccgatgtcaggggtgacctcatctccatgggcacctgtaccactgacggttgggccccggtaatgctctgtatgcctaaccgtatggacctaggagcagctgcgtgctgctcaaccgccaccgtaaccaccggccgggcatgtaggatctacacaaagactgccttgggttcctggatatatagaggggaaaaccctctctcatactcctctaacccaaccgcgcaaaacaccttcacgacaccgaccgagagagagat

SEQ ID NO: 7660 - DNA, 455 bp, Zea Mays
gcatcgtcgagcccttcgggagcctaactatcgcttgtcgtccctccacccccaccctcacgaccctagatcgatcactctcttttgaagcggcaagcgatgacaacgcatcgtcgagctcttagggagccatcgatgacaaccgtcgaggtctgtgtccccacgtttgcgggcagacggagatctggatcttctttccttcgcttcactgctcgccagtctcgttgcggcagactgaggccacactcacctatgtctccaccatccaccttctccgacgaggtatctagcaaatgcccacgacgctgcgcctgcaagcagccagcaatgttgccaacgcctgtcccgtggatcctgcctactcaaccacgcccctaggtatggatcctgcctactcatatctagatccacgctttcatcttgattttcttgtacccaatgccatggatctgcaa

SEQ ID NO: 7661 - DNA, 351 bp, Zea Mays
gtagactacgaccagatctggcctcgtctgaaagtagtaggcaccgatgtggtccctagtcttctcagacttgaccagcacgaagaagtagcagaagagggaagtgcagggggccacacctacgaacatctcgcagaggtggacgaagattgctgcctggaggatggagtggggcgtgaggtgttgaagctgaagcctgaactcctccagcagtagtaggaagaagggagaaatcgccagcgccaacccacaagagatgtaggaggtgaacaacacaaactccccggcggcgagatcgccaaggggggcagcgccgacacggattcttccggcgagccctggcgcgctcca

SEQ ID NO: 7662 - DNA, 561 bp, Zea Mays
attgaacagagtttttgatgctattggctttgtttacccagactaccgctacccgctgcggggacaagggaaaaagaggaaagctgctacttcggccaccccagacgaacctgtgccgaagggaaaaaagttgaaggtcctaactcaccggccgcgattcatcgaaccgaccacgatacctgaatttggcaaaggggcctcctcggctgccaaaacaaaagaaactattcctcccgtgcagaggactgaagagccggccataatgccgaaggtgcctacagtcaaggtagttgaaacgaaggttgataaggctgaaaagccagaaactgaagtaataacgaaggtgccagaggttttgagccctccagaaaaggtaacagtaccaaaggtacaaatgggttctgtcgtaactcctaagaggaggagaatggtaaatgtaatggatgtgctagaaacaaccgaaaccttgagtcctgctcctgccagaaaaattgctgaagcttctaaggcgcaacctgaagctgaaacgaaacaggcagaagtcgaagctacaataaatca

SEQ ID NO: 7663 - DNA, 433 bp, Zea Mays
cgggggacttgtattctgctagccaaagcaaggttcgttgttcctggatggcatagttcttctgacgtcgtgtgtagttgtactcccatcatggtgtattgtcccgttcgctcgtcatacagatccctttagcgattctcccgctgacatcttcatagtaatgtgtgagggccccactgggtcattcatatggtgtagtcatgcgtcgtgtggtctcgcctgtcgtcacgagcccacgtcactcacagacgtgcgcaggcgtacacctggtatggtgtatcagttgcgtactatttggtatttggtaactgtagaagctctggtgatgaggtcctctatgaatagggtcgaccgacccctcgggatagtgggggtggacccggggtcgtacttgaggaggtgcagtcatgttgataacaacccctcggcgcgc

SEQ ID NO: 7664 - DNA, 619 bp, Zea Mays
tgaggctcctgctccccttccaccccttctgccccctagggatagagcatcccagcccaaactgttctagggtttcgcgcgtgtagtactgtttgttaattctgggttaggaccaccgcttctgacctgctgctgtgccgaatggggactgcttttcggtgccccttaacgctcgttgttctcgtgattgccggtcgttgcgttcaagcgattcaggcatgagaaagtagagagcccctatcaccaataattcccatgcctgtgcttgttatgtggccaatgaattcttcattctcgaacagaactggatggtcctatctgtcgtaatccacaatgaccatttgtgttttaatcgggtaaaatgcatgtatgctattcttctggtaggaattgagttgctgctgaatattctactaggtgggatgttaatgttttaccgtgcatccgaatttctacttgttgtttacttagagttcaggtcatttggctcacaagtggttggcctccagcgaatggttagggtgcagatgacttgatcacgagggccatgtggatgttaagggtgcggtattatttccacatggattccgttgcccttccagtgctctctcttatgttt

SEQ ID NO: 7665 - DNA, 641 bp, Zea Mays
tgataatccaccaaaagtccaaaacaaacatattctggcaagctataagataattcttctcgtatatataccaaatgatgcatttaatctctactactaattatgtttcagtacttgatgatgaggctgtcatgaggaaacaactccacgaggcgagagaacagctggtgagacaaaggtaagagtgttttttacctatatatgtttgttgactgatggctgcagatatctcttcacagaatttgttgagcaacattgttactaatatattcactctctctgtagtttggaggaaggaacttaaaatttgctaatcctgaagaaagcttactgttttttttcgactgaaccaacaattatatttggtgctgatgtcactcaccctgctgctctagatgatacttccccgtccattgcttctgtaagctctttttccgtttacaatacggatagtaccatcttattacaataacactttatgcctggtggttccttgtaggttgttgcctcccaagactggccctaggtggctaactataatgccattatacgtgcacaaggtcaccgtcaagagctcatcgatgggctggaaaacattgtcaagtacgatcatcatcaccatctctgaaattcaaatggca

SEQ ID NO: 7666 - DNA, 393 bp, Zea Mays
cccgatgattcaactagtcgacgggcccattctggagcctctgtctcgctgagtcgggccgatgtcaccatgagttccaaagggggatttgtttggcaacttcaaccataagccttggttgccaccggtgtaggtcagacttccacacgggtgcactggatccccagcaatggggccttggatccacctcatgtccccaggataagagcactccatagatgcaccctacggccgaacccctgtgggacggtcccaacaccatgtgtgtgccatctagacctccagccaatggaggtctggtgctgccacatgtccgggctaataccagtgggacccaaacttccctaagtaccttttggaccctcggtcaagagaagtttggagctaccacgt

SEQ ID NO: 7667 - DNA, 706 bp, Zea Mays
ctccgtagtagttttatgtgcctgggacttctcagttcgtgccggtgcagggtttttctcagtatctggctgcgcctactcctgcaccgactactcctatgccatctcagtttggagctccgcgtctgcctcacccggcggctcagtggggttcttctgttaatttcactccaggagcttcctcttctgcgggtatttccggagcttatgtgctacccgctgcggatggcaaagagcaaggagacgtggtgacaggtacgatttcagttgattcgtttgtggcccatgctctttttgactctggagctagctattcgtttgtttcggaggattttgtgtcgcaggctggtctttcggtgcagaggttgggtcacccaattttggttagttctgctaatggctccattagtagttgttcagtttgtcaggggtgttccgtcattctcgctaatgaggtctttttggccaatctggttgtgattaccttggggcattcgatgttatcttgggtatggattggttatcccaatatcgcgcaattatatcatgtttttggaagacagtgttattgcaggcaccatcgagtagggaggtggtattcttgggaagttccccaaagttcacgttatccttgttggcgcaattgcttccagatcaccagtcaaggaagtcaggaatttttttctccatggtggtggagggtgag

SEQ ID NO: 7668 - DNA, 752 bp, Zea Mays
gtggacccccacatcatgctactgctaagtgctggcgaagttcgtagtgaagtgcacacagagctcttcccaaaactagattgacccggggtgacattcatgagccaagtctaggttggcccgatcaaggctacatgaaagtagcttgccatgacggcaccgtttctaccatccactgtgacggtggtgacgtagacctgtaggaattctgacgggttagacgtaccatcgtacttttcctgcaaaagaggatggaacttgggtggccaggccaccatgcggaggtgatctgcgagtgtgacgcaacccactctggccattaggacacccatcttgacccgagcgtctcctgaggtttttggtgctactgcaccaaagtcagcatcgaggtttcgaccttcgatgttgtgacggcgctcacgcaccctctccatgaaggcacatgcatcctcacccgcatgcctgcgatcgagttctgctcgcatgccttcattctacacagccctcacagagggcgagcgcacggaggttgacgcatcatgatgatgttagtagagggatctcaagttgtgttcgcatcgaacggaagtcgtgatccagttctagccgtactagaggcggtctgagccaagttgatgaggcggtagatgtcgtgttgccactgcctaatcgcccctagcatggccatagagcctagggttgtggagcagctccctagccgccaatagcgatccactaggaatggtccgtga

SEQ ID NO: 7669 - DNA, 712 bp, Zea Mays
ggaccgtgggatagccggggcccccttcgccgatgacgcagagaaccgcgggcggggtcaggaggattgtcgccgcccagggaactcgccctcactgcctgtctgtgcgcatggtcgggccgaggaacatagagagtggaaagtaacggcgttcgctggctcggtgggaaggattgatcatcagggcgtcatgaattgctcaccggagctcttcgctgttgcagtgccgctcttcgccgtgggcgtggttctatgctacactaaaccacggtgagttggccctatagctttcacaatgagttctgcgttgagttgcactagttggcacgtgggatggtccaccggagcaccgagatggtgattgccggtctgccgccgccgtggtgtgcgcacagagctgcccgactcggataggggtggggaagacgcgcgtgggccgttgatcacagatggacgttggagattcgattccagttaccgcttcagggttgtgatcgggaccgtccatggggaatccagcggatcggatttggtctcatctatttaagtgtggaccgtagatcgtgaatccagtggccgttattggataccggttcgtttataggactgggctgatctgggccgtccccgttggatcgggcggctgatcttcgccgataccccttcgtagaaccccttttacataggagccctcggattttagtaaaatcaa

SEQ ID NO: 7670 - DNA, 590 bp, Zea Mays
gttgacaatgtactcgtcaagggggagattgcaaaaacaaggttgacatgtgcccttgtgtttgggttgtgttgagttgttgttaattgtcggggaaatgatcctcagggccctagggcccattagttagtagaagggcgtgggagaggtctaacccagatggacccgccctggataagcatgaagcaccgaacaaagggttaggtgagagtgtgaggcggagccgcaaggggtcaggcggatcaaggggaagcccctcgagtggagtccacacctgactaggactgaccgattgtgccacattaaccacgcctagcggcgaaccatagagggtgagttgatccacttaccaatcataacccatgggccctaggcttgcggtacactcatggcctatcaagccaaggtctgagcacgttggtcgcctacaggccctgcaaacacgacaagtcatgccgagacccaagctatggcgcccaggggttggtgcggcatatagacggcaatgatgatgttgggactcttcgctgcccatgcctccctccataaagagtacaaccaaggaagaccagacaacctggcatgaatgg

SEQ ID NO: 7671 - DNA, 940 bp, Zea Mays
cgagggccaaattggctaagactaggcataaataaggataaagggggagatccctggagccttctcctggggcgggcagcgcaaggagcatcaccctatgcacggtaggaggggaggacccggtgctagcaggagctagaccatggttgctcctgacgccatggcacccccagcaggaataggcgggacgatgactactagtgaagatgaccccgccccaccaggcaactcgcctctactacgatcagaggtgaggggttcggaggtaacaagaccatcagactgtcgacgctacccgccagcttggccatagagatcatcggccccaatgatgtcgtagccggcgaggccgcgctagggccctccaccgcgatatggtagtcagcacgttcgaggtcaacaacacaggatcctgggagacgaggcaccatccttcgccacgcgtgccacgtccttcatgaacttgtgcagcatgaatccgctagtaggacaattaaaatgaaaaaccaaaggcaacgatggaaaaaaggaagaccaaaagggacaaggcttaccgggaggagcgtgtccatctgaatggcatcttctacgatggaggaaccgccgccgaaagcgatgacaatggtcctccctcacgacgctcgaccagtgctacgggtgcgggggtcgtcgccgtctgctcttacgatccccctcgtgacgctcgggcgacgttgaaaacgtagggggctccaccgcctcctcctcctatgcttaggcactagatctggccttgatgccagcacggcaggatgattcgctcgccgacagtagggccatggatccaccgaaagccgttgaggtcttatcattcgtgttggtagaagaggagatgctcacccctcggtccgacgtgagtaggactgggcaaaatacccgctacctgattcccgaacccaaa

SEQ ID NO: 7672 - DNA, 501 bp, Zea Mays
ggcacctgcggtgtcctgggcacttcaccgaagtacctggggctcgggcgcaggtcgacgggcaagcctgggcgaggttcactttagcgtgatagaagcatggtggggctgccgcgggagtgattctcgtgcgccactgcggaccgcctagtgccgtgggtgaacgctattctcgacgttcagagttcggctgccggtcgggggagatcgtgagatcgtatcgaggctcgtcgtgatgtcttcggacggtgatggctacctgctccggcctgggtgctcgtcgtcgacagcgtacaaccacgattccaccgggcatcgcggctagcttcacctgagtgccaaacctcggtaagaaacctcccactgaactcgatttcgccctcgttacgcgtagtacccaatcatactcgattttgtgcgccggttgcaattgctccggcctggtccgccgccgcgcagtgagctctgctcgccgccatgctccgccattggggattgaac

SEQ ID NO: 7673 - DNA, 416 bp, Zea Mays
cctggagtgggcgtcaatttctggtaagcgcaggggccaacgtgcaagtattcttaagactctgagcgccactggtgaggacggcgggttaatttcaattaactacagagtctcttacgcaaaatggcctgcccgaaggggtatgtggttatcccggccgcgggatcaacagcggacggccgtgattatttcgctagcatgacgaaacggtatgcaacgccaaccgcccgattcgagatcaacgcccatgatttaatgagatccagaaccagcgcggatcgtcgatcgaccgaccgatggtcacgatctaatcacacaaaggggtccctatgatctaatcctactcgttgcccccggatccaacggttgaggtgtttctcccccaaaccagacagacgacgccggcaccgtccccc

SEQ ID NO: 7674 - DNA, 712 bp, Zea Mays
cgcaacatgcaacgacggcaggaagcccacaagtacgccaaagtatttgggagcttcgaaagggtcacaaggcatggcagaagtatttagaacctacatcaagccgaagtcaaacacgttcaatccttcttggtcatatatagaatccacaaggtggtttccactgtccaccgacaccaagaggtgatagaggatgccacaacttcagataaaaataaactcaaagcacacaacaacgaaagttgtattgtgtattctgtcgagaaaacaaaggccacacaaacaaggattatgcaattacaatacaaaaataaagagaactagtagctgctaattaggagaatcagccaaaggaaatatgtcacacgacatcttactgtcccccacctcatatccaacgatatgttcaacattaggggtcaaatacacatccttcggcttccaatgtttcagcacacccgtctccgcctcctcaaactgtagttcctattgtacatccatcatcatcttctcaaacttcacatgctgctcctcatcctctttctgacccaccctctgccacaagcatcgccattcagggctccaccaccttctcctcaccctcttggagacccactgtctatgccaccagtaacggatccaccttttccatagccatcaagggatccacgaccatcaaagaaatctaaatttcctaaaaattggtgtccac

SEQ ID NO: 7675 - DNA, 485 bp, Zea Mays
gtgcacttgccaactaaccataccattaccaccagccgctgcagaagttcgcgcaccgtcgtcgcgcgtccaccgggaagcgggtgtggctgggctcgctcctcgttagggttcgtcgtgatcgctacagaatcgggtgtggccggatcggagtctcgacgtggatctcctcagcgagtagtggttgaagtctgctcggtctaccgcttgtccaggggtgagtttttccctacctgttgattgtagccatgtaggctaggagcagtggtgtccaggcggtagttagggctcgaatggtgagctcggtgcagctcgttgccgcgtctgtggagctcgtccacgatggaataactgaggaaagaaatagaagagagagggaggatcgggaggttgaagatgatggcagggccgtagattgtaaagccaatggtgcagattaagtcaaggcgcgcagtgttgaccggtgtaggggaagagtgcctgcg

SEQ ID NO: 7676 - DNA, 481 bp, Zea Mays
gaggaaacgaagggagtacgagagacgggagaggatggaggaagcaggggagaaatctgattcaaaaagaaaggagggtgggaggacgggggcaagcctactatttatatcatgcggtgctgaaaacaacccatgggttgcgtccttatcacgagactgccaccatggtttcacgatggaggatggttgcggaagagtaggctcgtagtttgttggaaacctcctaggatattgtggggatttggtcaggcggcaaggatagcgcgctcgggaaactccgtcgcgcgagtgtacgcgcgaggtcacgaagctgggccccgttggcaccacccgtcagtggtatgcgactagggtggtatggtgtacatgtttttttagaggactgactgtctccaaagtcaccaataccaatacatgatatctctctgtatacagcaaatatttacttgtctctagtttttaatcatatctttttacaaat

SEQ ID NO: 7677 - DNA, 498 bp, Zea Mays
gggcagaggcatggagcgcctaaggaaaccagcaaggagggagctcatggggagatatcctgtgccatgggaggagagggaaacgctggggagctcgaccaacgaggttgttggccgaccatggagacatcctactgccgagcgccatggagggagctggagatggcgtggggaacagtgggagagatgcagccgtgtgggagaagaggaagaaggttgtggcggctagggaaaataaaggggtgggaatgaaaaatagccaagtgcaagtggagagggatccgtatttatagaggggcactagggttagggttttctagtgggccaaatgggctgggctggcccaagacacttaatcgggctgcgctaagtattttccggaataaaaatgctcctgcagaattcgcctctacggagaatagagcgaaatagagtttgaaagatcgggcgattaactcgaccaagagattgatttgacttcgctcagcaataattccc

SEQ ID NO: 7678 - DNA, 442 bp, Zea Mays
gcatcctgggatgtattatctttcctagccacgtggtgcccttagaccttcccatgtggtggggtcgggtgccgttctccgtgtggcctggaggcgtcgtacgtgtacatcgccttcatactgtagaagagggtacccctgattcagggtaccgacagtggcccccgggcctgcatcaggggaggatacgagcctgcaggtggggcgagagtctgattagcggttggcctgctgctcctgcgtgcctgttgacgcaattactgccggcccgcctatggtcatgccgactgctacgcctattcccacggttgactgacccatgaccttcgtacttaatgtcactgttgggccatgcgcgggatgcttcgagtcgctatactggttctgaaaacttatcttttcagtcttccgcgacggccccgagaagacgtgacattggcac

SEQ ID NO: 7679 - DNA, 410 bp, Zea Mays
tgatggcggatttcttcatggctgaccagctaaccagccaggtaaactgtgctcagccgtacactaggcatgcatggagagctagccattgtacttattacgttgcggctcaaaatgtcttgttttgcagatcccactgctaagacacctcaagttcacggggtgctacttcatggctgaaactttcagaactcacgcgtatggaagttgtaccagcagctcccaatacaagaacctggcatatgtgctctctttcctgccatactactggcgagcaatgcaggtagattgatattgaacgaatctagcagatctatctgctcatcagactaactaaaatggtctactgctgcatgctagtgtctgagaaggtacttggaagaaggccacgacatgaaccagcttgctaa

SEQ ID NO: 7680 - DNA, 277 bp, Zea Mays
tcggtataccaatttgtatcgacaccatagctgtgcattgctgctgctgcactcttggaatttgagttggaatagttgtcttcatcatatcggtaccagcacttgcgggcagaatgcccagttctgtcacaaacctgacaggttattgtgttcccatcagatctgtgccctcctggaccaccacgccctcctggcgcattgatgttgctgatgcgaccaggattaaaccgaccattgcgaccccggccatgcaggccagaaccaccacgaccatgac

SEQ ID NO: 7681 - DNA, 436 bp, Zea Mays
cgaccttcgggcaatgttatctaggccgaggccaggctcgggcgagacgaagatttctcccaaggccttggttgagcctgccttggggcatgtagtcgtacagagaggggttagtacagtttgtcggagtggcctcatgtgggattcgcggggagttgttgccggggtagttggtcgaagccgagcttgggtgaggcagagttttctccaaggtgtggcggagtttcatcctaagggtgagaccatgctctatcgtacgtacgtctcatccagagttgtttgagcacaacatacggtgtgggggagcagtggccgttattactggacgtgcatcatcgtagttggtgaaattggatgggatcgtggtcccgtcgctccctttttgactgcagcgtcacgtgggggtaggtatttgcattaaatggtcatgtcttcg

SEQ ID NO: 7682 - DNA, 476 bp, Zea Mays
gcctcccatgtggccatcaaaataaccctgttctttctggtggctccatacaaacctccgacgtttatgcaattttcggcagccacaccataagccaccaaaatttagccctttttcgggcgtgatttccttctctcgtccatgctcgctcttctctttcctaccatcgttgtgtcgttgctacatccacgccatagcgtctccggccttgcttcacccgcacagctgtgtctctggcctatgcacgtagccgtgtctctagccttgctccacccacgtcatcacgtctctagcctccgcgcgacgtcatgccctagccttgccccctactccacccacttctttggccccctgcttcactcacaccaccgcatcttcgacaacccccgccgctgtgccccccactaaacctttcttcggcctctactccagttgtgtcatcatgtctctagcccctatgtgcatctgtgtttccc

SEQ ID NO: 7683 - DNA, 787 bp, Zea Mays
attttcgccgatggggttgagtttggctctaggcacggtgaggaggattcggtggcaaattcaaactccgatgggtaattagttcacgattcgatccacaattcctaatcctgacggtcctattccatcccgtaggggtggcagatgatttgggcgacttaccaaaggtagagaagaacataatgggattgtccttggcgagggcgacaccacaacttttgtgcaggttggcgaaggttgaacgacgaccacggggctaaaaccacccaaagcagccctcctgggcacgccttatgtggctcggatcggttcacaacgcgaggtcgacgacgaacgcaagagtagtccgcgcggtgagtctcccctattcgccctcctccctcactctctctccctgttaatttctgcaataggtttatggctatggcagtggaatcactggagctttataggtgcacgcacccctcggatcttggcgagctagcgaggtttcccgcgcgggttgttacgcggtcgacaaggaagatatacagtgggggtttaagacttcaacacgcgggcccccatggtcaacgacagcagcaggtttagagcgcgcgagggagtgagactggcgatctcggacccacatgccagcatcgtgagttggaaacgcgggcggcatattcaacagacgagtgggccccgcctgtcagtgggcgccaggcgcgggtgcggagcgcgcaggtgggctgatttgaggacgagttgggccagcgcgtgggggttctgacccaagacgcaggta

SEQ ID NO: 7684 - DNA, 662 bp, Zea Mays
tagtggataggatagaaacaagataagtttgtttgcatgcctagaattaaggatagaaactagataagtttgtttgcatgcctagaattaagggttgtttgcatgcctagaattagggagtagttagctccatgcggttaggcctaggggcctatatattcctgtaaccagacctgagttggaattaagaaagatcattatcctaatctctctctcaactaagccgacggcagaggggcataacctcgccggagaagacgacggaccgcggctacgatctccgtagccgagggccacccaccctagagacactaaggcccttgacaacctggtatcacggtcaccccgatcctactcatccacctccgccgacgccgagtctaccgccaccgctccactcagccctaccgtgccaccacaaagcccaccaccctccccaccttcatccgcatcctcctgttcacccatggccgaaccatccaatgccgacctcgccaagatgattgagcaactcaccggcttcgtcgccacgctgcagtccgaagtcaccgcgctgaaacgcgacaaggagaagtcgtcgtcggcgagcgggggcggcgttcctgacggccagcaccaccacgatcggccacccaagttccagaagatcgactttccctgct

SEQ ID NO: 7685 - DNA, 317 bp, Zea Mays
attatcccgaaggttgaaccaatgtaaggtgtgatgccctcgctgtacgtatgtaactataatttgtatgaagaggctgtatgccttcactgatccggtcgtgcactgggtctagcgcgtttattatgtcggtcaggcggcacctgtagtcggtcgttgcatgggtacttttttgagagagacttcgattttgcgcgcttgttgtgctagtccggctgcacccttaggcgactttcgcacggatagtcttttgagggagacttcgattttgcgcactttgttgtgctagtccggctgcacccttaggcgacttttgc

SEQ ID NO: 7686 - DNA, 1027 bp, Zea Mays
cttagaatctcgagccaattactctcaaaaattagcttgggcctcgggggctcgtgggagatagatatcccatgggtcattgcaacatggatatgttccatgggccgcccgataggcccccgataagtcgcccaacagtgcgtactatcaagccacattcagacgaaacaagattaggcgaaacaagatgacacaccgagcagagatcaaactcgaataatacgacacaagaatgttatccatgcacgattttcgcagaggaatggcggggattctgagacgcgtcctagacgcgaccagatagcgacctactcggaggataactcagaggaaaagcaaccgaaccctggaagaatagacacgctcgcagtagaagatgatagactcaaacaatatgtaagataggacatctatctagtcggctatataaggctgcagaggtacctttaccaaaaaggagtctctcactcacctttagatcgataggaactctttaattcacctccacaactacctgtaatctgcaaactcagagcaatccaatactcaacaccgcaaatgacatagggtgttacacattcacgtggcccgaacatgtttaaaccctatgttccgacttgcatccacgtgtaccatcaagcagcgatcaacatcgccgtcctcccagaagcactacgtgggctaccccttagtgcacagccgagactaaacaccgagaaaccatatacctagtcatgatgccagttaattcaatgccttaactggctgggaaccatcattttccccattttggagacaaatccgcctctaaaaatggagccatttttataggctcactaaataagtctgaagcccatgagacccaattgatgatcttgtacatacaagcaatccttagggtttccaacattcttgttcatcagttccctctttctttgaactccattaaatctcacaacaacacggtggcaggctccaagacgccaagggcacgagcaaaaaacaccctaactgaacccactcggat

SEQ ID NO: 7687 - DNA, 864 bp, Zea Mays
caggaaagcagtaatcaggataaaaaaatccgatcacatcaaaaactctgttcaatctccttttgtcacgagcgccgaaggtagtggtcatggttttgtcctcagccttcgtataagctcccaacagctcgtcactggtagcctcaacagcctcaagccagtcatcatttgactcgtcaaattgacttctatagcgatatgtgtatcttagataaacaagaccaccttcgctggagccagcaacagtcattaacaagcaggcacacattataagaaatatgctcttgaaccaaatctcttgtgccaatgtaagtacacaccatgttgaaggccatcaaacatgcttgcacttcgttcccacttgcgatcggtggcctcctgatgccgaagcgtgaccgtatagggcgttggattatacccctcacatcctccctcttactcagattattcttgacataaaaccattgcttcatccaagtgcctgaccatttctttcggaacgttgtcacatgacacctcacatcagaacggtgcacaaagttgtagcatctgaagttgttaggatactgctccttcccaattgcctttgtctggtaggataattcatgaatgttgcaaaagcacttggcatctggcttcagcccttggcttctcatagcccaactaaaaactccaactttaattaaagcttcgggagtaagctgatgaaggtatatctcaaatgtctttagcacttcgaccagcatcttatgcaagggaaaatgaagtccaaccttcataaaacttttaaatactaccacttcatctgctttaggaagaggaatagtgctttctcctcccaccctcactatggatatatcatga

SEQ ID NO: 7688 - DNA, 1206 bp, Zea Mays
agaaacaactttgagaaagaagcccggaggagttggagttgttaattttgagtccatgggtttgtttggaagcaaggagattggaggagaattgcagggattaaaatcttctcgatattcaaattaaatagcgagtggattttagcccttacagggctagtttggtgaatagcaagggatttcttatccatggatcctctctaattctcttgttaccaaattggctctcggtctcctttaatcctctcgctcccaaacaagcactaatggttcctagaagcatctacaatacaaccattttagaatacacatggaagtcgtttgagacttacaggaaaagcataaatatggccataggaggggcaagggaattaaatccatgttatttagatttgtttatgtattctaagtctgttctaaaaaaatatgaaatctcaacgtaaaaggtatagtaggtgaatagattcttaaaaatctacatagtcctctagttcaacccataatcttttgtcccctaatatttttcacattcttagcatccaaattttccaaaatattatccacatggcaatttataggatgaatcgttgtcttttctatttggaggcctctcatttcactcccacacgatggcaccttccaaggacgactagggctaccactgtgtccctgcgccacactccggctcaaccatctataatcgccgcacctcttgcctatctccccttcaatgctgcttcatcgtccaacatccatgttcttcttttccatctaacggtaccctccttagcacatcccgcctcacacttcaatgttcggtggagtgggtatgactacaaccacgacgcttgcgcctagtcgggcgtaggatctccatggcaggacgtaccccctgccggtgatgacatgttgttgaatcggttcgtctcaatgggcagagcggcatccctcctgctaggttgtcacatcatcataagaatctcttatagaatatatagttgacaagtgtttcaactaaacaacttttagcttttctacaaccatcaactcacatcgactttcccgtagtttacaactaaaatcagattttcaagaatctattactgaaccaaacaggcacttaatttaattcataaaaatatgtggatactacctatccagtaaagagtgatattttatcctatgacaaactatcttatatttaac

SEQ ID NO: 7689 - DNA, 335 bp, Zea Mays
gtccactcctttggttgagattcaacactgccgccgagaggtatagaggagaaggagagaggacaacatagagagaaggtatcgccaagggtcgagttccccactgcaccatggtaggtgagaagtactctcctaggttcacctaaatcttcgctatgttttgcgctagttcgcacgagtttttgggctcaagaatcgagcttgattttggggcaccgcaatggcgtcgtcgccctggtaagcgccgacacctatgtccagcaagagagggaagaaacaagcaagtgtcgttggatccgggtttgatgcactagattagatcttgcatgcccctt

SEQ ID NO: 7690 - DNA, 510 bp, Zea Mays
caattccagagacgacaaacaaccacgtgaccggggcccatatttccctaataaataacaatcttgggaagagaagacatactctttctcccgctgaccaaacactaaagtattgatgatgttcttgaatgaagcatagcattctctgatagcaaaggaaaagtatggatctgattttatcctcttcgtcagatcacggtcttttccgccactgtctgctgccatatccagtgctattgggatctacaatccagcagataaacaataaactgctgaatccacaaatatagtaagtagaaaaaatacagaaagagcaagatgagcaaccttgctagcaagtaagaaaggtggccattgaaatatatcgagctcacggtctttacagtatggaaccagtagcagatccatctccctattgtctatgaggtcttcttcacggaaacttgtaataatgacattccacatttgagcaaaccttgcagctcttttctctttctgtctttcgtcacc

SEQ ID NO: 7691 - DNA, 446 bp, Zea Mays
cgagatggctggggggacaacacaagcttgttggcggtgcaagtctggagctgtgttgcgggaggaaaacagagtacctcgacatccccctcaaggatagcatcaaggggtagcgcctcgagtggttcattatggagaaccactgcaagtccctaccccctcggttagggaggcagccagatgtccgcactccaagatgggtagaatctccaacccctccggagatacggaggcaaaagtactgcttgccgaggtatgcttgttgaaagatagaggtctgactattgaggttgtggttgctgatttcatcttcaagaatatccagcctttgaaggacagggcgtacccggcttatctgtatagtggcatcaatgaatctacccgagttacaaacaagagaatccccactgaagatctggtgagccgactggatatgatcctgaggg

SEQ ID NO: 7692 - DNA, 414 bp, Zea Mays
atctttctacaggatattaagaaattgcaggatatctgatactcttgcaacagtaaatttttctaatctagctggattgaccttattgtaagtatttcattatatgccattctacaaatatctgttgctattgcttttctttcaaaaaaatcaataggagcatcttttcaagtaatatttatgtctcatggcacagggacttgagctttaacaatctcacaggccaaattccacagtccatactgaacttggacaaccttggattcttgtaagggattctttgaagagataatcttcataatacaactgaactcttacgctgacacttgtatgttttgtttgtgatgaacattaacaaattcaggtttctcggaaataacagcctttctggaagcctgcctgatattaaaagcc

SEQ ID NO: 7693 - DNA, 521 bp, Zea Mays
aaagaaaaaggaaaatattcaatagtgttgggctgattccggcctgaaccggcccaacaacgcaggaagcgcgcgcccgcgtccgcgcgcgatggcagaattgcacagaggcccttggggttttaactaactgcgaacgggttctctcactatttaacagagtcactgacactttgcaagaaagtccctcgagttctattcctttacgtttcacggtccccgacggcgtggagcacggccgagctccggcgagctgtctgtgccagccgattggggcaaggactgacgtccttcttcggtcgaaaccaaattcacaccccggccaacgattcccctaagttaattgcacaattggtggattactttggtctggccatggagagcgcacggatggaccaaagatccatgcgttcccgacggtcaggggacttctagcccaattggacggttcagtaagcatcacagacacaaggagaagcttaaacgaagcagagggagggttggactgaccggaaaaaggg

SEQ ID NO: 7694 - DNA, 600 bp, Zea Mays
gaggttggcctcaggcgagtcatgactctgtctcccatctaaggttggccttaggcatgtcgtgattgcatctcccgcccagggatggcctcaggcaagtcgtgacgacatctcaccacccgaggttggcgtcaggaagtcgtgaccacatatcccacccaaggttggcctcgagcgagccgtgactacctgtcccacctgaggctagcctcgagtgagtggtgactgcatctcatgcctgaggttggcctcaggcgagtcattactgcgtctctcgctgaggttggccttgggagagtcatgactgcctctcgcccaggggtgtccttgggcgagtcatgactgcctatccccctccccccgaggatggcctcaagcgagttgtgactgcctctcccgctcgaggttggccttaggtgactcgtgactgcctctcccgcctggggatgacctcgggcgagtcgtgtaggattatggggaggctacactagagcaaaacaaaaattttgaccccataaaaccaagaactattgtggttataggtcatggaattaccactagatgcgtagggcagcggaagacgtctcaatgtagacgaac

SEQ ID NO: 7695 - DNA, 867 bp, Zea Mays
gtggacttctgtactacggtggagcaagcactgggtgtggagatgcatcaccagtataccatggacgcgaggaggggcaacataggaggtccagcctcatggctaggacgcgaggaggggcaacacggaaggtccagccaacaagaagggcaagtctcagcatcagtgccaccatccttaccgtggcaaatcttctgacttgggtacttctggaagaagtactcagaggtttcgggctgttgctaagcccgggctggggctagtgtgtttccgctgtggtgatgcatatcgccgtgcagagtgcaagtggagtggcaggtgttctatctgcagtcaggaccacaaggatgtggtgtgtaggaggaatcctaatgggaagctcagatgggagccggtgacttcctcctcttctcagggcactatcaacatgatgtcaagtgctgagcagcaattttcagttcctcttcctccgcaacaactttatgtgcctgggacttttcagttcgtgctgatgtagggttttcctcagtatcaggccgagcctactcctgcaccgtctactcctatgacgtctcagtttggagctccgcgtctgccttacccggcagctcagtggggttcttctgttaatttcactccaggagcttcctcttctgcgggtatttctggagcttatctgctacccgctgtggatggcagacagcaaggagacgtggtgacaggtacgatttcagttgattcgtttgcggcccatgctctttttgactctggcgctagctattcgtttgtttcggaggattttgtgtcgcgggctggtctttcggtgcagaggttgggtcacccaattttggttagttctgctaatgg

SEQ ID NO: 7696 - DNA, 798 bp, Zea Mays
cggtgatctaagggatcttagttcaatcaagttggtcggggggtatcaagggcacacaagaacactaaaacgagagggcagagggcatgtgcagacctgaatcgagctggccgcggtgaggattctttcacggtggcggaaactcagtttgggggaagtgagaaattcgtggtctctggtggataattgaaggcaagcgtgggtgcgttggcttcgtgataacatggcgcaatagacccggccatcaatttataggatcgctaagtggtggccggggatttggacgaagacacgcggcggtcggaggaataggaggttactggtgctcgggttagtcgctttcaccgtggcagtgcaccggcgatccccgtgcatgcgagacgcgatttacagcgacgtggtctaatgctttagcacatggcaggagatcgacgggcagccaatgccggtgaactgatctgcgctggccgcaaagcatgggggtacggcggccagctacccgagttatccccaggcgaagatcttttgccccaaagcgctatccggtcactagtgagcgtgaatcgtaatggcggcgacgatcatggcgtggattcatcggcggcgaggaggggtgaacctaggatcatgttcaggttactgtaccatggcgcagtctactcagttgacctgacagaccaacattgagctcgattttctcctgatttcatgtaacaaccggttcaactctctttatcaaagttatagcctaataaaccagctacaactttgctacattgtgcacccacaaaaagtcgc

SEQ ID NO: 7697 - DNA, 515 bp, Zea Mays
catatgcttgttatttgatttatatacttgattagcttatggctctatctcaactatatttaagtgtgagtttattcgtgtgtttcaccttcccacgctcacgcgcgccggtcagcaaacaaaaaaatgaaaaataggacgtcagatcaaatccctaccccttagaaagtttaggaggcgcgaaccaaacagcctcttagtcatctagtcaccagctcgtttaaaggattttgagtcagactcttttcattttgagtcacgagctgcggtccaacaacgcgtgaggcttgagcagagacaagtatggcgcctatgcatggaccagctgggcttatcgtgaaacacatgatgcatgaaacatgaggacgatggggtcatggggacatgcatgcatgtcgttacgttcctgccaaccaaccactgcataatgaacacgattgatccaattaagatatgtaaggagtgtttggtttgatggatcaacttattttactccacaacttattccattctac

SEQ ID NO: 7698 - DNA, 678 bp, Zea Mays
ccgtgtttttgagttgaaccgtctgccatatgccgactacccgggggacgacgatgccgttgttggtgaccgtcggggaaaaagggtggtggccgcggttgatgaaggtccttcgtggggagcagtgccgactgcggccgctaagaagaggaaactagatacaacagatgaggggttgggggcttccgattgttttgctgtggatttattgggaacttgcacgacacccggggagaggatgtcttcaactgagctctgagaatattctgtgcgaacatgtgtacgtctaggagtgttccgatcccccgggcggccggcgaggacatgtgtacgtctcgattagctcgtgagatgaagatttttccttacgaacggaatgttgctgttgttgtatcagcagtgatggaaaaggattatcaagacgcgtcgtggaaacactgggcgtttgcgagggtcgaggacctacgccacgaggtcaagatggcgcgggggatcgcgaagtctgccgcccccagcgccagtaagcctccgctgggcgcgaagtccgccgcccctggccccagcatgccgctccctgtcgtgcccgcacaggagcgaaggcctccatcctcgccgtgtactgctaagacggaggtgggtgtggccgaggtctccatggatatttccgtggaggactat

SEQ ID NO: 7699 - DNA, 799 bp, Zea Mays
cagatttctcggtgcgcgcaagtgcatctactagatgtagccccgagtaatccatgtggaatttttggggtttttattcggtgtgtgtacagtttagggggcggacccttcttgtgatggtcgttcatagggtcttctatactgtactctcggtatgatgccttgccttgcttgtccgtcatacaggtccctgtagcgagtccattgctgatgtcttcataacagtgcgtggtgggtccagcgagttagtctcatggtgaggtcgtgtgtgtcatggcttcgcctatcgttatgagccctgcatcacgtgccagcttgcgtaggcttacatttggtatggcgcactatcccatctttcctagtatacgtgtcactgtagagactccggtgttgaggtccttccacgaccgagggtgactaaccccacagggcagtgggtatacacctgagacctttcgtggggcattcaatcgtgctgatggtgaccacccagtgccccttcggtatgatgcacgtatgcctggacgtggcttagtgatgatgcgtcatgtcgtagctgatgtggatcagtagcactggactgggacctccaccctaccgagttgctcgatggagacttggttggtcgctccgcatcgcagccttgctcgacggggacttggtcgatcgttccgcctcataggcttgctcggcaaaggacctgatcgtctactccccgacgaagggttgctcggtaaatggaatggaaggaggtcatgggtctactttaggtacgttgttcctatgtaccctatatcct

SEQ ID NO: 7700 - DNA, 1083 bp, Zea Mays
ccatgggcaaggtgctgtgcctggtcgtgcgggctttcagcaggcacacaggcaaggatttgatgctaggcggggaagctttaaccagttcggccgtggtatgaatcatttctccaattccagggttgtccgtggatctagtgctttcagggggagaggggctggtgtgttcaatcgatttggaggtcaggaaccaaggtgtgggcagcgtgcaggttctcaggtgaatttttcaagggcggaagcggcctcttcttctgcagcagtgccgccgtcggctgaggctctggctcaggccgtggccttgattaacgaggcgttttcgaagcagacaccttctgtttcaggtgtgtctctccctgcagttgtgcagcaggttttcgactcaggggataagttggtgggggatgcgcgagaggaaactgtgctgccagggaagaatagtgaacaggaggatgtggtggtccggggtgcagcacagggtaagaccaaggaaggaaagcctccgtattgctggagatgtctgacaaagggtcatgtaatgcagggttgtactatagagctgtggtgtgatatatgcaattgtgatgcccataacactgagagatgccatcagtttagaggggtaaaaccaaatgttttgacttgtgggtatgcagtcgatgggctcggtttttttcacatcccttacactccttcgcagaagcatagaggggattcaaaaaatgctataattaaggtttcagggggtgctctgtccacagcacaggtgtcatcagaacttgagcgtctggtgccggttaggtggaaatgggaggtggagtctgttggtaccaatgtgttcaagactcgatttccatctcgtgccgatatggagcatatgatagaatggggtgtggtccaaacaaaattcaatgcgtcaatgtcaatagaggagaaggtgttgccagtggaagtgaaatcaactttgggcaaagtttgggttcagttcactggcatccccaaggagatgatggattttctgcttatttgggcggtgggttccatcctcggggtgacaaaggcggtggacatgaagttcac

SEQ ID NO: 7701 - DNA, 387 bp, Zea Mays
ctagggtgagggagaagaggctggggcggtggatgaagaaaaccagctatttttctctcccaattcttgtaacaaataaatatggaggctgtttgtttccacgtttttagccattcatctattcacaacggaaatggataacatcgtttgctgttcggtacagccagaatgttagaactaatcttgttatttaggtgttaatgtttaagtaagtgtgttaggtactgaccgagctgccaagtggtgtggcatgctggtagagcagtgatgcgtgtgtgcgttttgtgcggaaacggctgtttatggaggacagtaaattgaatttttcctctatttcatttcttttcaagagtataaatatagatatgaatataatcaatgttctag

SEQ ID NO: 7702 - DNA, 684 bp, Zea Mays
gacaagaaagaatattgagcagaaatcagcacaatatgcaaagcacgcaaacaaaggaaagaaaaaggttacatttcagccaggagatcttgtatggttgcatctacgaaaggatcgctttccccaacagcgtaagagtaagttatctcctcggggtgatggtccgttcaaggttctccaaacgataaatgataatgcttacaaaattgagctgccacctgaatattccaatgtgagtacaacattcaatgtcaaagacttgcttccatttgttggtgagcctgagtcaaggatgactcctcaagagggggaggctaatgaggacacgcctagcattcactcatcttcaaatgaaactccacttgatattgttggtccaattacaaggagtagagctaaacaattgcagaaggaaattcattctcaggtgaacgctaaccttatgtttaataatcagtctatgttgaatgaacctatgcttttgagttcttgtttcaatgtcctcaggaatggtggagtgtatgaaccagcatgggatcaagatggattcaagcctctggacatctgaaccaagaagcctatggtgtgcatgaataaaatggtcgttcatcaccttagcatgggaatgcaactagaagttagatgactgacacgtggtacgaattccaagcatcaatgccaata

SEQ ID NO: 7703 - DNA, 1075 bp, Zea Mays
tggattcctaactaagtcttgacttggcgtcggggctacaatctctgggtcctcattggtgtgtcctcctcctcctcgtcgacccgtcgtcttctcatttggggttcatctattgcttgtgtgtgcgtccattgttcgtgtgtccctagttcgcgtcttcatccattcatctaggggccaacctcttccttttataggctgaggaaggggtcggccagtggtggcttccttaggaaggagccaccgggcgatggtaaaaccaagtgttttacccggggtgaagctacgtgcgcctgtgggtcccaggaacatctggttgtgtcgtattctttatggtgaacgatgtgggtagcatggggcccgagcaccatcatttgggctacaccgacccctagccttcgtagcctaaggctcggcggggctcgtcgtgttgcgctctgccaatggttagtgcactcaggcctagtcctgacagatcatgagtgtgtcgtaggtcgagggggtgcgtgggtcgtaaatgtgtcgcgactcgaggggttcataggctatgagtgcattgcaacatggggggctcataggtcatgagtgggaggtcaatcgatgcctcttctgtggcttagcgccatgtgcagttaatgcggccattcacttatgacgggtcggccttgggtcaggcgaggggtccactcgagtggattccttttggctcaccttgccccttgtcaagctccaccacgccctaccccgggctcgatgtcgtggggctcgtccggggcgggtgcttttagggtagacgttacctacctcctctagctgacttatgggtcctagttagcagaggcttttccctaacgtgctcactgaccgatgggccctaggggccaaggatctgatcaccgacagtaccgtttcgctatctaatccgaccgcttgtatggtgatctcacgactcagatagatcgataccccttcgccgtggtaaagttcataaagagccccttggtttcgccatagtcagcctgccatccgcccagacacaagaatcatcgcaaattagtccaacatattatagaac

SEQ ID NO: 7704 - DNA, 437 bp, Zea Mays
gtgtgattccctcggcttgcgcgattggggagcagggtgaagcgaatttctcgtcggtggttggagggcgcggctgagccgctctacgtcgtgaccagtggtcttcgtcgtgctaattccggtgaatctcctcccatcttgttcgtgttggtcttagcgtcatatagcacctttcaatttgacgcgtagtgtatctaggcgcggtggcgggttcgccagccatggacaccaccgcgctgacgttggtgcgccgccgcgtggttggtgtttgggcgcgggattgggaagacatgcatgcactgtagatccatggatgtgtggctgggatcggctcgcgcgtaccgtttgagccaaacagttctggttcgtccgatcgtggatgggcgtatgagattggatcggctagtataaaatcataaccgtagggttggatccta

SEQ ID NO: 7705 - DNA, 741 bp, Zea Mays
gcaggagtgcataaacgctatatgggcctctcgatgacttgcctctcaaggcatgccctcgggccgcaaccaggctagataagctcgaactgggaggcaaagatcggatgaccgagtcatgcgctgatacctcgggcagggagtttgagcataccgaaagtgctagatactcagagttcactcggatagagggccactgaactccggataagctggaaggcgtctcgtgttaaaaggagaattcagttagagagtgatcatgacttcatagcatctatataaggccgagggggtacccctatgaacccatctctgatctctcagctcatcacatctcagcttgtcaccacctcatagcccattagccctctcacagcaaccacgccactgctagatcaatacaagaactcactctccaccgtacacaactcatctgtgacccttgtaaactagtgatactctaatactcagcctcaacacgaagtagggtgttacacattctagcagcctgaatctatataaacatctatgtgtgatccaacgtgcattcgcacataccatcaagttgccatcaactacgccgtcctacccaaaagcatcacgcggggaacctgtggtgcacagtcgggtcataaaaatcgactgctggcgcaccaagtagggggtgcgacattgattcatgacaattctatggctatcgccttcaacaccctgatggcactgatcatggatgcaggctcg

SEQ ID NO: 7706 - DNA, 387 bp, Zea Mays
tttagggaaaacgaaattatatattatatgcatcgctctaagttttagtgttagagtttagagagattaaatgaactgcccaacatacatttcggactacgcattttattttcgagattacgaaacagagaacccacctgattcagaaatgatttaaatcagaacattgaatcaaggcgagatgcaaacggatcgaacctcgacatcggtcactctattttaaactgtgttcgatacgacctaagaccagataacttcatatgcaacttgatacctcatccctctatcgaggataaattggctggaaaccaactatgattataaattatcggatgcgatgtctcggttgatgagaggggactaaattattttagacccactcgagtg

SEQ ID NO: 7707 - DNA, 651 bp, Zea Mays
gagagttcgccgtggagccatggaacggctgcgggcctggcaggttggggactccaggaatttgtcgccggagctcgtgcgccgctgcgtggcctccatgcaccgtggaccgaggtcactgctacacgtcccatggtaactcgcccttccctttgctcgccacggtacccgcgtcatttagcgcctcgcaacggtaggatttgcgttcaaaatcgtcggatgcccttgctccggcaaccacgccaccgcacgcactgggcggcgccgcctctatgcggatcctggggggaagaaagcttggcaccgttggatctaagtgggcgggcaggattagaagtagccataccccttggaagctttaaatcggaaccgttggtttgggaatagacggatagatttggctctgcgttccaacccacggattggctatgggccgtaggatcccgatcccagggctcgcgttgcaggctgatcacttaagtgcacgtacctaatctgggccgttcgggtctgatccgatggcccatcatggccgataccccttcactttgccagttcgcagaagagaccctagggtttcacctattcaacccgccatccattctaagtgaaaaataatcacagacagatcctgtttttagcactttagtc

SEQ ID NO: 7708 - DNA, 746 bp, Zea Mays
agaaacgacttaaaccgacacaacatacttgcatacacataacttaaggtcagtactataccctgctaatggagcaatcggcttaagtcaaaaacgtcttaagtcagtgcgacatgctcacacttacataacttagggtgattactacaccctgctaacggagcaatcgacttaagtcggaaatgtcttaagtcagtgcgacatgctcacgcttacataacttagggtgattactataccctgctaacagagcaattggcttaagtcgggaacgtcttaagtcggtgcgacatgctcatgcttacatgactcagggtgattactataccctgccaacggagcaatcggcttaggtcataaacgtcttaagtcagtgcgacatgctcacgcttagataacttaggttgatcgctataccctgctaacggagcaatcggcttaagtcggaaacaccttaagacgatgaggcatgctcacacatacatgactctatcatgtgccatctcaacaaaaaataccaactcaatgaaaagtgctttctgttcgaatgaatcaaaatttgttttcactaaacaattactgtgcaggagcatccccgcaagggaccttgtcggcaagatcatcagaaggagaaggtttactcataccaacagatgcagcgagcacgtcagcaacaatgtcatcatgcaccacgatgctaggcctcttcatcaacattcggtcggcgcgaacaactttgtccatcg

SEQ ID NO: 7709 - DNA, 694 bp, Zea Mays
attggcaaggaaggcgtcatacggcacggcatcgcgggctgccgcaccatcatcgtcgttctggggtgagaattcctcctatggtctctccttcgtccccgcatcgcgtaggatcagtatgttgtagattcggggtcatggggcgctggaaatttctcattggatctcaccgctgtggcgtctccgcgtgccaccgtgggtaggcatggcggtccgacggtacactgatttggtgccaccactggaatcgccttggcttcctcgtcgcacagcattaatctgggattggttggtgcgctaatgggtgacgaggctcgtcgccggcgcagtcgctgtggtggttcgtactcgagccaccgtctcacgcggtgggaggaagaagacgctctggcgccgtctgatctacgcggacggccgagattgggccaaggcccccccttcgcgctagtagttctggaccgctggatgtaaatcgtgcgggcgagggggaggaatcaagggcattttggatctggggcgtaggtaggtaatcctacggtcgtgatcgcgtacccgttcgcgaggtcactggtctaatcgggtgcgtccattcttgatcggacggccctgtgcgctcgcgggttcataatggacgagatccgatcctggcccttggatctgatctgaacggtccgaatcctcctgtaccccttcg

SEQ ID NO: 7710 - DNA, 1150 bp, Zea Mays
ccctaggggccaacgcaagagatgtgttgtgctggaacacgtgcactagggactaaaacaactaccccgggggtggaacaggtgctgcggggggcagaagagttgcccaagacccgaaagacgagtttaccaggggctggcgcaggatgtgctccaggggtcaacataagagatgtgttgtgccggaacacgtgccctggggactgaaacaagtgccccgataagtgaatgatgcccacgaaggaactgcttgcattagttgagcaattcagggggaccttgccatcgtagatagagaagtcttggggcatggcgcccactgatgaggatgcctaatggctctcaatgatggcttgccacgatcggacggtgacctgctacacgttgaggttggccacctgttgtgcgatctcggagaggacctctattatggcgtcgagacagttactactagcactccctgctgcgtcggcaacacgacttgttgtgtcagctgagaagaagtgttgacgttcatcacaacaacaactttggaacctgagatctccaatacctggtattgtggtggcggctaatggttcacggagctcaaggaggctgcccaagagccttgcccatggtcgagcaagtgggaagtctttccttcataattcttgcatgattagattgatacatctcctctcctgatatagagaggcttactttacccttaagaaaatattctaattaaactaacctaacttctctctttctttattctaactaaccaaatattttcttatcctaactaatcttttttatagtaattaaataaatcaatttaactttttctttccttatcctaatggctccacgtgctgtaacacactttgctttggatgggagcgcagaccccatgggaattcggataggactgagcgctgctgatccaatctccctgtcaccatgcattgagtagcagatttcattgctgcatgtcgatctaatttagtttatgcatcaattcacacgtttctgaggatattgtatgcctctaatcttgagttagtttagggtgcagtaatctgattgttaagacaatagatgcagacatctggacaactcattcttttaacaagtactactgttgtgctgtattggtatttaattg

SEQ ID NO: 7711 - DNA, 516 bp, Zea Mays
ttcaatttatagatcccggttgagcttatcatgaattttggattgggatcaagttcaccgtggccgggatatttttacagtggtctgctcaccgtggcgcgcgagaggggattggttcagggatggcaaccgattgcttgccacgaccacgactgtatggggaagtaggcgactacgtgcctttcactgcgatcacgtcgagcaccagcggcgatatttcactgaccacgtggcaagtgggcacgtcggtgttccagctcaggcctaagttctcctcacccacgatcttttcacccgccacggttatccacttcacataggcatgaattgcggcgcgaagatcatcggcggcgatagattcactgaatcagtgatcttcttcaggtcactgtaccatcgcgattacattcagccgttctgacagagcaagttcgggagcgatttactccaaaaatcgtacaacactaggccaagcttggtataacaaatttgttcactaatgttagggcttcaact

SEQ ID NO: 7712 - DNA, 546 bp, Zea Mays
ttgttcttctcacgggtaattttctccaagacttcaactgctgttatactttacagtttgatttgttcactgttagtactgtccgctgatgatatgcttgatttagaatgcatgacctcgtagaggatttaattacaagtttttctttatcttaaaggcaagcatttcagacggcgaatgctcaaagaacttatcttgcatcaaggtcggcgggatgtttctgaggtactatatctgtccttgttactcaagactacacaagtcctgatggttgtgtcattcacttacaaattgaggcattgtgacccctcacgcctaaagtattgaatgacattagaccaatattattttggttaaggcataactgaggttcctgacggttctgaatataggatattgtgactgtccgtgtcaaaagtatcaaatgtcatataactgtcattaacaatgaacttggctgacattgccccctcagtgtctgattcacgttttttttcctggtgggcacgctctatcaagctggtgcccaaaataattcggaaggtg

SEQ ID NO: 7713 - DNA, 831 bp, Zea Mays
tgagcctctcgactcttaagaccgcgctccaaggtcgacgaggcacgagatgctgctcgggataactctaacccggcatcaggcacatcagcgcaaacttccaacattccaccatctgccggctctaacaacagatcttctgggaccatgtcttcgagagtctgatcaaagtttgccagagacaattcttgcagaccaacgagagcagacaaagctagagaaggaacaccactactctccccgctggctatgtagcgccggctgttctttcgaatcaagggaatttcctcctcctcttcctcatcttcatcaataatgcggatggtacacccattgggatcagctttggccggattacacccattgggatcaacatcatcaaggtcacactcattgggttcagcatcagtcgggtcacacccattgggatcagcttcagcaaaaaccggcactggcacttccttagcagcaggagcagaagggccggcatcctgattcaagcatgacactcgacgaagacgtctcttttttctttttcttcccctcagcaggagaagttggatgattggttcggcgaggacgcttcgggcgaatactattagacctctgagtatccacagctttgccagactcggggatgggtgctacaaccagtgtttcagcaggggatgcatcagaggaatcttcagccaacatgtccagcatgacacttatttctacatcactcggattcaaaggtacctcgaaatgaacctgcctctcgtcgttggggatttcgccaagtgaagcaaccaaagcctcaacctcttcgagagaaggtcgcactctaag

SEQ ID NO: 7714 - DNA, 648 bp, Zea Mays
atcatggcctgttgcatgtccatcatgctgttcaatgttcaacaaataaaacgaagtaatataaaagatctatgcattgcagttgaactatacaggctgcccagtaaggcagtaaacatctacatttcacgttgctgtcatgcagctctagcctaagcagcaacgccaagcaggattttcggatcaatggaagaagggtttcagattttgcaccaaggttgtttagcacaataccaaatagaataaccaacagaagaactgtgcaagaagttctactaaataagtggattggtgatattaagggagctctgactgtgggagccctgattgattatctgcacctctgggatgctctatctgatttggtgctgcagcctgatattgaggatagacatatattttctattgcttctgatgatctttactctgcaagaactgcatacaatggtctcttctatggttcaagggcctttgttcaccataaacagatatggagatcttgggctccttctaagtgtcggttcttcttgtggatggtagctcagaacaaatgatggactgcagaccgacttgcaaaaagaggcatgaaccacccagccagatgccctctctgtgaccaagaatccgaaacaatcaatcacctgctgg

SEQ ID NO: 7715 - DNA, 496 bp, Zea Mays
aaagagagggttctctcggcgcagccttgcatcttgctcagcttgctcctgttctcggtcctgagcttgtcgacgatcacagcggcgagagttccgcctttcttagtgcactcgctcgttgggagtttctctcgcttctgaggctttgtcccgggatacgggctgtgctggatcccgttctccagcctcatgatgtcgctgcatgttccggcgtttgttcctccgtcgctgtgcctcacgttggggaggttcttccccttgcatggtaggctcgtcgtcggagatgggtgaggactccagtgtcccccgatgaagaggatgtcagggtagaaaggagctggcgtgatggcgctcttctttccgtcctcctttgagggtgaaggtgccggaaagatggcgcggcgtgctctcgtcccctgactcgggatgtttgcttccttctttcgagtgattcgtgtccactcctttatgggcgaggtggatagcggagtttttc

SEQ ID NO: 7716 - DNA, 468 bp, Zea Mays
tctgaggcacacaaagactgcccctgaaacgaaccaaatcattctcatcaatggtgaactcccagggtttaccatcaccaaccctctttcgagcttcctgcaatagacgatcctgctgctgagccgcacgcactccctctatgagggaggattgaataagcatccgagtctcctcactagtggtgccgacatagcacaaagcgatccccaaacggtccagatcagcgatcaaaggcaaggccacttttggaaccccggacctgctaagggcatcagccaccacatttaccttcacagggtgataatgaatggacaaatcataatctttaatcaattcgatccatcgacgctgcctcaaattcagctccttctgagtgaaaatgtacttgagacttttatgatcggtgtaaatgtcacaagactcgccatagagataatgcctccacgattttagagaaaagaccaccg

SEQ ID NO: 7717 - DNA, 597 bp, Zea Mays
gtgccaaaattgtcctttatgtgatcaggaaaatgttcctttatgttagattgaaaagcttgtaaccggtccataggcctctgctatgtaaatgtaatccaggagataactctactatagataactagcctaaaatatagcagattctgttatgcagagttaacccttaggtttttatacgcggcagtcatctgcctatataaatcgatcattgcggactgccttcttagcagagacgcttacccaatcccggttgctattctaacaaaaaggtgttgaattgtttcttgctcttgatcacaaagagagcaagcttcaggatgggggaggtcacacctttctattagactcctgtttagggttaggctagggtccccttgtatttacctgatcacccctttgtaatgggcttggccaacctaactgctctatataatatacacccaaccatggttagggtttcacattttccaacttggtaccaatgctaggctccttttttctctctcctctctcttcctctctggtcggcctccatcccaagctaccgcccctccccacctagagatggtaatgggtaaatacccgctgggtatt

SEQ ID NO: 7718 - DNA, 503 bp, Zea Mays
aggaaaccctcctggaattcgaaaaccttggggacacagcccttcgccgagaggacgaagaccacgaaccaggggcaggcaagcccagacgattgaacgcagaaattctgaggcgagactgatgcgtcccaccaacggagaacctcttatcgctgcgaaccggagccagattacgagtaggagagcccagacgattgaacacagatattctagtcttagcctgatgctcatcaccaccagagaacttaatattgttacgaatcgggacagcattggcaccggtgagagggagcttaacaatatccgcaaaagataaactcttcctgccccgaacattcagccaagatgccgcttcttcatccgtaaaaatcttgaattcatgtttccagttagggccaccgtggttccaaaggttgaagaatgctctgaattccttacgatcaatgcatctggaattgtagatatggaaacccacaaccatcgaagaaaccgagaaccgaaaa

SEQ ID NO: 7719 - DNA, 1092 bp, Zea Mays
cttcgcactgttgagttccccagcatgcgctgtatccggcgacggaaaaaacgggccaggggtgggcgctcctttttatcgcgtattctctctcatccacacaacccaaccatcattccgaacttcctccttccttcgttggtacggcgacacaagatctattttcttcctccgagctatcggggtcacgctcaagttctcgagttttgtctcctaggtcgaaggacgtcgcccccatccgcggcgctgaagcacagtcgactatgaacttcaaatctaccggatcccataatcgtgcaggacctttaattattgcgtactgaccttgaagaaccctgaagcaacgttcgacgtcttttcgatactctgctttcatctggccctccgtaggctagcttacgaattgcagcatgaaccctccagtgtagtggcctccatcagaactgagacgacgctggtcgtccttcgttgctacatctgaaaggctgcgccaagtggcacaaatccaaacgatgaactcgcatctgcagaggaaatcaaaacgatgaactcgcatccgacgggggaataaatgaaaacgatgaacgcgctggcaacctaccaccggggactgcggatggctgcaacagagcagaaatgggatactagccgtggccgagccagagacgaggcagagctgcaatccggcgacaagagcttcgatgaaatgctacggtggaggttgtacccgaggccggtcgatgcagcactgtgactttgggcagccggtgtcttcagacaggggccaacggctctcgtttcagggcgttggcgggaacagaaacgatgccttgtttacaccgctttacggagccatttatggagcttcctggaaatcgggctactgagcaactccgtatcgtcgcctgccactccgtaggatacagatccgcagccagccattgctggggttggtcttataaacatgcacaaactgggtgaaaataataatcaaactattacaattataaaagcccatttggaatgcatcaatttttatttccgttttctacatttttcctgtgaaaatgaactgttttatgtgaaattctc

SEQ ID NO: 7720 - DNA, 2669 bp, Zea Mays
gcagaagaatcgacatcgaggtcggtcgtacaccacctagaagggtgtggtgtgaagcgccatgtggaacaaagtattatagcaatactctgtctaagcaagccagtcaacccaggcacgtggacggttccccaaggcgcaacagttgtacatggtgatcaccttgttgacgacttctgactagccgtttgtctgagggtggaacctcgtgctcaagcgaagctcgacgtcggccatcttgaaggtcacgccacatgtgactggtgaagactgggccatggtcgctaccgatggaggtggggaagacgtgtagacgaacaacgacctggaagaagacatgtgcgaccagggcagctatgtatgggtggctgagggcaatgaagtgctcgtacttagagaagtgatcgacgacgataataaagatagacttcccgtggagttgtgatgacaggcggcaaagggccagctgaagaaggccaagggaccaattccctggcggagaacagcaccgaaacccacacctaaagcgtccagtcgatgacaaactgtaggtcgaagtttggcatttgcatgaccagccccttcgaaagggcgcgcttgagtgccgctaatgcctctacagtctcgcgttcaggtaaaggcagccttgtgcaacaattgtggcaagtgagcaacgatcgtgctgaagtcaaagatgaacttctggtagtagtcgaccaactccagaagccgagtacgccccgaggcgagcgaggctcggtctaggacgagacggcttccaccttgtcattgtccatggaagcgtcgttggtggagataatatagccaaggtaggcgaccaacaacgcctcaaaggagcactttgaccacttcaagtggaagtcatgtgcatggagggtctcaacgacgagacgaatatgctccaggtgctcaaaccacaacaaaataccatcaaagaagacaagcacgaacctgcgaaggaaggccgaaggacatcgttcaagagcgcgtcgagaatggggccagggcattgaaagaccaaaggcatggagacgaacttgaggtggccatggcggatatgaaacgtcgtctcttcttgatgtcctcaagatgcatccacacctagtcatagccagaccacaactctagcttggtgaaatatttggtactatggagctcgtcaaggagttcatcaaccacaaagtccacaaggatgggaaacttgtccatgtatgtcttgtcatttaatgtgtggtagtcaaggcagaacctctaggagccctccgccttcttaattagtagcaccgatgtcgagaacataaaagtgatcgaccggatgatgccctgctctagcatggcaatgcactgttgctcgagcttatccttgtgtagttgtgggtagtggtaagagcaaacggccaccaacacggtactcaacagcaggtggatccaatagggtcacgccaatggcaaccaacagggctcgtcgaagaccatgtcatactgttggaggctgtccagcagcggatgctggtggtcgccaacgatgcaacaaagcgatgatggtgtgtcgtcatgatgggatcccacgccgttctagaggatgtggcagtcacccctccagaatgccatgcagatgacctcaaagtcgcacaagaagggcgcaaggttcgaaggtaattaatgcctaggacgaggtcgtaggccatttgcaggtcctaggttctcggagctcgacatcaacccaaatatgatccggaagaccccaacgaagcggttagacttttgaccggtagaagatttgacatgtggcacaaaagtgtgttgaagcactcctaggaccatggcgtggaaggggagcctcgcgagttcgataagatgattgatgtagatgaccaagccaaaccgtggacgtagaagatccttgaatcactcccataatggcatgccctcatcttgctgcagagcatagtaccatgtctaagttgcgcatgcgaggtggtaggaagcgagccagaactaatccaaggcatggatgctgcccatgaaagaaatactcagtgattgaaccaattaacagggccctccttaccatcgtaggtggagacgtggagcttgctgaagcgaggaacgtccaaaccggcaagtgtgcgggtagcgtcttcattggagggcacccacacatatgagaaaggtggcccctatggaaactttggtagtgaggatggcaaggaggggaattcgatctggtggatgggaagaggaacaataggctgttgtgatgtgcaggagggtggcattgggcatgacaagcagggtgacagagggtgtcacaacggtggtggtggagatggacgagaacgtcatcgccttgtacctcgacatcatgtagggattcatgacacccacagaggaggatacctcttggtgctctagtgatgacatgcaagtggagggattggcaagctacatggtgatgtccgccaaggccatcgtagtggtgtcggcgcgtaatgatggtgggattggcgactgcttctcggagtcatagtcacctggtatctctaataccagattgatagggtttgaaatcctaccatggctacttaagttgtatggatagaagatcgatggtccaagcgtgtacccccatcagtgcacatgagcag

SEQ ID NO: 7721 - DNA, 613 bp, Zea Mays
gggaaggatcccaagtctctgtgttgttcagctagagggtctacgtattgtgtatttgtttttagtttgggtcctttctctcttcgtgctgaccctccttttataggccaaggagggggccgattatagatggcttctctcgaaagatattgttatgctggggtaaaatggagcgattcaccaccgacaaaatccttgtcatgcatcaatttttatcctcatgtaaatctccgaccgtgcttctttaagacttctaggggagcatgctagcgacgagagtacgaacatcattattattcctattatccacctcttcccacgtcgacccttagtcttcatatcttgacctctggcttcccttcgttgtcttacatgctttgtagggcatcagagtactcaggtctaggacccctggttcttgaatggtgctcaggcctaaggctcgtaggtcatgagtgagaggaggaccgactccttctcgtgtcgtggctcggtgccaggcgcagttaaggcggcatgcgtgatattgatggcaagagcagtccttcagccacatgtggaatccactcgagtggtttcgtggcggttcgtctgacacccttgcctggctctg

SEQ ID NO: 7722 - DNA, 1042 bp, Zea Mays
gctgtttgttcaatccaaatgccatcaggatatgattacatactgtgccgcgcacctttcaagacgatgataggtaaaatgaaaattacgattagtattgcgattgctcgccagatactaattttattgatggtttggattaggagctcaataatatctattttagatggctgtttggtattcgatacgtctctactgagtctactctctacttggccgttcataatgagttactgtttttttgagcacggagccatgattgcattctagaatgatgatattgtatttgatacatgctggaaagaatatgggataagatgttttggtgagacaccacagcaagcattcctgcttgtccgaatcattgtgttagactttcgtgatagaatgcatggtttccgaatcattaggatggagtttgtaacatgatggacagtcaggctttatgcctgtgcgtgagctgcattttgagccgtgcacgttataagtaatgctggagtgaccaatttagtggatgtaaaggccggtgccgcagtctttgttagatagtagtactcatgacttcgaagcatcctaaggcgtcttgttcttttgtttggtaacggacccaatgtctctgatgggtatggtagcacaatcatccacagctcgaaagtgagggttacttgcaaccaaattaatagagtaccaacctaaacactatgatttattagttcgatctgcagattaagtctagttttcatagtacaaacgtttcacatgatgtatgatctaaaagttgaaattatgtatcaaccattacatcaaactgtttggtataacctctagatgttgaaccgctgatagtttgtcactttagagccagtatctggtgctcagtcagtttaattattgctactagtctttcctggcctatggtcgaaaaaggtttcccatccatggttagtcaattttgtccccatatcaatcagtgctaccttttgttaccttcgacatatcatattgctcaaccgtggaaataatgtagcaatgtgttaatcta

SEQ ID NO: 7723 - DNA, 541 bp, Zea Mays
ggaactagtgaggcgagggctgtggatgcttttgagtcagataggactcatgggattgactaccgcttttggaatgtgtttcattccaacttctatgccacagccatctttgccaaaggcaagagcaagatcagcactatgcactatgttgacttcaatgatctacaagaaaggaatgaatatgagtttgccacagctatcaggatttgtgacagttttgagctcaccgacctcatgagcttcaggtatgattggaatagggagatcttggctcagtttcgtgccacgtatttctagaacagggatgtggatgaggtgcattggatgatagacggtcatcactaccgtgttgactttgtcaccttctgtcgcatccttggctttgggcacgtgcataggacttacagtcggatccatgatgcacggcgtgctgagccacgtgaggtgagctttatgtggcaagatcaggatctcagtaggccggattggtcaaggaccaagctcaagagcctatattacatcatgaacaacctcatccggt

SEQ ID NO: 7724 - DNA, 1000 bp, Zea Mays
gtcgaagagcttgaggagagcctaaggatgctagaacaagcgacggagaaacttgaactgacctgaattgagctggccgcggtgaggctaaaccgagcggagttcggacgtgatttggggagaatccaaaattagagctctctggtggaggatttgaggtgcgggtgggtgcgttagctgcttgaatacatggcagagccgagggggtgctcaatttatcggcctagtgagcgatggccggaaatttgagcgatgacgcacggcggtcggaggagggggaatttcactagcgcagtggattggtgtcctttatcgtggtgttcactccggtgatcaacagagagctaaaacaggtcacggcgatgcggtggagatgcctagacacgtggcacaaggccggaaggcggcagtcaccggcgatctcatcttaatccaccgcggcgagcgtggtacggtggccggaattatttactggctggagcttatccacagcggcgtgactacgagcgttatccgatcaacccgagcatgaatcgagacggcggcagcacgaatcgtggcagagatcgtcggcggtgaaaaactgagctggcggcctgatctatttcagatcactgtaccatggcgaagcccattcagtcagtctgtcagtctatgattagggcgaattttctctcaattttatgtagtaacatgatcaacactctttagcaaagttatagctctatgatccagctataatcttggtatagcaaccctaggcaaattcttggtatagcccaaagttcttggagttgcattattagtctgaaatttagacaccaaacagcctgacagcccaactttgggtgcatttttctccaatttcttcataacaaccatgcttactctattaagcaaagttattctcctttgataggtctacaatgttgatgtggtgatctagggcaaaatccttcttgtttggaagttacaaggtcacaaagatgagctcaaaaca

SEQ ID NO: 7725 - DNA, 425 bp, Zea Mays
gtaggatcggacctgaattgggctggccacgacgaggtctcaaggcacggtgttcttggttgatttgggggaaatcccaaattggggagttctaggggatgattcgaggcacgggttgcacaactacctagcggagcggacgggggcggaaatttatagcctccaacggcggtggcatccaatttcacgaggatgtgctggcggccggaggggaaaagaggtactggcgctcgggatgagtggctttcaccgtggcagtcctccagcgatcatcagacaagcataccatgattcaccgcgatgtgggctagcgcttaagcacgtggcgcacaacgatgagcgatcaatggtggcgaagtctatcccggccgcacgacgagcaagtgggtacggtgaatctcatccgcgcctgagcccaagctgat

SEQ ID NO: 7726 - DNA, 427 bp, Zea Mays
aatcttgccattggcgcgctcaacaacactgttggattgtgggtggtacacagaggcgaagacaggcttggtgccgatgaaaaagcagaaatccctgaagtcttggctgtcgaactgtttgccattatcgactgtgagttcagacgggactccaaagcggcagacaatgttttgccaaaagaatttttgggtggtcttcgatgttactatggatactgccctggcctcaatccactttgtgaaatattcgacggcgacgaaggtgaacttgaggttcccttgagctgtaggcagtggtccaacgatgtccagcccccaacgttgaagtggccatgtatgggcgatgagtttggtgaattgcaaagggctgcctgagcgaggggagaacttttggcatgctttgcatgaccttgtgactcgattggca

SEQ ID NO: 7727 - DNA, 326 bp, Zea Mays
agaacggtgattctgaggagttccatgcaaaactttgtcaaactaagatggtattgttcacagccacttttgtagtcacttttattagtgaaattctgttaatgttattttgaactatttacttgtcctcttctaggatcttgtcttggctttgtcaaacactagcaaggagagcacgaaatacatccactctaccatccttaaattacaggtgatgacttcttaccttatgatggtgtacatgttggtggattagtcaggtgccttatcacttgctttggtaactgcagattctagatcatgctactatggtttgggacctgcgt

SEQ ID NO: 7728 - DNA, 473 bp, Zea Mays
ggattttcgttggtatattacatggagctgcctcgttaaaaacctcacccctgggaggaaaagagtgcaggcctgaataacattgtttgaagaattacaaaggcgcttgggccttggatcttaaaagaaaaattttcggagattatcgatgttccatgagtgttcttagtcttcgccggatgacgttgctagcctgtaagcactgggggatgcctttgtcttgactatgtacgacccttcccacttcggctctagcttgccctgggactctgttcgggtggtccttacaagtacgaggtcccctttgttgaattctcttgggacgactgtgttgtcatgccatgctttggtctggacctgatacttgttgagggcatgcagggtgaggacacggtctccgtcgatgagatctttggaggttggttcgtcgacttcggggacgactgatttgtttgttcggggggacccatgct

SEQ ID NO: 7729 - DNA, 458 bp, Zea Mays
aaaaaaaatggcggtgcgcggctggtcaaaaaacaggaaccctaaaacgaaggagccgtaaaaaaatggcgatgaaccggatcagcagctatgtctagtgcacaacagagaagggagcgtggatgagaagtacctgtaggtcgtggcggcacaggacgctaggacgaacaggcggcggagcgggcggtgctgtccatgtcgtccaggcaaaggttgagcgcggtggactggtgggcaagaaacaatgaatacagatgaagtttctagagccgtatggaatgggaaaaggcactagagctccgacggcttgtagcacctgggcagacagggatcgtagatgaaaaatcggacggtgtataaataaagacataacgtggatagcctaatcacacccgttttgaaccgtgtttgtaaataaggaaataatgtaaactggtcttatacacgtccacatgcac

SEQ ID NO: 7730 - DNA, 573 bp, Zea Mays
caagaacaaggagggcatgatcggacctgtgaagggctgatcgcagcgagctcacacacgtggtgttcttgaccgatttgggagaaatctcaaattagggcgtgctggtggacgatctagggcacgggttggtgtattgggtgcgtgactacctagcggagtcgatggcacgctcaatttataggacccgagggcggtggcctgtgaatttgagatggtgcggtggcggccggagagagggactgagtcactggcgcggtgaccgtggctgttaccgtggcaagaccttaggcaatagaagggttgtgtattgtgatcaattgcgacgtggtaaaatggctgatggtgtggcataaccgtgaggaacgatggcacggcagtgagggtcgtgcggccacgtcgccagtaagtggatgagcgacagagtggctactgtgctccaagttcatccacgacgggatcttttcacccggggatcgttatctgcgtttaactgggcgtgaatcgtggcgccgacgtgaatctgagcgcaagatcaccggcggcgagggggggctgaacctgagatatttc

SEQ ID NO: 7731 - DNA, 702 bp, Zea Mays
gtgcgaatcccccaattgggacctcctccgccactgcgacgccgcctgacgctggcaccgctgccgctggatccccggctagggcatgggaagccaccagagctgtcctggtagcagatgggagcggaccaccggcaccaccctcagtagattcctgctgctgagagccagacccgttggtgggcttggtatttggcggaggaggcatggccttgggagcagcggaggaagaaggcctggcaaacagatgatgggttaagacttgtcgacatgatgattaggctcgaagaaaaagggactacacttacttggggccctggactttccaatgaccctagaagcgaggcgatcaccgctcctgctgttgttgctgttgttgctgctggtgctcctgggggtgatcaccctcagatggtggtggtggcggtgggatcgggggactgacacgcccctgcgcgtcgcgggcctgggagctggcctcttcgatcccacatgcaaccctttggcgcttctggggggctccgaaacgagcgacccgtcagcgcgacgcagcctacgtcgcctctcctcctccgactccccggagctacctgggcggaggcactacttgcagccccttttcccttgtccaaggggctgggggccatggcgggattggcgctgggagccacaccaacgggctggggacccccagccggtgca

SEQ ID NO: 7732 - DNA, 425 bp, Zea Mays
ttgtcagcatcctgagtaggcaagctgctcggctagtaaaggaagatgagaaaattttgaagaaagcaaaatcagctcctgagccgaaagcgacaatttctaaaaagcgaaagcttgacataatgccctctactgacccgaaggtggatgagacaggagaagaagctccttcaacgccctctgctgccgatgtagcagagattttaagggtaatgactgattccccacacttcaagctactaagtcctctgggatcagaactaacacaatttttacagaagaaagaacaacctttggctgcaaaggagaaggttgaaggtcaaaagaaacgacgaatagttaacgtgatgcaagccatcgagggaacaccaccttcagcctcagcggctaaaatagtgactgctgcgggtgccgaagctgatgct

SEQ ID NO: 7733 - DNA, 664 bp, Zea Mays
ccctaggtgacactggggtgtcacaatgtggggtcctcacggcagcggcgtcgtttgagagagagccgaccaggcgctagcacatgtatgcttgtacccttggcggggacatcccttatattttccttgtctaatgcactattgtattgtcctctcaggcgatgagggatgaagaggtcgaagaccttgccggcttggagagctcgaaaccccgataagatgccgacgctgaggtgggagttgaagagcagtcttcgcttacgaaggtcggcgttaatgaccctagggcggcggagactgcacaggtgtaataattagagtaggactggtatgacaatatttttactttgtttgatacttaaagtcggctgctgcgtaggttccagcgtatgggcctgcgcaagcagattttggtgatattaggaatgatatactgttgatgtgcccaagttcggtaaggtttagtagcggggagtctgattttgatttgtagtcattgggaagtgaggaattactgagtccattcatcaagatggacgatgagtcttcgaaagacgacttagattttttgtggcgttagatttgtctatggtggagtctatagcggcggagtcttcgtctagggtttccccaattgaggcaaggtgcaagagaaggatcggag

SEQ ID NO: 7734 - DNA, 747 bp, Zea Mays
aaatgtcgaaggaagccgctgctggctccagccagggtggcttggtttatcttaagtatacgtttcggttcagaaatcagtttgatgagccaaatgatgattggctagacgctatagaggcaacaagtgatgaaatacttggagcgtactccagggcagaagttgaagttatgacggttgcctttggtgctcacgacaagaagaggctgaatagagtgtttgacgttattgggtttgtttacccagactactgctatcccatccagaaacaagggagaaaaagaaaagtcgctgctttgacatctgctagcgtgccgaagggaaagaaaatcaaggtcttgacatgcaaactgaggcacattgagatgaacgatatgcagaaactaattgaaagggcggaaactacccccattgtctcaaagactgcttccgctatgcttgttgaagtcattgcagacccggctagagtgccagaatcagaaaaggtagtaggcaaggtgctagaacagcctaagaagatggtgacagcgctgccgaagctgtcagctaccataggaactccaaggaagaggaggatggctagtgtcttggaatttgttctagaatctgtgaaaacgccgcctccttctgccgaagcttctggcagcaaaactgaagatgtcacagggaggatcactgccagtacttctgctcgtgccgaggcaggaccttcggaaaatgcaccagaaaatcttgtgaaagaaagcc

SEQ ID NO: 7735 - DNA, 809 bp, Zea Mays
attattgtgtgtaattcattccatttttatggtaccatgagacatagcttctttcgttgttcatctttatgtcacactgatccatctgatcaccactgcttcccatgtcgatgctctttgctcgacacgtctactactttcggtgatattgcatgtgcccattgccccaacatcgttctcgatatgctatcgcaccatgatcggtgataacaatgaactcaaccaacttcaccaggaggttgaggcacttcacactatcattgcgcagcatacccttaatgaccagtgtgttgtcaataaagccaatgaattgtcaaaatcgaagttgcggttgaacaacatccccttgacattgaacatgaggccaccaatcgttgttgccgtgagtgtgaaatcgacgctttgctcattgtcaacctccatgcatagtcatcgtcctcaccaccatcatgagtcttgttcttatggtccttgaggtcagacccacctcctacctcaagtggcacaatcttcatctcatcaccctcaagagtacactttcatagatcacatgctctctaacaactttcatcctgatgttgcaccttggtatcgcatggattgcattgtggtgttctcaatttttagcaccatctcatccaacctccttgagtttgtcatgacctccagcaatcccaaccactagctagcccactagctgagatgtctagctcgtccttgatgacatgttcctcgacaacaaagagacccatgccttgtttcttgacatggagctccatacctttgtgcaagggaacctatacatcttg

SEQ ID NO: 7736 - DNA, 694 bp, Zea Mays
ctgacatacacccagagcagcagctacatattctgcctcgcaagacgttagagcaactactctttgcttctgcgacgaccaggttattggattcagacccagaaagaacaggatacctgaggtactctttctatgcacaagatcacctgaacaatcactatcggtgtaccccagcagtgacagaccaactccaccacctctcttatatttgactccaaaattgactgttccagcaacatacctgataatccttttcactgcaccccagtgatctttgtttggagcttccataaatctactaacaaggccaaccgagaaggtcaaatctggtcttgtgttcactaaatacctcagactaccaataatgcttctgtatctagtctgttcaaaatcagttcctttttgagcagttgtcagttttactcgctgttccataggtgtatctgtaggattgcaccctgtcattcgacattgatccacaatctttgctgcataggaactctgacagatagttatttcattcttcgactgtctgacctccatacctaggtagtagctgagcaagcccagatcactcatactgaaagtatgcatcatttgatgtttgaagtgtgtgatgtcagacactgatggtccacaaatgatgagatcattaacataaactcctaccaccagcaaagaaaaccctgacccc

SEQ ID NO: 7737 - DNA, 330 bp, Zea Mays
cccttacctctcatcgcgttgatgagctgcgtcgtcgtcgacttcactcgccgcatcccgctctatctcattgccatccgcatttctctcgccccttccacctaacacgccccatccacatttctcttgccaacccctaaaccctaaccatcgttggatttgggtcatcgccgacgaccttgatggtgaacacaaggaggcaaaacagtcagaaaggtccacaataagaagaaggtatcttttggttcactcagcctaattcttagttgctaactattaccaagctggatctaaccaaacctagtgatgctagatacatcattcattcat

SEQ ID NO: 7738 - DNA, 622 bp, Zea Mays
caacatgtcaacattgtgctgcaacagatgcacgctcatcacctcttcaccaagtgttccaagtgcttctttggcgaaccatcggtggcgtcggcggtggaggcatgactgcagcctcggatgtctcgtgctctgcatgtgcttagcgaccgggacacgatcttcaccagcagcttctgggagtcgttcaagctagcaggtgccaagctcctgcacaactccgccttccatccgcatacagatggccagtccaaggtgtagttgcatcatcgtcatgcaggctacctgcattggtgtcctacatccgcatacagatggtcagccaatagctctggcaccatgacaccttcatggcattaatttgcaagtgtctcttgctagcccaggacgtcatgaaggaacatcaggacaagaagcggtgcctagtggagtactcggtcggcgactgtgtttggctccgtctgcatcagcatacaactgtcgacaccacgacaacttcctccaagctggggcctcactactttgggccctactagatcaccgagcagattgatgccgtcacataccgtctatgtctccctcctaatacctgcatattagattgaaaccctaaccataaatc

SEQ ID NO: 7739 - DNA, 977 bp, Zea Mays
ctgccatgtgggcctgtgtccttgccgcctcgctgtgtcgctgttgcgtggtcccgcgttgtcatccctttccccgtttcctcgcgtagatcgggtacgatctcaacggagaccgcgtgattcccggactcggttgccagctgccgtgatctacggaccttgtgcggagctataagattgggcgcctgggctgtcgtctcttcctcctatcaacgcgtgctacccgcgaccgagcgtgagagagaaccagagaccggaagagggattgctgccgccgccataagtcgacccgtgcgctcatcgccaccgcgtcctctatgtcgtgcctgggggcttcactggaccacgaggatggtgttcgcggcttcatcaggcgggattagcaatcggggacctcgggattcctcgccgtcgcaagaatgtgccgcggattcgcctcgcgtcgtggccatgcaccttcgccacccccatcggcggtaaggcaccctctatcaaattcgcgagtatacgaatttcattttgcgcgttttcgcgggggtggatggatcgtcgggcttgtggctgcgcgtctccggtggggtgtcgccgcgtgccgtgcgtttcgccgccgcgtccggcctgggagggagatgagcctccaccgttggatcccagccaacggtcccgattagaacctgagtgtatcgcttcggggattgaacctgaaccgttgatccttgtgttgacggtcgagattagaatcgcgtaccccttcgatttacgaaagcgatcgggccgttgatcatgaatcgtgcgggtcagggtggatcaggacagttttaaatccgcaccgttgatcgctgatcaaacggctatagtatcgtaccgcttcactttagataggatctaacataggccctcggttttggatcgagcggccagtagtattccataccccttcgcccatagcactttgcataagaaccctccgaaaatta

SEQ ID NO: 7740 - DNA, 462 bp, Zea Mays
caagggtaggaccttatagtgggacttgtattctactaaagagggatagaaagatattggctccacgggatggcatggtgggcccttcgtagggttgcgtgtagtcgtactcccggtaaggcttcgctcgtcccctcgctcttatagcgagtctattactgacgtcctcataatggccggttcctcagatcagtctcacggcgcagtcgtacgtggcatggcttctctagtcgtcatgagcccttcgtcacgtgtcagtgtgtgtaggcgtacactcggtatggcacgttgtcctgtccttctgatgtatgtgtcactatagagaccttggtgtcgaggccctcctcgactaggtttaactgaccccacggggcagtggggatacgcttgagaccgttcgtgggatcgtacggtcatgttgatggtgacctctcggcgcccattcgtcatgttgtgcgcatg

SEQ ID NO: 7741 - DNA, 747 bp, Zea Mays
cttgtagcgggttctttggacgacaatgttgatgcagacaagtgactgagttgtacaagaaaaatagggaatgaagctctccaaatcgcgctgtcagagtgtctgatgaagattgccatggtacagtgaccataaagatctccgatgatgtgagctcgacgccaatgatctgccgccacaattcgcgcctacctgggagattcgtgccgcgggaagagtagataatgtcggggtggggcgaaaatatccagtgtggggtgaatctggttgctggcggaaccggccgtcgtgtcccaccacagtcaatcgcgttggcatcaccggagttcaccgttatccgaccaggctacgtgcctcaaagccttaccacgtcgcagtagaccgccttaggtagcttgttcatcgcctgagacagtgccctggtaaaagccacgatagtgcttgctccagtaatttctcctctctccggtcgccagcgcgccttctcaaaattagacgccaccgccgtaggactctataaattgctacccccgtgagttccgctaggtaattacgcatccaacgaaccagcccttgcctccgatcatccaccagtgcctcccaatttcgtgtttcccccaaatacgttttccgggccaccgtgaacacttcgccgtggccagccctctataggtcagttcaaacttctttgattggtgtcctagcctccctcaagccccctgttgctcatagacccattcgattaag

SEQ ID NO: 7742 - DNA, 355 bp, Zea Mays
ctttgggttcgaatgatttgcaataaattgcaaattgactgccttgtgcatttactatgaggtgtcactcaaattaatcctatatggaagtgccagaaagagtggttaaatagaacaccactaaactcactattacaatgatgttgtaaataagagggggagaagtatggtcacaaattgggattaaaatgcttgcaagcagctgaaggctagaccttctgagatagtaaatgcaaaccaactattcgttggtaaccaacttagcattggtggacacctagaggatatgaattatcctatgaatggaagacattcacaacctagctcagtgcgcactgatgaggctaggttatcg

SEQ ID NO: 7743 - DNA, 454 bp, Zea Mays
ttgtgtttagagttttgcagaatggtcttgctaccgatgtggagtcacataatcagattaaggagaggaagaacagggctaataagatctgtggtgtgaacaaggtatgcacagttccactcattaaaacacaatcaaattaaggagaggaagaacagagctaataagatctatggtgtgaacaaggtatgcacatttccactcattagactttgttggaataaaagctgttactatttcttgcatgcacatgtcttcacgatgcacattttttcagattcctcatgctattatattatatttgtagagtgaactacctgttactgcaagcaattatatattcagatatttctatctcttctacgtgtgtgtatatacatgtctaaatcaacaatcttctatatctgtgtaaacatatcagacaactggctcgaattgcaacaaggtgaatcgt

SEQ ID NO: 7744 - DNA, 592 bp, Zea Mays
gtccctcttctgccgctttgtgtcgaagtcagcgctggaccccccagtgatcatatgaatgactccgcgatacggctgatcggcgaagtcctcttgctttggggcgtgggggcggtggatgttttgttgttgctggtgtggaggtgggggtgggggaggtacgatttgtacttcctggtggtgctggtatgcgtggtgcggtggatgcggagcggggccgtggatgtatggcggagggggttgctgatatgtgtgcgcgacaactctagggttgtcggctggctgcacccgtgccatcctgtctctggtggccttcgtctctgggcagtctctggtagggtaggcgcagtcttcgccgtggaacaggcagtaaaatctgcgcggctgctgcgcacgtccccagccccgaccacgagttccgttcccgcggccctgggggggatactcctggcggtgaggggcctcgccagcggggtgctggttggcgatgttgtgcacctgctgctgattgcggccgtcccgaccggagtctggctgcgaaggcctcgtccacgtgcggctggactgtggagtgtctttgggtttcctctga

SEQ ID NO: 7745 - DNA, 476 bp, Zea Mays
cagattgtaaaaatcaaggagaccgcgaaagaagggagaaacgggaagagcgagacctcggataagaaagggaacatagatgacagactcatgagtatcctccgtcagaacagtaactccacggcaaatccactaagaacagagttcttttggaggtaaaaccctgacatccacaaggcgcagaagatcaaactctgaaattacagacatatggttacccgcgaatggcaactgactattggggttgatttacaggatgatagccacggtggaactctgtttcttctgtttcggcgccatcgcaatctcgctggcggagcaaacaggagcgaaatctaaggaaaacagggggtggttcgaggcgaaaatgtgaagttagggctcaaaaatcaaaagcgcacgtcgacatgagtataaatggggttttcccgggttgtgcgccatttctaaaaaagtgctaaatcaacactcgggaa

SEQ ID NO: 7746 - DNA, 512 bp, Zea Mays
tgctgagcttctaatcacattggttccaagtgacttctgtagctgttcccagaatcgtgtgacgaaaggtgtccctctatctgacatgatagtccttagtattccatgcaagcgcactatttggtcaatatagatctctgtgtatttttctgcccgatgggtggttcgcgaaccacacgctcgattactttaaattgaccctcccctcactccgcctctctgttacacgctcaacccaccctcagttagcccttttcatcaactatagcccaagttctccggaatctcccaaaaattgatcaccattgtcgccgtgaggtgcttcaccgtggtcggagctcctcaggttagctcaatcctctctaacctgtgtctaagaatctctagtatccctaattgcttgtaaccccaaccgattgaactctaccatagtattttgatgagaacacttcctcgccgtccttatgcgccattgtggccctccttagcgtggtcggttaattctatcttct

SEQ ID NO: 7747 - DNA, 730 bp, Zea Mays
cggtgttggcgtgagtctagcgctcgcgtgaaccgattgaccatgtctgacaataaagcttttgtcgcccttacctcctcctgtaccacagttccacgaagtccgtagctaacctaaaatcctagagccaccatagccatctaccgccgctgccgtcgagcacgtgaaccgtggacactgggaaatccggagagtactctggtgctgcgccgtgaccctagaagcttcggttgccgtcaatttcctcgccggtgtcgctgtgcaagctcaattgctcgtcgggcgggacatctcgccgtcacgtcgcgcgacatcggggaccggccacatcactgcaaattacgggtatgtgttgggtcctctgagttcgctttagtctccattagggctaggttcgtttgatttgaatttgtggtcgcggacctcgtcggccgtatgctcgcggccatgggcatcccctgccggggtgctcggctcaccgggtgaacgaaagaaaggagaaagcacccgtgccattgatctcaggatgaacagcctggggtcagaaagggttaggaccgtgggatggttgttgtgcgactcagatcaaacggtagtttaccccttcgtgcattagatcatgaccgtcgatttcgtgaccaatgatcctcaacgtgtaccggttcattaaagactagattcaatccaggccagtgaatcccgatcgtgcgacccacaatgcatgataccc

SEQ ID NO: 7748 - DNA, 920 bp, Zea Mays
gtggactgcgggttaattcgtccaatccccagggctctttagcaaaacgacccgaccaaaggggtacgggctgatcacagccgttagatcacgccccaagtgctagtattagatcgagattgtcccgaagtggtatgaaatgtggaccagcggatcgctgatcgacggtggtgatttaaaataaacagaatttgatccccaccgcccgatacatatctaacgatccagatcacatgggctcaaagaggtatcgctacactcaatctgatccgtccaatcccagatcgacggacgcgccctcatcttcttccccaccagagcagctgaacgcggcagcctcgcccagccgcacggtggcggaccacgccgcaggccgattccatggcgaccccgggctctaatctctattcaagcgagtgctatgcggtatatgaacaaggacgaacacgttagcggcaaaacgtacccaagatggtagcacagaggtgcttgcccacggaattaggcggattcacggcgaaaggtggaggccgatgagaaattcacgtcgtcgtggggcctcgcgcccccggatttctccccgagcacaacccacgagtccgtccgagtgcccggaatcgattcactggtgcaaagcgacggtgcaggcgagagtccctagcggcggcaccgacttctctaagctctctctctctgctctctctttatttcttctctgcgcaccattgtttggggaggagcggccccagatttatacccagacggcgcccaagtccgagccggggcgagcagcgagatctgcggtggtttggtgaggcgcccgagtcaagtcagcgtgaacaacggaggctgtcgtggagtccggttggggaggatagagatgaacctgacgtctcgggtccatgcaccagggagcacgg

SEQ ID NO: 7749 - DNA, 443 bp, Zea Mays
ctcttttgcaagttctaatagccgaaggggtacgaatagatttcaactgttggatcgacatttgagggctcagattagatcagcttattatataaaccagtacgttttgtggttcgtcagatcttcatccaacgacccagggaccacccacaccgagatgccaccggatccgtccactgactgatccacggccaggatgaactacggccaaaacgtcgtcctacagctaatcacgatcgcgcgatcctgatccaacggtcataactatcgccacaacaccacccttcatcgaggatccaacgaccctcacccttcttccaccccaggccatctgcgcggcggtgcacagtgccaccacgatggtgcgcccaccggagccatggcaccagagttgtaaggcacaatcccatcatctcaacattgtttcgcgatgcagattggtc

SEQ ID NO: 7750 - DNA, 1333 bp, Zea Mays
tatgatgtttagggcgtgttcggagattggcgaaggtgtctagctaggcatctatcccatatgtttgattttgaacgcatgggttggatggacctacatggctggggcatcccagggttggaactaaacaaacccttgttactgatgtggcatgacatcatggtgtgtatttttatatttaacatgtcatttttttcttgaaaaatagacctttttctcgcgctcaagcaaagcagccgcactggcgcaccgcacaccacgacgcacgctagatactctattttagacctgactctacaaatagtattatctatagtgtaaaacaatgttttataacatcatgtacacaatctgttagagacaatctaagtagcactccatggtcatctcgtccgctgtctccttgcacccaccttgtccgcgtgccgctcctctcgctggcgttgaggaccaggacactgcctaggctaggagatgctcgtattagagtatgaaatgtagatggaataataaaagtaaagttttgttccgcgctcctctcagccaaagaaccatgatgtcgccccaacctagtggcctgggggcagatttagggcccatgttatctggaccatggtccgggacgtggcctatatgaaaaagaaagaatacctggggttcgatagagcgtaccatacatatctacaactagcgaatcacgatcaaataacatgagcgggtggcgcgtgggcgtgctcggtcgtcagtgcgtggggcgcacagtggtgtctttctcgtcgtctcgtcgagcaacgcacgagcatgggtgtgtgatagtgttctcagcctctcatgaagacatggatgtgcgagaccacgagctatgtgcctcttctgcatgtattgcctaggcggctaggcccatctcagtgtgcctccacggctctcttgttatggtcgctagaggaatgcctgctatcatgagcaggagccttcatattcaaccaggcctgataagggcaaggtagtagttatcgagtagcagcgcaagaagcttaagaggctcgatcacggttagtaggaggcaatcattgtcgcaaccaacacaaagcaagctaagagatggattggttcatatgcccctcccacataggcaccaccgacagagactacaccgcttaaacggatgatacaccattgtgtcctcatatacccttcagagagatagcctttagcacatcctagagtcacatcataaccatagccatagttcagtgagaggatgattttgaggtggagtaggtctaggatgaccccgactatcagatatttgtagagccacaaccagttgtgt

SEQ ID NO: 7751 - DNA, 870 bp, Zea Mays
caacactaaattggcgtctgacaatcatcgctataaatacagtataagcatcaaactgttagtcggtatatgttagtcacaggctgtcagtcgctaattttctatttcctaattaaacatcagtcggtatatatacacacacgtagtgctgaacagtaagtcggtataagtttttttgcatcattggatcagtcggcataaaaaggctcaggactaattgcctccacgcgcttcacttggtccattggtgcgaaaatttcacaagcgtggcccacctgaagcaggccaattcctagctgccgcctattcttttactgagccaaaccctagatagttattttcttcttccaattccaaatcgtcgccctgccgccgccccgttcagcgtcagcacgaacgcaagctgcgacgatcctccttcccaattcaagccgccgccttgactgtttagctagcgtcgtgcgtgcattcatcccttgcctctcagctctcatgtgtgcatcctctgtcccaaatccatcgtgaatcatctctccccaagttgttgtggtcaagccgcactcctcctcaattccaaatcatcgcactgctacatcgcactccccaagttgttgtggtcaagccggcctcctcctcaattccaaatcaacgtaagctgctccaaggaatttttgaagagaagagacatcgcctgattctccaaagacaaggcagaggcagcaaagtagtgcgcaggtcagtccatgttctttccttaacgaagtctagtttggtttgtaggtgaatagataatttcctatctatgtttgtgaattgtaaacttgattagtgtaaattgtagtaagaataaataaaaaattgtgacttgga

SEQ ID NO: 7752 - DNA, 612 bp, Zea Mays
ctacccttcgtcacatatacaacttgttttacggtcttctttgctaccttgtgcttctttatgtttttcatactcctgtcatggttcatatatctagagcattctttcttttccataacaaccctttatacttcctcgttccagcatcaagtatctttagcttcgtctccacctttggttgctccacacgtctctgaggttacctttcgagtgtaagttgccatcttctcccacatgttattcgtatcatcttctttcatgtgccatctttgatgatcctttctttaacaacccttgtaatctctgcttgtttatccctacaggtacacatctgaaaacgaaattccaccaccataaatttatattgaaagacaacacactctctaggtatcaccttgcaatcaagcatgcttgtttaccctctctttttacgaggagaaattcaatctgactagagttttggctactattataggtcactaaatgagattctcttccttaagagagtgttggatatcaataggtcaaaagctaccacaaactacaagactttttctccctcctgattcctattaccatatccaaaacctttatgaaccacctcaaaacttg

SEQ ID NO: 7753 - DNA, 343 bp, Zea Mays
ggaattcgccgccaggacctcttctttccccacggaaccactgtgcgccatcgaagctcagcgacgggagttggaagatgagcggtggccgttcatcagaaaatgagcgctcgggattagatcctgggcgtaatggctcatcgtccaatctgggccgttgatcccctgatggacggattctggtgcatatcaaatatccaccacagatcgtgggatcgatggctctgttagttgctcggtttagatctaatctgagctgtcgaatggcgatccaacggtgccaatctgctgataccccttcgttatgcgtcatttgcataagagaccctatagaattttgaaa

SEQ ID NO: 7754 - DNA, 593 bp, Zea Mays
tacaaacgggtgtacggaacctcatggcgtatggaggaagaaggtctgcggttaagcaagtatgtggcagctgcgagggcctcaacccaatacttgggtggcatggactcatgaaggagcagggtacgcacagagttgttgagggtacggagaacacgttcggccttgccattctgtggtgaagtgtggggacaagaaaggtgaaaaacgatgctgtgggcagcaaggagatcatccatggcatggttaacaaattctgtcccattatcagcttggaagcatttaatagtgtagctaaattgtgtgcgaacataaggaataaaatcagcaatgtgctgacggacctcagacttgtgcttaaggggaaatgtccagcaaaaatgagtgaagtcatctagtagaaccaagtaatatgagcatccagatatactagtaaccggggatgtccagacatcacaatgaactatctcaaaaggggaaacagtgtgggaagtagatgtactaaaaggtagacgagcatgtttgcctagctgacaggcatgacaaagagggtggtctactttattacatgaaattaaaatttttctcttgag

SEQ ID NO: 7755 - DNA, 511 bp, Zea Mays
gaagttagtgccttggttgcctcgctcggggagattcctgatgatgaacggcaggtccattttgaggtgcccctgaatcctagtgatgtagagataagcgccatgcttgacttgctggctgaggactcttctgacgctgctcctgctggggcattggtagtggcgcccctcccagaggctgatataaccttggatactcagaagcctgccagtactcgcccgaggcgcccttgtcgagccagtcaacctgatccttctgctaatgagcagaaaaagaaaaagagacgcctccggcgagtatccagtttggatcgggatgctggtactttggttcctgctgctgaagaaatgcctatgactgaatttactgatgctgaccccgatgggtgtacccaattcgctgctgatcccaatgtgagtgctccatctgttgctgatcccaatgggtgtgctccatctgctgctgatcccaatgggtgtgctccatctgttgctgatcccaatgggggtg

SEQ ID NO: 7756 - DNA, 639 bp, Zea Mays
ccgtggtcggacctcggtagtagagcgtatcggggcttgctgagtgcctgggcggcctcgttggggcgtggcgggaacctctggtggaagtccggaccttgcggtcaaacggttctcggtgaattgctcgtcggagcagcgcgcgtgcagtccttccgcttctcaccatggcgcggctcctcctcatcgccattgtcggtaataagccctcccctgtgtccgtcgtaccctcgatttgggttagcacccgtccaacgacacgtagatccgtgtatgcgtcgggttgggtgctcaccggcgtactccgccgtggtggtcacctgggcgccgctctctgttagagttggaggtaggaggatgtgccaggatcgtagatctgtgtgtggatggcacggattaaaccatgagattccactgcgcttggagttaattctggccattgatcggtaatcctgtggtctagattgggtagtggtcaggtgcgatcctcggccgtccgatgcgatcgtgcgcgcaagaattggcctcggtatttaaaatcttggccgctggtctctgaatcaacggttattagcgcatgcgggtttgtgagatagatcttttaatccgggccgtctgtgttagatcgtatggctcgcg

SEQ ID NO: 7757 - DNA, 639 bp, Zea Mays
aaaaaacagaccaaacgagtcaagcactaaacggatcatactaggctagcatatcgtgcttaattctctgtccaggcctagctcgcttatttgtgctggaccggcctgtgtccgttttaagcgggtcgggcttcgatcttagtggacatctataggtatgtgtgagatagtgagagtgcatatggaagcgtgtgttagatttcaagggcataactcgagtctcgagggtatagatggcaagtgaacggtgttaaatgggtagacactaagcacaacacgaccctttgcagtgctttggtacggcatgggcacgatttatagtgtcaatgtcgatatgacacgagtctagtgtcttgtttggaccgccacctggtacgatggactggcacgagcacaatacgattaagcgaccgacaccaacccatggtatatagacgcatcagttgccacgagtaataataactaataatgacggtgacgtgtcgggcggcccaatactcgagggcatagcacgatgcatggttggagttggagggctgaacggttcgggcctgggtcaaattcaactacgtaccacggagtagcaacacatcagttgcaatttgcaaatacgcagcctctgggcagccgacacgttac

SEQ ID NO: 7758 - DNA, 729 bp, Zea Mays
gtagcttccgccttagctatgctttcgaagaccagccttggtgccccaaacttgaggtcggcaggtagcactgcctccaaaccatagaccatgaagaagggggtgttccatgcagagctcgactgggttgagttcttaggctccaaaccacataaggtaattctctgatccacttccctgcgaacttttcatttttgtcgaagacttttttcctgagtgcttctagtatcattccattagccctttccacctgaccattagctcttggatgtgctactgacgcttatttgatctggatgctccgttgttcacagaaattaaagaattcagagctagtgaaattggatcccaggtcggttatgatgttattcgatatcccaaacctgaatattatatcttgtatgaattccactgccttggctgaagttagagaagcaatgggtttgtattctatccatttggtgaatttatcaatggcgaccaacacgtgagtgtagcctccctgagctttcttgaagggtccaatcatgtctagtccccagcacgcaaatggccatgttacgggtatggtctgcagttgctgtgctggtaaatgttgttgctttgataagaattggcaagcttcacatctctggactaactcggttgcatcactctttgctgtcggccagtagaaaccagacctgaagaccttcccaaccagagttctggatgctgcgtgtatcccgc

SEQ ID NO: 7759 - DNA, 525 bp, Zea Mays
gaccaagttctatgtagtagccgcttctaaggctgatggaccctcagttacttccatgggaccaagatgatccaagtcagtctcctgaccctcaagaccgcgttctaaggtcgatgaggcacgggatgacctcaacccagcatcgagcacatcagcacaaacctccatcacaccatcatctgctggctctgataacagatcctctggaaccatatcctcaagagtctgatcaaaatttgccagagacaattcttgcagaccaatgagagcagacaaagcaggagaaggaactccactactttcaccactggcgacgtattgccgactgttctttcgagtcagagggacctcgtcctcttcctccccgtcgtcttcaccagcaacacaggcaacacccacattgaaatcagcaacagatggagcacacccattggggtcaacagcagatggagcacccccattgggatcagcaacagatggagcacacccaccggggtcagcgtcagtaaattcaggcacaagcac

SEQ ID NO: 7760 - DNA, 498 bp, Zea Mays
ggcgggtggctgagcctgacatgaaactgactttccttggtggtcagtgagaagaacagtcttatttgcacaacttatgatgcccttgtgtttggttaaccaatccattcctaagatcacatcaatcccttgggatagcaagacggtaagtctgcaaagaacactaccccacttaaaagaattctgacttgggagcatttgagctagcatagaaggtctgaccctagggtttgggtgaccaagggaatttctaggtgtgtagagggaatgccatgcttttccacaaaactaatggctatgaaagaatgagatgctcctaaatcaaaaagtacattagcgggagtaaattcaactaggaactcaccgagcactactcccggagcttgctgagcctcttgagcgtcgacgtggtttactcgtgccctgccatgatactgggtcttgctctgctagctgttggaggagggtgccttggaggcgggtgctggggcattcttg

SEQ ID NO: 7761 - DNA, 574 bp, Zea Mays
ggttgacagtaaacagtttgagtgcctctgagaatgaagtctttttattgatgatgtatttcccaatttacagaatacaaggccgtcccaatagcttttgaaatctagctaggggtaaaacttcctgagatgttctatattccatgagttcccaatttctgtgtcgtccatttgagtaagacgatatgatccaggtcgagtgacttctgctactatgaatggcccttcccatagtggcgacaatttgtgtcgtccctcccccgttagaattcggcggaggatgagatctcccactgcgaaggatcgatgccgtatggccttatcatgatagcgccttagagtttgctggtaccgggctgactgaatcaccgtattcaactgttcctcttctagtatatcaacatcctccagcctagtagcttcagcttcagctatgttttcgaagatcaatcttggtgccccaaacttgagatcagcgggtagcactgccttcgaaccatagaccatgaagaagggagtgtttccatgcaaagctcggctgggttgagttcttaggctccagagcacatacgac

SEQ ID NO: 7762 - DNA, 565 bp, Zea Mays
gtcaacgacagcgacaacatgggtgaggggagggcgcagtagtgtcgtgagggagggggatgataggtggcagggttagggggagcatgggagggaggaatgagagagggatgatcctaataatattgtgcattgggttttagtaagggagaggggttgtcgagcgatctgaatcactgattttgatggtgggttaagtttgggtgcaatttgtttagtggttttagtggaggttatgggtgtgggagtgatttggttgggtgggttttgcaaagtttaaactggtggagtatgtaatggtatatatgccaaattaaatgttagttcaataactagaatacaggtagacatttcataaatgtgataattatttaaacatgatctagatcgatagattagctgagtgcgaatggtggggtatgtggtatgaggtcacacaagataaagtttctctcttgtttttttcacactcgtgagatcaggcggaggtaagggaggatatatttggctatagatagccaaatgggtcttgcctagccggccggcctgaggcacgacccatttt

SEQ ID NO: 7763 - DNA, 783 bp, Zea Mays
aaaacattgaatccaatatcgtttgggttgagccatcgacgccttgccccaaactctaaattcttgaaatcggatctggttcctaaacttggtttcaaattctttcacgcttgagttacacgtgtctctctgtggcctggcatcgtggcgcgtggctggtgctgaccggtgcctggacagtgcacaacctctcgcccagacgtcgattccgaaaggatcacaatttcgatgttgtatcaatctcgcgtatttattttgtgaaatatcgagccttgtgtctgtttaaaatttatcgattaagtgaatacgaatttggaacctcgacccactcttgtgatttttgacccgagtaaattttattagatactcagcaacaagagtgttggtgcgagattaaatcggaccgagataactagaaccgaactgagtactcgtaattaatctgttccactgtctataattatagaacccgaaaatacctaccagtgttagcgtagtctaaaaatattaaaatttatattgttttaatgggtctgtttacatatcgcgcggatttaatctgagaacttaattatttgtgtagtcttttgtaacgaaaattggagaaggaaaaacctgaattatctttattcttcccatcgcctaactctctccctttttctctctattgatttatctctaatcggtgcacaagctactagaacagattccccacggcccacgtctccctaaggtcttgttcgtttgtatcggattgttgggtcggaatggttacgagccgga

SEQ ID NO: 7764 - DNA, 358 bp, Zea Mays
gattaaggatgcaccagagcaagagatcctctgcgacgagtgattggactttcacatggcgcaggtggtaatgtcatagggcctgttagtaatccattactcggtagatggcttggcatcgtcgctcttcgaggagatttagttctcctagccggagctgaccctacaagttaccttaaggaaacttgtaaaatttcacttgttgagggccgcatgaacaacatacttagctattccctttcagcttttctcctgaattcttttcgaggtctcaggagacgaaataattggcatttttaccactgaattcattgcctttttgctatagtgccctcagtacctatgatttgtaggtcca

SEQ ID NO: 7765 - DNA, 549 bp, Zea Mays
catttcctgcctttgggagccgggccattttggtgggaaatcgaaattctccggatcactctacttggtttcgctctcccgtggtgtccctgtccggtggaccgccctgtttcagttgcttcgaggagttcgcctgggaggtattaaaaaaatctgaatcgtcacctctctagtacccgacgctttctttgggtgtcacttcaccaaaaccccaaactgctccctctccggccgctggttggcgatcttcgcttcccgtctcgatggcgtataggcgtgtcgatcccgagcccttccttccgccgggcttcagcgcttcggtggtcctgcaccgggaggttatggccaggtcagtgactcggcgccttccgccattacatgaggattgggccatcatcaatattcaacctttgcctgatcatgaggtcactttctcggcggtgagagacgtggtcagagaatatttggtggagcaccgtcggcttggggtgcgggatattcagcggtcgcacctggggcaggtcctgattcagtttagtagtgtgcttg

SEQ ID NO: 7766 - DNA, 499 bp, Zea Mays
gcaagttggtcgggcgatgggggagctgttcacggtgtcagtctgcgacgatgcgctcttgttccagccaaaacatgatagtatcgttagggataacagctaagtgagcttcactaatctaagggggacatggaacaagcacagcacagaccaatacttgcctgagttagcctggccacggcgaggtgacaaattggtaggcgtggtcacaactcataggagtttggcacgtgcagctctggacaaagcacactgatggctggggaaaggagaagctacacgaacctgaaggcacatggaccatctgctgcaaggaacctaggaaagaagttcactgaaccatgtcttttagggcagcttaagtgtggcaggtgtccctagacttgcacaaattcagtgcaaatgtattcccagggtgccagcagtacatgggcatcccatacgtggctttcatgcccaagttcctcacagatgcacagacacacccataacactgaac

SEQ ID NO: 7767 - DNA, 816 bp, Zea Mays
ctaattaaagtgaattaaggaaaaataaagaattaaggtggtttccttaactcaagcagtgatgagggtaaaccttaagggtaaagataattgttgttgtaagcagtaggttggttatagattctttgcccttaggagtgattcccttatgtataaataggtttatgtgtaaaaccacaaccctcgcgaagggagccatgaagaaccttttaatgccatcctataaacaaatgaaaggaaaacactaactaaggttaatgagttaaggatgaaatcgatctaccctcttcaaatatgaaaacaattgtcagagagaaaactccaattaggtggtagaatgcacccacctaatcctacaggggcgacctagggtttgcctaatgagatggatgaacacaataacacacaagagtttagagtggttgggggcatcgtagtgtttaccctactccacttgtgagttgtattgatgagagcttaagaaagcctaagactggttggagatgcccctacggggattcaagtaagtttgtccgtcctcgagtccctagatgagctcgagggttggtccgtgcctgtcttctccttgctacgcaagtgccctcccttttatagactaaagggagcacgtacaatagagctagaccctaagaggtggacctaggaatactaaaatatgaagtgtgaagtgacagatagaactggtgggccaaggtcttctcctgcgttagacaggaatcttctcttggtcgccatgcaggctcctcaggctagactcaccttcgccacgtcttgtcagcgtgtgggtgaagtgtg

SEQ ID NO: 7768 - DNA, 846 bp, Zea Mays
ggaagatggaaattccagagctcgggtgaacgattacgggtgggagtgggtgctaaggcttcgcgatgacctagcgcagctgcccgggggctcaatttatagaaggagcgagcggtggccgggaattttatgaaggacgcgaggcggtcggagatagaagaaggcactggcgcacgtgaatccgtggctaacgtcgtggcaacctcaccggcgacgatgggacggtggtagggagtcacggtgacacggtagatggacagagacatgcggcggacacggagatggcacgacggcggtgagcccctttatccacgggcggtgagcaaggggggagtaccgcggctggccggggtggagtccagctcacccgcggcgaagattcttttaccccgcagcgctatccaacacccaggcactaatcttgacgccggcgacatgaatcacggcggagacaaccgtcggcggtgagggactgccgcgctggcggtctgatcctttacagttactgtaccatggcgatttcagtcagatgaactgacagagcaagtttaggtcacattttctcttaatttcaaatggcaacacatccagtgaccagcagcaaagttgtagagctatataccacctatatttcgactatagtgactgagctcatttggtcactagatcatggttgaattcacaccaaaagatggctctgttacactgaatatctaactttcagagtggaaccatcctgacagccagactttaggcttaattatctcttaaatttccttaacaactatgctcacaacctcaagcaaagttgttctcctatgattgggctacaattttgatgtggtg

SEQ ID NO: 7769 - DNA, 588 bp, Zea Mays
aaagaatcatggctttttgacacttgtttctcgaccatgttgctagctgtctacggaagagtaagcagcaggaaagctggaaatttaccatggcatcatgggtaccagtaccactaccacagcagatgggtcctggcctggcccacgaactctgcaaggttccttctcccttgcgccctgctagaccagaccagaggacgagatgtgagcacgccatttcaattcaattcaagggcgcatgaacgaagcccactcggcgctccaaagaatcgattcccacgaccgatcgatcgatcgccagccagcttttagatttgcccctggcactggcaggcaccgtcgttcgatcgcctttgcacacatatgcacgatccctcgtgctttcctctcgtttgccagcttcccgcgaaagaacactcccttcggctgcagcctcacgctctcctcctctcaacaagaaggcgcaggcaggggggcagggtttaggctagctagctaagcttggtagaggcctcaagttcaagtataccttccttgtcgccgggttcaccaccgacgcggccgcggcggacgctttgccttccctcc

SEQ ID NO: 7770 - DNA, 311 bp, Zea Mays
cgcaatatgttggtcaatcccaccagttagtaccacctcggtagctcagatgagtagaagataccttaaaagttcagctcaggcaacttgcagcacgaccttacttgaacaggatctgttctataggatcgtactgttgcatccttgattaataaggaggcaagtacttaaacctggttgatgagtaaatgacctgtgggccagagcgtgattaacggccaggattcagtctctgtgctttgtctggtgctgtagatgatcgttcctggtcaggagcccctggctaagggtggcccacaggttgtctgaca

SEQ ID NO: 7771 - DNA, 325 bp, Zea Mays
aaatattttctaagattgatttgcgcagtgggtaccaccaaattagaatgaaattaggcgatgaatggaaaactgcttttaaaaccaagttcggcttgtatgagtggttagtgatgccttttggattaactaatgcccctagtactttcatgcgtttgatgaacgaggttttgcgcccattaattggaaaatttgtggtggtttagtttgatgatatattgatctacatcacttgtttatctgaacatcttgaccatctacgtgctgttttttatgctttgcgcgccgcgcgcttatttgccaaccttgagaaatgcaccttttg

SEQ ID NO: 7772 - DNA, 503 bp, Zea Mays
attctctgcaccatccccaacggtatgaatctcgtcccctgttctgccctcgtgttagcttcgaggcacgctatccgtacatagggttattgcactgtggcgcctgggggggcttctcgccggcaatgctcctcaatggcggactgttgtgcgccaccattttgtggccgcgggaggaagaggcagtcccgaccgttgatgtgggaatcaacggtttggatcaggtcatagcgcaacggttcagctaggagtgcgacggtccgttcgatcttgatcaaaggggctacattgggtctcgtggtaattagatctgggtcattgatcatttaatggatgaccgagaatgttgagtagcgtagtggctcatctggtcgttaacctaaaatctaacggtcattgctcgatcctgggtattttaaggcgggatctaatccaagccctcatatgatgatccaacagctcaggatcatgcgtacctattaggtcggcattcttcataaaga

SEQ ID NO: 7773 - DNA, 611 bp, Zea Mays
gagagagagagagcagagcgcagcgaagaggagagagaaaagggggtcactgctggggatcttgctcccatccatggtcatcgcgtgggagtgtgccaccgggggatgctcaactggttgcgcactggacgtccagcctccctgtgcgtgcggcgtggagcaaaccgggcgttgaattctgtgtgggtggccgaagctgctgtgccgccatggttagattctatcctagtcgtcggtccggccttggagggaggacgaaggactaccggtatgcaacgaacctagagataactccctagagggcagggtactcttgatccttggcgacgttgaggaatgtcgtgcgttccggttctctgtggccgacgtcgtctacacctgaatcaccggtataatcacgtttccctaactcgccatcgacccctcttctggtagcatccatcaaatcagggtttggggcgaccaatgcaccgattgcacgtctcaccggcgtgcgccgccgtgctgcctgtacgcgcctccgtgacccggtgcggaggtaggagaagggttgctggccattcgatctagttgtgtggctaggattagaatcaacttaccccttcgtttat

SEQ ID NO: 7774 - DNA, 420 bp, Zea Mays
ccgaaggaagccaccgctggctccagccagagtggcttggtttatctcaagtatacctttcggtacagaagccaatttgatgagacaagtgatgattggctagacgctatagaggcaacaagtgatgaactactcggagcatactcgagggcagaaaatgaagctatgacagctgccttcggcgttgcaggaagaagaggctgaatagagtgttcgatgttattgggtttgtttacccagattactgctttcccgtccaaaggcaagggagaaaaaggaaagtcgctgcttcaacatcttctggtgcgccgaaggcgaagaaaattaatgtcttgacatgtaggccgaagcccattgggacggccaatgtgccgaagttaattgaaagggcggtaactgccccctagccatagaaacaac

SEQ ID NO: 7775 - DNA, 335 bp, Zea Mays
caccgaatgggtcgatccaggtggcccgcatttctgcactgcatttacacaagtataatagttagtacaaaaatgcgtaaccaaacgtgggccatttgtccgaacgtgggccggtgacgtgtaacccaaaaattggggaagcgcatttaaacagacaattacgacatcataaatctatgtataaattgcataaatggctgttacgcccacgatcagcgcgcccacgatcctagaattcagcggataaaggatatgcgccgtgaatatcgcgtccacgataatggatatgcgcatggtcaagaggaaatattcataggcttccaaaaaaggtagac

SEQ ID NO: 7776 - DNA, 288 bp, Zea Mays
ggaagctgagcgaaagtcggtgtggcagtgtctaggctctagtggagatcgttctccggtgtggctgcgtctatctggtggggacacttctggtccaccggcgatggatcgtccaaccgttcagcgcaagaccccagtttggcgaggactttcccctccaatgaactcctcattagtggagaaagaagcacagggtgacatgcatccgactgagggacgtatgaagaagagaagacgttctaagcgcgggaaaggcagctcgggactgcattcggggctaagtcagcc

SEQ ID NO: 7777 - DNA, 336 bp, Zea Mays
ggggaggatgtcaattgaggaccggaatcggatacacactcgcatgaacagggcaaaggctgccgagctgtacagtcaggcaggctcatgcttagtgctggtaatgcgcgctttcaccagctctcatgaaatcattcattcatgggcgtcgcctcgcccaccggtgcctttctccactactaaatgcagtgctcaaaccgaagcatctggtgggtgctgtcagagccacccccctttcctttggccccaagctcacacttctccatgccatcgccatgcatgctccttcgttctttagcgagccacacctactctgctctgttgctcacattgcca

SEQ ID NO: 7778 - DNA, 497 bp, Zea Mays
gaatattttttccaatttgcacaaaagcactggtaccactttctccaactgctccatcgtatctcttctaatttctttagcatatagatgtctatagaaatagataactttagctaatgttttccacacagcatcagaaacatgcccacaaaacattacaggcatgagactttccgtaattgtgtggaagtcatggctcttcaatcccttcatcttcattgtcttcaaattcatagatcttctaaaaccagcagcataaccatggggaatttcatatccttcatccagctcatcacttcttttttgttgcttaggtttaagacaataatcaacttttggtttgcctccgttttctttaagcacttgggttggacgatcacatatcacggctaagtccatgtgtgccttataattgtctttcattttatccagaaaatccatgcatgtatttatgaggacttggcaaaagttactctcttgatgcatgacgtcgatgt

SEQ ID NO: 7779 - DNA, 985 bp, Zea Mays
cgtcttcttcaacagaaaaatccggtgctgccgcggctggatttccgtcgacccgagcatggcgggtcaagatccaggaatcgtccccacgcgcaactaaccgcccataagaaccctcgcgcagcgcttcccgtgacccgtctctgccccttttcgctaacaacatccagtcgcacctcgcgcgccgcctctcctcgccgccgcggggattctccctctgcaccaccgtccaagccgggaaaagcgttgtggcagctccgttaacacgcgtgggagcttttgtgggcatcgtcaggcaggggctccaccggtgtcgactggaattggttgtcgacgtgctcctccgccgcggcatacgctccatcggcaattggcgattctcctcaacagctacggtaatagctacctcctgctggctcgccttgttcttttcctgttggcgcatcatctgggcagggtagtgcccgccgtggttcaagcgccgccgtggatccgctccactccgtggccagggtggtaacatcagtcaaacattaaattggggggctctatcgggttcgccctacctttggcttagtgtggcttggttggattggaaactcaggcgggtttgtggccgatttgatggttctccggcgagcgggtcgccgtgggagcgggcaccgtcgcgctcggcaaccagaggagaagaaggtttacgcgtcgttgatctcccagggaacggctgcgattagaagtagcgtaccccttcgccactttggtcgggtaccgttgatctcgaatctaacggtagtggttagatctggtttcataaactcagggtgcgttgatttgggatccaacggctgcagtcgcgtaccggttcgggaaaggctagatctaatctcgcgcgtccacacctaatcgaacggttcagattagatgataccccttcggcttgcacatttcgctaaagagaccccgactaaaacgaaaattaacccgc

SEQ ID NO: 7780 - DNA, 687 bp, Zea Mays
gccgcgtgtggcacgacaaagggagcaagggagggagcaataggggccacctcgaggagggcgtcgtactctgaggaggcagggaagaggacatggagaacgggaagtcagactcgtcgaagatgacgtgatgagagacgagaactctgtgagtggagaggtccaggcacttgtaccccttgtgatcaggagagtacccaaggaacacagcgagtggaacggggcgcaagcttgtgaggggcagtggcagaaaggttgggatagcagacgcacccgaacacacgaaggtggttgtaggagggagaggtgccaaagagagcaaagtaaggggccaggtgagaaaccgccttggtggggaggcgattgtgcagatagatagcagcggccaacccctcaacccaatagcgggcaggaagggatgcctggaacaacaaggaacgcatgatgttgttcacggtgcggatcatgcgttcaaccttgttgttctgagaggaaatgtagggccacaacatctcagctgaatgccattggaaaggaagaaggaatgggacgtggagttgtcaaactcccgcccgtcgtcactggacagcccggacggtgcgtccaaactaagtggaaacccaagcgaagaagtgagaatgggtggggaatgtgtccgacttcaagcgcaaggaaaaagtccacaag

SEQ ID NO: 7781 - DNA, 529 bp, Zea Mays
gattgataactcttagaactacgtgctccacttaataattctgcatgggaataggagaggacatcatgcatgtgttgtgcaccaaatgcttgtcaccctactgtatcgacccgagacgaggcatgacatgtacacatgtacctagtgaaactgttgtgtatcgtcgtttctcttcaagcaccatttttccacgttcgtcccgcggaatatttttacaaataactcatattgcttgaaatggcccccaagacaaattctcttcacatcgatcacatctaatccaattcgtttatcaacactctgcacgtcgtgtgagcgtcacagtcacccacacaataacacaaacccacgcacgccatgtcttttgttcatagcaacgaccgacatggcaagtgtgcccacgccaaatgcaccgtgacaagagcccgacaacccatgcacgccgctccgtagaggatgaggaaagcgattttagcagactcacacacgggtaacccatgcccgcgccaagttgcgaggtggagccgtt

SEQ ID NO: 7782 - DNA, 377 bp, Zea Mays
aaactcgagcctctggccaagctcgagaccaaaacagagagaggatcaagcgatgtttcgccgagtgagatagatgtggtcgtcgcacctccaattcgtcaacgtcaccgatctgtgaccttggtgtggcggagggagttcgtcagggtgcacgtggcatgtacgaggtcatcggagaggagaatcgtgtggtgctccgaatgaattgctcgtcgaagcaagcacatcaccacagaaacactagacgtcggtgccggagttattttgcggcacgattgaaggtaatgaggggtatgttgatttcacctaagttctctctatgtgcggtatccatccataggtgatttggggtactagggtgctctggcgcctatcgg

SEQ ID NO: 7783 - DNA, 776 bp, Zea Mays
tgacgcgatcagagcggcggctgcattggccggcgatgaggacgacagctttgggagctgcattggaacggcggcaagtgcagacgcggtgcagcacagcaatgacaagcaacaacacggcgtcgaggcgagtacggacatgagtgggcgaaaaggggaggagggaagctgggagtcggcatggtggcatgacgagaacctccaacgagcagcataggtggtgctcgggtcgtgttttataggcgagggggagaggatggcgatcacgggaattgattgttcattaaacgctgcttaaaccatcatagaaacggtagctattaaagctctaacaatggcggccgcatttttgggaggaagccggtacgctaagaagtcgtgaggggagggaagaggaaggggaactagcggtctgcgcacatggttcttgtggctgctccactaatccggtaggtgagcaagcgggcgtgggaggtagacaggcgcagaacgcagagccgacggcggcgctggacactaccgtcccaaacatgcgtgcgaaccaggaaatggtggtgttgtgccagggagatgaaggggcaaggcagggggcccacacgacatagaaatgaaaggaaaataaatgtgtggctgaaaaagaaattacttgatagccagggccgatttgtaacagagagaatgagagaagtgggacccgcacgttggtgaaagaaagagagggggaaagggccatgtgaacaggctaggcggatgtcgttagctttctttcttttttt

SEQ ID NO: 7784 - DNA, 583 bp, Zea Mays
ctcaaacgctatggcagagtcgtagcttcgcctcggggagcgggaaggggtcggtacggattgaggcgacacctgtggaaggaggaagagagacggcacgacggacaggggaagagaaaagagagtgtgcgagcaggtttatttcttacgaagtggcaggagtcggaggcatatggggtcggcgcgatgagggcggagatgttggccgggaacttcgggaggttgtcgtcaccgaaggaggagggctaggtctcggtagctggggttggcagcgacgagtttgctgttgggaagaaggggtatggatcccggtggagggggttgcggaagaggacgggtgtgcctaggcgttggcgaagtgacgaccggcggcgctgggttgggagtgggcggcgacggtggaggcggcgcctacgccagtggcatgacgacatgagtggttgtatggtggcgcggaggagggggcggtctaggtggcagttgtgacgtctatggggtgtgaggagacgcaggtgcgaggagaaacttgtggggcagcccgagaaggaagatggcggggtggaggcagcgactgccggggagg

SEQ ID NO: 7785 - DNA, 558 bp, Zea Mays
catgagctcgaagggacgggcacactcggggaggccatggcagtcgatcaggtcggcagtggcggcgaaataagcgcaggtacaggtcaccatcgttggtgaaagggtcgatgctgcgttgtgagatggtgttggcaccgaggtgggcgagtacgccggtgaggagggcgccgatgaagagccaaaaggcatcagtgttgtcggagaagaaactcttgcactatgaaaacataggtcactagaacaggatcgccgttgaggaggatgtggtacatgctttgataccacttgttatggcccttggccaccggcataggaggcaggagcaccaggacatgagcgctcaggcctcgccgatgctagagaaaacaacgactcaaggactattatgtttctattctattcttttctcctcttctgttacaaccgacaccctcaagtactctggataacaggttggccaacatatgcccacacacatccatatgctggcccaacatatggcccacacacacatctctatctagccgaactcactcacactatctttcaaaccac

SEQ ID NO: 7786 - DNA, 382 bp, Zea Mays
aacaagtcaccaaggagactaggctatcgtgcctcgcaggaagcaagtaaagggctctacacctaccaaagaccatgccaatcaacacgaaggaaaccatcgccacaaagacccatgaactccaaaaaggccactgaggccaagatccggagggcaaaaggttcaaagtggaaattacatgtcacgtgaagatcttgtccatccaaggaagttattacaaaacggaacaaacaagagaggcgacctaagtgccagtgggcgggtcaccagcaggcgacactagactctagaggcccatcagtagggtcttcatatccgcatgttcagtgagcactctggcatggggtagacttgatcttcaattgcgtccaactcttcctcg

SEQ ID NO: 7787 - DNA, 848 bp, Zea Mays
ctggggaaaggttcatgggtgcactagggtctacggacattctttgatttgggtagaacaagacccgaagaacgggtcgacggtgggggggttacgacggtgtttgacagcgcacaagtgcgttccagtgaggagcttcggccaaactctaaattgccacatctaagggcaataggagatcaaggattaactaaaacagggagcaatttgagagttactgaccagaggaacgctagcgacgaagaagttcttcacggcggagcaagaacgaagaagagagggaattggggctgcgcaagttctctggcgaaatggagttgattgcttaagcactggggtgcgcaatggagagaagaagcggagtccgagctcaatttataggccgtcgaccggagttggagaagaagcgcggactacggatgcgctggcaagcttttccgcgcgacggattccggtgagggcacgggggtcgccgtttaaccggagttcgccacctcggtaaccttttgccacgacgccaaggatatttaccacggccaccgacgaccagtcacgccgcggtggcgttcttatcgccggcggggggactgatcctgatccacggcgggatatttcagatgacagtgaacagtgtgccagcttcagtggacagcttaactgacagaccaagttggagcccagttttctcaaatttttatgtgaaacctaagccaactttctgtagtaaagttgtagaactataatccatctataactttgctacaatgtgctctcacaaaaagtcactggatcccattcaaaatcgagctcaaagttcatctcataacactgttactctgaatttcaaa

SEQ ID NO: 7788 - DNA, 326 bp, Zea Mays
aaagcctgagggctcttttgcagttttatagggccgaaggggtatcgtctaatatcatttgtaggattcagatcctacggctcggattaagtactcccggcgctcaaatctgtatcacccggagccgttggatccccgatccatggtcgtgtactcgccccgcgcctgacccgatccgaccgcaagattaactatcaatgacctagattctattcaccgagatcgaactacattcaccagatcccgatcggatggctcagacttctccaagcgacacatctaatctaaatcgatcgataccagatccatggttcagacaccttctc

SEQ ID NO: 7789 - DNA, 746 bp, Zea Mays
aatttctggaaacgttagggggtctaggggtaagaatctgcagacatagagcaccgctcccacggatggcgggttcattctcaaatatcatagggtttcttatgtaaatgagcagagcgaaagggtatcgggtgatattggccatcagatctgagatgtacgcaccagattaaaacaacatccgcgtgaatcggtatgtaatcccgatcatcggatccaaatcctacggatcggattcgatcacctaaaaggggcttctgggtctgatccgagtcgttcaccagcgatccaacggtcgcgatatgatcgcatgaaggggggcacacattaactaatcctagccctccgtaacgatatcgccggttcgagctcatctctccccttcctgggccatccgcgtggcggcgccgccctcccgcggcggccgaacgccggcgagcatgccatttggtgttccgatgccccataagcgcacccgagggtaccaacacaatgcgcagttcacgacgactctaatcgtaagctcaatttcactaattgagctccaagtgctccagtcaccgcgatggtgcggtccccagatgccgaagccatcacggcaaccaattcccagcccccaagttctctacacggtcacacgcggcgcgatacgatactatgggcgattcgagcaagatgatagagttcttaccgcataggagatggtcagtggtctcggcggcgaggcttgtatccgcggccctctt

SEQ ID NO: 7790 - DNA, 373 bp, Zea Mays
ccggaccgccggttgcaacgaaactgaaagggtgcacaaccgtggtgcggttgcacgcttcttgcgtggcggtccgccttttcgaccgctggtttcggcgaggatgagagagcgcttaaccgcggggcggttgcatgcttcgtgtgtggcggttcgccatcttcgcgtttcgggtcagtttgtatgacatgtgggacctagcccctgtgtcgtagggtgggaaccctggagcacgtcgggggagactgtgcccgtgatgctttgggacgcgagtggggagatctgcctttaaaaagggatcgatctcttgggcagtagccatgccttttctcttctcgcattcatcgcgtctttccatctttcgggcctccag

SEQ ID NO: 7791 - DNA, 364 bp, Zea Mays
atcgtcttgcattgcagctaagcttttgatctagcaatgcggtgttgggtgtaggacacactaggaaataatgcttcactgatcatcaccagcaccagacacttctactaccgcactgcgcactgtcaatattctattgcctgcctgacatgctttcgagacgacatggcgtcgaacgcaagcatttggacggttcaacaccgcaccccacggggctacagtatgcagtgtctcggtctacaagctcggtgttgcctagtagatctatagttgttgttagcatgattgggtgtgtggctgcgtgagtgagtgatcgagtggccacctcatcccggacctgttgggtagggcctggcgtccggag

SEQ ID NO: 7792 - DNA, 588 bp, Zea Mays
atgaacctgcctctcgtcgtcaggaatctctccgagtgaggcaaccaaagcactaacttcttcgggagagggtcatactctaaggcccaaaccgctatcatcagcaggaggatttgacacgaaactgatgaaggcctgggagggaggcaaattccaagtcgagtatgcaacaggagcgccgatgttcgacacctagcctctaagtatcatctcaagccggttcaccaagtccacagtaggaattcttctgttagtcacccgggttgaatcagccaagcctcggtacagataggccgaatatgctatgtctttcagtggctgaatgttcttgaaaacaaagtcaacaaccacagcttctgcagtcagacccctttctttcaacaatccaacttctgctaacagagcccttgccttagccacctcctggtctatgggggattcggtccagctcggagtgcgaacatctggttgtcttcctgaccatggggggagggaattcccatgattctccatgatgaaccattccaggcgccatcccttgatgttgtccttgagtgggatgtcaaggtaatcagacttccttccgcg

SEQ ID NO: 7793 - DNA, 843 bp, Zea Mays
gccatcaaagccaaagagatggagccgcagcacggctcgcttcccaccccaaagagttgggggcgcgagggatggagtcgtggctcagcccgctgttcaccttcacaaggctggtgaacatccttccccccgaatgctggaggaagaagcgggaaggaccgtcgcctccacggacatcccgcggaggtaggcgatgatggctgcctgaaggatgaagcagggcgtaacatgtagaggctggaggccaagcccctccaacagcagcacgaggaaagacgggtttggcaacgccaacccgctggggagtttggagacgaagaacacaaactcttcggtagcgaggtcgtcgtgaggagaaacaccgacacggatccttctggcaaacgccagcacaccccatccgagcgggttgcgcaccaagttgagtgccacctcgggctggaggcgctcgggagggtctagcaaggccatggtggctacgacgacataagaacgtggagaactcgagggcaaaaggacgctgatgagaatggctaccacgcttgggggagtccctttttaaagaaggattcccccactgacgccccgaagagccaaagaagacctcgcccgacgcaaggtgacccagtctctggcacgggggcccgggcccatgagtcatactcttcgagcgtcggcctctgtgtgcggagaaggcgaaccgccgagtgaggagcacaccaccgcccgtggtaaatgcgcctcttcgtctccgccgcgtgaggagcacgccactgcccgcagtagatacgcctcttcgtttctgtcgaaggcagcggaccagtccgctgcgtgaaaagcacg

SEQ ID NO: 7794 - DNA, 312 bp, Zea Mays
acaagcacagaagagaagagggctttagcattgctggggacatgaacaggaagattattccagggacgggtagggtcggtcctttgcagccatagccatctcatcctaagtgccaacagagttcagggaggctggaaattcccaaacctccaaagttcaagggtctacacactttcccccaagccaccatacaatgccctcctttaacctctcttctgcctctccataagaaacctttccttatcttgtcaatttccttaatgacccacatagggaaatcaatagccatagcagtataaacacacatcccag

SEQ ID NO: 7795 - DNA, 683 bp, Zea Mays
aaaacattcagccgctgaaagacagagcttatccggcatatctttaccgagggctggccgactcaacccgagttactaataggagaattccttctgtggatttggtgagtcgactcgaaatgatccttagaggtaaagtttcaaacgttggagctccggtggcctactcggcttggaacctgccttctcccaaagatttcactctttttgtgtcaaatccgcccgtgacagataacaatttgggtcttagagtgcgaccttctgctgaagaggtccgttccttagttgcttcgctcggggagataccggatgatgaacggcagatctactttgaagtgcccctgaaccctagtgacgcagacataaacgacatgctcgatctgctagctgaggattcatctgatactgctcctgatggtacattggcagtggtgccgcttccagaggttgatgcgaccttggatgtctcgaaacctgccaatactcgcccgaggcgtcccagccgaaccagtcagcccgagccttctgctgatgagcagaaaaggaaaagaagacgcctccggcgagtgtctagctttgatgaggatgccagcaccttagctcctactgccgaagaaatgactgcaactggtcttgctgacattgatcccaatgggtgtgctccgcctgctgctgaccccaat

SEQ ID NO: 7796 - DNA, 416 bp, Zea Mays
cccggttgcaacagggagagggcaagcggagcaccgccggcgagcaggcgaccccacgccccggtaacctaatcacgatatggttcgatcccacacaaagagaagaaaaatgtgcatcgatctaggtataactcaccttgaatcgtgtagcaggactccacgacaacgaagcagggcagatccgcggcgaagatggcgcctcggtgagaaattgcgtggtttctagaagtgttcctcggacacaagggccatggataccttcatggtgttatggcgaaccctctgcccttttcctttcgatgcagcgcgcgacaaccagtaaatgccccccaacggtgtcgtgaggttcctggtccgcagcagcactcgcgttttgctagtctacgagtgaacgaaaccacatgatgccagccgat

SEQ ID NO: 7797 - DNA, 439 bp, Zea Mays
ctgcaactagcaatggatggaatcattcatgcatgtcttgtgtttgatttaggtgtttgagtgggatggattgagattttcacaccttcatctgtaattgacatgggccacacgcccacacctgtcataaagggtcatatgctgcaatttgtattagctagactagacagtagcttcttccttgtagccacagcctacggaactgacaatgttgcatcaagcaacgcctatgtcactcgtccactgatcaagctagcctttgtacatggtcaggttgcaacccgttaatcagttgctagttgcagttttgactctgggatgttacaaactgtatttcgagggcacatccggtttggtttacatatcggggtctacaccgctcaatcagtctggcaggtgtggtgtggccgccagtgctaccatgtcgtcgatctcttct

SEQ ID NO: 7798 - DNA, 714 bp, Zea Mays
tgccgccatggtggtcgagtgctttcaccatcgtcgcgggccctctgtcaggtcggggagactcgcctaaccttgcggatgctcccgttgcatcgtcgggcggttggggccactggctcggaaggaatcgcttgccggagtccgtggtggtctgctatgccgctgccgctgtggccggtgatttccacacgtcgacttccggtaagaagtactctattgcgttcgcattgtcctacactccgcgagtattcgatcggttctagggattgagctatgtggccggggcacattgctcgccggcgttcactgcctcgtggcgccgtcgctgttggggcagtcgctcagctcggtctggggtaggtgatgatgcgagggccgttgatctccctgtgttcggcttagattaaatggttcatgttactttggcccgatccgatctaaatcgtggatatgaaattgagtggctgagattagatcatgaaataccggtttgtccaattagatctgagccgtcgatccttgatcctatggttctgagagcttaccggttcaagtgagactgatttaatttgagcccttggtttagatcggacggccaccattcaacgataccctttcggctacgtgtttttcaaaagagtccctgtactatataagaatcaacccgccatcctacgtgactatgctctgtgtcttaggagttttaccccaagc

SEQ ID NO: 7799 - DNA, 373 bp, Zea Mays
gatggagtctataaattgctgcccccgcctgctacgctatgtaattgtgtaactagtaaagcaactcgtgcctcgaatcatcccctagaactcttcaatttcccactctccccaatttggttcccgccgccgtgaaagcatcctcgccctggccagcttgtttcaggttggttcaagctctctggtcgtttgttctagtctccttaagacctcctaatgctatttgacccctctgattaaactagaccgccctggatcaccgagaacgcccatgttcatccattgtccgcgctgtctctgtggacagggtgatctagagtctcattagtgaaattgagtgaggggaaatggttaggaggaatccaatttggtg

SEQ ID NO: 7800 - DNA, 475 bp, Zea Mays
ttacaacaggtgtgctcgtgtgtcggagaaggagagccttcccatttatatctcaaggataggaccttacagtgggacttgtattctactagagagagatctcctcctcgggttggcgtggtgggtcctccgtagggttgtgcggagccgtactcccggcatggcgtcgtccttgtctgctgctctggatcttgtagcgagtccatcgctgacatctttataacggtgtgtggtggtttccacagatcagtctcaaagtgcggtcgtacgtggtgtggcttctcctgtcatcatgtgcccttcgtcacctgccagcgtgcgcaggtgcacactcggtatggctcgttgtcccatccatccgatgtaatggacactgtagagaccccaatgccattcgacgtgcgcatgtcctaacatggcttgatggtgacacattccgtcgtagctgatgtggatcagtagtgttggacgtaga

SEQ ID NO: 7801 - DNA, 632 bp, Zea Mays
gggggatggagccgcagctcagcccgctttccaccttcacaaggctggtgaacatccttccctccaaatgctggaggaagaagcgttgcccccacgggtggcttgctagcggcgatgaccacctcaacgcgtgcgccatagcgaagaggccctcgccccccccccccccccgtcttcctatgagggtgacgacgaggccgttgcggcatcgctggggcgcgaccagtccatggaggcgggccatcagttcgtgcgggagatagagccgcagctcagctcgctctccacctccacaaggctgatgaacatccttgaagccaggcaccggtggaagagcacaaactccctaacgacgagatcgccgagggggatgttgttggtacgaatccttccaccaaacaccggcacgctccatccaagcaggcagcacaccatgtcgagcatccgctcagtctggacacgctcaggataaacttacaaggccatggcgaactacggcgacacaaagcagagaccttgaaggcaaaggggtgcagagggctcggaggcgaaagggcacagcgagtgggagagaagcgaaggcatggctgctactcaagggatgaacccctatttaaaggcagacccccccg

SEQ ID NO: 7802 - DNA, 326 bp, Zea Mays
cataagttgttttgcgtgtcgatttgtactctgtgacataaagcttgacgttttgttttcccagcttggctactttgctgaggcctcgagggtgtttgttggctccgcgatgtcctgagtagaagctgaaaaagcagccctaagaggggaagtgggacgccttcaggccgagctcgttgtcgaggcacgaaggcatgaggtggcagaggcgaagaaccgttagctaaccgtgaaggtggaagaggttggtgagaagggggcacctcgctaggagatcaaccgacacgccaccgccaaggccgaatacctggaagagatggcccgtg

SEQ ID NO: 7803 - DNA, 582 bp, Zea Mays
ggcgagtgtctgagtcgagcagaaggaacatgaaccacccttctcatggtgttcatgatcctcctgttcagacacgtccatcgagggctagaggtgcttttgtcttttgctgctaggcctcaagtagtgagaccatgtggtggtcatgcctagagaattgcttcacatggacattgttggtctagctagggtttgctcttttgggaggatgtggtatgtgcttgtgatcgttgatgacttttctccctattcttgggtgttattcatgaaggcgaaggatgaggcttttactcatgctcgcgatttaattcttaggttgcaaaatgagtttcccaaaaatgccatgagagcgattcatagggatgatgacacataattcaagaatactcattttgagacattttgtgctttttgggacttgaacacaagaatcggacccttgttgagatggctaggatgatgctcaatgagcataggactcctaggagtttttgggccgaagtgatcaacattgtctgacatgtgttgaaccacgtctttcttcgagctttcttaaacaaaacttcatatgaggtgcggttt

SEQ ID NO: 7804 - DNA, 474 bp, Zea Mays
cacggaggtctcgggggtcatctcatcgaggcggagtcgacgatcggacagcggcagcacccgcctccagtggaaggccgtgacaactccagccgcggtgagaccacggtcccagagctttcgtagcacctccgtaaccacttcaggtgggtctggagatcccacggcagcccccacctccacttcttctctgtgttgaggacgacacagtgtgtaaactcttgcagcctcccattgttgttacagaggtagaaccatcggctctaccaccccttgttcgacgagataagggtggcaaggatgtatagtgccgcccgatctgagcgtagctggagcgtgcagccaccagcgcggatggcgtgttgcaccttgaatgtgcaatgagttgtttcttaaggcagtcactagtcggcaatttggatgtagaacgctaccctcgtccccttgccgattggtgactgacttcgccttcgc

SEQ ID NO: 7805 - DNA, 746 bp, Zea Mays
tttgaataagtgccgaggcgaaggggtatcaagggtttctgaccgcacgatcaagaatggacgtgccagattaaatttaagctcccgactctctcccgaccgctcgatctacccgtgaacggcctggattaaacgtacccacgacccaaccggtatgcatttacatcggtcggatgaaggatcaacggttcagatcaatgctacgaaggggtatcttctagtctaatctataccgttcgtatcagatcagacggcaccgaccccatcacccccatcggtcaccagactaaggcggcgccacccacgccgaacggcggtgttccaccggcgcatggagcccaagggatttagcgccccaaaatctaattataccgatgctagacgttgaagggacgaagatgaacaacgtagggtcgtcctcaccttagtttagggtggtcgcgacgtcgttccacggcgaacagggggcccgcggcggcgcaggagcgacggcgaggaattcgctagtgtcaggtgcatccaaaccgacgctgatgccgcggacacggtcgccgaggcgtagcacttctccgcgaccctcccggtttgagcaggtcacaaatcccagcgaagtcccttcccttgcccacacacgacaacaatggcggcggaaattctttgctggggcgttgacctacagacgcaggggtagggagaaggggtcggttggctatataggcgtgggggaagtgcttcatgcaacccac

SEQ ID NO: 7806 - DNA, 538 bp, Zea Mays
gttttcggcatcctacaacccaattgatccaagtatcccagcacactagggcaacgcatagaggggacgaaggcggacagggcaagggtcctcataccaagtattctgccgcagggaggtacgaccacgccggggcgaggttccgcggtgtccatgtagcgacggcgagaaattccgcccgcacgaagccgcctccgcccaatcgcctgccaccgaacggttcctcgcgttgcgcccgccgattcccaacgccaaacaggacgttgaccacgcactggtggcggcaggggacttccgccgtggatgcgcacaccagcttcctcgcccacgccccttgcctgaccggagtggaaaaaccctgaacccaggtggctatcgacggtgcacgaggtagcggaccaagggggcgccccacgctccaggttttatggggagggcgagcccggagcgatcggagcgtccacggccaccttgaggagcagcaccgttggtttcgcggttagttgaagatgcctgacgcttgggtcccacaaatcag

SEQ ID NO: 7807 - DNA, 801 bp, Zea Mays
atccgtctgtttgaggatcagggtgctacagctgacacttccttagacgatgaggatctgtggattctaccaccacctcctgtgccacctcattcccatgatcacgaggttggtggctccagtgttgttccttcggctgctcctccatcgattgaccctgcgttggatgctatacttcagtctctcactcaacagcaggctcacctggcagcggagctggcccgacaggcagccatccagcagcagatgttcgagcggatgttgtccatgttccagaccattcaggaccaccaggacacccttcaacaacagctcttggcagacatggcagagcatcagacattcatgactcatatacttcagcacaccggtgtttctattcctccaatgtagacagctccgcctcctgctctttaggctaccgttgtgccagctattcagtcaagacctcagctacactcttttggtcctccatctctccgctcaggtcggtcaccctgtacttctctacccagatcgtcggaccagtcatgcttagccaccactgcctccagtgtctgctgtcgccactcctgtcatgtttatctctgtgactgctctagctccagcagatctagcaccgcagccagcatccgagtcagcaccagcctctaccgtagatactggatccgagactgactccgacaccttgctcacgtttgtgctgcttcctcgacctcgacctgatgcgcctgctcctcctccttcttcctctaggctctaggctagggtaacccttttggtgtttaacgccataggggg

SEQ ID NO: 7808 - DNA, 573 bp, Zea Mays
tatgctgtccgcacgcatgggaaggcaatggggcagggtactccactgctcggataaaggtaaggagccgcataataccttcgtcgttctacccgctgtgtatttcatgggttggattaaagcatcggcactctaaactcgtggtctgggggtggtcagaaccatcggcgccgcctcggttctcagcgtgagacatgggagagagaaaggggaggcaggagcacgtgaggttgaagatatacgatgaccatcggatctgttcccaacgcacgagattaagggttgtgaaccgatcaccagggttgaattaccatcgttgatctgaaatcgtgtggtaattgaggggacctcgtttcattaaaccacgaccactgatctcggatctaagggccaatactggataccggttcggggtggtgctcgatttaatctgagccttccatctcagatcagacggcccagccagccccgtaccccccttcggtgccgcaactttgctaaaacgcccctgataaattagctaatcaacccgccatccccgctcactgttcgctgagtcaagggaaccttgcg

SEQ ID NO: 7809 - DNA, 440 bp, Zea Mays
gctacatgaaccaagagcaaagaggaaactgagccctatagcagggcggccggcctagactgggtgcactcgttccctggcctgctccaacgtttgttggttccccaagctgcttggcatacaatctcgatggaccttattgaagggctaccacggtcttaaagttttgactgcatattagtggtggtagacgtatttactaagtatgctcactttattccattgtcccatcctttttcagttgttaccattgctcgatccttctttcagcacgtttacaagttgcatgggcttttagttgctattgtgtctgagcgtgataagattttcacgagtattttttggaaggaactcttcaagctaaccggggtcagtctccacatgactagcgcttaccatcctcaaacagacgggcaaacaaagcgcattaatcaatgtct

SEQ ID NO: 7810 - DNA, 489 bp, Zea Mays
ggcggaccatctttgacatcttcgggccgtcctcatggtgctgcagcagcacgtcctcttcgccaagcgctccaaatgcgtgataggtgagcgctccatcgcctatctggggcacgtcatctccgacaccggcgtcgccatggatcccgccaaggtgcaggcggtggcagattagcccaaatcctggtcgacgctggctgtacaggggttcttgggtcatgcgggctactagcgcaagtttgtccacgactacgtcacgattgcagccccactgaccgcggttgaagaaggaccgcttcacgtggaatgacaacgtcgccatggctttccaggtctcaaagtcgcgatgacctccgatccagtcttggcgcttctcaacttcacgcgcccgttcgttgtggagtgcgacgcatcaacctacggctttggggcggtattaacctaggacaagcaccccattttatactttagccggctgatggctccccg

SEQ ID NO: 7811 - DNA, 287 bp, Zea Mays
cacggaatccattaataaatcctgtacagattttaggcctgcacgtacaacgtaccatgcctggaagcgtttaaactacgcagtacgcacgttcttgatcgagctctcgaaacaaacctatatatctgtttgaatatttgttccagcattctgggcgttcagttttctcaggctggggtggtacaaaacaaacacgtacgcgcgagcgagcacgagtctgtagctctcaagcatacattcatatacatgcatgacatgtatgaatggtgaagattaaagtattaaac

SEQ ID NO: 7812 - DNA, 310 bp, Zea Mays
cgctagagtacatatacatacagttcacaacgagatcttgtaataagcgtacagtggcgtgcagtagcctatttatccagacagatccaaaggcacaggcgccactggaccacgccacgcttcgccgtttgaccctgcttctcctggtcgtgtttttttcctcctccgttgagagctagcatttggcatctcttaccgaccaggtcgcgtgtatatatgctagtggactgactggtcgagtagaatctgttggactggacgacgcgagattatattccgttattcttcgtgtattgacgtgagctggtgt

SEQ ID NO: 7813 - DNA, 443 bp, Zea Mays
aaggagagggtgcagggattgcgacgttagagttgacagtagcgacgaccctccacttgtgtcgtggccttgaccctaagagctcctaaaggaggcggcctaggtgggagtgggcatcgaggaggcaaaggaaggaggtggactctgctgctgtgagtctttcgccaccaggagacaacgacgacgcagggagaccttcctggtcggacgccagagcggtcttgaccccagagctcctaaaggaggcggcctaggtgggagtgggcgttgaggaggcggaggaaagaggtggactccgttgcaatgaggctgaggaaggaggcggcagaaggagatgtgtgtagggtttagcacctgcatctcgcggcaggtcgttgggtgaggacgcgggctgttgcggcggggcatcaattcactggcgggcatcacgcgacgggggtggg

SEQ ID NO: 7814 - DNA, 484 bp, Zea Mays
ctccaatgtgcccttccaggcgctctgaagaagatcctaatggtacagtgtctgaaaatatcagtgatgcagtgcacctcgccgctggtgaccctcgcgccgtgatccgcgccggtactacgattcgtgctctctggcgaggggattgtcgtggaggggtaaaagatccgaagggggagtggatcaagccgacgtcgccgtacccacttgcccggcgacgtggtcgtgtgaccatcaccatggttgccgctgttcacttcagttgcgctacgccataagccgttttaccacgccgttgtaggtcgtgaaggctaagcagtgaccgccgtagacccttgcccagtaaatgccacgataagcgactccggtgactcacccctctctccggctacagaggtttcccttttataatttggagccaccactcatggaggctataaattcagtgtaccgttggctccgctaggttgttacgaagccaaag

SEQ ID NO: 7815 - DNA, 284 bp, Zea Mays
aaagcttgcaggcgaaggcgcggcattccattgtgcgccggaaggatctttagccggcggccatggcgctgggggtgttagtggtggaggaggggaggcagcagcaggaggcgccgccgccgctcgccgtggaggcgcttcgcgacaaaatcgtcgagaaggtgaaggcgaaccgcgtcacgctgatcgtgggggacactggatgcggtaatttccggcggtttccttctcacattaccttctcgatcggttctactgtgtgtgtgcacctgatggtttgctgt

SEQ ID NO: 7816 - DNA, 1035 bp, Zea Mays
gtgataggaggcccccgactgcctctccgtgcgcagttcataactcagcatttgcgagagtaattcagaaggtgtaacaggttctatgcgagtaagaatagatgaaacgagaggattgtagcgttcctcatcaagaccagtgaggagataggatacaaactcttcgtcgttaaggggctgtccggcagcactcatctcatctgcatagcctttcatcttggtgtagaagtccgtcatgttggcagtgcctttctttgtggttgccagcgcaatgcgcgtattgacggagcgagcacgggtacgggacgcatatgttgcggccagtgtgctccatacctcggccgaagagggcagcgtggcgacgttggtgagtacatctcgtgtcagggacgacaagagataccccaaaactgcttgatcacgcgcaatccaccgagcatactcggggtttggttcggtcgtcgaggcatcgccgatcttgctggcgatacgggccgggggctttggatcagcacccgtgagaacgtcttcgagttgcgccgcgcggatgggcggcaggatttgagcacgccagagcacgtaattcgtgcggttcagtttttcagaaactggaattgagaaggaggaggggatggtggaggagaattcatgcgccatggatgaaaaaagaggctggctatggtaccatgtaaacctaataggatgaagcgttcaaccaccattggtggccgcaggttgcatgtttatatagcgccgtataccggacgaagggtgtatacacggatagagtttcaggtggttaagattacacagccgaggcttatctatagcctaatctctatctatggctaaccaactaaccacccgaggcaccagaggatagggattacaattctgtctaacacaaaggatagagttgtccgggaaccggtttgtgaaagttgagtaccttcacaagttcacatactaacagctactcctactcatatgtcctagcacgatactcactccttgcactcaagccttatgaacgcc

SEQ ID NO: 7817 - DNA, 1263 bp, Zea Mays
aatttggagataatcatgctcaaactttggctgtcaggctgcttaagtctgaaaatcagactgacagtgggcggacactgacttcaaactcaattctgagcatgatccaatgaaaatctaccttgggctgctatggcaaagttatagctggttggtagcactccacttttgctgcagagggtcggacctggtaccatagaaaatctggagaaaaagagctctgaagttgctctgtcaggcatgtatcaagaaactgaaactgaactcctgatggtacagtgacccgagtggctcagaacgccagcatagcctgctcgccgccggcgaccctccctgcgctaagatttgcgccgccgtcgtctcaattcgtgctcaggatgacttgataaacgctcggagcacaccgccggggataagcccggccattaaagtatcccggccaccgtacaaagttccccgcggtagaacccgataagctcgctggtaaccgccgcctcccggccgtgcgctgcgtggcctagtcgttctacagcaccgctgtgacaccttaaggctgtcccatcgtcgccggggagcctgccacgccacgggacacgaattcaccgcgcccgccttcttcttcatttccggccgtcgcgcgtcctccccgaattcactggccaccgccttaccctcctataaattgagcccgtgaccagctccgtagggtcatcagctaaccagccaccgccaattagccacgatcgttcgccggagctcgggaatttcacgttcgccccaaattgggtttccgccaccgtagaatcaagctcaccgcggccagccctttctaggtcagttcatccctccttctcctttgttcgagcactcttgtcacttagtgatgctggtcgaaccgccaattgggacggaatagctctagatcaccgggaacgcattcatctgtccgccacctaatcggtttacgcggacagagcttaataggtcgccattcgtgcaaatgggttgggagaaatactcggggtagatccaatttggtgtctgttgctcggagaatccagccgtggccccaatcggccggtacaagcgctcgccggagtgctccccgcgctgccgtcgtcatggacttgggcgtgcaaagaattagaaatcaagggggctcggtgtaaagcgttagcgacttagtgaatagtgcttcggatctacttcgggttgttctgaaacgcaaggccctttttgcaaagccgccagggcgcgggcgca

SEQ ID NO: 7818 - DNA, 1864 bp, Zea Mays
ccccatttcacattctagatcataattgacaactgaatcagctttcattcacatgtcaagtgcactgcacacaaccaacctggcaagatagtgaataactcaacctatcctagagtatcctctactggccatggatgccattaaatcataattgttgatctaatcacaatcttggctacaaagcccatctgcccttgactgcctattagacaaaaggcctcccacaggaattagtccggaacttattgttcacatagtaaggttgcagctactcaaagaattcttcgttattcaagtggctgcaataacttatccaagggggtgtgatctgtatgtctgatgagggctattaaaccatccaaagttttatatacctctttccttttcttgtgccttgtgtctttagccaaaaactcatgtacctcatttcctacctgaatcaagctactaccaggtgttttctcaactccgcaatcacgcattgttctgcgagcatccatcacactgtcccaccttccctctagggcactacaatttgaaaccaacacttgataactagaattaaaaggttccatttcaactatctttgtgctgacatactctgacaactctgcatcaccatgcgtaatgcaagaactaagcaaagttacccaaatgacaaccccaggcttaagaggcatgctttcaataaatcgaactgcctcttgtaacttaccagctcgaccaagtaggtccactatgcatccatagtgctccattcttggaacaatgcgacagtactcaaccatttgattaaagatgctccaaccttcttgcaacaaacctccatgagcacaagcaccaagtgcagcaacaaagactgtatcatccagtgtgactccttctctgcacatatcattgtagaccaatagggcttctctaaactgtccattataagcaaaaccagatatcattgttgtccatgtaatggtacatcttgttttcattttattaaaaactaaatgtgctcttcctacatctccacattttgcaaacatatctacgagtgcatttcctaatgcaacggttatatgagtgttgcttttactaatgtaagaactgatccagttgcagtattcaacactgcctagctgagcgcaggctgagacaacacttactaatgttgcttcatcaggcatgaatcttccctcaagcatcatctgctgaaatgtgcacagtgcatcatcatacctcaagttgtggttgtaccctgtaatcattgcattccacgaaaccaaattcttatcaggcatctgatcaaatagcactctagctgaatctagttccccaatctttgcataagcagagaccatagcagtccaggaaactacatccttccgatccataatatcaaaaagtgaccatgcagattcaacattgccacttgttgcataccctgagatcatgagattccaagagatggcatctctgatcggcatcctatcaaacacagcacgtgctgacaccatgtcccccgccctcgtgaatgcagcgacaatagtgttccaggagacaacattcctctctggcatcgcctcgaacaactccatggcccctgctgcgtctccattcgacatgtacacaccaactatggagttccacgaaaccacgtctctattagccatttcatcgaacacctggcgagcgattccaacatcacccgggtcgctgcacttgtagtacacgttcaggagagcgttctgcacgaccacatcggacccgaacccacacctcacgatctgtccatggacgcaccggcacaggaacagccgcctcaaggattcgcacgcgcgaagcaggaaggtgaaggtgaacccgttggggt

SEQ ID NO: 7819 - DNA, 661 bp, Zea Mays
acatttgaggtcacaggaggaacagaatcacttgcagttgcactgccactgccaaccacattggacccggggaataagacctcaacattagcacctcttcgtccaccggcagcatgaaactctgaacatgtcaacagatagaggtcaagtcaatactaggcactagatatgctactgctgggctgatggaaactggttggcagagatgaagctaagtactattgaagtaaggcagtagaacatagaggtatagaacactagatgagcagggccagggcagactgcgcagaatgcaaattcttggcaaaactgccgtgctgcgcagaatgtaaaactgcagagtgcagagtgcagacaagggggaaggaggggagcagggatgaccttcggatgacgagctcatcttgctccttgtagatgagcagggggcagggacgaccttgagaggggcagccgccggcgatggtggacggtggagactggaggctagagcagcagccgccagacagaaacttgagaggggcgcaggcacatgcacagggaggatttagggtttaggggcgccaacagatgtatgcggctactgggccaaaaaaacggtgaagcccaatagcacagccacatttagcccgccagcactggtcgaccagaacctagctaa

SEQ ID NO: 7820 - DNA, 745 bp, Zea Mays
acacggttgaacaaaaaccacctaagggcgcagccaggtacgcgtcataagcgtccaacatcgccgtggaaagcgaggtccccatcccattctacgcacaacgattacaagtcaggacaacctcacaaaaagcgcagcatgcgatgtcattgtagtttacatacacacagtgaggggcccgccaaccatattgcacaaacaaaaaaatcacatcttgttgccctccctctctattgcgagccggggagggtagcgttttcactcactaccacaacacgagagtgagggcagcagacatgctacatcggctcagccttctgaataaggcctgcctctcaaaagttaaacaacatcatcttcaactcctcgccctcaaaaagattccaaagatccccctccccaatacacgtcccggatgtcgaggatagcaaatctcgttggccgcctcaatctagccgaagacgggatcgttccatccccatccgtcgacgcctcccacttcgcgatatcacgccaacattgtgcttcgactccaccttccgccagcagcgctcttcggccatcgccccagccaagggagcagacacttcgcgcacttcaggctgcggcaaggactccgccgcggccacattcaacgcaacaaaataatctaaatcttcatcagaagactcctcaatccacaaaaatgggctctcaaaatcacccccatcttacgaccaagactcagtttcagaaccagacgaat

SEQ ID NO: 7821 - DNA, 521 bp, Zea Mays
gcagaggccttctcagagcattattctattactgcgagggatactaccgagatagccatgcaagatgctgcacgacgtgcactttaacagtattacccgttgttgagcggggtagctgatggccttgaccagaagtactaccctccccgttcgaccgacagtgctggaggtgtgattgtctcgccctttggtgagggcaatcctaggttgaacattatggtcaacttggtcgtcgtgctcaacaccgagctataccacgcccatgacgagttaggcaaggttcgggcggaggttgcggaattgcatgctgagcgtgcagcgcgccactatttggatggtggttctcctgcccctgtcgggattcagcacccttaccattctccgctccgtggtcgctttgattatggtacccctgactgcaggacccaaatagatttggatccatagatctacggaatcagagtctgtaataatgcttacttcagtgtcttagttttagtcagtcttagtcagagttagat

SEQ ID NO: 7822 - DNA, 331 bp, Zea Mays
ctggatcatgtgcgaacgcttcagaaccgcccattcacagatctacggttaccctctcctttcctctcgatctaaccctaggtgttggattgccatccaacggttacctacattccccgctctcaacaaatcgtggccgaccaacccgagatcgacgaccaacacatcttcgtctccaacgggtcacatgccgacgcgccccagggagagatgtagtcatcgacggtggcgccatggccggaaggtttcccaaagccaacccgtgtaccatgctctaatctgaggagccccacacgatgccctaagcaagggaaatgcaatggacatatac

SEQ ID NO: 7823 - DNA, 819 bp, Zea Mays
gatcgacaacctattccagcctaatctggtgggggaggtgtcttcaggccgactccctatgtcgtcgcgcaccgccgcatcacaggtacattcatttcatgaatcttttggcaattctactcttaccctttattttgcttgggcgttcaatatatattctctattgtgtggcatataattcggattttcaattcagctttgcccttcttgcaaccacggtaccacaccacttctgatttttttttgtttcctttatgttagatagatctttgtgttgtcgatctttcttttcaattcgccggagaacaatagtgtgatgttcatgttatctgtcgataacataactacataagcaataaccaagcatgacaccctgatcgatatctatctgaatctctgaacaaattgtaaatcctgcaggcaaattaaaccgtagatccagacacatcactacaccagatgagtgagcacaagatgtacatgcatgtaccagcagtccagcacacagagaacgggcagctggtgcagcccagctgtgcacaacatttgctagctgcctcgcgcgcgccatgcatcctgcagcggcacacaaacacgccggaggcatgcactcacgttcttctccccctcctcgctctaccgtgtataccagtctagctacgtactgccagtgccagcagtctgtgccgtgccagctagctagtcgatgacgaatatggcaggaaggtaacagctagaggccgccaaaagatatcatgctgttggggaaacgccaacgatctcttgttgcccttctcgccaccacgtcggtcgtcgttg

SEQ ID NO: 7824 - DNA, 845 bp, Zea Mays
ccgaatgggaccttcccgatcaattcccccaacttaattttatggttggtaatctatcaagctctgtccatgcggaccacggacgatgaggacaattgcacgcgttcccggtgaccagtggtttcctagtgcaattgggtgggttggcgagtatcacagacgtatgagaatgcttaaacaagggagcagaggggaggagttgacctgaattgggttgaccacgacggggtgtgttttacggtggcggaaaccgaattgggggaaatccaaaattgaggctcactagcgatcgactgaggatgattcttggcggctgggttcgtgatgatccaacagagctcacggcggggtcaatttgtaccaagtgaaagcggtggccggggatttgagcgacgacccgcggcggtcggagaagtaagagttcactggcgcgcgattagtgtcctattaccgtggcagtcattccgacgagccatggagagtcacaagggttcacggcgatgtggtggacaggtagagacacgccgcggacggcggtgatggcttaacagcggtgagaaccttatccaagggatcagtgagcaaggggagaggcacggcggctagccggagtggcgtccagctcatcgacggctatgctttttcaccccgcgatgttatctacttgccacgagcacgaatccagacaccggcgacacgaatcacggcagaggtatcatcggtggtgagatcactgaagcttatcttcttcagttactgtaccatggcattcctcttcagtccatctgacagagctacttcagggcaattcctctccagatttcgcatgacaacttcatcacccc

SEQ ID NO: 7825 - DNA, 821 bp, Zea Mays
agatcttgctgaatgaattttgtggtttttgagccatcctggtaaaccttggcatggccagtggagagacaaacgcagggaacacccagaggtgtgcttatctcatctttaccttgaaacacactgtttgttttttctagttctagttactactggaaggctcttcagtgtttttttaaaaaactacccactgatgtgctaactgcgagacttcaagatttttgtttacagaaatcttttgctatttaagtagctgtcagaaatcttgggagcactactatatagacattttaatataaattgtgagtgctggtagccttatcttgtctttctgtttagggggaatacccttccaaatggtgacatctatgttggcaactttgctggtttagttcctcatggatttggaaagtatatgtggacagatggaactctttattatggcgagtgggatacaagcaagatgagtggtagaggagcaattcagtggccttcaggtgcttcatatgatggagatctttgtggaggtttcattgacggaacaggcagtttcaaaggagttgatggatctgtatataaaggttcttggaggatgaatagaaagcatggaatgggcacaatggtttacgccaacgatgatacttacgaaggtttatggaatgagggcttgccagatggatttggtaaatatacatgggttgatggcaacatctacattggactttggaaatctggtaaaatgaatggcagaggagtgatgcaatggacaaatggcgatactcttgactgtaattggcttaatggactggctcatggaaagt

SEQ ID NO: 7826 - DNA, 644 bp, Zea Mays
attttttggcggctgcgaacgtagtgcctgctaatgaaacccccgactggcgcgaggtccgaacgccgacgacgaaaacttgtggcgaagcatagcgttggcgagatatcgcgaagtggtaggcgtcgtcggatggggctggagcgaacccgtcttcggatagatcggggtggccaacgcgatttgctgtcctcatcgtttgggacgagtattggtgagggggatctgcggaatctatttgagggtgaggaattgagaatgatgttgttcaattatcgggagcaagggcattatcccaaaggcttagccgatgtagtgtgagatgccctcactagtaagtcccctagctcgtaataaggagggaggggagagctcgattgtatttatctgtgcggtggggctggtggcccttcgttgtgtgtatgtaatttgtgacttgtattgtaatgtggcatgttacccttctcttaccgatgtgatgtatttatttgtgcggtggggctggtggcccttcgttgtaatgtgtgattgtgcggctgcacccttaggcgacttttgcacggagttgtcttttagtaaagactgtgtatcgcgcacttgttgtgctcgtccggctgcacccttgggcgacttttgcacggttg

SEQ ID NO: 7827 - DNA, 324 bp, Zea Mays
caagatatccatcttcacctctgatttctgaggcacacaaaggcggcccctgaaacgaaccaaatcattctcatcaatggagaactcccggggtttaccatcaccaaccctctttcgagcttcctgcaataaacgatcctgctgctgagccgcacgcactctctccatgagggaagattgaataagcatacgagtctcctcactagcggtgccgacatagcacaaagcgatccccaaacggtccagatcagcgatcaacggcaaagccacttttggaaccccggacctgctaagggcatcagccaccacatttgccttccccgg

SEQ ID NO: 7828 - DNA, 534 bp, Zea Mays
tattgccttgggttgccttagccctcctagcgtcgtccataggggggtgctggcgattcttgatgtggcattctgtcttgtctacccgatgtttttgtccctgtagcttatctgatgccaacatagtggtacacggcgggtcccgcagagtggcctcatggtgaggtttagggttgtatttagtacaacttcatcatctatcatgacccttgcgtcacctatcggtacgcgttggcatacaactggtatggcgtactatcccgttctttcaggtaatccgatcactgtagaggctccgatgctgaggtacctgtgaatgggtttaactggtcccaccggtgaacgggggcacatctgagaacgtattgggagtcgtgtttgatagaggccctttgacattgttcccctggtacagacatggtttggtgatggtttgttttatcgtactgacgttgctcagtggtactcagtcagcccccgccccctccccttgacctgtgggtctgcttgctagagggttggtcggcaactccg

SEQ ID NO: 7829 - DNA, 541 bp, Zea Mays
ctatcagtggtaccaagtcatctttggacaggaaatcaagcatgatcgagtgggaattgggctataattgttatggcaagattatagctgaatcattggtctacaactttgctgcagagttttaggtgagttgccatagaaaatttagagaaaatctgccttgaatctactctgtcagaccgactgaatgcaattcgcgatgggtaaactgaaatggattaagctgccagctcagttcagttcaccgccgatgatcgccgcgcgtagatttgtgcccttgccgccgtgattcgtgaccagatcgactggataacacttgaagtcgtgtaaagatcaccgccgtggataagtccggccagtaaaatattccggccgccgtaccaagctcaccgcggcggaattcgataagcacgccgatgactgccgccttccggccttgcgccacgtgtccaggcacttccactgcatcgccgtgacctgctctcgctccccgttgatcgccggagtgactgccacggcgtaggacacgaatttgttgcgc

SEQ ID NO: 7830 - DNA, 372 bp, Zea Mays
acaactcatttgtaatctgtataccctagtgcaattccaatacatagcctcaacaggaagtagggtgttacacattctagcggcccaaacctgtatatatcattgtgcaaatccgacgtgctcctacacgtaccatcgagtcgcagtcaacgatgtcgtcctactcaagagcatcgcgtggggaacctcgtggtgtgcggttgggtcataaacactgagagctggtgtgccaggtagggggtgcgacgttaatccatgatgactccatgactatcatcttcaacatcccaatcactttcaatgctggggaggtcttctactttggctccctctcctacattgcagaccaagaaggcgtcctgcactgcatag

SEQ ID NO: 7831 - DNA, 555 bp, Zea Mays
tcttcacccagtcagagttgaacatgagacaaaggcgatggctcgagctgatcaaggattatgaattagaaatccattatcacctaggcaaagcaaatgtagtggcggatgcactcagtcgcaaggcttcctgccattgtctaacaatgaggacttctgacattacattatgccaggagatggagaagttaaacctgggaatgattcagcaggggacttcaaatcagttgaagctggagtcagtcatcttacaaaggataattgacacacaaaaagatgatgagggtacgaaacacatacgtgagaagataagggctggaaaagccaaatgtttcaaagaagacgatcaaggtgttgtatggttcaacaaccgcatagttgtgccaaagaatgaagagctccgccgacaaattttggatgaagcacatcttagtcactattctattcatcctggaagcactaagatgtatcatgatctgaaacagcattactggtggacgaagatgaaaattgaaattgcatgctatgtggctaggtgtgacacttgcagacgtg

SEQ ID NO: 7832 - DNA, 357 bp, Zea Mays
attcatgcttgtccgaagggctgcgtgctattcagaaaagaatacacggaggcaaagtattgtcccaagtgtaaatcatctaggttcatggaggtagactctggtgatagacagaagaggtagctcgacatccccttgacaatcctacgacaccttccgttcataccgaggatccagcgtctgtacatgacagaggaatccgcgaaacagatgacatgacataaaaatggaaaacgatacaatcctgacaagatggtgcacacatccgatggtgaagcatggaaacactttgatgtcattcaccgtgagaaagccgaagaggctcgtaatgtacttgttgcgctggccacatatggg

SEQ ID NO: 7833 - DNA, 499 bp, Zea Mays
gtggggcacccccttgatccgtttcatcgtgatccgtcgttagccacctgggattagggctttttcactccagtcaggaaaggggcggggcgggtttcagccgccactgcaatttcgcgtcggcagtagaaatctggcgcattggtgtctgctcggtggtagttcgggtcatatccaagccgtcggagggattaattagtcagcgaatcaccacaggattgggaattgctcgccggccattcaagctcgccgcggattcgcctggtaccgtagccaagcagcaccgccttacattcgcaggtaacctctgtcctatttcattcctagcgctgtgtgcttcgttttgtagccatcaatttgagcctcgggccctggcacggcgatttgggtgctcaccggatccgtcaccgccgccgtcaggggggaatagtcacgcgcttcagaccggggtaggagacagtgtagtgaccgtccgatccttctcggtcggctgcgatta

SEQ ID NO: 7834 - DNA, 468 bp, Zea Mays
ctgccctcattggtctacaagaattgtccctggcaaactttgatcagactcttgaagatatggttccagaagacctgttatcagagccagcggatgatggtgtgatggaggtttgtgctgatgtgctcgacgctgggttgggatcgtcccgggcagcatcccgcgcctcatcgaccttagagcgtggtcttgagggtcaggaaactgacttggatcgtcttgctcccatggaagtaattgagggaccctcagccttagaggcggctactgcagagaacttggtcctcaaggatggtgctgacacttgcccagcccccgaggatgttgccggggatgactcggctcgggtgggagacgcaagccactgcccagcccccgagggtactgccggagatgatacggctcaagtgggtagcgcaaactatagcccagcccccgagggtatccgagcggggtctccctcttgta

SEQ ID NO: 7835 - DNA, 276 bp, Zea Mays
ggcgttggtagggttccagcgaagggtagggtgaggatggggatcctctagtggtcacgtcgaggtatgggtcggcgtctttggtgcccggagctggtctggccacggatccaggcggcggagcttatcgacgatgtctgcaccggccataccacaacagtagagctcaatcagaccgcacatggaggttcactgattggcagggagtgtgtttatgcaaggaatcgacgaatggatggttagattacctggaccgagggaaccggtggaagggac

SEQ ID NO: 7836 - DNA, 610 bp, Zea Mays
ctatctcgccatccttgatgactgctcccacttcttgtggacctttcctctccgcctcaaatccgacacatttcccactattgctaattttttctcttttattgccactcaatttggcaccaccataaaaaacttgcaatgcgacaatggtcgtgagtttgacaactcccacgcacgagctttcttcctatcccacggtgtccaccttcgtatgtcgtgtccctatacctcccagcagaatggtagagcagaacgtgtcctccgcactgttaacaacatcgtccgttccttactctttcaagctcaccttcctgctccctattgggttgaggctcttcacaccgccacataccttctcaatctccaccccaccagcaccctcaattactccactccccatcttgcactctttggtcgccccccatcttatgaccatctccgtgtctttggctataagtgctatcccaacatctctgccactgccgcccataaacttgctccccgctccaccatgtgtgtcttccttggttactcgtctgaacacaaaggctatcgctgtcttgatatctccaccaatcgtatcatcatctcccgccacgttgtgttcgac

SEQ ID NO: 7837 - DNA, 672 bp, Zea Mays
cggacgggaggtggatttggtctcggacgtgagcttatcggccgcactcgattgcctagcgacgtggtcgagtagccgatgtcatcgggggacatcggcgatctcagtcacgccacgccataggtcgtcttaccacgtcgtcgcgagtcatggagagtaactagtgattgccataggactttgccccagtgcgtgccacaatgaactcgccttagtagcaatatctcgtcactgttgtgatccaattcccgttcaaattcggagcaaccgtggctggcttctataaattgagcgtttcccttgctccgcccccttgtcacgaacccaacgcaaccccaaccacgtcatgccatccaccatagcccgaggaattgagatttcccccaaatcggtcacccgtgtcgccgcgaggcatctcgccgtggccagagccctctaaggtaaccatggtcggacctgtgagtgttttgagttctcttacatgtcgtgatgctcatcgacccgcccgattgaactctaccatagccggaaccccggaacgtcgtgttgccaccgtggaacgccgccgcagacactccctccatcgactcttcgttctgtcccttcacccgtctgcctagccgtcgttcttgagtcctagtaagttactgaaacttatcatgctcccaattc

SEQ ID NO: 7838 - DNA, 422 bp, Zea Mays
cagggatagagagtgagggagagcagtagaggatcaacttccgtcaacaccggaaggagaggcgagaccgtgaggcgaaggcggctacgatggaggcagcgtacacaagggagggatgaggcgacgaggtgctagggttctgggttctgaacttatggcagagcgacgtacacgagtgataggcagggacgaggtcggacggtgggacgatgggttaacccactattagcgggccttagccggaccgacctgtttagcgtgcttaggctttcactgtgggctcgcctagcggcccaagcccggcactagcaacgagtccaagcccgacacaaacgacaggtcgggctggcacgacagtcagtgtgccgagccgactctaggcccttcctcaccgtaccgagccacgtgccacctaacgggcc

SEQ ID NO: 7839 - DNA, 667 bp, Zea Mays
cttttctggccacgtggcgcccctggagccatccacgtggtggggtcgggtgctgttcaccgcgcggctagagattgccgcatgggcaccgtgccttcatactatagtaaggggtacccctgattcagggtaccgacacacttcttcagaaaatctttgaaaattctgggcgtcacacccaatgggtgtgcccaaggggtgtcttggtatgcagagtatttatcgcgttgtcctggtgtagtaatttgatgtgaccgagaggtgtaatcatttgcctcagtagttgacttaggtccaaccggtgccgtgttatgtgaagcagcgcctgttgcctgacttattttcaggcgacttgaattgcttattgaattcttgcgactgttcgacgagcggggtaggaagtggacggtcacccccggcctctataaatagcctgcttgccccagctattctcttcacttgctcattgatcacttgctttcttcttcttcttcacttcctccctttccaaccgaccatgggcaggggtaggaggggcagaggttggcctcgccgcaccgacgacaagcgcaatcgcgctccgagtcctccctcagaggacttcagcgactcagaatactcggaggaggcctcctccgagtatgatcgatcgcccgctccagcttct

SEQ ID NO: 7840 - DNA, 630 bp, Zea Mays
agcagcaggccaaccgccaatcagactctagccccacctgcaggctcgcatcctcccctgaggtgggcctggggggccactgtcggtaccctaaatcaagggtaccctcttctacagtatgaagacgctgtacacgtacgacgtctccaggtcacgctgagaacagcacccgaccccaccacatgggcaggtctaagggcaccacgtggcaaggaaagataatacatcctaggatgcatcattgggtccggacctccacagagggacaccagacccctgtacgtacaagtccggatctcccaagaaggcatgcctggtccctcgggtgggccccaggtccctccgagtaaggtccgagccttggcaaggtcccgggacggggaggaccccggcatgagtaagggttcggtgctggcacgtgtccaggccttgccctacgctcctcgctcaggcggagacccgctgctgccgcgtggcttgtggcccgtgacataagccaatgggccaagcctgacgtaaggcccctaaagccgcgcaacctctgcatttattgcagagaggacacgccgcctgccaccacgctgacggcacgatgtgccctctcagcatttaatgcgtcctgtccaatcc

SEQ ID NO: 7841 - DNA, 671 bp, Zea Mays
atcagaatgtggaggagaagacccaacgtggacatccatggaggtatgagaaggggagcccacttggacaccctcgagggctgggttgcagcccacactgcccatcggagccggatcaccaccggcaacaccctcgggggctgggttgcagctcgcactacccacccgagccggatcattaccggcaacaccctcgggggctgggcaaccgctggcaccatccttgaggactgggttctccgcaacagccacctctaaggctgaaggactttcagtcacctccatgggaattgaacaaccttgaccaacctcttggctccgaagaccgccttctaaggtcgacgaggcacgagacgctgctcgggataactctaatcccacatctggaatgtcagaacaaatgtccatcatatcaccatcagttggctcggacagcatatcttcaggaacgacattctcgagagcctgatcaaaatttgctatggataattcttgcaaaccaacaagagcagacaaagctagagaaggaatatcgctactccccccactgactctgtaacgccgactgttctttcgaattaaggggacttcctcttcttcttcctcgtcctcgtcaataatacagacaataaacggcacagggtcacacccattggattcagctctggcag

SEQ ID NO: 7842 - DNA, 558 bp, Zea Mays
ctgacaattcttgctctatggaatttgatttgtttggtctctctgtgaaggatcttgccaccaggacccttctcgctcggtgtgacagccccgggcccctctacacgctccgcttgcctgcttcccctacatcgacttctgcatcgcctatccttgcagcgaccgcctcctctgtgacttggcatcgtcgtctcggtcaccccgggcatgatgtgatgtccatgctctccaatagtacctctatttcttgttgtaggggatcttttgagcacctctatcatgcttgtcagttaggtcgccatgttaggctcccgttccccacctcctcctctcaggctgcaggcatttttgatctgatacactgtgatgtatggacatctcctgtaatcagcatttctggctataagtactatttactcgttctcgatgacttctcgcactatttgtggaattttcccttacgtcagaagtcggacacctttcccaccctgtctcacttcttcgcttgggtatccactcagttcggtcacaccatccggagttttataacaatacgtc

SEQ ID NO: 7843 - DNA, 313 bp, Zea Mays
cccaagcggggtattgtggcatcccaaatgggtatggtggcatgccccacatttgatttgggacatatggtggaggtatgtatgtgtatggatatggcataggtggatatggtggtgggggtgtccatgcaggtacgttaggtcttgattgaacattatgacatttcgtcctttccgattggtgcggtgatccaatcgacttaacctgtcgtcgcacctgggtgggtaagcgaggttgctttggtggccggtcgctggggccagccttctttttcacatatttagacaataattgatcaaaggtcgggctgga

SEQ ID NO: 7844 - DNA, 300 bp, Zea Mays
gattggcgcatgtgcgtcgactatactgatctcaacaagcattgtccgaaggatcccttcgggctccctagaatagatcaggtagttgactcaaccgctggctgctctatgctctctttcctagactgctactccggatatcatcatatcagcttggcaaaagaagatgaggagaagacgctttcatcacaccatttggagctttctgctatacctccatatcgtccggcctcaagaacgctggagcgacgtaccagagagccatccaaacatgcttagccactggggcaagcgggtgga

SEQ ID NO: 7845 - DNA, 585 bp, Zea Mays
ggggagttagaggggatgaagtattggtcatgaggctattgcagggattgggtggaggtgggctgagcagtgggattttgcatttgtaggatttgtgtgagggagaggaagagggggcatttttgcatggactacatggcctacatggcgagtaggtgcagcatggtgagagggcagcctctctctagaggtggtgcaggagaagcaagaggtcagattgcttggtgtgggagtgttggagggggatagaggtggtgcatgcatgtgaggtaggtgtcgtagaattgattaaggggttggaaagcatggcagtagaggtttgggtccctctagaggagggagggagctcagcacccgctcttgaagaggaaacagggagggcagtgggacccgaggaagcggggagagtaggtggcagggggaatagggggaaaatcggaatgtagtccccctgttgattgaactactactctatgggctagatgtggacggggaaacctgaaccacacccccttcttaggtaaaacatgagcgctttgagagccagacctcactaggaatatctaggtagtggttgacctcaag

SEQ ID NO: 7846 - DNA, 787 bp, Zea Mays
tcctcaataggtgcagtcgggcggctaactcggcgtggatgctttgggtgagcacctttaggtttccggatctccaccgctttgccaagtttatgtcgaggcatgatagccatcggctcgatatgggtcgagtcagatgattccccagccatcatactaagcaaagcatctatctctgcgtcatctatgcttgctggcatctcaaaatgagtttgcctctcaccatctggaagactccggagaggggcaatcatagcctcagtatcttcgagagaaggtcatactctaagacccaggctaccataactagcaggagggttggacacaaattcagaaaatgacctatgaggtggtagattccaggcagaataggcaataggagcaccaacatttgacactctgccccttaggatcatatccagtcggctcactagatcttcagtagggattctcttgtttgtgacccgggtagagtcattgatgccacagtagagataagctgggtacgccctatccttcaaaggctgaatattcttgaagacaaaatcagcgaccacagcttcaacagtcagacctttgtctttcaacgaccagacctcgccaaacaatactttcgcctctgttatctctgaaggggtcgaagattctacccagcttggagttcggacatccggttgcctccccgaccgagggggtagggacttgcagtggtttttcacaatgaaccactcgaggcgccaccccttgatgctatccttgagggggatgtcgaggtactctgttttcc

SEQ ID NO: 7847 - DNA, 538 bp, Zea Mays
ggccgctggagtgtaatacactacatccactgagttgtattgcatgaggaacgggagtctctgggtgtgtccgagggtctccgatagagtctgtcctatgataatcctgagttcgaactcccccttggcgggtgtgtgctcttcccttttataacccaagggtggttacagagacctgtcacaagcctgactatgccctgcgcttggtcggagcacgtcttagttgtcttgcatttaatgcagactgaggccttgcttccatgcgaaggtttgcaccatgcgcccagcggccacgtgacgtcaccgggcccttgcatgggtccggagtagggcatgggggcatgttcttccctagagcaccgggagcccttgttggtgacccggatcccatacgggggggtccggatccctactctaagggtccggtttgtatacttggaggtcctagacctactagggggactggattgcatacatgggggtctggaacccacccatgggggtccagactcgttggtgaagtccttgagcatatcgc

SEQ ID NO: 7848 - DNA, 746 bp, Zea Mays
gcttggcgcgagtaaatcctagattcatagtgcactacggttggactgcgggttgaaaccgagaaaacctagggtttcttttataagattgcctggccaaaggggtacgggtgtatttcggtcgttggatctccatcagatggcccaaattagatcgctaatatctcgaaccggtatgcattctagtccacaagatcaaggatcaatggtgggcacttaatcgcgagcgattccatcctgagccgcaggatcacgatccatgggctacgaattatccacccaaccgttcatcccccccttgatctcacccgctcaaacctaatcaaacggccataaggccatcttccacctggcaacacccaagcagcggtgcccacgaccccgcggcggcaagaagcctgccggcgatcgcccaccaccgcaccccatgccccaaccaccatttcgatcgtcgataaatgcataggagaaccacgcgaacacatgagggggtacctttctcacagaaatggcaggaacactgtcggtcagggcagggagcggacaacggcgagggaagaggccatgtccgcctaacgccgcatgcacaggaaagttcctaggcgcctatggtgttgcgaatgccccaggactccgcgccatgatcactcgcgggaggatcgagacgaccacgacggtggccatcttctctctcgtggcggtctctcttcgctctctcccatgatggcgcttaagctcggctctgg

SEQ ID NO: 7849 - DNA, 836 bp, Zea Mays
acaaaagttggagttaaatggactcaaagttttgctgtcagtcacccatatagtctgatactggtctgacagtgagttctgctaaactttggactcgattcaagctcgaaggagtaagtaaatgggccaggtctctatagtcgatttgtaactggttgatagagctacaattttgatacagatgaaaggttaagttgctacatgaaatttggagcaaatcgcccccaaataagctctgtcaagtgctctgaatggtgttctaatagtacagtgacctgacgaagatcgctagattcagtgtatcgccaccggtgatcccgcgccgtgatcatcgccgccattgcgattcgtgctcagtgaagtgcagataactgctcggggtaagaaatatcgcgttggggatgtgctcgggacactgtttcgccctggccgccgtaccccccttgccttacggccggtccagataacctcgccggcgttggccgcttatcgaccatgcgccatgtgccttagggtgttaccatgtcgtagtaaaccactgaagcgtgtccgttcatcgcctgtgaccttgccacggtgaaagccacgaatcccttgcgccagtaacctcccctctctccggccgctgcgcgtcttttccaaaatcagccaccaccgccgatggaaccaataaattgctgccctagtgagctccgctaagtagttgggcacctagtgaaccagccctcacctccaatcgtcccccacagctccccaatttgggatttcccccaaatctgtcaagaacaccacaatatgtgagctcgccgtggccagctctccacatgtccgatcac

SEQ ID NO: 7850 - DNA, 621 bp, Zea Mays
aatcccctcgatgctgatgactggctgcgcacgataaaaaggaagttagaagccatcggatgccttgagaatcagcgtgttcatttggctgctcatcaactttccgggatggccctatcctagtgggataccttcagcactgccgtcagagatgctacctaggcagaatttgaaactgctttccgagaacatcatgttccccaagggatcgttcagctcaaggaagatgaatttcaggaactaactcaaggtggaagatctgtcagtgagtacatgcacaaattcacagaattggctcgctacgcgcctgacgacgtcagcacagaagccaagaagatggcccgctttttgaaagggctaagaccagaactcaagactatcctcggcagccaggatttcctcagcttctcgcacctctcaaacaaagccatacaagtggaaagggcaagggaagaagaaaaaggtcacctcaagaggaaattccaagtccttcgagcttagcagcaagaccgacaccagagaattcgatcctttgggcttccacccaagggaccaagcttcaataagccagctggacccactccgtcacgtttcagtcagcagggtcagagctcctttcag

SEQ ID NO: 7851 - DNA, 276 bp, Zea Mays
ccgagcatggtgtgggctatttttgtggacatatggtagattacgatgaggttggtatttgtttttgattgcatcagttgtaatgttccatccgtacttactgtttttatgtagcagacaaggaaatgcagttgggagatatacgccaagaaagaagatgtgatgcatacaataaagtccaagagactaatggggcagaagatgagttgtggatctcagctcgttgattcctacattaaagatcgcagacaggagatgtgtaggttcgcggaatca

SEQ ID NO: 7852 - DNA, 405 bp, Zea Mays
cccagagccatggcagaagctcaccggcgcgcacgatacatcacccaagcgaccccaactctaaaattgattggtgctacgcgacgaggaggacgaggcgagcttagtagcttaggttgttacctatgctgtagcgcggacactgccgcccacgggattaggcggatacacggcggcggactccctgtctggcgagaaattgctgtccaaccatagctttctactccaaatttctcgccgtggaacgctcctcaagatagcgcgctatccccaagcccgatccttgattccggacgacgtcgagatggaagatccgtgttggtgacgaagtgctccacccggtgaacattccacagtactccgaacagacagcgccctcgatctccctgttctgcttggcttcca

SEQ ID NO: 7853 - DNA, 292 bp, Zea Mays
gtgaacgcggaccgcccagattagatcctatggtgcagattagatctgggcgctttataaaccggtacgcaacgtcaaccgtacgatcagagatccacggtccacgaatgcccacgatccaatctaccgcgagccacacgattaaaatccgatggctcagactcatcacggtcttgatctaatctccaccgtaggcgccaggatcaacgacccatagctattttccccagatccgaacctagccgtcaatctccaatctaacggccagcggcccttcttccctctcccccaa

SEQ ID NO: 7854 - DNA, 364 bp, Zea Mays
gtagtatgcgttcggctttcccattctgttgggatgtgtagggacaggacagacgaagttgtgtgccatgagcggcaaagaaggtgcgcatagcataggagtcgaactctttgccgttgtcagtctggacagcgagaataggcaagcggaattgggtatgaacgtaggcaaagaacgtacggaggacgtaggggacgtcagatttttgacgcagcgggaaggtccacacatagtgagaaaaatcatcaagaagaacgacataatatttgaaaccagtatgactaagcactggtgaagtccagacatccgaatgcactaactgaaagggaaaatgagtagttgttgctgaagcagagaatggcag

SEQ ID NO: 7855 - DNA, 311 bp, Zea Mays
gttgcctactctgcttggaatctgccacctcctaagtcctttttcaatttcgtgtctaatcctcctgctggtgatagtggtctgggtcttagagtgcgaccctctcccgaagatattgaggccttggttgcttctctttgtgatcttcctaatgatgagaggcaagttcattttgagatgtcagcaagtccgaatgatgcagagatgaatgttgtgctcgatatgttggctggagaatcttctgactcggcccctgctgaaacaatggctgttgcagttataccagagcttgacagaatagtggacacccg

SEQ ID NO: 7856 - DNA, 547 bp, Zea Mays
cctttaattcggaagaacagccggcgctacatagccagcggggagagtagtggtgttccttctccagctttgtctgccctcgttggtctgcaagattgtctctggcaaattttgatcagactctcgaagatatggtccaagaagatctgttgtcggagccggcagatggtgggatgatggaaatttgtgctgatgtgcctgatgccgggttggagttatcccgagcggcgtctcgtgcctcatcaacctcagagcgcggtcttaagagtcaggaggctggtctggattgctctgttcccatggaagtggttgaaggtccttcagccttagaggtggctgttacagagggctcggtcgtcaaggatggcgctagcgtttatccagcccccgaggttgttgccggagatgatctggctcggatgggtagcgcgagctatgacccagcccccgagggtgtccgagttggttctccctctcatacttccattgatgttcacgtagggtcttctcctccgcattctggtgcatggcagcagcacgagcttcg

SEQ ID NO: 7857 - DNA, 407 bp, Zea Mays
agttgcagcagcagttttttgtacctttggcaattctgctcctgctgatgggctcagaatttctggcagtttcaataccttttccactatcggctcttcggccgcaccatctttggcttcggtaggcccgactgtaggcaccttcggcactacaatcggctcttcggcgctctgcgcaatcggagcagcttgttttacttcggcagttgaagaggttccttcgccaaatttaggcaccacggccggttcaatgtatcgtggccgatgggtcaggaccttcatcttcttgccttcggcacaccagtgctggccaaagcgataccttttcttttcttcccttgccttcgcagtgggtagtgataatcagggtatacgaaaccaatggcatcaaatactccatttaatct

SEQ ID NO: 7858 - DNA, 497 bp, Zea Mays
atggcacacctcaatcagagaacaatgtcctttagaagattgcaacccaaacaatttaacttgagtacccctgtaagggatgaccacccacttctcagtccaatgcacctccataggactaaactgctccagccaatccataccaacaataagatcataagtcacgagtggtaacacacgtaaagtggactggaactcgcactgccccaacgaccaaacagcccctaccaactgttgagtacactgcatttgacacccattggccacctgaacagacaattccttggtcataggggttaatcctgtaaggtgctgggccacccgggaactaagaaatgaatgagaactacccgaatccaataataccagcagatcaattccttgaataccacccacaaactttactgttttaggtgctgaaatatcagtcacagcagcttgagacagacacaactgaagttctgcggatgcttcagatatatcatcttcctgttggt

SEQ ID NO: 7859 - DNA, 495 bp, Zea Mays
acaaattccaaattctaggggcttcatttaaatccttcttcactaaaccaggatggcgagttgatttgtgaaaagggcaggggctcatttgtgaaattggctcggcgaaggggtatggttaattctgagccgtgagatctattccggatggccaagattaggtctggcttacgctgaatcggtatgcgatatggaccgccatatctaaatccaacggatcacagccgatctgaacctcagtcatccgatcacgatctgaccgtccagatataatagatgaaggggtacgcggatttataatcttgaccacacctccccaatccaacggcccccagagcatccctctacttctaatcgcggccacaggctagcagatcaacgctgggcgacgcgtcttcctcacaacacccccttctgctctttggtcaggcgggtaagccctcccatgacgacagcctaccagagtgaaagccaatcggtcccctggtgatcgat

SEQ ID NO: 7860 - DNA, 1545 bp, Zea Mays
ttttctgcaaaaacaaggatgtgtacttaagtacatatgaaacacattaacaacatatgcgacaaaagtacaatgtagttataccttcagggggatgcgggaacctatccccgtacgtgatcaaagtatcctgtaggactctagtatcatgcactgaaccaggccaacctgtgacgacaaatgtgtacctcatatcgaagtcacaaacggccatgacatcctgcgatgcgtaaccgtgacgaccaatatactttggttgctccgtggacgggacagctcgggaaagtggcttccatctatggcacctatgtagtccttgaagtctggccagaatctaggctctcgcaatctagggtgaatctcagtgaaatgtgcttcctgaggcttaatgacgtcagaagacatcctatatattgcgttaaggacttcactaaatttgtggcttatagtttccaatgagtgaccaagctcgttccttatctgtctaaatgattgtggacccccgcatgcccacaagaaaatggcaagcgcttccttcgtactaactcacgactacctacgagcccatactcgctcaccaatgtgtcatgtagacgacggaaaacagtccgctgcatgcggaacatgtagtagtcatcactaatttgtaatgttctctcaacccattggatacctgtctctcccattggttcacgtggaaccccacttgaagagctcccccaaatatccaatgagaatagcaaccataacttcctcatgaaagtcatcatcgttttgatcatcagctgaatccatggtctacatacaaacaacacatgcactagatattcacacttcatgcacattacagatatagaacattaatactaagcaatacaatttatttgacgacaccataaaactgtctcgatcacaagagtatttatttaacaaattactggaaccaaaacaaattcgacgaaaaacatgaaatacaatagttctggaaaacttatatcagtacttcgacatgaacgcactcagtaccctaaactaaagacatgacgacaaacactcacgtgcgcaggcacgataaattcagttaactcgacttttcatgcttctcatacgcgcggtgaagccaagctgtccttccttccttggtccgaagagttgcaaagacatcgtgatgtcgtttgtcaattaacagttgtgtagcgaagaaatgcagatcgcttcctttagtagcaccgtcttcgagcacttggtttaattgagctgcaacgtaccaggtcatcctcataattagaaatgcttttggtggagctcaaagttcttgcttcaaatgcatcacaatccttttcatgtactcatccctctgttcctttttcttcctaggctttggagagtcatggtacaacttgcgctttcctttgattctagtacttgggtctggagtactattttcaccaccagccaccacatcttcctcgtgaccatctgaggaagaatttgcatcttcaactcctggaactagagtagtctcattggtgcacactatagggc

SEQ ID NO: 7861 - DNA, 616 bp, Zea Mays
aaccactggagatgtccaaagatcacaatgtattaggtcgaaaggattaacagcacgagagttggagacactaaatggtaggcgcacatggcgacctagctaacaagcatgacaaatgtgatcatcaatgtgtttattacatgaaatggcattggaactaataagtttagataaagccgcatgtccgaggtgaccgagacgacgatgccaaagtgaagaagacgtcgtggtggtggcgagggcagtggtgctgttggatggtatgggaaagaacgggtagaggtcacccgtgctattgcacctggcgatcacgctccgtgtctgaaggtccttcacagaaagaccaaatgggtcaaattcaatggaacaattattatcagtagtgaaacgacgtacagagattaaattcttaataatgctaggtgacactagaacattagagagaacaagaggacgtcgttctgtagggaaagaatgtgacccaatagatgtaacgggaagcgaagctccgttacccacaatgatagatgaaggactggatgacgatggagggtgaaggctagaaaggataccagcgttgttgaccatatgagcaccggcgccggagtcagcatac

SEQ ID NO: 7862 - DNA, 1003 bp, Zea Mays
ccgggttacatcatattaggagatccaccctaaagcctagttcaaaagttggtaccaaaagctaagcttacgtggttttcccgttctcctaacatgtttaattctaacccgtctaaccctgattggtagaggcaacattggccgcagatgtagggggaactccggagtgggccgtgttcggactgaaaactggctctatttcctcgggatccttctcttcctcactgcctgcctcattagcattcatgtcttggtgatgcaattctaggtgaacgttggcctccgcaagctcctcttgcacatcatggagctggttctctaggatctcgatggtgttgtcccagatttccacctgctgctccaatgcttggatgcggttgcccatctattccacctgtagatccttctccaccaatttcgaagacaggtccaccacgaagtcctccctatcgtcgagggtgatctttgcagcttgagcaagcccagcgaggtgcgtcatggcgtcgctttgcaaggtctacgggcggtatagtgcactcatgcactggacgatgattctcccaacctggtcgagatgcatggcccacacatccttcacgtggctcactcaccaatttcgaagacaggtccaccacgaagtcctccctatcgtcgagggtgatctttgcagcttgagcaagcccagcgaggtgcgtcatggcgtcgctttgcaaggtctacgggcggtatagtgcactcatgcactggacgatgattctcccaacctggtcgagatgcatggcccacacatccttcacgtggctcactctattacaccacattgggtcatccctcttctcggcggggaagagtccaagtgggtgcataatcatctccagtgggtggtatccatagaatgtcgtcaaagcttttagtgctgcggcctcagtggtgtcgtctgccctgaacccgacagttttggaatcaagtgaacgccacccaggctgcagagggtgagactcca

SEQ ID NO: 7863 - DNA, 674 bp, Zea Mays
ctcagggctagagcccaaccggacctccatcccctcctcatcgtcgtcgttgtcatcatcatctatgctgggagagggctccagcggcaccccctcactctcatgcgcgtagcggtgcttctccaacatgtcgtgggcccacttcttctcagcgtccttcttcctcttctgttcctcgacagccaaccggcatgccctctggccggccatgtcttctaggactggaggccgggcggttcggtacctccacagcccctccaaatgggtggaaaaataggttgagacaaagaataaagggcgaaggcagaagtaaagcttgaaacttaccagggacatgtaactctgctcaaggcgcattaggacggggacggtgtaatctgccttccccaccatccccttcacccattggaggagctcgtcggtggagagggtggcggaggccatccgggagctctccatagaggcctcgggtgtcatttcgtccaggtgcaggcgccactccgccaacgacagcaccctcctacggtggaaggcagcgacgatcccgactatggtaagcccccggttgtggagcctcctcagagcatctagcagtggctacagctaggcctagtgctcccgcagtgcgccccattgccaatgttccccagccgcggtgacgtctcgctaggtat

SEQ ID NO: 7864 - DNA, 866 bp, Zea Mays
agacaaattgcagaaaggccctccatcttctatctcttccccgtgaatgcccctgaccacggcgcgcacgccgatcatccccgacgtggttcgtacaggccatggtcggcgatggcggttacggccaactaccggggaggcatcactgacctacgacggcctcggaacacacattaatttgacccgaacaccccgagaacggccggtccacgtgcacggcggaaaccgcggtgtcgatcccatgttctcaattatccagacccgaattggtcaagcggatgctacggtgagctttacgtgcccacatagctgctagaacaacacttgagaggtgcagagctttaccagagtggtctggccacggtggggtgggtttcacggcggcggagaccggtttggggagaactccaaattcgcggatctcagcgaatggtcgaggctgattcgaggtggctggttagcttactaccctacggagctggtggcacacgcaatttataggcgcatcgagggtcggtgacgaattcggccgaggggtgctggcggctggagaggggaggcgagcatagtgcggggaaaaaggtagttttcaccgtggcagtgactccggtgatcgccggacatgcaaccaatgagtcaccgcgagggagtcccgcgctgagacatgtagtgcgcaacggcggtagcttatcgacgacgaggctatccaaccgacgatgagctggggggggggtaaagtacggcggccttagccgtagctcaatccggtaccggatttttacccggtcaagcttatctgttgtacacggtgcacgaatcgcaacaagagatcgaccaccggcgacgactcaccggcgacgagccag

SEQ ID NO: 7865 - DNA, 730 bp, Zea Mays
ctccaaatcactcagtttctatgtcataactctctgtatatgtatttattcacattttatatacttatgactatgtgattaatacgtgttcacctcttctgtcatttcagtgatctcgcctgcccgtgagcccgtctcctgttatgcctggattctctctctcgtgaggtttccaggtagatatccgttcttttataatcttatcagttgctatctactcgtgcttagtttttcactctcctatgcagccgtcaggtcatgatggtgcgcacgaagaatgtgtcaacaccagggggaggagacgatgaggactctccttgccccttcaggcagatcaagggcaagacagtttacctcgagcagcaggaaggccgcaagaagcgacatatggatagagtagcccgagaagctcttgcagcggcagcagcagtagagcagacagagcgaggtggacaattgcagatctcatcagatcagattgcctacagggttcgtcgtctcacgtctcgacctcgctcctccgctccctctacacccgccacagctactactacacctcccacttcaccagctccagtcgctctagagccatccaccacttccgccatacccaccacctccaccacacccgcttccactgttcctcctcccgctcccattttcgctccacccattccaccagcccacttccgagagcgagacgagaccgaggtgcgaccgttagctgtcg

SEQ ID NO: 7866 - DNA, 524 bp, Zea Mays
gaggagcggccgccgcgagtaatccctgcaaagccgtcgatccggtcctcggtggggtgtccgcgggcttcatctggccggtagggaggcatccgtggcaaaagcactcggaatccgtcgcgggcctcgccggaattcctcaccgtacctcgtcctccgctgcgcgccgcgagcaggagactaccgccattcaatcgaggtactaacgccatccacgtgttcgcattgttgttcagtaggtttagcgttagctaatcgcattttggacgacccttgcgcgtggaattgctcgccggcgttcatcgccgcggcgggagggcggcgccgccgtgtgagtctgcccagttggggcgataaccgtgcgccatcggatcgttggcggacgaccgagattagaccctagcataccccttcgtcgtattgaatctagcgcgttgaaagggaatcgtgtggccgagagggagtaaagggcatcgtgcgccgtggaccgcggatctgggatccaacggttgtcagcgtagcag

SEQ ID NO: 7867 - DNA, 371 bp, Zea Mays
gtcagcaaccaggcgtccagagatgatgtcgaagacatgagccgtgcaagtggtgaagctgaagatggcgagctcaagaaggtggtcaggatccgtaaaccaaacgtgcgcgtgggtggtccggagtgggtaagggcgtagaagtctggtcaggtcaccaacagaaaggttgtatgtgtgagtggttgagtcatgtaatggcttagttaaaaagaggaaagcgtggagaagaagggtatcaattgtaacagaattttgtttccctacgaaaatactcaaccacttcgcccattctctcttgttctctgctatttctgctctcttgttcttgctggagattggcagttaacagacagacatgtcgaccccac

SEQ ID NO: 7868 - DNA, 449 bp, Zea Mays
ctagaaacaaaactagactctgcctaagttcatttagcctaaaagccacctgctaagccatctgtcctaactaccaagccattctacctacaagtctatcttaccttatgtccctaactcagatggtcaatactaggacaggaggaggtgttgatctgcctgcacgcatacgtcgaaggagggcagtaatcaattcagaatcacagatgaatcccccaaatcctccacctgccgggatggaagcattcctcgctgcccaaactcagttactgcagcaaatggccaatacaatggccaatatgcaggctcagctcaacaataatcaacatcaaccacaccagccacctcccagggacaagcacagagaatttatgagccacaagcctcccacattctccagctccccagatccacttcaagctgatgactggcttaaatctgtggaaaag

SEQ ID NO: 7869 - DNA, 386 bp, Zea Mays
aaaaggaatcaggagatatgatttagtttgttcctatactagtagattgcttaagaataaatgaggagagtgtttccctcaattaaaagatatgatctagtttatttccttgttagtatatttccttaagtaaggtttccttaagagaaagaggtgctagctatataaagcaccatagtttgtaataggggacatcgaagaagaatagatctccgagagagggcgatctccttcggtcacctcgactggagatcgacctcctctggttccaccttccccatagtccattgagtcatttcactcgggttcagctctgtgtggtgtcgatttcctggttcctcccccaatccacatcaatatcatgttagagtggacgcactaaccag

SEQ ID NO: 7870 - DNA, 652 bp, Zea Mays
tagtgattccgtatcctacccgtatccgaggttcaatatctgggtaatacccgtacccgtcccgacaaacaaaatacctgtatccgtatccgaaattacgtcctgttttggtactcgtatccgatacccgtttctggtacccatcccgttttcatctctaagtctggggcacagccgtgcagcgaaccgatcatcaacgcagccgcaatcaacgcttgtgaggagctgggtgttgggaggtgggcaaccaattacacagtatcagaatccatgtaggccacgttttatgatctctcgccttgctgccaattgctatatgttacatttagtgctgggaattcgaccaagctgtcttcggatcaaataggtttagatcatgtcgtggcagcctaaaaagtagaaacagtgacctagctcgatcctaaagcatgttgggccttcatcgggccaggccggcctcaacctgactcgtgcgtgcgggacgtgctgggatccgacggaccggactttaaggtccggtctagggccgccttcgggccgaccaaccatccgtcgagcaatcttgcaaggagcattggacgaccaggttctctgtcgagcaagcctgcgagcggagtggacaaccaaccctctaagcagtcccgcgagtcag

SEQ ID NO: 7871 - DNA, 777 bp, Zea Mays
gagagtttcccctcaactaatattactagcggagctctaactcgccctgtccacggtgacagcgggcacaacggatagcacaacgtgttcccggcaatctaaggcagcttaactcaatcaaattggccgagtagcatgaggagaacctaatgatgctgaaacaagagagcagggagcacgaacagacctggaattcgcttggaaaacagaattaggggaaaatgggaaaattggagagttgtggtggctaatcggaggcaggagcgggtgctcaggcttggtgatgacctaacacagcataccgtgtcttcaatttatagcggcgctaagcggtggccagtgaatttggtttggtgtggtggcggtcagagaagaaaggagtcactggcgcacaagattagtggctgcaaccgtggcaagatcaccgacgatctctggataggtcagtacgagtcacggcggtgtggttaaagtgctgaggcacgtggcacaagatcgtgaggtgtctaacttcggcgagggacgattcaaggcgatcggggtagtgcggacacggcggccgaacaaacagtaccttaagctcatccgggggggggagaagatcttttcaccgcggaacgttattcgggcgccggtgagcacgaatcacctcaccggcgtgaatccacatgcagggtcgccggtggccggttcactgaagcaatagattcttctggtcactgtaccatcagattcttcttcagtcagtctgacagaccatgtttggggcgaatttcc

SEQ ID NO: 7872 - DNA, 523 bp, Zea Mays
tcgaggatgtcatccagtgtccgctcgcccccacggggtgcccctcgagcacgagcgacgggtggtccggtggcgtggacctcctcacgaggcctcttctcccaacgcctgttgggttgtgggttcgcgtcgcgccgcggtgctggtggtgcaggtttcgttcctccgatgaggtcctaggcctactcgttagcggtgatgtagaggtccgcctctcgaaatagttgttcggaggtggtcgatgctttctatagtatggctcagacgaaggccgagtcattagatccttggtagaagttctcaatcactgctgcctcagtgacctcgaggatacgatttctcatggtctgaaaccttttgaggtacaaccgaagtgtttcatcgccccggcgcctgatggatttgaggtcccatggctgcgccggcttgtcagagagggactggaaatgggcggtgaaacaccgactaaagtcactccaatcgtcgatgcagtgtcgtggcagatgtcatagccattgcaatg

SEQ ID NO: 7873 - DNA, 518 bp, Zea Mays
gctaattggaggcgagagttggtgctttaagctcgcaacaagttagcgaagcaggtcagggcatcaatttatagtagctcgaagcggtggctccgaatttgggaggcgagcggggcttatcttcccggcgagacgattaccgaggcccgccgtggagcgcatgcgttcactaggggacggtcactattaaggggatgccatgaccatgacaatgcggtgaatcaggcgactacgtgtcccttgctgtgatcacggtgagcaccggcggcgatatttcactcactacgcgggcaagtgggtacgacggtgactcagctctggccaagtcctcctcacccaagatcctttatccgcaacggttatccactccacaccggcacgaatcacggcaccggcgtgaatcgtggcatggagatcaccggcggcgaggttcactgaatctggcatctggttcagtcactgtaccatcgcaaactcctttcagtgtgcctgacaaagcaagcttgggggcattttcc

SEQ ID NO: 7874 - DNA, 746 bp, Zea Mays
ctcaagactcccaaacctggtcgtcgtcccaggcctgggtgggtggtgagaacctaccatctagagtgctgacgagaactagggatgttgcacgtgactagcccctacctggcgcgccaactgtcggtgtttggaccgtgggtccttaaccaacgagtaatgggccgcgtggccagctctagatggtgtgcaagatgacacaagcgattatcctggtttgggcttctcgaggccctacttcaaacagaggggatgaggcttatattactcgcactgtggtgcctgtagtagggttttacaagcacaacgggagaggggacgttcccaagtcctaagatatgattgagacaagtaccaatatctaatacaaagtgagagagcaagaactcgtctacgtgtgtctcccccgtcaatggagggaccactgccctatttatacaccaaggggagcgtccgtggcgaagctgagtcttgtatttgaaggagagatgccctagcatctgatgtgacggcgaaccgtgtagtagtttcgcacctgctggcttcccgtggagagctgaggccaagaccgaggggtcgtccgtatgtccgagctcccgagggagaggtcgcccatgccgtagtggttgtaacagcgctgatgtatgagccaatagcttcttacggggtgcatcatcgtcctggcgcgtgatgacgtcgagattctctgcaacactcatcgagatcagggccctcgcttggttgac

SEQ ID NO: 7875 - DNA, 482 bp, Zea Mays
tcaccccctctaggtgaccatcactcacaaaccgcactaagagcgccattgtcactgttcttctacctcaaccttttcgtgcctcccgcactcagcccttcccacgacctcgctctgccacgacctagccattacctccacctagagcttgcacgccctagcccacctactatagcaaccctaagaccgagagtcgaatgtcgatgacgctcaccgccacctccatcctcaccctaatcgataaaagagttaggaggattacgaatgaggagacatacatttaggctagctagatacttggcctgaagtagggtttcccttccttagcctctgtctcttgggtcgggagtgagcctgtctatcctcgagatcgctccacctccacatgtcgcttcaggagggagcctagagtgtcgccaacatgtgctactctgccctcgcgtgcctgtcccgtcccaccgcctaccctagtccgtctctag

SEQ ID NO: 7876 - DNA, 918 bp, Zea Mays
caattgcaacatttcgacgtgtacgagggagccgtggcagtctgaccttgccataggtcggatggtgcggggcgtggactacttcgacgcatgcttgccaaattccctgtcatggcttacccgtttgtcgttgaggcaatactcgcttccccacggagggacctcaaccgctttaggcggggtctcgtcctggtggcgatccatggcatggtgcatcgaggtgaactggggatgatgccatggtgcacgccacagtgtcagcgaggctcccctcgaggttccctgagagcaaggagggaccctcaatcggcgagatcacgaggcatcctcaggtcgaaacatgggtagtcccactcaataggaaatcaggtctgcctcccaaccctaataggggaaaaccagacgacggtccctgaacgggacctgatacctccaaggccttggcaaaaatgggttgcggtgagcctagccgcatgctcccacctttcaagggatcgaggcggaggtggtgaaggcttccaatgatgtcaagttactcgcttgttaggggagtcggggctttcggggccttgttcatcatttctgtcggtaccctgaatcaggggtaccccctactacaatatgaagacgcggtgcccgtacggtgatttctagccgcacggtgaacaacacccagccccaccgcgtggacggctcaaggggcaccacgtgacaagaaaagatgatacatcccaggatgtatcagttggaccggacccccgcgaggaagcgccggacccctgtgtgcacaacccggacccccgattacggtccgagactccctccgagtaagggccggaccacaatgaggtcctaggacaggggatgccctggcataagcaagggtccggtactgacatgtgtccaggccttatcccg

SEQ ID NO: 7877 - DNA, 625 bp, Zea Mays
accggattggatcgccagctcagagacctcgccgctggcgaccacgcgcgcggatccgtgctatcgccgtgattcacgctgaattaaacatggataacgatcacagggtgaaagatctcgcctcggatagggctagaatgtactgtgtgcttgatggttcatcagtgcacaccgacgacgtggccgagcggcaatcaccagcatgttcaccgttcactgggtggacgccacgccttaggaggattatcgcgtcagtatgagccgaagtgaccatccaatgaccgcctagttcagtcgctctgcggttgccacgatagatcgccgccgtgactcattcccctctcgaccgccagcgcaattcgtccaaattaagcaacaccgctcacggactctataaattgagcatgccatgagctctgtagggtagtcaagcaccaagccaccaagccgtgccctcaattgatcactagagctcgacaatttcccatttcccccaaacctgctttccgccaccgtgaaagaggcctcaccgtggccatctcgtctcaggtccgctcataccctctgtcctttcgtttcagtgttcttgtgtgcccctgatgctccccaaccccgccaattagac

SEQ ID NO: 7878 - DNA, 522 bp, Zea Mays
gccagacccaaacgtcatccatgttaggatgttgaccgctcattgtttgatcatcgtctcagatctgcctactaaactgctgccctcccattctaatcctagccatctctttgagatccaacggtcccgagcatgtctccttcctccagcgtcgccaggcgacggagcagacaccccgcggtggcgcggctcactggagacacccgccctagcgcagcttcaccgagctgtaccccgattgattatgcacgtagttacgaccctagcaaagcatgtggaggttacataccgggggtttatgcggtagtggtcacagtccctatcgaatcacggccccgtgacgccgcacaatccccgacgaggaatcagggcctcaccgcgcactccctagcccggagccctgtaacctcacgctccatattcttcgaccgaaccccagaccgcatgtcgagagctgggtggcggtgtggccacacttcccacacggcggcacgattctctcacagcggcgaggtcaacttc

SEQ ID NO: 7879 - DNA, 301 bp, Zea Mays
ggctgacagtgaaccggtgatgagacttggcttttaagaaagagagctgtatacgtagcatgccattgccatgcatgagccgcgcactggggcttggacattgagcaagcttttggaccaactgggccactggggcagtgtgggcagggagcacgaaccctccagaaccaaaaggttgcctcctccgtagctcgtggcctggtctagctagcctcgatgaagtgtgtttccagtgagacaatgggaaccttcacatgtcaccagaagaaactacccctcgcagctacgagagagcttgttt

SEQ ID NO: 7880 - DNA, 780 bp, Zea Mays
cgcgcctcgattgtttgatccaaaattgagggcccagattagatttggcttacgctgaataggtacgtgttagtggtcgtcggattcacgatatacggcccagatattatgaagaacgacctaatcctactccttcaccccaaatcagacggcccagatggccccaggatgaaatagtgtcgcgtcatgatcttgcccgtcggttaccaatcaggggcccatgcaccgtcaccttcctccgcatgcctgggcacggcggcgccatcatcggcgacatgccaacccgagttctaattctccaattcacacacagctcgacgctaaacatagagggaagtaaggcaaaatgaatggagcaatcctcaccaatgttgggttgatgacatgtcccacccgcggcgcacgaccatccgtgacaaaggacaaacccctggtgcacaatcccgaccaacgacagccgagacataccttgatgatgccgccagactgagcggaggagcgtgaccgataacgacgcgcccacggtggcgaagcaggagcgtcaggcttccccgtcgaggttgacgatgagcgcccggaagcagagagggcaccatgggaggagatgacaggagtgcacgacgttgtgtggggaggagaccagggcatcgagaggggatgaggcgaccgttttatagggctaggggctagctggccagatcctagtggctgcgggagatctcaaccgaccgacaacagcggtcgcgaacggaggagagggggaagaagatgtcgacccag

SEQ ID NO: 7881 - DNA, 490 bp, Zea Mays
tacaactttgcttaagtgattaagcattgttgttatacaaaaagtggagataattagccctaaagtctggctgtcagactcctctgagactgaacattgagtgacagtgagttctaaggaactttgggctcgattcttgtgcaaggatataagcaaatgggcaagatccctatagcaaaattgtagctggtatatagggctacaagtttgttacagatggattggcaagttcttgcacaaaaatccaagatctaggcgttgcaactctgtctgtcaggcgctctaaatcaggtttgcgatggtacagtgttcggatcagattgccaggttcagttcatctcgccgccgttgtgattcatgctctgtggggtgcagataactcataagggtaagaaatatcgcatcgtggatgaactaacgccactgttctgctccggtcgccgtacccgccttagtcacgaccgcttcggataaactcacctgagttagc

SEQ ID NO: 7882 - DNA, 457 bp, Zea Mays
atcaaccctagccacagggaccatagcataagggtctacagcgacccatacgccagaagggacagggtaatacgtcataccagacgtacgcctacgcatggtggaaggcgactcagaagggatgacgggagatgaagttgtactgaagacgaccctaaacctcacagcgagccaacttagcgggagccaccaggcaccactacgtttgcatcagaatagatacaagaacgcatatggcaaatggacaagacacaacgccacaccaggggtatggcggtgcacgacctagcagatgacaccataggggctacaccgcccggaagcaataggccaaactccaccccgacagaatgctagttctcattgtaaagtctacccttgagctataaaagggcatgataacccccttcttcaaaatacaacgacacacaagcaccaaacggtagaacactccaag

SEQ ID NO: 7883 - DNA, 302 bp, Zea Mays
gtgggccctaccggtcatctccatctccatcgcgtggcgtaggctctggttgcacaccgcaacagacggcgctagaaccggtcgtttctgtttcccccaccaaaatcggactcgttaatccatgcctacatatatgtgtgaatcgagctcctcctttcccccatgaaccgtgtgggcgagcctcgagggagcgtggagggaaaccttggctcctgtacgggagagggccacctgtgcgctatgaatttctcgccgatggagatcctctgccgctgggccactacgctccgtggttgtgctcc

SEQ ID NO: 7884 - DNA, 590 bp, Zea Mays
atgaaatgaaaagttatggacaattctgttggtcatgtttttcccataagatggatacttgatgagtatcattgggaatgagattttaagtccctcttatcttaaaatctgatctaaattggctaaattctttgaattgtttcccaaagaacgagggtggtccattatagagattgtatggacattgaaggctttatatggttctttggtgcatctatatgatgacttgaagtgtgtcctttagacaacacctgaccattaagtaataatgtctcaagcttgagcacattagcctccacactaatgaatttaccaaatgagcttacaatgatgattgtttgtcttggtattcaaaatgatatccatattggatatgacgagtctgtgatagattcgaaaatttcagatcattaatgaccatcagtaatgaattgtcatttccaactagttatggttggagttaggaagttttgcacactcttgacttgtgattaactgcatgtacaagttcccctatggtttttagtacgtgggaatccatgaaagatttcccatgcgtacattgggtatgttcccaatctcaccaccgc

SEQ ID NO: 7885 - DNA, 974 bp, Zea Mays
ccttaaccgaagttccccctcaactaatttcactaatggcgcactaacacgccctgaccacggtgaccgtatggacaacagacattctaatgcgttaccggcgatctacggtagctcagctcaaatgaacgggtcagtgagcatcaggagcaagcaagggtgtagaaacaagaaagtagagggcaggatcggacctgaattgggctgtccacggcgaggattcaaggcacggtgttcttggttgatttgggggaaatcccaaattggggagttctaggggatgattcgaggcacgggttgcttcactggttgcacaactacctagcggagtggacgggggtggaaatttatagcctccaacagcggtggtgtccaatttcacgaggatgtgctagcggccgaaggggaaaaggggtattggcactcgggatgagtggctttcaccgtggcagtcctccggcgatcaccggacatgcataccatgattcaccgcgatgtgggctagcgcttaagaacgtggcgcacaacggtgagcgatcaacggcgatgaagtctatcctggccgcacgacgagcaagtgggtacggtgaatctcatccgcgcccgagcccgagctgatccagtgccaagatttttactccgtcgtggttatcccctcaccagcgagcacgaatcgcggcgatggcataaatcacggcgtaaagatcaccgacgacaagggggatgcatctgcaatctatttcagtcagtgtaccatcgcaaccttcttcagtcagcatgacagtcgatgtttagggcagattttctcccaattttccatggcaacacaaccaatgctctgcagcaaagttgtagccctacaaaccattttcacttttcctataacatccctagtcaaattcccactggatcatgattgaattcgagccctaagttcatgcaattccactgtcagtctaaattcatactccaag

SEQ ID NO: 7886 - DNA, 593 bp, Zea Mays
gtcagatacaatggtctttggaataccatgcaaccgcactatttgatcaacataaatttatgtatacttctctgtcttgtgggtggtatgcactggtaagaaatgagcagtcttggtcaatctgtccacaataacccaaatggaatcatggtgcctggaggtattgggcaatcccattataaagtccatgcaaatgtcctcccatttccacgatggtatgcgaaggggttgcaaagggcctgctgccttcaaatgactggctttgattctctggcacgtattgcactcggatatgtacttggcaatttccctcttcatcctggtccaccagtataaggatctgagatcatggtacatcttgttgctgccagggtgcatggagtattttgaaagatgagcttcatccagtatcttctttctgagctcagggtccttgggaacaaccaatcgatctccaaaccataaaattcccttactgtcctgatggaagcacttgtatttctctgccttctgcttgatcatgtctttgataacctgaacacccttatcttcaatctgtgccctggctatttgctcttgcaatgtgggctcca

SEQ ID NO: 7887 - DNA, 834 bp, Zea Mays
ccctgctgcttttatggaagcaatgaataggatgttgcatgaattcctggacgactttgtggttgtgttcctggatgatattctgatttattcaaagaccgaggccgagcatgagcagcatctccgtctcattctgggtgccctaaggaagaatcagttctatggcaagttgaagaagtgtgccttttggctgtccgaagtggctttcctggggcacgtgattaatcatcagggcattgcgattgatcccaagaatgttgcggctgtggtggagtggaagagaccctctagtgtctttgaaatccgaagtttcttggggctcgctggatattataggcgcttcgtaccaaatttttccagcattgctaagcctttgactagactcttggagaagggtgttctcttcatttggtccggcgattgcgaggtcagttatcagacattgaagagcaagttggtggacgcccctatcctagctttgcctgagagcggtaagcgtttcacagtttatacgtatgcttcgcgtattggtcttggttgtgtgttgatgcaggaaggcagagtgattgcttatggctcaaggcagttgaggaagcatgaggggaattacccaactcatgatcttgaattggccacggtggtttttgctctaaagtcgtggaggcattatctttatggcgaggcttgtgacatttacaccgatcataaaagtctcaagtatatttttactcagaaggagctgaatttgaggcagcgtcggtggcttcaattgattaaagattatgatttgtccatttattttcacctagggaaggctaatgtagtggctgatgc

SEQ ID NO: 7888 - DNA, 457 bp, Zea Mays
gtggatgtttgagcaaggttaccacagtcggtttatagccggatgatagggctacaagtttgctacaaacggattggtaagttcttacgtgaaaattcaagattttggcgtcacaaatctatctgtcagactgactgaagaagatcgtgatggtatagtaaccaaaaaaatcagtagattcagtgaactggccgccggtgacccttcgccgggattagtgctgctcgccacgattcgtgtgtctggtctgtggattgagttcgccgatgaaaagatctcgtcgcggatgggttcaagttactgtggcctcgctgttcctcaatcacttgcaccggcgacgtggctttacggccgtcaccggagttggcgtctttcaccgcggttgtgccacgccccaggcctttaaccacgtcgcttctagctgcaccagctcaccgataaccgccgtagcccctca

SEQ ID NO: 7889 - DNA, 640 bp, Zea Mays
gccagcatatgagcgggagttgattggattggtaaaggcagttcgacaccggcggtcatatgtttggggatgaccctttacagtctgcactgaccactatagcttaaaattcttgctcaatcagcggctgtccacaatccctcatcatacttgggtcagcaaactgtttgggtatgatataacagtggaatacatgctcgacaagttgaatggcgcaacagatgccttgtctcgccgagtggaagatacaggaactgtgtataccctttcttccccttcctttgatctattctctactttgcaaacggaggctgactcggaccctcaagtggctgcaatccgcgctcagttagcagatggaaaagcaagtcctgactagacaatggcggatggcttactacggttcaaaggcaaggtgttcatcccagatgcatccactttgtggcatgtacttcttgcccaagcacatgagtctggtcatgaaggcgtgcagaagacagctcacatgtggcgcacatcattttacaattctaaagctctccaacgtgtcagggagtttgtgtgcagctgtgcagtttgctaacaacacaagactcagcatcttcacccagtcggcctacttcaacccttgtcaattccc

SEQ ID NO: 7890 - DNA, 519 bp, Zea Mays
ctcagattgaactggtggcgatccgacatgaacatccatggaggcggctgaagaggaaccaagcttggcacccttgggggctgggtcatcctcggcaccacccttggggactgggttatcctcagtggtgccttcaggagctgaagcacctttagtcgtacccacaggagttgggtgactttggcctacaacgtcaagagccagcgtgtccccatgagctagaccaccctccaaggtcaaagaagcatgagaaaatgtccaggttagttcttgcccaacaggattaccagccaaagggacgtcatccgggacctctgtacggacgacagaactttcagtcttaggaggcttcaataaaaggtcttcaggaataatttcctctagtgtatggtcaatggcagacattgtcaacccttggagactaactagtcctcataaagcctgcattggaatatcactgctgctatggctgtggctgttcttgcgaatcaaagggacaatttactcttcttcctcttc

SEQ ID NO: 7891 - DNA, 580 bp, Zea Mays
ctgcccgacgctccacccgaccgcgccaacccgacgtccgccaacaccgaccacgacaccaagtgccaagaaccgacgccgagcccctgcgtccaacccgagccgaccgaagcatcgcgacgtccattcttctccctgcgttatggaccttcaagacaaccgtttcttcctcgccattactccctcccgctatcaatggagccgttactccacatttctctcccccgttaatggtaatatggtgatgttaatggccgtcggccaccatttcctcctccctggcgccctctcatctcccctcgccctcgcctataaaatggatgtcgagcctcctcccttcctcccccaagttctctctagctcctcacattcgcgccctgctctttggaccacgtcggacagcctcgactgagcccctacagccgaacccctccgtgctcttcctctcgccgccggagctccgtccgcgctcactgtccaccgtcaacgcgaccgcgcagcaccccgactggaccttccgcgcctcgttgttcgaacgccgtcaccagagctcgtccgcgtagcacctcgaccgtgctca

SEQ ID NO: 7892 - DNA, 410 bp, Zea Mays
caattttgctgcagagccttggatgtgttgccatacaaaatttagagaaaatttgccctgaatttgatctgtcaggccaactgaacccacctcgccatggtacagtgcatcggggaaaacaagtttagaaactcgccaccgacgacccgcgcccggattcacgctcatgccgccgtgattcgtgcccagatcgtatggatagcgcctgggatcgagtaagaatcctcgccggccatttaactactccggccatttaactactcgggccatttaacaactccggccaccgtaccgatcttgccacagtcacttcggatatcctcgccggtgactgcctccttacgatctcgtgccatgtgccttggcacctccaccccatcgtcgtgacccgttgtaactctctgttgatc

SEQ ID NO: 7893 - DNA, 599 bp, Zea Mays
ggcgggttgattccagaaatccccagggtctctttagaaagaatggcgcccgaaggggtatccatcaatgtggaccgtttgatctaaaatctaagaccccgattagatcagccaaaccctaaggtcacagccgccggatcctaatctgacgttcctggtgctacctaacctggtcacacccgccattcactccctaccattggatccgagatccgtggccgagattcgattacgtgcacatctctattgaaccctccgatcaaatctaacagccctgatttaacgtaccgaagtggtacgccacacctaatcctagtcgttcctgcccaaatcgacggtgcacgcagatctacccgacccgagtcctcgccggcgacgagaacaacccgcacggcggcgcgccatggccggaattctcactttaacccacggtgcactattgctaggtatactaggtgcgaaatgaaattgggaaggaggcaaacatggggagcgggtccttacactaactccggcgttggctcggtcagtccacggcgagctgcggatgcgtgacagtgaagatcaattgggcgcactccggtcacccacctgtcccg

SEQ ID NO: 7894 - DNA, 310 bp, Zea Mays
gaccgtagggattcttttgcaaagctggcagggccgaaggggtaagcacggatctcgaccgtccgatcaaaattggacgcccaagattagatctggatcacgccgaaccggtatgctgcgcgatccatccactccgcgatcaacggcgcggattttatttttgccccgagccacccgatttatccgatcggatatcaacggccaacacgcacccgactgaagcgttatgcgccatccaatctaaaccgttagatgcgatttcaacggcaagcgcttctcccccaacacgccgagcacccgcgcggcggcg

SEQ ID NO: 7895 - DNA, 578 bp, Zea Mays
agttgagctgttgatcagctgttgtgtgtcgcctagctatatgtcgacgtgcatgagcttcagttgtcgactagcagccgttttaggattaattgcatatagaaactagtagatgtggtcatcttccaatttcagccattgttgccatgaaaatagcacaacatagagcttcctccctttctccgggaggccaccctcagccaagctctagccaagcatccaccctcaactcgtcactagtcactccagtctcgcgaccaatcctggtcctacttttgatacctgcaccatcatggcgacgtgatctctctaccccagctagtgatggtatgtctatcagtgtccttcctctcctcgagtgggccctccctctcaaccccaacgctccctcatttcgtcattcgttggttcctagggcgacttggggaacataggtgcatttgtgcaagggttctgcccctgcggttgcggttgaaagtatcgtctgacgagtcctccgaaaatggcgacgaatatatctcttcatccctcatggcaccgagctactatcctggctccgccccagttgcgggatcatt

SEQ ID NO: 7896 - DNA, 295 bp, Zea Mays
cacggggccaggcgaaccgacgggaaatcactcgagtagatccctcgcccggcccgagaccaccctcataagtgactggcaacattaactacgcctgacaccaagccgcgacagaggcgctggtccgcctcccactcatggcctaccagcccctcggcctgtagcgcactcatgaccgacgaagccctcggactacgacgcatttatgacccgcgcacccagatgggcacccaaactacagaggccaggtgtcggtgtagctcgaatgatggtactcgggccccacgctgcctgc

SEQ ID NO: 7897 - DNA, 495 bp, Zea Mays
gtacccgacacttatcacatagaaatcgaagaaaaacgctcctgaacttgttctgtcagaacaagctgaatgtaatcacgatagtacaatgacctgaagaagatcactgattcagtgaacctgtcgccgccggtgaacttgcgccgcgatccccgccggccatcgcgattcgtgagctcaagtgtgcggataacggctggcggtgaaagttctcaacatggggaagagttggagccttatcatcggactgttcaccgcgccacttgtcgcgcgatcgaccaaactgttctcgccagagttcgttgccctttgtagtcgtgccatgtgcttacgcttgttatcgtgtcgcaagacatcgcagtggacagcccatttaccaccatggtctttacctcgttgagcgccatggtagctgcgctctggtaactcaccttcgctccgaccgtaggttcatcccatctcaaattcgcgaaaccttcgagtggtctctataaa

SEQ ID NO: 7898 - DNA, 1156 bp, Zea Mays
tttgaactcctctccctcctgaattcggatttggtgataacccgctctgtggtccaatttggtaaagatagctgccccactcaactcatcagttatctcatcaaaaactggcataggaaacttgtttttcaccgtataagcatttaacttcctgtaatccacacataatctccattcaccatctttcttcttgacaagcagcacaggtgatgagaaagggcttgaactttgttgtataattccattactcagcatctcctttatctgtttttcaatttcatccttctgttgtggggtgtatctatagggtcgaagcctgaaaggtgtggctcctggtagcagaggtatggagtggtcatacattctttttggaggcaatccttgtggcggcagaaataactcctgatagtgctccaacagtgtggatatctgctctggtattgcatcaccctccaatgcttctgttggtctgagctcaaacatgtgttccacagcctctttacttaacagacccctcaactgcttgtcagacaaaggaatacaggaatctagttttggttgaattccttgcagctgcactgtctgcccttgatgacagaattctaacttcttttctgcccagtacacagacatgggactataaccttccagccaatccattcccaaaataatatcatagccactcaggggtaagaatttgaaatctgtatgaaaagtaatacccccacacaaccaaggacactggggtgcccagcagtcacaccacagtttcctaccatcagccactttaactggtaaaggtttaggcaattgctgtacattcttgacatctcccatcaaatgcagactcataaaactagctgaacttccagaatccaccagcaccaacatctgtttgtggtgtattgaagcccacaacctgatagttttgttggtttcactgccactcgcagcagctattgatacagctaacaccacctcctcatcctctggtgccacctgactctcacttccatcgacttcaatttctcctaccgcctgagaggtaatcgcccacatttcttccacaacatgtaatggcacactactggaacatgtatgatttggattccatctttctccgcacttgaaacacaacccctttgctcttcgataa

SEQ ID NO: 7899 - DNA, 607 bp, Zea Mays
gggcttagtaatgctggaaaaatttggtacgaaacaccgataatatccagcgagccccaagaaacttcgaatttcagagacactagagggtctcttccactccaccacagccgcaacattcttgggatcaaccgcaatgccttgctgattaatcacatgccccaggaaagcgacttcggacagccaaaatgcacacttcttcaacttgccatagaactgattctcccttagggcacccagaacgagacggagatgctgctcatgctcagcctcgatcatagaataaatcagaatgtcatccaggaacacgaccacaaagtcgtccaagaactcatgcaacatcctattcattgcttccataaaagcagtaggggcattagttaagcgaaaagacatgactatgaactcataatgccaatacctggtgcaaaaagcggtcttctcaatatcctcctcacgaatcctcagttgatgataaccagagttcaaatcaattttggagaacacctgggcacccctcaactattcaaagagaacctcaatacgggggagtggatatttattcttgatagtcacttgattcaaagcgtgataatccacacatagc

SEQ ID NO: 7900 - DNA, 905 bp, Zea Mays
gctcggtcgagaaatagggaagagcagaaatccgtggtcgaagccgtgggcaatacgatgacacgccattgctctgcccttggcgtgtgaccgctgagcatcaccggacatcacagggcatgggcatgtccttagaaggcagattggagcacctgggtgatgggaattcatcactgaaatccttcaagcgctgcagatccacgtaccgtcgcgggtagctcatctgctgggttgcgggagctctaattctcgacctggggagtcatcaggaccctgggtgcgtgtctatggatcaaggaagccgatggagcaagcggggatcgagcaattgctcaccggcgtacggtcttcaccttggagccacctgtaccgtgggcgggatgcgtgggcatcctatatccaggtaaaaagtcccctggcaccttcgctttgtcctccatgagatttttgcggcattcggttctgtgcttggtgcaccgtggcgagggacggccatagccggccatggccaccaccgcgctggagctgtgggtggcggtggttgggcgccgtggggaaggatgacgcgactgccatggatcctctgatcgacggctagaaactgatacgcacttaccccttcgttggttgaataggtgtcgttggatggaaagagaacgctcaggattacatcaagtatttagtaactctcgagcgtcgatccctgttccaacggtggtgtttacgtatcgtttcggctgagatctgatctaatccatacgctcggctgttgatccaacggctgtgaatggccgataccccttcgacccgtcacttttgctaaagagaccctatccttttctcgaatgaacccgccgtcccccgcgggatacttctgagtctaaggaatttttatgaaatagccc

SEQ ID NO: 7901 - DNA, 981 bp, Zea Mays
tcgtgcaagatacttttgattctaattaattttcgaatttaattaattaatatcgcagatgtggtaagtacatgtttcggtttttacatttgcaagaaaaaagaggaaataaaatagaggtagttatgttggttgaaatggaaatgatattatataggtggggtggggtatagagggatgatttagaggaaaccgctgtagtacgtgaaaaaatagggggagagagaatgctgatgtggaggaaaagtaagatataggggaggaaatttaatggaaaccgctgaagatagtctaatggcctggtctgcgccatttgagaggaaaacgtaatcgcatcacttgtgcaattgatccgtacctcttcacaggaaaaggtagagtaaactttgagaccatacctcttaatttgaaagcgaaagtaacgtattgataattcagctatcaaagaaccctgagagctgagactacacgcgccggagattccagtggaattattttcccgcacccttgactcctcaatcctcacgcgcggaattctattcctgtccgtatctcttccgttctctttcactggacacacaagctctacagagacggtgttatttataatctatttttaccgacgtttttttataaccttccgtgctagagattagtagaaatagatcttttattgtcgattatttgagaattgtggtcgagttaagaggcccaccagtagaaatctattttcacgagcctagcggcatgcctgttgcagtgatcatatatttatagagtaaatcaagcatttaagaatagaaattgcgacatatctctttgctaaatttacgtgcatgtagggatacgtgtttgactcatgcacagacgtggggtgggggcgtatctgaggcttgaggaatggatggacgcgctgagctggaccaggtcgcaggggtggtcggtctaggcttactttaactatttgaagcatagttgtca

SEQ ID NO: 7902 - DNA, 511 bp, Zea Mays
ggcacgcaaggaagagggtgacgacggggctgctcctctagcgacacgaggaagatgacgaggcggctcctccaaccatggcgacacaacacatagaggagaaagggcgtaggttgctgctgtgcgagaaggaagagggagggggtgaggttgctgtgcgcagacggttttgcgcgaatccgagaaaaatgggatgaggcgcgtgcatcgtgtgggagcagagggaaagttggggaagagagagatggcagttgggtccacagctgacgcgtggggccggggtgggcggcggcgctggggaatggcttctgctggggcgctcgtgggcagcggctgggccggccacgaggaaggcgaggtgaggtagcgggccatcggctgggagggaatattgggccttttcctattttctttctttttctcctttttatttccaatcgaattccctactagatgcatgcttcacaaattcactcatcaaacaaaatgaaagaatgctccagcatgatgc

SEQ ID NO: 7903 - DNA, 612 bp, Zea Mays
tgaatctgtctctgtattcacttactgacatgcctccctatcgtgagaccagggataagaactccttgatcttcgtgagaccagcaggaatatggtaaatcctgaagtgagtagagaattctgcctaagaaatggtgttagcagcagcgtgcaacagcgcaatatgcatcccaccaattcgcagcggggccagtgaggcgacccgatgcatatagcactttctccctgtcggtgcattgggctatgttgagcatcttttccatggactttaaccagtcgtcgacttgtagtggttctgaggagttagagaatgtaggtgtcttgtgactcataaattcacggtgcttatctctgggtagagttggtggtggaggtggtagttgctgtcattcatgtcgttcttgacgcatttcttggcgttcttgtcgcatttcttgacgttcttgacagatttttacttgcatttccatcatcatgttggccatttgttgtagtagtcgcatttgagtagcagccacgtcattaacatgcgggggattcggaggaggattcatttctagttccggattagctacaacccttcttcgatgaattcgtgcgggtagatcaaca

SEQ ID NO: 7904 - DNA, 319 bp, Zea Mays
gctgcctgcgctgcctgcgccgcctagaactggtggacccgctcttctagctttttctccttctcctccgcctcgagctcatgctcggccagcaacttatcctgcctttcaaacatttcctccctgaaggcgagatccttctcccgccaggcgagatccgcctcccgcatatccagggatgcatccttctccttcaggttctcctcggccagggcaatgttgctggccttgtcctccagctcccgctcccatttttggatcctctccacagccgtggtctgctggatccgttgctcttctaggatttcgttcaaggcgc

SEQ ID NO: 7905 - DNA, 379 bp, Zea Mays
ggccggcaaaggagcgtttcgcagcgcgccatggcgtacatcgacggcgagcaatctagaccgatttacaaccttcccacgtgcacagttcaccaaaacatgttccaccttcctccccgctcccactgctccagacgctcgacgccgatcagtggcgaggtggagaatcatggctgcggccgagatcccaaccttcacgactctctcttctcacggtgttgttgtttctcctaggctagctgcgagggtggggctatcacgggcacacatttataagtgcagacgtcacgaattgtaagggtagatggaggcggctcgacggttgtgagcatcgggcgccgctgcaacgacatgggcgaggaaggcgacctgacgtgtg

SEQ ID NO: 7906 - DNA, 684 bp, Zea Mays
tttctccttgcgggctggttaatgtaaccatcctcttagcacaagatattactccatcatacttggttaagtagtctattccaagtatcacatcgattccactcgattccaagattaccagctctactagaaagcttatttctctaatttcaagcttagtctgagggcatgagcgagtggttctaagttcacctcctagtgatctaattaatagtttgctcttcaaaggatagtttgatatattatgcttttccacaaatgactttgttatgaaagagtgagatgctccagaatcaaataaaactgatgtaggtatggatttaataaggaacataccatacaccacgtaggcatccttaggaactgtttctgctgtcacatgattaactcttcccttactctagttctgtggagtcttgttctgtgcagtaccacgagaaggtgtattccaatcaactctttgactgctgttcctctggggtgtctgtgggttgtgcttagggcaattgttggcataatgaccaagttcaccacacttgaaacatccactaggttggactggagtagttgtattgttatttctggccggtgtgttcacgacgcttccttgactattttgttgataaccattagacctttcaccggtctgagaactgttcccctgctggttctggttgtttctct

SEQ ID NO: 7907 - DNA, 517 bp, Zea Mays
tagcatcaaataagtgggaaacacaactcaaagggtatgtgaaatctatcactgcgagacaaatttgagaatcgacaacaaccaaagctgcctgccgaatttatttcgcatgggattcgttttataagggtatgctcaaaggtatagtattctcattagttccaaatgtcacatgtagcttctcaaatcccaatatcaaatggaatgcacaggcaatctatccagtctaacaactcaaaagtacataccctaatactacaggccccaaatgaacacatgaggcaatgaaaaactatgaaatgtgttacaccataagtgaaccaattttgaaatatgtgcctcaccatatttggcccaaaattaatttgactgatcagtcactcaggtaactttcatcatctatttgacttgaatatgtatactattcaagaacacctaaagcaaatattgtaactgagtaaattacatacctgtccaaaggcacctttgacaagatgtagaggctttttatcattgt

SEQ ID NO: 7908 - DNA, 293 bp, Zea Mays
gaagaagcccaccaaccgtccgatcggttgtagacaacaaagattagatctgagcttgctacgatggtggccgtagatcaagtaatgggcagtccagattagtttgatcataccgctttggcgtggggcactcctgaccgtttgatctgatcggacagctgttatcgcgtacctgtttggagtcatggcgatatcatcttggccgttggttctgatctggcggtcgatatccactgataccccttcgcgcgagactagttgcaaaagagtccctgcagaatcatgtattcaac

SEQ ID NO: 7909 - DNA, 869 bp, Zea Mays
ggaaagagagcccacctaaacaccctcgagggctgggttgtagcttgcactacccaccagagctagatcactaccagaaacaccctctggggctgggtaactgccagcaccaccttccagggctgggccttctacagtagccacctctaaggctgaaggctcctcagccacctccatgggagtcaggtgactcagaccaacgtatcggcatggaaggctgccctccaaagtcgatgatgcgcgggacaccgctcgggttacctcttgcccagcagaatcaagcaaggaaagcccactgtctgggacctctgaactgacgaccgggatatcatctgcaggtggctcggatagcatatctttggggacgacttcctccaatacttgatcaaagtctaatattgaatgaagactaacaggagccgacaaagctggagaaggaatatcactacctcctcgctacctctatagtgccgactgttcttgcggatcagcgggacttcttcttcttcttcctcttcgtccttgtcaaatatgcaaacaacaacctgtgcacgagcacaacccttggcatcaaccttaggaagggcctctaccactacatcatcaagagccggagcagaagggcctgcaccctggtccaagcatgacagtcgccgaagtcgcttcttcttcctttttcctcaacaggtgcagtcgggtggctcactcggcatggacgctttggacgggcaccctcgggtttccgagtctccacctcttcaccaagttcttgcccagctgtgatagccattagctcggcgtgggtcgagtcagatgattccccagccagcaaactaagcacaacatctatctccacgtcgtcagtgcta

SEQ ID NO: 7910 - DNA, 519 bp, Zea Mays
gtcgcggaggcatctgtagtcttcagagctccggacttcgaccctccaatcgcgctagcgtaaagggccttcgtctcacgatgaggatccaccaaccgcagcggagccttcatcttttttttcaaagactgctagtggtccttgtccatcacagctattacaatagctccatcattccacccgtaagaaaaaactcagaaataccaagccagagaatatgtagagtcatccttgccagaagccatcgaaatgcgatcatcccttcaccactcaccccttgacacttttaccatccgagcaaatgcttcccgcagagcgagcaaatacatgacctctcctagctcaacgcacgtctcggccagctcctcagcaaacctgtcacagaccttcgccagttttgctgccctcgccagccacttcgcctttgccttcaccttcctcctctttctcactagtggcattacaaccttacccttggagcacccctcagccatactaccactcttgattccacccttc

SEQ ID NO: 7911 - DNA, 309 bp, Zea Mays
attttttaagcattagatgcttgcactactggccttctctcttttgaagcaaagatttttgcctgatgcaggcttttgtctatctatctgtttcccttagcaatccaatttttttcccctcctaaacccttcttttcctagtttgttacgggctgggctgttgcttttggatgcgccccttctttgcagattgttatatttctatgttagaatgtgtgtctctcatctcatcgcctgtcctcttctccctgttgctgccacgtccacaaaccctcgctggaacgtacatctccgttgcttggaaaaggg

SEQ ID NO: 7912 - DNA, 496 bp, Zea Mays
aaggcaaatgtggtggttgatgcccttagctggtccgaggttccaaaagtggccttgcagttgattgctgatctggaccgtttggggatcgctttgtgctatgtcggcaccgctagtgaggagactcgtatgcttattcaatcttccctcatggagagagtgcgtgcggctcagcagcaagatcgtttattgcaggaagctcgaaagagggttggcgatggtaaaccctgggagttctccattgatgagaatgatttggttcgtttcaggggtcgcctttgtgtgcctcagaaatcagaagtaaagatggatatattgagagaagctcataaaacgccttagaccgttcaccctggcaaaaccaaaatgtatcgggatctgaagcaaaacttttggtgaaagcagatgaagtgataggaacgggggtgcccgatcttccgtcaggtgaagataactatcgatttggtggagatgtcacacagacgatccggcttcc

SEQ ID NO: 7913 - DNA, 334 bp, Zea Mays
caggatgcgctgcaatggctacgacacctaccccgacactgcatcgacgactggagcgacttcagtcggtgcttcatcgcctacttccaatctctctcagacaagccggcgcaaccatgggacctcaactccattaagcgccgaggggatgagactctccggtcgtacctcaaaagattttagaccatgagaaatcatatccccgaggttgcggaagcagcagtaatcaaggacttctaccgaggatctaagactcggccttcgtccgagccatactgcaaaaggcgtcgattacctccgagcagctatttcgggaagcggacctctacatcac

SEQ ID NO: 7914 - DNA, 470 bp, Zea Mays
ctttaaaagtaaattaacggtacgaattcatcagagtccggagtatttatcacatcaagtcccgtctaaaaattgaagtcgatctcgttttggtccaatctatttatacctctgttaaaccttaatccaagcgcccaatatattcataggattttgtaaacgaggtagagaaaaagacatttctcttttatcctctacatatctatctacttctatttttttccaacgtgagctgattttcttgatttttaaaaatatctcaccgtcgctgtgtacttcagaaatatccacggccgaactgactttcttatcccatcgctatctcttctcccattcagatttttcacagccgtgctctggacttctctttattccacgcgggccctcatcctctccctccctggaaaatatcctcacgccgcgccgctttaaatttgggataaaaataccgccgcccagcctctgtcttc

SEQ ID NO: 7915 - DNA, 537 bp, Zea Mays
cttcaataaaatgctcttgcttcctctcatcttcagcaacttcatccggtgcatatctggagagctgaatgaacttatcgcggtactcgctgactgacatgctcccctgctttagcgacagaaattctttcttcttaatcttcatcagtccagctggtatatgatagtttttgaactgcgtagtgaactccacccatgtgatagtatcagcaacatcatgggaagcagtgtatgaatcccaccaatcagcagcaggacctgtcaaacaaccagaagcatatagaaccttctcccggtcagagcattgcacaataatcaacatcttttccacagacttcagccaatcatcagcatccagtggattaggagagttagcaaatgtcggtggcttatggctcatgaactcccgatgcttgtcccggggtgaaactggtggtggtggaggaggcggtggttcttgctgctgttgttgttgctgttgctgttgcacccttctctcctggcgtatctcctctcgctcttggagcatctcctggc

SEQ ID NO: 7916 - DNA, 585 bp, Zea Mays
tcggaggaaggctccaccctaggtacgtcagaacaatccataatcccagctcaagtgacgacaggggaaaccaagctcaaggccatcagcaaagctcccagactatagggacgcaacaaagttcttacaggccaccagctccaagaggcagaggaggaagaagcttcggaggaaggttcagttcccaacctagaaggttgttctatttattctgtggggaagataagggacatacaacaaggacgtgccaagtcacaatccaaaagcaaaaagaaatagttgaagccgaagcacgacagaatcaggcgaagcaggtcctacacactgcttcgtgctattctccatacattcctgaatttgtgggaaaccagcagcccatagcttcatttgcttcggcaagtcactctcaaactgcatggactccgctaccaccaccacctcctatggaaccaaccctgcctcacaatcaacaactagaagggcacctccaagcgcagcaacagcgtgatatacgtgaagagtccgaagctcgtacagtcaacaacactatgcccgagtcaagacacatttactgaagcaatacag

SEQ ID NO: 7917 - DNA, 481 bp, Zea Mays
tttgattctccctagcgcaagcccagtcgtggctcactcacttcttcggtcatcgactgaccagtaagtcgttgacctaacccgcccgttgcagcgcaccttgccttctcatcactcatcagctcgtcgactcgtcggggtcctgtagacaacgttgatattttgcctcctagtccgcaccagctgatgggcaagttgttggtgggaccatggtgtcacctgtccctcgctaactcattagagttccaccacgccgttgcaacacgacaatgagtgtcgcttgccgtcaccgtcatctatcgctaccttgcttcctgcactcgctcctccaagatgtcgtcgtctcaccaacgccatctcacgacaatttcgatgactcgccagaacgacgcaccgatgcggctgctccgccctagtgcctcgtcctcagtcagtccacatattttctctctctagctctccttttggtagccaaaaaggt

SEQ ID NO: 7918 - DNA, 1560 bp, Zea Mays
agtaagaaagatggggcctcaaaagtagtttgtttggacaaccaaggtagcttcctcatcatctgatgcatcctccaccacaacaacatcctcaacagaggtgacaacctgaagcaacgtggaggtctctgaaggcaccttaatggtctgcttggtggacatcatttggcgagaatctgcttcaaatgcccctatgaccacctcatttgaggtaaggtccgtctctctatgaatctccgtaccagagatccttgtgggcatctcgccaaggatggggattgtggtgtttgcaatggtgtcctcacacaccaaggagtcggcattcgtgtaggctaccgcgagagaagcaagaatcgatgatggcgaatcatgcttcactggagaacaggggtcaaagagcttgggcaagtcagagacaaaagcatgctccccatgtgcatccgcatgctccaaatggttggccacacgtgctagccacaacttgatgatagatgcctcctccttgagaggttgcaacacttccttcaaaagagttgaaaacatatgttgaaactttgctcacaacgactcggccaaaggggtgatcaaggactgaaggttcaaaggtgtcgagtcaagagaggcacaacaacagctatgacaaacaggatcgtcgtccttaccatgcaaatcgatgggttgagaagccaacaaaggattgcgatgttcttgcaattgagacttggcgatgacgtcagctaacaacgtacttggcgaaggcttggccactacctcagcccaagtcctcgattgttgaggatggtcacattgcttagaggagttaactcgacgggcagaagaggaaaccaaaagcgacaatgtcgctcccgatgacctgggcggcgacagcggttgcaacagaagttcttgcatgagctgtcttggtgatcatgtgcgaggcagcgataacacctgccccaagcccacctcttgatggcaaagctcctctctgacttgctccttgcaacagcatccgacaacattagcaacatggtctgaagagggaggacccttgacgacagcgtggccagtgatggtgggtagcccagatggtggctattggagacggggcctctgatagcgctaagatcggtcgcctccatcgatggcagcaaccaatctagggaagagagcggccctacatgatgcaggatagggacaaacactcgggaacgagcaaccggcgagctcaaacggtgggcttgaggccgggcagattctctccttccacactggtgccttgctctccttccgcggactgaccgcaaatgagtggcggagtgttgagattgggtctccttcctcaagcttgatggcccagcggaggggtgagctcgggctgtagcccccgatctggggtgggggagggtggatctgacatgtacgagcgtggatctggccagagacaggcggtggtgagtcccacgcggtgacggtagcgaagagtccacaaccggcggggacaactcagccttacctgcaaagtcgtcccgggcagcagcgacttgatccttgggcggg

SEQ ID NO: 7919 - DNA, 304 bp, Zea Mays
atggcaagatcatcttttatatccatgcgccaccagtggtctgcctgtgtgggtgcgtatgtttccatcagctcagctgtgtcatcggcttgctggcacctgcatcatatgcagctttgtaagatatttacagtaaccaactgcagtagatcaaagaaaacaagatattttttacaacacaccaaatactatatgctggtagaacccaagtttcaatatggacatgtgtttcagtatgaacaagctgccgatgcacaatattttttggcgtgttcaatgatattcatagtaaatacctcatctc

SEQ ID NO: 7920 - DNA, 775 bp, Zea Mays
gtccggaggttattcttgggcgtccactccggtctggtgccgagcctggagcgacgctgactcctctctctcaggtgctgattcgcgctcaccaggccctccaggaaactgaggcagctatccaacgagagtggaaggcgctcgagaccgagcaccagcgccttggcgactggtgctcccaactggagaggcgcactaaggcgacatcctgccaattcgcctcggagcgggccgagcttgagcaggagcgtgaggacttcaagaaggacaaccggaaggtgtctgaccgagaggaggaggtgacccagaaggaaagaagcttggccaggaataaaaagcacctagaccaaaaggaggaggccatcacagaactccatgataggctgaaagcttataatgcagtgctggagaaatagtgggacaagcaagctgcggctgaggcgaagctgcagcaggaactctccaacaaggctagtgatattgctcgtgttgagggaaacctcaaggcgagggaagcctccctggcgaaacgaacaactgacctcgcttggcaggaggaggacctcgccttcagggaggagatgtgggcaaggtggaacaagctgctagatgagcttgagctcgaggccgaggagaaagtgaagcgtttggaagggaaggtgcgggcgctggaggggcaggtccgccagttccaggcggcataggcgacgcagtcggcctcgggcccccaggcagtggaggtgttgaggaagacacttgacgacctccgggcaga

SEQ ID NO: 7921 - DNA, 409 bp, Zea Mays
tttgtatccaagctctcatgcaacttcttccaaaaccgagaagtaaattgtgatcctcgatcagacacgatcttcttaggcactccatgtagacaatctatccgagtcatatacaattctgctagcttggctcccatgtaattagtcctcacaggtatgaaatgagccacttttgtcaatctatccacaattacccaaatagagtcatacccagtaggggtgtgggatagtccaacaatgaaatccataccaatttcttcccatttccactcgggtattttcaatgggtgcaatagtccaactggtctttgatgttcggccttgactcttcgacacacatcacacttagccacgtgtgcagcaacatctcttttcagtccataccaccaatacttttgcttcaaatcct

SEQ ID NO: 7922 - DNA, 547 bp, Zea Mays
ggggaatcgatacaccagaatgttgtagcataagagtcatgaaggccctgctctcagctcgatcctgaagaagctggtgctgaagggaatcctgcctgtcctgtatggtctgaaacatcgagagcatcctctcggacaactgctgatgggctgctgcctggcgggtctgctcggctgccaagtgagcctgctgttgagtaagtgtctggagaatcgaagccatagcagggtcaatatcaggaggggcagcaggggtagcactagagctcccagcctcatgatcatgtgagcatggaggcataggaggcagaggcggaggtggaatcccaaaatcatcatcatcatcatcatctgctgcatcctgagcttcaaactgatgaagagcagtatcctcggcctgagtgtcaaaaactggagcagaagctggcacaggagcctcaggcgcacgacggtaggacccaaagacaaggcgtgaggcctcaagtgtgccctggaactggggaggcagaatcagctgagcaaaaatgtgacataggtagtgagcata

SEQ ID NO: 7923 - DNA, 471 bp, Zea Mays
cagggactgaccgaaaaagggctggccgcggcgaggtgttcttcgcggtggcggagacttgatttgggggaagtttgaaattctagagctcggttgaacgattacgggtgggagtgggtgctaaggcttcacgatgacatagcgcagctaccccggccatcaatttatagagggcatcgacggtggccgggaatttgaagaaggacgcgcggcggtcggaggagaggaagggcacttgagcacgtgaatccgtgtccatcgtcgtggcaagctcaccggcgatgatctaacggctgtaaagagtcacggtgacgcgacagaggtgctcggatacgtggcgtaaggctgagcgacagcgatcaccggagttcttatccaattccgccgcggtgaacgcatgtacggtggccggaatatttcatcggccggagtttatccacggcggggacccttgcttgatcccaagtgtta

SEQ ID NO: 7924 - DNA, 1856 bp, Zea Mays
gtcgcactggaaggagaaggagaatgctccacctctcccgctctacccaagcggcgcctctaacccctctcatctcctcccctgcaagcgcccgctgcaatccccatccccatgcccaccgctgcgccggccgctcgtcgatatcactggcaacgcattggaacagcggggcgggtatgggtatacaactcccctcccgaacgcttccaggccttgcgggtttcttctgcacgacgacgaagacgacatgaacgaggcattcttgcgggaggtggacgccatctgcgaggagcgtgcgcggtccacggccaggaaggaggaaaaggagaaggagaaggagaaggagaagaagccagcagaggagcataaggggacgggcggagtggcgctcatggcggcagcgggcacgattgacgccgctggaacagagacagcaacggtacggttcttgtttcatcgaagtgcctggaaatggggttaggaatccggtgggtgtattttatttacaaatgctggatattcagattctaaggaaatatggagagccaatgcacgaaggacgttattatttgtttaactggggtttgctttgaagtggaaacgccatttagtgacattttttgaaaaaggaactcacattgttgctctcttatttggacggaaattagcttgacgatgctttctgggaggaggtgagcgccatctgtgaggagtgtgatgcccagtctgctgccaagagccaggagaggacgaaggaggaggggagcttggtgctgtcctgcgatgatgcttcactcccccctgctatttccatcaccgcggagggtggggaggtatgtgaatattctgtgttcatgatgtttgtttttgattccatgaatcagaggaggaaattgggacgttcttgtatcgagtatggtgcatgggattgttatagatttggggagaatccttaagttatgagagcacttcacaataacttaattttttgtttcatgaactgaaatgattttaggaaatgtctgtgaaacatagcaaattcatgtttattgtgtgtgtggcgaagataggaaataggcatgcacaatttggggtttattgtttcttgaaatgcgactgtgttaatgtaccttatttgtaagagaaatttattgtgttgaatctctgttgaatttcttttgagatgaatttagtttgaagatgcattctgggagatcaatgccgttatggaggagcacaatgccaaagctcatgccaagtatcaggaggggctcaagggaatggaggagaaagatggattgttagcactgtgcggtgatcatgatccttcagtttccccagtaatatccgttgcaatggggggtggagcggtatagcttttttcttcagacaatggaacaccgagtagttgtaggacatcagacagtttttgtttcctgtgtctggaaattagcatcagtaccaaatggaaatttgtactgagtggttttagtctggaatgaagtctctaactgagttcatttgattccttttctcttgggacatatttagcttgttgatgcactccttggtgaggttgatgctgccgtccatgatgggcatgctgatatgtctgctgctaagggccaggtggaacagcaagatatggaactagaaaaggaggaagatgaagcgtgtgctccaaagaagtacaatgaatatttgcactccttgaatgataggcagaaggaggctgcatgtaatgatgttgctgttcctctaatgattgttgctggtccaggaagtggaaaggtatacatacttgtccttttatctttgtgtattcagcgcgtgtatttttttgaccgattagagtc

SEQ ID NO: 7925 - DNA, 1050 bp, Zea Mays
ggatggaaggaaggattcggaacatagtgggaaggtttgtacaagaaacgtgatcgatacaaagaagagatgtcagattattttaagtgggaggccaagaaagagttcaaagacctgatgtctcaaatgctataaaaccctcctccaaaattgatgtagctgttggagagtgcaatgtctgttcaacagatgaccagtccacagatgcaaataattccagcagctcaaccgtcagcttcgaccgattgtacgaccttcccaagctctatcgcgtcaacgggaaataaggtccattatccagttgataacatcacaaggcctgtggcgtgcacactggttataagatatggtattaacaatcatcgtaagatgaaagtaggcataggcattgcgatcctaggacgcaagtttcatggaagcaacattccagatgataattgcagggtagaagtgacaacggtcgtccaaggatccgaggatgacatgctagacatccctggtcctgaaggtatcgagacacttggacaagccatcaaaaatttcatcctttcgcctcgaagggatgtcgaattggttgaaccaccaccgccgtcgtcgtcgcatccccaaccatctccgcctcctcaaactttagttcctattgtacatccatcatcacctcctcaatcttcacatgctactcctcatcctctttctgacccaccgtcttcgccacaagcattgccatttagggatccaccaccttctcctcctcatcctcttggagacccactgtctacaccaccagcaagggatccaccttctccacagccatcaagggattcacgaccatcaaagaaatctaaattccctataccaaaattggtgtccacgttcgagaaaaagaagagtaaagctactactgctggcaccgctcgatttttaaaagggattgcacgggacctcacgtcacatacagttcgtttggccgagcacgaggagtctgcaaaaaaggctgaggctatggccgcaaagataaagatcccaactaaggcagattataaaaatgtc

SEQ ID NO: 7926 - DNA, 522 bp, Zea Mays
ttgctgagtcattatgtgcacatgcatgactgtctgaggtccttgggacaaggacatctgtaggtgggtctaataccttgggaggttccgtgacactagacttcttcgagctccgagatcatgagtccttgttgcagtttctgtatgtgtgcgacgagatgctctccgagagctcagagggttatagctttggtggtgaaggctacgatccgtccttagaatgcttccacatcgactctgagatccccgaggaaggagatcacctcagcatgccgcgggaaggtgaccagcctccaccacataacccagacggggcccagactcctccagggagccaagtagctcacctcgagcaaatccgagagcaacataaaaagctcggggagaagcagcaacgacagtagcaactacgacaagctctggagagggaggccgcttgcaaagccctcgacggaggcgcgcgagcgaaggcacgtgacgtctggcgtcgcatcgaggaagacgctgacgccgccacacccc

SEQ ID NO: 7927 - DNA, 332 bp, Zea Mays
caaccaaacaagttggttacgatcagggaccgaccattacaatcgtaggcatctcctcttggctatataacctgagcaccccctcctcatccatcttgtgccaacgccaaggagccaaatgtcacaatgacccaaggagttgagagtgccaccgtgaaccgagtgccgaacgagagggagagaaggtccacgccgcagtttcggatctacactgtctctcgggtggtgtgcgtggctagcccagacgggaggagtggtcggagagcaagaagagtcgtcaccagagtcacaaatagaggttcctacttttcatccctaacttccctaaccta

SEQ ID NO: 7928 - DNA, 631 bp, Zea Mays
gcgagcgccaccgctcaccatcactgcccgagcacggccgtcgtgaccaatcttttctaacgaccccagcctcaccctagcccctggacagcttccccgagaggctgtgaagcttctccaagcttgagccgaggcattgcctcaccagagaagtggaatcaccctcgccggacttcggccgcccgccaccgcgcgtgaaccaagctatctggtgagccatttcccaattcctcgtgcctctgtctttcctggtctctggtatagctcactgaccaatttaattgaactctaccgccctggataggctggaatcctcaccgccgacgagctcccccgcttgtgcacgtggaccgacctactccgaccatccccggaacagatgcacattggcgtgaccgtcacgacctcccctacaccctcggccacttcaccagagcaatctcgccgccggtaagcccctccgccctttcctatgccgcgattactgtttcattaggggaaggaccgcaggtttaatttaaagtcaccccaaggggttttctgcgtagtcagagactcatgtgaataatgttttaggggcacggtttaaacaacttagatagaagtaagcccaggtaccccgatgcaaaac

SEQ ID NO: 7929 - DNA, 802 bp, Zea Mays
gtgacattgatttatggagatgtaaagagcttcagttacaacagagtacaaaaaataaatagaacatcaagactccagtatgtgcagccatatagtcatcagatttgaaatgtaaaatagttgaggtttcttttttgttcgacattatatgagaacatcacatctacactttcgtactttgcattgtgaacaccacatgcacttccgtaattcaccattgagacattgccacattgattcgtacagcctatgtttacaaccaaaatgcatatatgtattcataaaggatatataatttgacgatagactgaagagcaggaaagcataagactatagacctcaacaagaaaatgtcagaaaaccaattaaatgttacaaaagacatcatggttggtacttggtagagtgttaatcaagatagcattacaaagccacatacctgaacgcgactccagagcaaggggacagcaactttggcacgatttcttacaaaaacatttgtccacagtggttgatttggaaactccaaaagaagagtgtctgtttgtgtactcagattgttgttactgacaataagactttttggtactgcttcataaagagttccagcagctcctgcattatctggacagcctgaactccttccccctgaaaaaaatgacagacattaatttcaaacaaaataaaacaataaggtcatctcatcttaacaataactttagacgtgtggtctgtatcacaatcgctagaaaaataccaagagtaggagtttcatggcacacatttcacatatggaggttaa

SEQ ID NO: 7930 - DNA, 402 bp, Zea Mays
atggctctggggtggtggcttggccgacaccggcaggttctccaccgcgaggatagaagcgccgccgcctgctaaccatcgtgagaagaagacaggggggagatcgtcgatctcggtttgaacggctgagatctgatctcagtcctggcagctcgatcatgggaatcctcaccgtagatccttaatcctacggctcaggtacctgcgggagcttcggcctaatctcgaccgtagaatcctaatcgcgtggagctcgttggtcgataccccttcggcctgtgtattttgcagataagcccctcgccttattagaattgaacccgccgtccactcacgtgggaatttaattaaatctaggtcctgagtttcatagtttagaccctgacctttcgcagaatagtg

SEQ ID NO: 7931 - DNA, 927 bp, Zea Mays
caattattcccatcaggacaaagaacttggctcgttggtggagtcttcgcgctgccgtctcgtcccaagggagcgagttgttggacaaaaagttttggtatgttgttctcaaatcgcctgcgaaatctgttaggggtcccgaccttctatgacaacaatgggctcgggggtcggtgggctaatgcctacgtgttgtctgcccttctagtgggtttcatcgtaatggtcggtgggctcgaagaggtcggtcatgaagacccccggtgggaccgtcattcgtcccgacctcatcttcgtgagggcgtccgctgcttagttgtcacatctgggacgtggttcaactcaaggccataaaatctatcaagttgtagtacctatcgacaatatactgtcatcctaggtcgtgacattccaaatccttcatcacctatgctatgacaagctgggagtcccctagacttcgaggcattggatgcccaactctacgacgacgcataggccattcacgagggcttcatattctaccacattgttggaggcctagaaactgagttggacggtgtaccgcaactattctcctgagggtgacgtgaagatgaggtcaccacctgccccttccttgacgtcggcgaggacttgtgatttaatcgccgtttgtggggcataggaaatctcgtatcccatcaactcgagggcccatttagcaacactccaagaagcctctgagttatggatcacctcccccaggggaaacactgttactatggtgacgaggtgtgattcaaagtaatgcttaagcttccgcttcgtaataaggacagcgtaccagagcttttgtacctaggggtagcgggtctttgcgcctgttaagacctcacttatcaagcagatggggcattggagcggatgtgtgcttccctcctctcg

SEQ ID NO: 7932 - DNA, 729 bp, Zea Mays
gggataccttcagcgctgccgtcaaagatgctacatgggcagaatttgaagccgctttcagagagcatcatgtgcccctagggatcgtccagctcaaagaagaagaatttcgggagttaactcaaggagggagatctgtcggtgaatacgttcacaaattcacagaattagctcgctatgcgcctgatgatgtcagcatagaagccaagaagatggcccgtttcttgaaagggctgagaccagaactcaaaaccatcctcgccagccaagatttcctcagtttctcgcacctctcaaacaaggccatacaggtggaaagggctagagaataagaaaagggtcacctcaagaggaagtttcaagttctccaagctcagcagcaggacaagcaccagagagtccgatcttttgggtttcctcccaaaggaccgagcttcaacaagccagaagggtctgctccgtcacgtttcagccagccgagtcaaagttccctccatgccccatctgttgcaagcaaccaacctctagccaatgcttgttggcactgcggagaccccagtcactacaagaataattgtcctcagttgaagacatccgtgcctacctactccaactcggtgaatggccccaagaatgctccagcaactgcctccaaggcaccctcctccaacagccagctaagcaagacccagtttcatggcagggcatgagtgaatcacgtcgacgctc

SEQ ID NO: 7933 - DNA, 601 bp, Zea Mays
caaagtttaacacgtctaggaacaagggagcgcggtagaagacttgagcgagaaggaattgctcatcggttaatggtgtcgcgcaggatccgattctcgacgccgggatggataatctgctctggccacaaattcaggcccgcctaaccgtttatccgccccaccgcagcaacgtacgcgttacgcgtgccctagtactacttaggtggacaggcgtcgaggaccaagcgcctggccaatcccacgccgacgttcgcggcactcaccttcccttatctcccttcacggcacactggtgggtagttggtcgtcgcagcttggatgggtttgcaagtggagaaaagaaaaacacgacgacttagcttttatctacggggtcaaggccacccgaggatcccgcagtagtggttgagctcacgcccatggagccagcgacgtccatggccatcaacggaaggaagccagcttcctgccctaggtaagccgagcccacacttcggtccgcagacacacgcgaggtatggtttgcgcgggatgtaaggctggccagtgggcccaaaagatcagtggggtcaagagcgaacgcatggggtgtggctgg

SEQ ID NO: 7934 - DNA, 743 bp, Zea Mays
caggaaaataatgtatgcctagctaccattatcaacgaggaccttatgcaattcccatgctatcacgttgcattgtgtagccattgcatcggtatgcgaagcgctacaaagatcgacatcccttatgtcgaaagttatggggacatgagaccacatcgtctgggtgacgggtccagtgatggtgacatgattaaccttctgatagtgatctttttctgtattttattggcataatccgtgttggaccctccagtgatcatgtggatgacacctcgaatacgtggttgtgcgaagtcctcgtcttccttttgttgtggaagggggggttggtggtttaggggaattatttatggatcggcttgaagagtaggaaatgtgttccttgtatttatgtgagtgacaccgagaccaccatcatcttttgcataacagacttgtccccgacgcttgctatccactgccttcacgacccccgggagcagttgcaaggaccccattaagtagataaggctgttgtccaaaactgagttgattaggacaaggcaccccataagatttaaaagatccgcttgacatctagccaggtacctatcaaatttctctacgaggggactaaaggaagacaatctggttttggatggggagaggggtagaccaaggtatgactgtgggaaacccacgtttctgcatccaagaatctcaacacattgctgcacaactacttcatccatgttcatagggac

SEQ ID NO: 7935 - DNA, 449 bp, Zea Mays
cggctaaagtcccaagaccccgacggtggcgggctcaagcttcggtccccatcggtgtcgaaacggcctccgcgacgtcgattgtgcctaagggtcgctcagtctgtctcatccctcatctccagtctcgtgactaggcgcgtttcgcacgctttgacctggccttaggcgccggcgaggtggaatttgtgtcgcacttcttttgagttcggggggttgtcgcgatgtggcatcgttcgttgtaggtgtagatgtagtgcaccagttggtctccgtctcatgacatcgtgacatggagctcttggcctgctactacacaatgaggccgagaagatctcagatttcctggtggatttttcactcgcttggtgtctccaccttagtgagtttgtacataagtgtcacgacggtcacaacgttttagcttgtgtcggtgtttagtgtccgac

SEQ ID NO: 7936 - DNA, 847 bp, Zea Mays
gtggagttagggttgaagttatgtaactccacccatagtagtgcggcagggcctgcataaagcggctcgccggaactccaaaacctcgttcatggaatgagatgaagctaacgatgtagcccacgggtagatctggcacctgttcatcatcagacgcgatccactcgagctatgggccagtggattggggtcggagtaggttggcttcgaccagtgcctccagatccccgtcggtatcagaggatacgagccatgcgtcgcgaggatgaaggacggtgatcttctccaccattggaatgaaggaagaggcgagaggaagacaaaaggctctttgggcagaaggcgaaaacgacgttcaaaggtagaggactgaaacagcaaaggtaacggtctgaagcctccctctcggttagctttatataggacagacggagccaccgaagtgtgaatcacaaatggccggacgacgactgtttcaaatcccgcgcgcacgcgtaccgcaaacgatcagctggccgacagtatgtcctgtcgcattaaatgaccatgtcccctccaaggaaaaatgtgtcgagcgccgttccgcatcccgcctcaaaaggtacgctctctaccctcgacttcactgccttttatcctctcagcaatcaaaccagaaggaagcatcttctgcctctagcaacccacctcgaatagggagcagaaaatcggaaaaagtcgtcttctgcctcggcatatcattccaggagcaaaaaagtcaaggaagtataatgttcagaggttcgaaggttcagccctcagcagggttcagacgaaccgcctcaggacttcagggtttcaagcccaa

SEQ ID NO: 7937 - DNA, 460 bp, Zea Mays
gtccactctcaccggttcactgcctcagctccgccgccgtcgacccataccctcaccatgccccggccaccgttcgtgcgttcctgagacttccctcaaggaaatcatcccagccatgcccttattttcccctatcttgcatttacttgcccgcgattgctcgccggagtactccccgctccgtcgaggactcccctccaccgtctggtcaccttagtcccattcccacaaacccggccccgccatagtgttcgtcaggtcctccccaacctctccagctatttagactgacctctcgcgccctaggagtcccagtctgcctcacctccggcgacggtgttgtcgtgtccacggggagcgccgcctctggctacccggcaaagttgaaatcccctagtcggacgacccgatttcaattaagctagcccaaatcccaaccgccagatccggatctgacctc

SEQ ID NO: 7938 - DNA, 659 bp, Zea Mays
gtcgggtacatatgttttgtcgcacccgcgggtatccaacggatatccgcaattagtgaaactatttctcagcccaccataactccggaagctggtccaaagtcccagcagtccatcaccattgtctaaggcatctcaccctagtgcaagcctcctcttcactcccctcctgtgatatcctattcccctccttactgccagctccttgctcccagccccatgagaccatgtcaacgactcaccatgatgccccaaccaccacgcccaacgccccatgccaagccatcggccaccacgcatgaacgccccacactaactaggaggcccgaaccccctcttccccgtgaccggcagcgacgccatcctcttctagtcccgacgatctactcttgatcgggcatagccagcgccacccacctgcaatcccgattgggcattgtcgatgctgcatcaatcaatcctgaccttcatcacgtacggacccatcttcgctgaccactgggagctgccgcctgccagccctagccgttgatcgccttccccatcgcggaccacaaggagtcgccgaccaccgatccccatcgcagactccattccctttctgttatacctgacgggtacctgatacccgacgagtatgagcacgggtacaaaatttt

SEQ ID NO: 7939 - DNA, 471 bp, Zea Mays
tagatatctctgggtcctcacgaacatagaaacatgtcatgggccgcctaacgggcctccctacggcttgccttgtgagataggtcactgggccacagccaggccgggcgagctcgatccaggcagacgaagatcggacgtccgggttatgcacagaccaaagcactaatatcttgggcaaagaggttccgcacacttgaaggcctaaacactcagcattaactcggccgaagaattgatcgaactccgtataagtaggaatacataccgtgataaaggagcaattaggtagaatagatagtgatcacaacttgtaaagggacaaccctttggtcacctatataaggtcgagggtgtacccctactaaaacatctcataccatctctgatcaaccacatcttagcaccaccacaaagatcattagcccacttgtagcatccacgagctactagattggctggagaactcat

SEQ ID NO: 7940 - DNA, 478 bp, Zea Mays
tacaccaaagttatccatgaatccgtcaaaaattgtgagctggaatgtccgaggtttaaattccaaagcacgtaggatagtgttcacaatctgataaactccttcaaagctaatgtggtttgtatccaggaaactaaaatggctgaaatttccttgcatacaatattgactgcccttgggagtaatgttgtgcacaagctggcccttccctcagttgggtctagcggggggattctcatggcctggagtaatgagattggtccggccagcgcttctagggtggatcatcatagtgtgacaattcagttcagtccacgtgaccaacatccttggtggttaacatgtgtttatgggcctcaaggcaacaacgacaaaattcagtttatgcaagagcttcccaatgtgagatctgcttgtcctgggccctagattttaatgggcgacttcaacctcatctacaaggatgatgataagagtg

SEQ ID NO: 7941 - DNA, 715 bp, Zea Mays
cgaaggatggtccgggaagccgttggcgccgatgggttctcgttcagcacaatcctttctgggctggcggtgaccgcgagcttggcgggcggtctgcaagttcacgcccagctcgtgaagagtggcttttgtgacgatgtgtgcgtggggaactccttggtggagatgtatatgaagagcaaatgcctagcagatggcgtcatggcattcgccgagatccgctgcaaagatgttgtgtcgtggacagggctggccgctggatgcttacactgcggcgagcctgccaaggccattggcattctcggtcagatgatgctggacggagtcatgcctaacaactacacatttgcaacgtcagctaatgcctgcgcgagcctcaccgatctggatgaaggaaggaaagttcacgggtatgtgatcaagctgggagacgactcagacgttggtgtcaacaacgcgctcatcgacatgtatgctaaatgcgggtcagtggcctgtgctcacaaggtgttccagtcgatgcaacagcggccagtcatctcctggacggcgatgatcatggctttcgcgcacaacgggcgagctcgggaagctgtggaggtgttcgacgacatgctgctgagaggtgtagctcccaaccgcgtcactttggtctgcgttctctatgcctgcagccaaggtgggttcgtggacgagggttggatctacttcaacg

SEQ ID NO: 7942 - DNA, 484 bp, Zea Mays
gtctacccaacaaaagagaacaagcttccataggtactacatcgcaatccacataatcagaatacataccaatggagaaatgcactcgtaccatgtgtgttaccttaaccttgcctgagtcattgatccactgaatgtggtatggatgtggccgtggacgtgtggtcaggccaagcttcttgaccaaatctgaactcaccaaattattgcaacttccaccatcaataataacacgtgcacgccgattctcgatggcgaagaaagtctagaacaaattatggcgttgctgcttctctgatgattcaggctaagaattaagaacacgctgcaccatgatgcttcgaaggttcaccatagcatcagcaccaagcatggcatcatcattagcagcaacatcactggaatcataatcgtcatcctcaccgtccaaagcactaatgtagccatcatccgtagcaatgtatgttcgctgactcgggcaatc

SEQ ID NO: 7943 - DNA, 514 bp, Zea Mays
gttcggtaaatgttgttctatggggtgggcaagctagcttattccctggagaacagatctacaacgatggccagtcctctccacagatcttgatgtttgttggcatgcttgtcaagaaatacgcgggtatactaactttgaacttttgaatttagtcctttttgtagttgggacctaatgccctttgttttagatggactgtgcttgtctggcggctcaccctgtaagtggtacattaatcctgatgttcgtgaagcatgtgccctcatggctaggtaatattctgctatgcttgctgcacgtatacgactgttgtttgtcttcgctgtgttctaacttgagcttgattcattgtatgtacaaaccagtgcgaggaaagcacatagtcccattaagtggaacgaggttctatcttcgaatcagcctatgccccatgttcccgaggaacaaaaaatcgcttgtattagagatctgcacccatttgagaataaggtatgttccatgtttgattaac

SEQ ID NO: 7944 - DNA, 811 bp, Zea Mays
ggttaattcctcactactacaggggttctttataaaaaaaccacggcgaaggggtatcgcggtttctgggtcgatggatccgatctgaacggcacagattaaatctggcgcccgccaaccctgctagtaaccccggccgcccgatctgatcaacgctccagatttaatatggttacgatcacatctcgaccattaatagctaatcctacggccacggatcaatccacgcgaatagttatatcttggtttaatcctaaccgcccagaacccaatccacggtcgcgagtgcttcttctctcactaaccaggtcgacggcggcgctgcacagggacaacacggcgaagcatcccggtgagcagtgctccaacacctaggtgccccagctaggctacggatctatgctaaacagagcggagggtaagaagaacttaatggagtgcttcatactggttatggtagcgtctgcagtgttatccacgctgcggcacggatccacgacatggtcgccaccacggcgagaaattgagcggcttgcggtccaattcccagggtgggaaggttacgagcatcatctgagcaccactgcggtatacctggccaaccgacgaggttgaagcgccacccaaatcatgagtcgaccatggcggatccaatcacccgcggagaatgggtacggcggcgctcactccatcatctctctctctctctgctgggcatggaggtttgccgggctggataaaggagggggagggctctacggatcataaccttaagtagccccgaggatggtgttaaggctggaccaaccgc

SEQ ID NO: 7945 - DNA, 276 bp, Zea Mays
tgttgtgatattgctccttgccggtagccttcgtctcataggacagctcatgaatgttgtggaagcattttgcatttggttccaacccctggctcctcatggcccaaataaagatccccatcttgatgatagtttcgggggtaagctaatgaaggtaaattttgaaagtcttcaaaacttccactagcaatttatccagagggaaccgaagccctgccttcatgaagcttctataaactaccacctcgtcagcttcgggcagagggacattatttt

SEQ ID NO: 7946 - DNA, 916 bp, Zea Mays
aattatataagtttctgaaattgttttgtattaaaaatcgatttctataattatttttctaattctttctgatctctggattgggcgccaataacagagaaacacagggactaatgtataaaaatatcccagactcagattcaacccgcggtggacggcgggttaattcactgaaatcccgaggggctctttagaaaaatacccaggccgaaggggtatccagggtgtctggccatccgatcacacctgtgcggcccagattagatcgaatcccaactacatgcctagctgcgcccacaaccactggatcccagatccacggcgcacggcgcacgatgaccttcactccctctcggccacacgatttcctttcaacgcgccagatccaaaacgacgaaggggtacccggattctaatcatgaccacacgtttgaggatcaacggtcgacacaatatcagagccgggacctaatctaacccttcgacgcggaatcaacggtcagggtgctttcttccttctctcgctcacctaggcaaatcgcgccaccgcctgtggttgcccatgacggtgcgcacaccaccggcgattcacggcataatcctataatccgaacgttcctatccctaattgaggcctaagcgaacgcagagaacccgcacatacctgtgttccgtagcaattgtggccggtccacgacgttgcagggttcggcggcgagttgcccggccgacaagcaatggcgtaggtgcggtgatgtcaacggtgaaatcagcggcggtcgaagcttctaggggtcccgacgcagcaccggaaggcctcacggatgcccaggcgcccgagacacacgagttcggcggcggcaccttctttctccacgggcgcagcaatggcggcgccggttgacgctgggagtgg

SEQ ID NO: 7947 - DNA, 653 bp, Zea Mays
atcgaggcgaagataggcttggtgccgatggagaggcagaaatccctgaagtcctggctgtcgaactgtttgccgttgttgactgtgagctcagatgggactccgaatcagcaaacaatgttttgccagaagaacttttgggcggtcttcgacgttattgtggatactgccctggcctcgatccacttggtgaagtactcgacggcgacgaaggtgaatttgaggttcccttgagccgtaggtagtggtccgacaatatctagcccccagcgttgaagtggccatgtgtgggcgatcagcttggtgaactgcgaagggttgctcgagcggggggagaacttctggcatgcttcgcaagacctcgtgactcgattcacggtacagattatcgcgggccagtaaaatccttgacagattaccttagcagcgagggccctgggtcctgagtgggacccacaagttccgttgtggacttcacgaaggatttgaatgccttcggtttcggtcacgcattttagcatgggctgattgatcccctttttgtatagctggcccccgactagtacaaagtcccggcttcggtgcttgaggcgtttggcctcattgacgtcacttgggtggtaatatccttgcaaaaacagggttattggggc

SEQ ID NO: 7948 - DNA, 415 bp, Zea Mays
gcacgatcgggctcgcctctccctccttgtcctcctaacctcgcgacaaccaccgtagcagagggagaatcacccgccgccgagtgaaggagggaggcagtaggagcgctgccgcggaaactcgtcgccggcaggattcaaacgccagcgaagccatccaggcgttgttctactctcgctgcagctgggggaagatctaattggaagcgcaccagctacaatcggggggaattgctcgctgaccggccaacttcgctgccattcgcaacttgccccgcgtagtgagcttcgcgccgtgtctgccggtaactcccttcccttagctgcgtcacgttccttgatcggtagcaaatcacctcgcgcccaaattttactagcgtagactccagaattgctcaacagcgtcacatcctgc

SEQ ID NO: 7949 - DNA, 713 bp, Zea Mays
gcttacccttgggcgtcgtggaagtgtgctacttggctctggcatccttagtcctctgtgtgctctagtgtggtcttctgtcgtctctgtttgagtcgtccgcgcgtctctatgtgtgagccgtatgtgatctctctgtgtgtttgttctcggtgaccctccccttttataggccaaggtggggatcagttaccggtagcttctcaaggaaggaggcaaggagctaatgcaccatggtaaaatgagacattctacctcgataatgtcaagcttgtcggcatgtgcctcggtcatctgagctactctggtcgtgctctttaagactggctgcgcgtgggcaacaaagagcttcggtgccatcgttactggcactgggccatgtcgacccctagcctccatagcctgggtctcagcgtggctcatcatgttgtgggtcttgtagacgaccagtgcactcaggcctaggcttgataggttatgagtgggtcacaggtctaggggcccatatgtcatgagtggaaggaggacctacccttttgctgcggctcagtgccagacgcagttaacgcagtcggtcacttatgctgggttagtcctaggtcaagcgcgaaacccactcgagtggtttcttctcggttcatccggcctcttatggctccgccttgcctgatctcggactcagtgccttaggactattagggggtgttcttccg

SEQ ID NO: 7950 - DNA, 650 bp, Zea Mays
atattacaaaaatttagaaagttgaatgggttaatttggagttcatatgaattttctatggaataaacaagttctaggatttttttgtattaaaaatcaatttctaaaattaaataactgaattctcagagctatggactgggcgcactatttacagagaactcaagggcctcaaggtaaactgtcctagacacagtaaacagttgaatatggacggcgggttgaattcttgtttacgagggggctcttatgaaaaacatgatcgcgaaggggtatctagaaaccctggccgttcagatcagatccagaggccaggattatatcacaattactttaaaaagggtcgcacactgactaccactggatcatgatcggacagcgcactatctctcacccgccctcgaccgcaggatcactgatccacagcccaaaccgaaatctcgaatcggtaagcttcggttcaatcgtaaccgtacaacccgagatcaacggctccagctctctcccctaaccaggcggtcaactcagcggccccgccccgccaacgacagcgaagcacgccggcaatgccccaaactcgttctctagtgcccatacctcaaattgcgactacctacacgatgcagacaagaaggtgaaacggataatag

SEQ ID NO: 7951 - DNA, 1017 bp, Zea Mays
ttgcgatcaaatggagagtgtgatcgaacttctcttgtaaatgtagagtttgtttgggtagttactaccttgtgcaggagcagctgtagctggtctcagtgcacgagcggctaccatgagtccaagatatagtatgaagatcttatgtttggttcatgtacaccacagctttccttgtgatcctgaccatcgggtgaccaatggttgttattgtacctagggtctgttttttaaggatatatcaatattgcggtgctcggtgatggtactttgtgtgaggaagatggctatggttgggacttgtcgagatgggagtactagcttgattgggaagcccgtttgagaccttgtagttgcattttgcatacacaagcacatgttggttagtgttgtggagatacaataccaatgtgcttgtcagcaactcagcatatgttgatcggttcttttcactgaaagatctggcagttcattgcttctgtgctgacccttgtggttattatccccgtgtgcttcattttccgtttctgcccacatgcttgactccgcaattacacattctgttctgcggttccagttcatgcctatcccatcgctggactcctcatcgattcataatccttcgcaagttgggcttactgattggctttccagctctgcacgatgaggaggcttgccagctctgcaagaagacgactcatgagtcatgatgtatccagttttgcatcaaatgcttccagatctacaagagtaagtactgtatgtatgtgttagtttgtcatcatacatgacaattgattgggtcttggcaactagaggaagatggcagatgttgaccgtatacggctgggcttggaacgaggcccgttccacatggatcggcgggactcggattcaatcctggtccaactgggaatggttgttcggttaatttggggatgaattgcagctggttcattccggccgtttttcctgtctcatcatcccattggatcgacgcccggcctcctaccgtct

SEQ ID NO: 7952 - DNA, 610 bp, Zea Mays
gtttaattggcggggtcgacgagtatcacaagcatgctagagtgctgaaacacgaaccatgaggacgagagcggacctgtagatggctgaccacgacgaggtgactcacggtggcgcagagagtggatttgggggaaaacgaaattagggcgctatgttggacgatcggaggtgagggctggtgctctagcttcataacaacctagtggagctaacggtgcactcaatttatagcgtctaagagcggtggctccgaattttgaagggaaagctggcggccggagagaggggtgagtcaccggcgagtgttatcgtggcatttacatgacaaggacctacggctgtcattggctaaccttcacagattgcgacaacatggtgaaacgtcctagagcatggcataaccgcgagaaacggcgacacggtggtgacggtcgcgcggccacgttgtcgatgcaagtgggtacggcgatagggccaacagtgccccacgttcatccaggcgcacgatcttttcactgtcgaccattatccgcatgccaaggcacacgaatcgcgacatcggcgaggatcgcggcgcggagatcaccggcggtgagatacactaaac

SEQ ID NO: 7953 - DNA, 344 bp, Zea Mays
ccagacccggcgggccggcggccaagtgttgagaggatgcacctgctgcccggctgcgaggccgcgacccgacgatcgatctgggcccgtcgtcgccagtagtaaaaggcagcaggaaaaacgatggaaacggaccgaaaacccgcgaccagcgctgatcctacaagttcgttacaccttccttagcagacactggaactggtaggcgggcgacgaggtttgcaaaacgcacgcggccgttcccctcttcctccgctcggtttccgcacgtgctccacgctgcccgtagaaatagacctccccttccctcccatcgccctatcctgcagacgcataaatctctc

SEQ ID NO: 7954 - DNA, 355 bp, Zea Mays
gcggggtaccgccgagccgcctggacgcgtgggcagggccgtcaccgcttcataccgaggtaatgcgcccaccaacggattcgccttgacctcctctacgcgtagcgctagggaatcgaaaacttgacagctgggcatgtaggttggggagctccagccatggcacttcgccgcggtgagcacgccgtcgggcttggaggtgttcggggaaggaggacggtttctgaccgtcgatgcgcgatgtgcggctcagatcgaatcagacgtagggattaggctggaactcaccgtggtcattgatctcgacgtggacggttacgattagactcagctcttcccctttggttattctgac

SEQ ID NO: 7955 - DNA, 861 bp, Zea Mays
gaaaaaaataaataaacaaaagaagtaaacatattgttaagttcttactagcctaataaaaaatgggtgtaccttgttgaatattgatctcttcgatgggcaggtgtgccgagaaaggggtgggtcaagggacgtctctagttgagagatagggctcgttggttcgacaagctcgttgacctccaaggacgggtcacatcatcacgacgaacgagatcggacatgccgagctagctagcgtcatgaggatgacgagcgaggcgggggcaccgggaaggggtggggttgtgcagtgtcgcgacataaggaatgagacatcgaagcggactggatcaggcggtgtcgataagaatgggactgggccatagtcaaaatgtttctgggtcgattggattgaggagcggggtcatgggtcgttggtcgacattttaaaaagggaagtatacatctatgggacgggaatattatgaatttgatatgttgagtctaatgggccgatgatctcaggttgattctatgggtcaagggtcgtgttctaacatttcaataacaacctaacaccagtctaatatcatctcattctaccattgaaactttaggctatccctatcagattccctatcttatactctattttaaacctttactttacaaacagtatcatctacagttatgtgtcccctattttacactaactgctgtagacagtattatacttatacaaacagaaaacctcaaccgacctacaactttaatttttctctatactcactaaatgaatattagatatataagagagagaaaaggtcccagcctactgagttcatccatcgggctgatgccacctggtgccccggtcgc

SEQ ID NO: 7956 - DNA, 455 bp, Zea Mays
accagcagactctaagacgctatcacgacaaggttgtgcgacagcgatccttctcagtaggagatctcgacctccgccgaattctaacgggggagggacggcacaagttatcgcccttatgggaaggacccttcatagtagcagaagtcactcggcccggatcatatcgcctcactcagatggatggcacagaagtcgggaactcctggaacatagaacacctcaggaagttttatccctagctgtatctcaaaaagctatcaggacgacgatgtattctgtaaagtggaaatatgtcatcaataaaaaagatgtttcaaagatactcaatttgttcacgactgacttgcattcttacttaacttggggtgaccactatgccctgctaacggagcaatcgacttaactcggcaacgacttaaggcggtgcgacatgctcacgcttacttaactcg

SEQ ID NO: 7957 - DNA, 576 bp, Zea Mays
taatattatagcattatagaaattggaatggattaatttggacatcatatgaatttctaggaattaaataagtttatgcaattgtttctatattcaaaaatcaatttataattcttttctctggtttactaatactctggactgcgcgcataattcccgagaaaggcaggggcatctgcgcaagaattcctaagactcaaattacccacgcagtgggccgcgagttggatagctaaaagcatagggtcttacgcaaaacgccctgaacaaaggggtacgcaaagatcttggcagcacgatctgatcacaagggtccagattagattcccacgcacccgaactggtatgcagctctagccgtccgattttgagtagacggccaggatttaaaagccatggatctaatcacgcccgtccgttaacagatcaacggcgctagatcgattcactcgaaacgttaccacgttataatcctatccattcgtggaagatctgacggtcgccaaggcaaccccctaacttctaatcgtggccgttcggatcgcatccaatggctcgagactgcccacatccccc

SEQ ID NO: 7958 - DNA, 1032 bp, Zea Mays
cgggcactgggcaggccgaatgcggagcgggacacgtggcgggtgggccggatgcagtgtgggccacgccgacgtgggtggcaggaggatgcacatagatttgggtggttgtgggtatgtgtcgctcagctgtgagggtggaatcgatggataccttatatacctggactgctcaagttcccatggccaccatctgcagcaactgaaggcaaagacagcaccggacgtgatgtacagatggggttgcagtgggaggaggaagtgagagagggagcggcggcagccatgggcggcgtgaagctcagaagaggccgcgaccgagcaattgaagagaggcggtgaccgagccgtgggagggagaggagtctggaagcatcgtaactttgggtgtcgctgaagacgggagaggaccgtcggctaccagaggtgtgagtctgagcgttggatgaggatcgtacgacggagaagaaaatcgctgacgtggacgcaccagtggccagatttgctcccagctttaatatatagtgcctgcaacggtgtgaagctgatggccaatgccgggcgcgtgacgcagcgggcactgggcaggccgaatgcggagcgggacacgtggcgggtgggccggatgcagtgtgggccacgccgacgtgggtggcaggaggatgcacatagatttgggtggttgcgggtatgtgtcgctcagttgtgagggtggaatcgatggataccttatatacctggactgctcaagttcccatggccaccatctgcagcaactgaaggcaaagacagcaccggacgtgatgtacagatggggttgcagtgggaggaggaagtgagagagggagcggcggcagccatgggcggcgtgaagctcagaagaggccgcgaccgagcaattgaagagaggcggcggccgagccgtgggagggagaggagtctagaagcatcgtaactttgggtgtcgctgaagacgggagaggaccgtcggctaccagaggtgtgagtctgagcgttggatgaggatcgtac

SEQ ID NO: 7959 - DNA, 594 bp, Zea Mays
gttctccaggcttcgaatggctagccacgacgccaatcaagcccccggaacgtcgatccatttcgggagtctcgacttctccttcaatggcgaaggagaagcgatcagggcctcggatgcccgaccccctcagtcgacgaatgtcgacatgaccgcgagggctatcggtagccccgcatcgaatgcacccccaaagcgctcatccacttcggggcctcgatttcgccatcaactaggagggcgacatggttagggcggtgcccactcgaccggctctgcttcagagccctgataccgtatcggaagccctcggcgccctcagcctcgccccacacgagcagcgtgagaggcccaggccgtctccgccttccgaggctggcgagataaggcgacatgtagcgatttatatggggccaaacccttcatacgacgatctatcggttttcttcgcgtcctacgcatagctctctagagtgtatgacgtggaaacgtgtcctacaacgacagctctagcagtggcttcagcgccttcacgcctcgaccgcgccacgccctggcgataattatcgccctggtggcccatggccatctccc

SEQ ID NO: 7960 - DNA, 281 bp, Zea Mays
tcggttctcacctaccgtactaagtggccgactggttggaaaagtgaatggttttatatgaacgcagacgagaaaagaagggagaagctaatgattgtggtcatgagtccactaaaattgagcttcgggatgacaaggcctttgtgccacatgtagcgtggctctccatgccaggtagttgaagtggaattcagagtagtagtggctgaagtcagcactagagatctagagcaagaatacttggcaaatagggtatttccaacctccagtggctgggggat

SEQ ID NO: 7961 - DNA, 525 bp, Zea Mays
aggcccaggacaattcggttatgggttgggcgctccgggttgccggatctctatgcgccggtgaactacaacaccgccgtggggagctcggctgcaggcgtaaggtaggagatgtactggtgccgttgatctgcggggtaacggtctagattagaaaggtggttgtggctgtcagatcgatgacggacggcctggattatatcaaggataccccccttcgatggattggtccagatccgttgatcttggatccatcggctgggactctcgcgtcggtgctttaagggaagaccgttagatcgggatccgaccactgacgttggacaccggttcagagcctaggcttctaatccgcacccttgatttgtgatcgcgcggccaccattcacctgtaccccttcgctgaaaccattttacaaaagagcccccacagtttatacaaaacaacccgtagtccacctctgagttgtttgagtcaggggaaaacgtctggttctgcccctgtttttatctgtttggtgctcg

SEQ ID NO: 7962 - DNA, 626 bp, Zea Mays
cgcccctctagtattttgataacattgtgctcactgcttctactttagccctcttgcatctgatgattacaacccttcaacacaagtatgtgatgaaggatctaggcccacttcatcattttttgggtattgctgtcgagcatcactcaactggcttgtttcttcagtagcgtgagtacacatcacatttcttgcaatgtgttggcatgctgtactgcaaaccgtgtgtgctccggtagacacccaagccaaggtctccggtgatggccctttggtcagtgattcgactgcctactgagcagtgtttaaaaggcggcgcctaggggtccaggcgccaaaaaagtgcaaggtgtcgcctagtttcagacgacctcaaaatttgctaacatcttttttctcgaaaagtgcaggagaactgcgccccatcatattaagaaggagataaaggtctaagaagaccaggtacaacaagataaaatttgctaacatcttgatcaagagacttccctcggtgttcttggagtttcagtccagtctcaacgtccaccgtggctagagttttgattgtgtgtgggaggggggtagactgtgttgtatgtgttgtgggcctcaggcccagcctatat

SEQ ID NO: 7963 - DNA, 449 bp, Zea Mays
ggcagagcagcgctctcagaagaaggaatggtgtcccaaacaacaggaagctgatgcggaggtcgatgaggaggccgatgagacaccattggctagtataaacatggtatttgtgctccctctagaattttcacgcaccaaagcctaaagatttatttgtggctcgaattgatctcggcccacaaccagttgtgttcaaaaagtcaccagagaaaggttatagacatatgaaggccttgtacctcaaggagtatatcaatggcaaacccctcaacagaatgatggtggacaacagagtagcagtaaacatcatgccatactccatgctacgccgtttggggcggtctactgaggatttaatcaagacaaacatgatgcttaattacttcaatggctagccatcagcagcacaagcgtcctcaacatggagttgatggtttgacgcaaga

SEQ ID NO: 7964 - DNA, 486 bp, Zea Mays
caacaaaagagtaggtagggaactgtactgccttgttatgtgtgtcccatctatgtaaagagggggtatttataggcaaccggacgaggtaggtggtcctaagtatcattataaccccggttacctgctacattcccggattattcctcgcaacagggtcattaccatgcagtaaggtacaacgacctaaacatactctaaagtctaccccttgaaggggcttacaagtgggcctgagcagcaacgtggtggaagcctaggccccacagaggtctcccagagccttctcctatattccagacccttgacagcgtcggggctttgactccactgtttgagggacaagtagagccttcggggcacgtggcgagggttactgtgagccccctcttctcgcgcggcccttcgctcagtctttcttcaatggctgtggtcgaggatcctgtcgctggtacgggacaaagtccaccgtcggtgctatccctg

SEQ ID NO: 7965 - DNA, 593 bp, Zea Mays
gcatcgacccgtggccttcgtagcctgagcctcggcattcctcgtcgtgttacggggcctatagatcgttagggggcttaggcctaggctcagtagggcataagtgagccacatgtctatggcctcataggtcatgagtggggatgtggcacgggttggaccaactcctctatcgtagctcagtgctaggtgtatttaatgcgattagtcatttatgatgggggcagtcctgggccaggtgcggaatccactcgagtggcttcctcttggttcgcctgtgccctttttggctccgcctcttccaacctccgggattggtgctcgaggttactccggggcagactctccctccgtcctccctctaacgcatgggccctaggggcccaaggatctggtccccaacaatcgcctagacgaccgtctacccgttttccatgacgacagatttctagcacactcaataagatcatacactaactcttcatcaacatcactacatcacagaaggacgttgttgggaccaatggcggttaaagcgattgtccgaaaggcaaggctggtctacctaagcttaaggaccttaaccaagagct

SEQ ID NO: 7966 - DNA, 651 bp, Zea Mays
aaaagactgcaaggtgggaccatggagcagcaagatggaactatcacaagagcacgactgagggggggtagtttcttcttcataacttgtcgtgcatgtgtgcagaccaatagtccgggttcatgggggcagaccccatcgggttatcatacacgtatgcgtcatttagttaaaaaaggaaacagactcaacccctttgtcttgctctatggatagaacttacagagatattggcatcagggtaaggtactcctccagtcgtagctagatagttgcccctgggtcggtgcaatctcgttaccttggagggtccttcccagctgggggagagttgtggagcacctcttggtgtggcacttgccgccgacccaagatttctatccgcatttgacacgagaacccttgcctctggatgtgatcacttctgcatgtacctgtctgcagctcggacccgtgggaggtccggatgggcctccggaggaaggcatgcttcagcttcgtagaccgggggacacggagttcacccgatgtccgtctagttgtcttcaccggagtaggagcctccggcaaagatatccttcaggtccccctcgggcgactgatacccgaggtctcgttccggcgcgaccacctcactgtcgtccacctttt

SEQ ID NO: 7967 - DNA, 489 bp, Zea Mays
gcaccgccgtggttgggcgaggggaggaagacgacctcggtgcaattggatcatgatccagcgagtggggctgcctaccggtttggagcgtgttcggggtcgttgatcttagcgtgcacgatggtgattaggtctagcgatcggttggttgttgaccgttgatgccagaatgtgcgagtgagattagtgctcggtcatttaaaatctaagtcatcgacccatacatcaacggttaggatggatatcatctcgtcactgctcgccaatctaatgcgggcccttggattcagatctggcgatcgagatttgggcagtctgcgatctaatctgggcccttgggatcaaatccgacgactgtaaatagaccataccccttcgtggatgcgactttgcaaaagaaccccctgttttcattaaatgaacccgtcgtccacagtctacataggataattacaacgatgccctgaaaatttataaatgaacccccat

SEQ ID NO: 7968 - DNA, 542 bp, Zea Mays
aatttttggaggccctgtgcgagcgcacggctcgcacatgcctctgcccggccctggttctgggcgccatgatgggcctcggtcgctccttgtgccgacccgcggggagaaagggaaaggggtctgggcgccgacgcccaatctggggctgaggtagaagaaagagatagcggctcatcaggaaatgaatggctaggatctgatctgcatagcgaattcacgatagtgtatcgtggccattgttgctcggatggccggctgtgattggatcgcaggtaccgtttcgatgaactcgctccggtccatccgatcgtaatcctgcgtctcaaatttaataacgaagattttaaatcgtgcccgtcggtcggtaatccgagggctcgtattgcgtatcagttcatgataatacgatctaatccggggcgtccacctctgatcggacggctcaggttttaggataccccttcgccgagcaaaagttcaaaagagaccctatgatttttagaaataaacccgccacccccttttagtgtagaataatt

SEQ ID NO: 7969 - DNA, 697 bp, Zea Mays
cacccctcctctttttataagccaaagagggggttggccagcggtggcttcctcaagaaggagccaccgagcgatggtaaaatcgagtgttctaccatggggtaaggccacatgtgctcgtgggcccaaggtcgccttgctgtcatgtactctttatggtggacggcgcaggcagcgtggggtccgaacgccatcattcgggctatgttgactcccgaccttcgtagcctggggctcggcgtgttttgtcgtgttgtgccctgacagaggtctgcgcacttaggcctagtcccggtaggtcatgagtgcgttgttggtcgtggggtgcgtgggccataaatatgccacagtctatgtgtttgtagatcgtgagtgctctatggtctaagggaaaggggctcataggctatgagtgggaggggactagcgcctttgctgtggctcggcgccagacgcagttaatgcggccgatcacttgtgacagatcggtctcggaccaagtgagggatccactcgagtgatttctcttcgtacgcccaccccctgttagactccgccacgtccgacaccgggctcggtgccgcgaggctcgttcggtggcgggttcctcctgggtagacgctacctgtctcctccagctgaccgataagctccagttcccagtggcttttcccggacacgctctctgaccaatggc

SEQ ID NO: 7970 - DNA, 321 bp, Zea Mays
agaggggagcatgttttaacttatctttcaaagtgttgaacgctacctcctatgcgtcgccccaaacaaacggcacacccttctttgtaagctcatgtagaggggctgcaatggagctaaaatcacggacgaacatgcggtagaagcatgcaagtccaagaaaactccgaatctgtgtgactgtcgtcggtgtaggccagtctcaaatggcagcaatctttctactatccacctctatgccctgtggagtaacaacgtaaccaagaaacgagacacgttgtgtgcaaaagatgcatttgtccacgttaccaaataagcggg

SEQ ID NO: 7971 - DNA, 465 bp, Zea Mays
gacagacgatctccggccacggatagcatcgcaagcgcatgcataccacgtcggaaagagatacagtgagggagattgaggcatgggcgacaccgcggcaaaatttactggtcatggtggccgccggtgaagactccggctgggcttgggagatggcgccacggagggttatccgtccccggcgttatccactccataccacacacgaatcaggatggcagcggcacgaatctacgagcggagaggtcgccggcggtgagattgccgcgctcgcggtctgatccacttcagttactgtaccatggcgtccttcattcagttggcctgacagcccaagtttagggttaaatttctcttaattttctgtggcaacatacctagagttctgcagcaaagttgtagtccaatataccatcttcatccttgttatagtatcccaagacaaattcttactggattagccac

SEQ ID NO: 7972 - DNA, 272 bp, Zea Mays
gtccagacttcccacaattaaagcatccacttgaggaactgggaagggcagggaaacaagcaccagaggcactcggctgattgttctgggcgggggcaggagtgggacggatgaacacgagttgtctgaagggatatgtgggttggcgaggagaagaacggtttggattgaaaggtcggattaccaaccttgtctgtttttcagatcccagagttgatccttcacccgcatatcttttttggctttccctgtccggaatttttggcttcaac

SEQ ID NO: 7973 - DNA, 307 bp, Zea Mays
cgtgccgagcgtcatcgcctgcgctcatcatcgtcgtcaccagttatctgtccctacgtgatgtcgacatgctctcctgctccctcgcgtctgccaaaggtagatagaccattttctgatctattcctcagtctatccctttaatttcgatctagccctacgatagtttcctattttaaatgtgtattgcgtaatagaaatccaataaaattaaatattgtttcgttgaacttcataaatttgtactaaacacttttaattagtgttgcaacaatttatatgtttcattaatttatatttgattgtg

SEQ ID NO: 7974 - DNA, 446 bp, Zea Mays
gcagccggtgaacgcaggccgccgccagcggaagacgccatgcatatgctcgatcgctcactagctaccaaaccagcgacgatgtaagtttatgcttgtccacctgcctgcccggtcgtggctgggagcgatagggccggggcggtcgtcggctgcagctgaggcttgtttttattggtggcctggccgcggtggggaagttgggaggaaaagtagaggagggcgcgcgggatggcgaaagaggaagtggcgtggaagaccatgcaggcatagtatgcgggtcccccacctccccaggccctggccggaaggagactgagactgatgagactgagactgtgccaagagcaaggcgaggacaaggggaacgaactgaagctggcggcggcagcatgtcgtcatccaagtgatgcgccactgtgatgtcatccatgactgatggctca

SEQ ID NO: 7975 - DNA, 413 bp, Zea Mays
gttttccgatctcaagtcatggaggccttcgccttggggtcttcgaggttgccctatgtacctggcttataatatggcatcgaggtagaatgattgcccttcgcatcgctcgagccctcatcatggcctagatggaccacgttagaggaaaaaggccactacgagtgaagtccttgggaactttggcctcttgagctggagcccctactatgttttaggccctcgtcccccacaaaccccgaccaggatctacaaatccttcatgttttatgagggggacctcgcatgcacgacgtagtcctcatccttgggacttgctggcaccacatcagtgtcctgcattcgtagacaaggttagtatgcgatcaacgtgagacatgatcaaggtttggttcgacattcgtcccaataag

SEQ ID NO: 7976 - DNA, 548 bp, Zea Mays
gggtgattcgagctaatggtagggtcgggtctttagaatcggaccagtgagcctcatcatgtcgcacgaaatatagtcattgcttcgtctgggtggattcgctctcttcgtcgctggaattgctcgtcggcgatgcctcgttgacactgaccgcgctccaccgtggccggcatcgactgctaccccaaatgtgtggtatgaccctcgaatagcttctccttttcctcagcttcaaataacaccaaataggctcaggtcttgggcgccggaacaccgttcgtcgggtcttcggtggagtctcaacggtggttatgggcggcgccgccactgtggtggcccaaggttggggaaaagccatgatccgttggatctgatgagaacggataggattagagcatgggatgatgttgtgtgtttcattgatctcagcataagcggctgcaattaaatcggtcgtaccggtttgggtgaggcctgtgtgaaccatgcgatcttgatcctacgcgctgtattggttttcgctactttaaatccacgacgtcgatcta

SEQ ID NO: 7977 - DNA, 518 bp, Zea Mays
tggtgttggtgtctggttcccggcccttgcattgatcgtctcttttgcatgggtgctgtgttcgctggctgctggccaggtttggctatatgcctatacgcggacgcaatccggcatgatcatatatgcatgtatatgacttgctggaatgaaatgggatgggatgaattcaggggttgttacaaattcacgtctgtcggagaacgtacggatttcagggcttgctagtgtctgcatcaaccttttgttggagagacggcaactttggtctagataatgcgcgcttgtggtgtagcagtaagcaattaggtgaagaaacaagcaggtctgctcccatgtttcacctaccaaccacactcctgccccgcgcggtacagcgtctggatgcgccgaccggtcgcactaattaagccggtgcaactcgctccggccgtagatgaagaaacaagcagcgccctgcacccaagtcccagccaaggagctgagccaccggcagccaagcacaatttgaataatga

SEQ ID NO: 7978 - DNA, 685 bp, Zea Mays
attttgctctagtgcaagagttcaaatagggggggtagagttccccactgatctaatagttatgggtaatcaggatgcgactatagatgtcatccaagtgatgaattggctaaccacatatcaagtaagtcttagatgtgacaagaggacggtgaatttagtgtccttatcaggagaggaagtgttattggagttggtcttgtctggaccaaggaaaggaagctgtcaccaagtcactgcccatattgaggaaatctaaccatcataagctatcaacgtagtatcagaattcctagatgtgttttctgaggagttaccaggcatgccacctgaaaggaaagttgtatttgcaatagagcttatacctggcaccgcccctatttcctagagagcctatcaagtgtccggaccagaattggtggaactcaagaagcagattgatgagttgttagagaaaggctacatcagaccaagtacctcgccttgggcagccccaatgttacttgtggagaagaaagatggtacgaaaagtatgtgcactaattacagatccttcaatgaagtcactgttaagaacaagtacccgttgcccagaattgaagacctattcgatcagttgagaggacccggtgtgttctcaaagatagatctgaggtcaggttaccatcagctaaggatccgaccc

SEQ ID NO: 7979 - DNA, 990 bp, Zea Mays
aagtattgtacgaatgcgctaaaaagtaaaatgaagcttcatcccaacaaatattgtatgattatatcaagtattatatgaatacaacaagtatagactaagtatagaactctaattattaaattatcacatatatgaatacaccaagtataggactctaagtattacattatcacatatatgaatataccaagtatagaactgtaagtattatattatgacatatatgaatacaccaagtacaaaactctaagtatcacattatcacatatatgaatacaccaacctaatccttgactctaaccataaccctaaacccataactctaaccctaaactataaaccctaaccctaaaacctgactttaaccctaaccctaatccctaactctaacccttaacgataaccctaaagcctaaccctaattactaactctaaccataatcctaaacattgagccttaaccctaaaccataaaccctaaccctaatccttgactctaaccctgaccatatccctaaatcctaatccctaacactatcgcttaatcataaccctaaaccctaactataacgcttaatcataaccctaaaccctaaccctaatctgtgactctaagcataaccctaaacccttaaccctaaaccataaactctaatccctcactctaaccctatccctaatccctatgtctaatcctaaaccctaatccctaactataaacctaaccctaatccctaactctaaccctaacccaaaaccctaaaccctaacccttaaccataaaccctaatccaaatccaatagggagaggggagattcgtataggacatatagagagggagactcgtatagaacgtatagagagtgagagaggtaaattcgtatagaacacatagagtgggagagggagagtcatatagaacgtatagagagggagagtagtacaaatattattgagttgtgttgatacagatattatcgagttcg

SEQ ID NO: 7980 - DNA, 338 bp, Zea Mays
atcaaggctatatgctggtccaccataagctaacatatgaatggcagcagttaccttttgtatggggtgaaatccgggttgatgtgctgcattgtatgattgcctgaagtaggggttcgccacttgtagagcttctgttatgtgttcgaacatggatgtcgtcatccggaatctgaaaaaagaacacttcattacatatcatattgccacgaaaataaaacaatggtaaccagggtactaccgtcaattgaaaatgtcgtcattgtacacagggatgtctgcaaagtagtcttccacaagcctagcataacctgaagacctatcccgatgaataatac

SEQ ID NO: 7981 - DNA, 716 bp, Zea Mays
gaggcccctcggtccccagtgccagggcgccctccaaggcgccgaaagtgcagccttccggggcagacggcgggcccgcgaagaccattcaggtcggcgcagacccgtcccagaccacccgcatcgcgggaaatctgggggaaaataggaactcgcgctcgtcgccttcctccaagtaaatgccgacgtgttcgcttgggagccgtcgcagatgcctgggatccccagggaggtgattgagcaccatctaaagatctacccagacgccaagccggtgagccagaagccacggagacagtccgtggagcgacaggacttcatctgtgaggaggtccggaagctgttgcatgctggcttcatcgaagaggttcatcaccccgtgtggctggagaacccagtcatcgtgccaaaggcaaacagaaagcttcggatgtgcatcgactacactagcctgaataaggcatgtcccaaggacccatatccgctgccacgtatagatcagatcgtggactctacctcggggtgcgaccttttgtccttcttggacgcctactttggtttccatcagatccggatgtctaaggaggataggaggcataccgcttttgtgacagtggatggactatactgttatgttgtaatgccctacggtctgagaaacgccttgccaacatttgttcgggcgatgagtaagaccttcggggacctgatccggg

SEQ ID NO: 7982 - DNA, 704 bp, Zea Mays
ggacatcccatgcactagccgaggtcggatgagggaaggtaggagaaggctggagtactggaagccggttttgacgagagcttcccgacgacgacacacgatggtctgggcgaggctctgatggcgctgatctgtgctctcgatcccatggcatggtgtatcccacagttgtgcgctaggcaaggagcgcaacacctcattatttataccccgggatcagagaaggccggattacgcctggctgtgagtttgttaccgccgttatcgaaaaactcggtgaaatcctaacgaactgctagcgatatgttcgttcgtaacaacccggagaggcccgatgaggaggtcccacatggcagcgactattccaagagcgcgtatttcgttctgtgcgtgtacaagcctaaagccaagccggcacatcagcatcatgcattaatgtggctagaaatcataaaatagaaaaaagtaaaaaaaaaagacgtggctcaactgtattccagagctagccgaaggtagatcagaattggccgatcgtcacgcactaggccgagaggaattgaggtaagtttttttcttttcctattttctatttccggttttccaaatttatttcaaattctcatttgttttcaaagtttaacacaaagtcaaatgcacaactcaaaactacagaatgttcatgcaaatcacatatttgtttattc

SEQ ID NO: 7983 - DNA, 550 bp, Zea Mays
gtggttcggtcatgcatggactttttcaacccccattatcagtggacttataatcttctttgcttggtatatgggggcaggaactgagtttggctatggcaggaaccatgaaaagagatgcaatagatcattgtaactacaatctgaccaaccatacttagcttttaggatgagcaactcaagcacaaagcatagcacagtccattgtgctcgacaacccttttcaacagcatacaaagtcatgttcgatgctttttcaccctttctaaaatttctagaccttttgtgctctttagtataatctctggtccaagggcctgaagcatttcctccaaataatcgacatcacctttgtccccaacacgtcctccgccatcattgccactagcgttgtcgataccatcccaaccaccagcatcaccaccttgttcaaccatccatttgtgcatcaagcccagctacatattggtccaggtgttggcagtccttattgcctaaatttaaccaccaacactcgcataaaatccattcatacaaatgtcgcacccgg

SEQ ID NO: 7984 - DNA, 506 bp, Zea Mays
caagtcgtcgctcgcaaggcattgagggccctgtgtcagatctatgaagaagaagtggccgacaccccactcagattctttccgccctttcagagagactgtcccgcttggatggccaggatgcgtgcattggaggagcagctgctgcttgaggacgaccccacagtcgtgtacctcactgcatacctgctcacccttgatacacagtatgatttcttggctcgacaccaccgtcagatgattgcccgagaagaagatgcagagaagcgcaaccgtcagctccatgtggatctcaccacagctcaagcccgtgcaactacattggaaagtcgtgaagtcattgctgttgaagccctaaagcaagccaaggatgagcacgtccagaagctgatggaggcctacttggtaacccataaccaacgtagagccctgcggatccaagagcccgcttcatccaacccagttcaatccgtgagagccgaagatctccaaattcttgaaggtca

SEQ ID NO: 7985 - DNA, 768 bp, Zea Mays
caccacatcgtcgacagcgacttttgggcagtggtgaatggcagaagagctttgggggatcgcatgggtcatttccagggaagcttcggtcagaatcgcgggaggaagtaccggcaattgctcaccgaactttcatccccgccgtggtaaaatgggtcgcggtggccggggacctcttcgctacaaaacccggtaaaatcaccctctggagattcgctttattcctctcttcgagtagagccttccgtggttgagaaccgggcactatggcgtcgggtcggtgtacaccggcgggatctccgctgcggtggagagacctccgccgcgcagccgactggtttgggaggggagtgcgtgagccgttggattaggcgtatacggcttagattaaatctgggtagtgtttcgcccacgcccgtttgatgtcgatcggatggttcaggttgatctctggtacttaaaatacgaatcgttggatggcgatccgatggccaggataggatacctgttcggcgtgtttgaagatctaatctgggcggttggtgcgcgatcggtcggccagggtcgtccgataccccttcggcctcgcgacttttacatatgaaaccccctggtttccagtattcaacccgccgtcctacgggatagctctgagccttaagacttttatgaattagaccccaagcttttctgtttttgtgcgcgaagtccagggagcagtgaaaataattaaataatcatagaaaatgatttctagtatataaataa

SEQ ID NO: 7986 - DNA, 588 bp, Zea Mays
ttgatgtagggtccttgaaccctaacgtgttgcactcttctttcggcttccttcttctgcctcttgtttattggtccgaaggttgatcctttcgtgatggggataaaaagctttcttgagcttgctgacgaattggtgaagcttgtcatgtttttattcctgaaggacatgaaaatcaaggcagtacaaattaataaatgacaaacttctccccttaattaactcttctctgaatgttaatttaagggagaagacaaaacatatgaaaagatattagccagagtaatgcacaacacattaaggatacaatggattcctcatctgcatgtattgacactttgcttcatactttacaatagagcaaatgattacaaatatacctttggctttacagtcgatagcacgaaggtgaaggaagtacacagctttgtaggctgagcggtgcaattttcttcggcctccagaaaaagtctccctaatgcatgacactgttcctctatttatagttgcagggtacaacttcgataaaattacaatcgtgtcctcaataacctatacatacaaactattggatagaccgagggcatt

SEQ ID NO: 7987 - DNA, 430 bp, Zea Mays
gtttgccaaaaatctgttggtactatatgcacggtctggacgtggttttgtgacgttgtgtcttgtcgcatccgtcgtgggctgacatcatcggcacgggttccttcctctcgggtccgcttagcggggactttggtcggtcgccccacctcgcagacttgctcggcagggacttggctggccaccccaccttgtagacttactcgattggcacttggtcggtcgccccacatcgcatacttgcttagcgaggactttggttgttcgccccaccttgcagacttgctcggcaggaaccactctgtgatcacgccttctagtatttgagagagatttccgcacatttctgagctgccactctatttttgtgttctcgcgctctcttcttttgcttttgtgtgtgtgttgtttttgcattgtgctcttgtta

SEQ ID NO: 7988 - DNA, 828 bp, Zea Mays
ccctgaggatttacacaaaaaatttgcggagattgtcaatattccaagagtggtctaggtcttcgccggatgacgttgttagcctataagcgcttggggatgccttcgacttgacgatgaatggaccctcccactttggctctagcttgcccctcgactctgtccgggtggttcggacaagcacgaggtccccttcgttgaattctcttgggatgattgcgtggtcgcgccaggccttcgtttgagcttggtatttgttgagggcctgcagggcgaagacgcggtctccatcgatgaggtctttggacgttggctcgtctacgtaggggacggctgatgcacttgttcgaggtgacccgtgctttatttcttatggagtcatggcctccgatccatacagtagacgaaaaggagtgaatcccgtcgtccggcattcggtcgtgctcagcgcctagactgcttcaggtagaaggtcggcccatttacccttgctgtcgtcgagtagccttttcttgatagcagtgaaaatcttgtcgttggcgcgctcgacgacaccgttagattgcgggtgatatactgaggcgaaggcaagcttggtgccgatggagaagcagaagtccctgaagtcctagctatcaaactatttgccattgtcgactgtgagctcggacgggacttcgaaccggcaaacaatgttttgctagaagaatttctgggcagtcttcgacgttactgtggatactacccttgcctcgatccacttggtaaaatacttcgacggcgacgaaagtgaacttgaggttcccatgagtcgtgggtagtggcccg

SEQ ID NO: 7989 - DNA, 486 bp, Zea Mays
ccctggtggaggttcttctagatggcacctggaaacgtggacaggccctagacatgaactttctaaatcctgccttctcaccaaaagcaaagggcaactcatcctctacgaccatctcagcaaaagcctctcttagtgcatcttgatcaaacctccaagtggttggagcttccccgtctgttgcttgcaaagtgccctgctttggatctttattgaaaatatttggattcctcttgcaaatgttgaagtgcttcctcaaagctgaagtaccatgtgaccttgtgtcggccttaatctcacgatgacaatacttgcatctaccagccctcaaatcaccactgtcattcttgaccttaatgaaatgctgccacatctctgaccttggcgccatttcctttcttgcttgacattgtccttccttctctacatcaataacaccatgttcaacccctttgtcatgttcaccaattgtttctactacagcat

SEQ ID NO: 7990 - DNA, 853 bp, Zea Mays
acggatcagaacgccagcatgactgtcctcactgccgacgactcccttcaccgtgattcgtgctaccaacgtcccgattcgtgcccagggtggatggataacctcgtggggtaaaagaatctttgctgccggtgagctggaggtcactccggtgactcaccgccgcacccttctgccttgcggctggagctgataggcacgccggggatcgccgttgctcggtcttgcgccacatgtctgggcgctttaccacgtcacggatagtcacgctaggggcgtccggagtttgcgggagagaccgccacggtagaagccacctagcgcttgcgccagtgccttattctttctctggccgacgcgcgtctcgctcgaattcaccggccaccgcttgcgagcgctataaattgaaggctcgggcaactgcgctagatcatcctaaagccatagcacccgctcccaccctcgatcattcaccagcgctcgcaaatttcatattctccccaaactgatctccgccgccgtgaagaacagctcgcagcggccagctcgattcaggttagctcaagtccctctgctgcttgttctagcatccttaggtaccccgcaaacccctcgacccctttaattgaatcggaccgccagggatcgccgggaacacgactgtccgtccgcaacactctcggtcaaagtggccagagcaaaccaattggccatagatgaaattgtgttgggggaaatggtcagggtaggtcctattttttgtccgcagctcggggccgctagtcttggctccctccagccagtacagatgctcgccggagctccatagcgcgcgcagttgtcggggacctcc

SEQ ID NO: 7991 - DNA, 541 bp, Zea Mays
gggatttttgcaggtatattacatggctccacctcgttaaaaacctcaccccccgggaggaaaagagtgtgggcctgaataatactgtttggtgaattacaagggcgcgtaggccctgaggatttaaacaaaaaatttgcggagattgtcaatattccaggaatggtctaggtcttcgccggatggtgttgttagcctatatgcgctgggggacgccttcaacttgacgatgaatggaccctcccactttggctccagcttgccccgtgactctgtccgggtggttcggacgagtacgaggtctccttcgttgaattctcttgggacgactgcgtggtcgcgccaggccttcgtttgagcttggtatttattgagggcctgcaaggtgaagacacggtctccgtcgatgaggtctttggacgttggttcgtctacgtcggggacggctgatgcacttgttcgaggtgacccgtgctttatttcctgcggggtcatggcctccgatccatatagtagacgaaaaggagtgaatccagtcgcc

SEQ ID NO: 7992 - DNA, 700 bp, Zea Mays
tgtaaaccaagtctgtttgtgtttcagagaggtgtggtgttcagatttgagcgctcagagaggtgccttacatctcatactcgagcatcgcaagatctgggcggggctggcgcgtagaatgggaagtactcgagcatcgaaagatccaggcggggctggcgcgtagaatgggaagaatgagatggcggggtggtcctgcacttgcgatgggatgcgggccgatggtggtactgtgcgctggatgacgatgaggggattgggttgcgattccttccatggcggcgagacgtggattgcgtttggggcgagcagaatatgggcggggcatccgcggtgcatgagaagaacgattaggcaatgagtggtcctgcgcgtcgtcggcaatgggattcctgcgtgctggattgctgcgaggcgtcgatagcggcgaggggatgtgcttccttctatggtgattttttccttccatggctgaggcattaatcggtgaggggattgcggcgaggaccatgcggatgcaggggtagaggagagagggcgcgcacggggaagaaaagagacactaacatgtgggtcgtatgcgccgtgaggaggcagaaccgtgcaccacggtctacgttaggttcttatagagtagcagagaaaattattcaataaatattagtgcacaatgattacatgaaaacgaacaacatatata

SEQ ID NO: 7993 - DNA, 609 bp, Zea Mays
gaaccctttcccaaagttcagatgtgttccctgtcttccaaagctcgaatctataaagtccaaatatcaaagtggcgccaaaataccctaggaacactttggagaagtttgaactcaaaccaaaatcgtttgacacgatttaacataggttttgtctcggtttggacagtgctgatagagctatcttcacgccataatatctgctcacccaggccatatcttcactcgggactcacacacgacaggaagaccttggcacggtgaagagacgctacacaggatccttggcaagatatgcacgtttaggtcggccaacaggcgtttgaactcgggcagaatcacacttccacgtgtttgatcgcgtgctcaagcgctcggtcgcgcactggctgccctctgcgtgcgggtcgcgcacggtaggctcttgtcccccgcacctgcgcccaaccatgcccgagggcgcctataagtacctcgggtgtgcaacggtttgctcttcactccgcctcacgccccgagcaaaaactccaactccggcgagctctccaccgcccgccaacagtgcccgagcaggccaccgtggccagcccttcccgacgaccccaagcc

SEQ ID NO: 7994 - DNA, 395 bp, Zea Mays
gaattgcataattctcgaaagtattggttgtcgaactgcttgtcgttatcgactgtcaattcagatgggactccgaaccgacatacgatattctgccagaaaattttttgtgttgtattggatgttattgtggagactactctgccctcgatctacttggtgaagtattcgacagcgatgaaggtgaatttgagatttccttgagctgtgggtagtggtccgacaatgtcgagcccccaccgcttgagcggccaggtgtgggcaatgagcttggtgagttgcgaaggggcgcctattcggagcgagaatttctggcatgcttcgcacgatcgggttactcggttggccgtacatatgactgcgggccaatagaatccctgacgaatgaccttggc

SEQ ID NO: 7995 - DNA, 506 bp, Zea Mays
tgggggaagagagaaattgggaggctctggtggataatccgaggcaaggactggtgcaatggatgtgtaattacctagcggagccgcgggtacgctcaatttataggctccgggggcggtggcgcatgaatttgggttggcgcggtggcggtcggagaagaaatgggtcactggcgcacgagattagtggctttcaccgtggcggctctccgacgatcaccgggcatgcatgactcgattcactgcgacgtggttcagcgctttagcacgtggcgcacagcggtaagcggccaacggtagcgaggtctatcccggctgctcgacgagcaagtgggtacggtgaaactcagccgcgaccgagcccgagtcgatccaggcgccgagatctttaatctcctcagttatccacttgtgctgcacgaatcgtagcggccggcgtgaatcgtggcgcagaggtcgccggcgacgagcttctctgtgttggcgttctaatccaaacactgtac

SEQ ID NO: 7996 - DNA, 421 bp, Zea Mays
ctacttattaagtaagcaatagtagtctgccgttctgcctctgacgcgttctgccaacggctgttctgcctccgttagtcccgcgcaacaaaataaacagttcatacacagttccatctctctcagtgagcaacatatgatacacagctacgcttataaaccatgttccgtcactctcaatagtcggtgtggcactaatgaaacaaatgccataccagtgcgcctgtgctaggggttcgtgcggcccagcgtgtggacgaaaggcccatcgttggcccagcggcgcactcactgttgtacatcgcccgtctccgcgaaatggccgggagatccgcacccaccttgcctccgctcaacaactgcacacccactctgcatcccaatccactagctccggcctcgccccctcacccgcgtgttc

SEQ ID NO: 7997 - DNA, 394 bp, Zea Mays
cgagttccttccttgcggatccgcttggcgggggtttggtcgttcgccctgtctcatagacctgctcggtgggggttcagtcgttcgccccgcctcgcagacctgctcgcacgggggcttggttgttcgccccaccttgcagacttacttgacggggacttggtcggtaaataggccaaagggagctttatgagcctcgccttgggtacccctttcctgggtacctaacaatatgaattaaatattacatacacttgatattataagatagaagacgattgcaaaatgcaagtgtacaaaccatacttgccagcataactcgtggcccctcagcgtccatgcatgttttaaatgcattaaatggccacttgaatgtctccacaatttcatcacg

SEQ ID NO: 7998 - DNA, 293 bp, Zea Mays
gcactattgaaactccctagctaaggctgtgtgcaggttcgggtccccgtcgagactacctcctggggaccagatcaccaattatttcctaaatatactggcatccagcctcgacaaatcgagcccacatcccaggggtgccaagtaccagggaaggagttgacaacgacacacacaacaaagggaaagtagcatgcagataagttgcaatgttgcttgacaagtagtacttaaaagtatcttacaaaatcaaaatataataagccgcttcccagcaaaacccttgctttctc

SEQ ID NO: 7999 - DNA, 669 bp, Zea Mays
ccatttagtgaatttgtcaactgcaaccagcatgtgagtgtatcctccttcagctttcttgaagggtccaatcatgtctagtccccagcacgcaaatggcccatgttacgggtatggtttgcaattgttgtgctggtaaatgctgctgctttgataagtattggcaagcttcacacctctggactaactcggctgcatcactctttgctgttggccagtagaaaccagacctgaagaccttcccaaccagagtcctggatgctgcgtgtatcccgcattgcccggcgtggatctcatctagtagtttcttcccagtagccgaaagaatgcacttcatgaggactcctgttgcgccccttttgtacagtgcttccccaatgagagtgtagtgagctgactgccttgcgatgcgttttgctgcagttttgtcatccggctcctcttcattctttatatatctgatgattggctccctccagtcatcagaatctgactctggctggctcaaaacattgcactcttctgcccgatctaaggaaatactcgggtgtggtacttcttggacgaaaaccccaggtgggacctgggtccgactggatcctagttttgacaatgcgtctgctgctcgttgcgatctctctccacatgatgaaattccagcccttcaaa

SEQ ID NO: 8000 - DNA, 612 bp, Zea Mays
cagtctagttcaattaaatgggtcgagtagcattaggagaacctaaggacactagaacggaagagcagagagtataaacaggcctgtatcaagctagccacggcgaggtttctttcacggtggcggaaatcggtttgggggaaaagagcaattcgtgggctctggtgagtaattgagggcacaagcggttggattggatgctggattacctaacggagccgagggagtgctcaatttatagcgtgtttgagcggtggctagtaaatttgatggagatgcgcggcggccagagaagaggaagggcactggcgcaaacgattagtggctttcaccgtggcggactccccggcgacgagctagtgatatagagcggttgacggcgacgtggtgaagcttcagggcacgtggcatccgatcgacgggcggccaactccggtgaacttatctttgccggccgcaaagcaacaggggtacgacggccagcctccggtgttatcctgtggcgaagatcttttacccagaagtgttatccggtcactgatgagcacgaatcacaacggcggcatgaatccggccgcacggctcaccggtggcgaggttctcagcgctggc

SEQ ID NO: 8001 - DNA, 437 bp, Zea Mays
tgcggatctgacgcccgctgagaacgacgacaagctggacctgagcgctcgactgagaaggggcaaaacgggaatacaacgtatacgaactgactcacgggcgtcattatgccaaaaggaagagaaagtgttgttcggagtaccaatctggcgagagtgctgatcgggataccgatctggcgaagaagcagcttcggggtattataatggcaaatttctccactaggaggggtgtctccgtgggtcgcgctcgccgtcacttcggtcgctggtaggatatgctccaccaagctcggtgtgttcttctatgcgttttctcaagattgctgcagggtagaccacctcgtcgaggtttgggcggggctgacaatggcgccgccgtgcttctgttttgcgccgtcgggctggcgctggtgagagagaagggaataatggaa

SEQ ID NO: 8002 - DNA, 296 bp, Zea Mays
gttgcccttttaccctgaaacggttcacacccttcattggtgacagcttcaagtatacatgatcattagcttgaaagaccaaaggttggcgtcgcttatccgcataattcttttgccgagcttgtgcctctttcaagttgtgtatgatccgttggactttttcttccgtctctttaaccatgccgtgcctaaaaaaccatctttctctaggttttgaccaatttaagggtgtcttgcaccatcgtccatacagtgcttcaaatggtgccatcttaatgctttcttgatagctattg

SEQ ID NO: 8003 - DNA, 440 bp, Zea Mays
gttcccaaacaggccctcaggagtgtgctacaattgttgtacttcttttctgtttcacatctttgtagttcgtcacatattatgtgtgatatccataatgcaaaagtatgtgtgatatccatatttccatacataatccaggctcatgcatcacttaatttccaaacatgtttttttgtcatccatacaagcacacaaagaggagtgtctcttttgtgacagaataatatcttcagtgtcgtaattttttcaagaaaacgaaaacagaagcacctggagtaactctgtcctttcctatgaatgatcttgcctcaccaacaatatcatcatctctgacaggggtgcatttgaaagaaacaaactttccaacagcttcctttgtaacacagtattgtagcaaaccggttgcctctgaaagtggagtgccttcgtcatcttca

SEQ ID NO: 8004 - DNA, 726 bp, Zea Mays
cggaaactcagcacgtatcctcctgccgatgttcgtgccgtcgatcccggggaggggagtcggtagtaggtcgtctcaaccttcctcggaatgggccactcgtcgaagttgtcgtcgactcaattcgggtggcacaactttgcgccggtacaccatgatctcggtcgtactcctcccggtgcctcatgtcattttcatgccatcggtcgcgcgaagcgctgatggtgcttcatgcgtctcgtcgacttttgatggcgtgacgcaggtcattcgcaggatgagtgaggggtagaagatgattggtcgcctgtgtaagcagccgccagtaaccttccgagtctggggttcgtgggagtccgtcggctatctacgccagtactccaccaacttcactcagcgtgtttagtgctcgagcgaaatcatggtacaggtttcgagcgaggagagggttctctcgccggagcctagcgtcttgttcggctagctctcgctcccaatcctgagcctatcggcgatcacgacggcgggagttacgtctttctcggtgtactcgttcgtcgggagtttctcccacttccgaggcttcgtaccaggacacgggctatgctggatcccattccctggcttcatgatgtcgtcacacgtttcggcgtttgtttcttcatcgtcgggcatcacgctggggaggttcctccccttgcatggtaggttcatcgtctgttgggg

SEQ ID NO: 8005 - DNA, 336 bp, Zea Mays
gggctactcatactacaatcctattacgattcagtcagagaaatgcaatacaaagataattaaagtgttcctaattatactcattcttaactatatgtggacctaagaaaatccaaggctatgagaccactgcaactcaataacctaacctcgtccagaaagtttcttctgcacacgattcttgtagagagaagtaaaatgatgcctaaaggttcaagagaattaaaaaacgaatgccggttagtctggtcacttcccatgaatagctccaaattacttcccacccccaacaaacacaccccaaaaccactccaccagagaagagagctggaactt

SEQ ID NO: 8006 - DNA, 736 bp, Zea Mays
tcagaggcgatcttccgcctaagtgcaacaaccttggccaggggtatctcaggtcgattacgagggatcttgaacggggatatgtactccctaggcttcttcagcactctatcacctaggcgcttgaatatcatcctttgaaactcgctgaaatcagcctggtctactgagactttgtcttgagaaagtcggattggttgggtcaaattgttgatatcatcatcagactccgcagggaactggatatcatcaaatgatgagctggatcctgcctggccatcaatgctcttctccaaactgtcaatctcagctttggcctcctgacaaagcatgttcaacctatcatcgtactgttggtgttgctgagcatattcttttgacatttgtaactagaacatcttctttagcttggcagcgggcaccggctttttcaaagctttgatgttgtccttcagttgtttctggattgcaacctgtatccttttctcctccgcttcaaccttcttctcggcatcagccttcttcttcacagcttcttcagctgcagcctttctcttaatctcagcttcttcggcctcagcctttctcttattctcagcttcttcaaccttcttcttctcggcatcagccttcttcttcacagcttctttagctgcagcctttctcttaaactcagcttctttggcctcagcctttctcttattctcagcttcttctgccttcttcttctcggcat

SEQ ID NO: 8007 - DNA, 687 bp, Zea Mays
tgctagtctatacatgctaaacaggccttttccagtgatatcatcatcgctactatgtgcccccaccctttcacagcccatcagatgttctccctactacgcatggatgatagcatttctggctccctacaaccatggctccctgcccaggcaccagacacctctggtggtctgttgttagataactcttgctagtcccaatagtcccttgttatttgtgttttcagtcattgtcaggttattcagttagtttcagttattgttcagttaggtgttagagtagtcagttagctcatgccagaatttacctgtgctgagcgagtctcacggagaactgggtgtcatgtggaccgtggggatggacacgactgtgatcgtggcattggtgtatctcagtgatttgttttctctatatgaatatacaatagcaaatgctgagcagcaccaaaaacttgtctctctcatatgttgtttgttctctattgtagggagtgtgtagggtgagagaccctgctgagcttgctccaacatctgttttgtttgccatgtctctctcttttatcatgatcagcatagccctggtttacaccaccatcaataccattatcatgatacatgttcacatgcaaaattctccaagcaagattttgtaatattgctatatcagctggagagttaacttaaaga

SEQ ID NO: 8008 - DNA, 456 bp, Zea Mays
cggagtgtcttttacaaagacttcgaatatgcgcaagaagtgggctgttccggctgcaccgttaggcgacttttgcgtggagtgtcgcacgcgagggtagtcagcgctgcccctcgcggtgacttcggtgtggtcgaatgccgaagaccgtcgatgcggtctttttcgatagtatcttagtttttgcgggggatttttgcaggtatattacatggctccgcctcattaaaaacctcacccccgggaggaaaagagtgcgggccggaatgatactgtttggtgaattacaagggcgtgttggccctaaggattcaaacaaaaaatttgcggagattatcgacattccaggaatgctctaggtcctcgccagatggcgttgttagcctgtacgcgctgggggacgccttcgtcttgacgatgaatggaccctcccactttggctccagcttgccccgt

SEQ ID NO: 8009 - DNA, 484 bp, Zea Mays
atgacggaaaagtgccttcctctatgaccacaactgatcgtcatagaatgaattcacttccatgacaacgcggctttcgtcacagaatgtatacacattgatgacgaaactgggtagtccgtcacaaaacaacaaatgtgacgcgaccccaatgaccaaatcgaactcgtcacaaattcgtcacaaacctttatctgtgacgatatatacacatgcagtgacgcaatacgaacgtcatcgatgataagatctctactagtgacggcgaccgtgtccccagccctggggtgtgtcgccaggtggccatctccatcgacaacaacaccttcgcacatctcctgctacaccctcgcgatggaggtcttcgacattgtcctcagagtgcagtggcttcgcaccctgggaccgatcctatggaacttcaccgacctcaccatggcgttctggcataaggagtgtgatgtccgctagtcctggatcagcg

SEQ ID NO: 8010 - DNA, 709 bp, Zea Mays
ctgtggtatgtaggagtgctgaaacaagagagtagagggcaagaccggacctgaattgcactgaccacggtgagagcttgttcacggtggcgtaaaatagatatgggaaaccgagcaattcgtgggctctggtgagtaattggaggcacgagcgggtggattggatgctggaatacctaacggagccgagggtgtgctcaatttatagggctcttgagcggcggccggtgaatttgaactcgtgcggtggtggtcgaagaggagggggtgcactggcgcacgcgattggtggccattaccgtggcaacctcaccggcgatcactggatgggctaacatgagtcacggcggtgtggttaaactgtgaggtgtctaactccggcgaggggagatccgaagcagccatgagctaagcggacatggcggccagagtgaacagtggccagagttcatccactagcgatatttcttactacctctgtgttatccaactgcaccgagcatgaatcactgcggcgacgtgaatccacgcgcgggggtcgtcggcggtgagtttactgagctggcgatctgatctggttattgtaccatcgtgcagcttcttcagtcggtctgacagagcatgtttggggtcgatttgctccagattttatgtaccgacctgaccaactctctgcatcaaagttgtagcctaacaaaccagctttaac

SEQ ID NO: 8011 - DNA, 429 bp, Zea Mays
atcaatccaaccggctctatacactacgacaatgaagacgaaagcgctagaggtaaccgtaccggaagtcatgcgtggtggtgggctgtccacagcagttgcggacttcgatcaacgcatgaacggcgacgagcaattgccgcccactggcaatagaatccgacccgggatcggttcctacacctgcggcggaaccttccagtgctctcggtacacaccgccgcggccaaggaatcgacagcagcagcgtcgacggcggcggcgtgatttcacggttaaggctatggcgtcgggatgtcttgcgcttggctctaggggacgagagggggaaatgtggtcgggctatataggggcggagagagagttcgggcacgcacggccaaatccgaggtccccggcggcgggattttaccggagcctaatgaatca

SEQ ID NO: 8012 - DNA, 613 bp, Zea Mays
ggaggcagtgctacctgctgatctcaagtttggggcaccaaggttgatctttgaaaacatagcagaagctgaggctactaggctggaggatgttgatgtactcaaagaagaatgactaaacacagtgattcaatcagcacggtatcagcaaactctgaggcgctatcaagataaggccatacgacatcgattgttcgcagtgggagatctcatcctccgccgaattctaacgggggaggggcggcacaaattgtcacctctatgggaaggaccattcatagtagctgaagtcactcggcctggatcatatcgtctcacacagatggatggcacagaagttgggaactcatggaacatagaacatctcaggaagttttatccttagctatatttcaaaagctactggggcggcaatgtattctgtaatccgggaaacgcatcatcaataaaaagacttcaggaattgttcgttgtcaattagcattcttgctcaaatcggggtgaccactataccctactaacggagcaatcggcttaagtcggtgattgcttaagacggtgcgacatgctcatgcttacttaactcggggtgaccactataccctactaacgg

SEQ ID NO: 8013 - DNA, 427 bp, Zea Mays
ttggggctctgggcgcaacatcaccttccccggcgagagcaccaccatggagaggtctctgcgccactgtgaccctatgtctagaggtagaagaaggcacaggagcatagatctgttggcgaacgaccatgattagaagttagggtgttgcgctaggagatgttgatcgactgatgatcgggtcgcagaaccagagtaagggaagaattaatcatgtgacaacagaaacagttcctaaggatgccgacgtggtgtatggtatgtttcttattaactacatacatgcatcagttttatattgttctggaacttctcactctttcgtaacaaagtcatttgtggaaaagcataatatataaactatcctttgaagagaaaactattaattagatcactaggaggtgaacttagagccactcactcatgc

SEQ ID NO: 8014 - DNA, 889 bp, Zea Mays
acatcggtgaacaagcagagtcacggacacgaagtgctcgaacggtggagccgccagactgggatggcgtgttgccgactcacgctcaggggcggtcggtgactcggcttgacagcgatgacgtagatgaattcatcaccacgtagggctttctcgtgggctggtcctagccgctcaggaagtagaggtcagaccgcctaagatgagccaaggtcaaaggtgcattgcgcagaccgcgccctgggcaatgtccctggtggcccaccccctagatctactggtggtgagaccatctatggtccgctggagaattcgaatgagtgagaccttggcctacgcgccaagctccactgtgatggtagcgcgcatgatggggcacgcacgccgctgggtgagcaaggtaggttggcgaaccatctcggtggcctgctcacggcaccatcgtggtgcatctcaaagatgagccacgcaacgtcgacgccttcggacccgtagccacaggccctttgttggctcaccgtgactgagatgcagtcgcccttgacgtagatgttgtgttgccatgtgccgagcacgtagaagaagcagcacaatgccatggccaccagcaggctcagcccttgagatgcccttgttcgccattgccaacctcacccctgccccattgatgcgaccaaccaatatacacaataccccaatgcggggatcagacggcggatgcgagagggagagaaaatacaacatgccaccagatctagcgcgcgtacctgagttagatggacctaggacagcaccaccatgactgctacgacatctgctttggatcgggcggcggcagtggtggaaaaccctagatgggggagaagccaggatgggattcagatcgtcg

SEQ ID NO: 8015 - DNA, 273 bp, Zea Mays
agattttcctgtgttatgggcctgcatcattaaccaatcatagcatagcgttgtaaaaagtttttctaccgtctctcatggaactccttctaccttatattgcatatagatatctttggttttaagcaaatctgaccaaattggtggaccatcttagcctgcttatctgtgtttcacagtacaaatggatccatcccctcgctcggttattcggattttataatttcttgacaaaaggcttacttctttccaacttccacctccatttacaaa

SEQ ID NO: 8016 - DNA, 462 bp, Zea Mays
ccaccaatccatgctcgcgtgccattaagcgcgaccgtggagtgaagctgcgggctgtggctttgcttgccctaccatacctgccatgccatgtccttgcatgcttcatgttgccattggcgcgtagctagatacgtacatggcaggcaggagcagagcaggaccggcgtccgggcgggacttggactgttcctgctgcaatcacacacagatcaagcactagagatgtccccaacacggggagcaagggaaacgagagagatcagggacggggggactcgtccagactccagagaccgttgccatccctagcccacgcctgacgccccacggcccgctccgatttcttatctttctgactgcaactaccgttcgttgagaatgagaaaggggtgaaatgagtgaacaccttttccttagactagactcgcatcccctggccgtaaccatggcagttaccca

SEQ ID NO: 8017 - DNA, 391 bp, Zea Mays
attgcaattagtagtggcgatttaaaaagatttcatgttgaaaaggggaaaatcctctaaccctagctcctacttgactactggcttatcaacatatcaggccaattaatcagcattctccatcaggtagccacatcactaaagtgattaaccggtgataaccggtggtgcacctaggcgaagggcagtgcgtctacagtacggttagtcgcgacctatcctgatttattggtcaactagtgtgattaatcggtaaaatgagttggcttactagttcaccggacgagcggacactcgggtcagcttctcggtggcgttggccggctagccgacgatttggagcgatatagggcgctgcgacgacggacaagcagtgggagcgaccgaacga

SEQ ID NO: 8018 - DNA, 489 bp, Zea Mays
cttagtgaccgccatggtagctcacgctagtgacttcctcttctctccggccgccagcgtttcccttccaaatttggagccgccgctcaaagcctctataaattgatgccctagcctgctccgctaggttgttacgaggccagagcactagccctcgcctctgatcatccaccgtagcaccccaatttcgttttcccccaattccattttccgcgccgccatgtgcatctcccttaagtctacaggtcagttcaagcttctctgcttgatgttctagcatcccttaagtctcctattgctcgtagacccatttgattgaactagaccgcacggaaacaccaagaacacctcggtttgtctccggtattcaccgccgtcgtgggcagacaaattccgggccggatttgtgcaattgatagagggattagggtcgctaggggtaggattaggtgtcgaccgagttagggcaccggtcattgcgcatcccga

SEQ ID NO: 8019 - DNA, 742 bp, Zea Mays
gaagtgtatgaacccatgtcgtgtgcaaaggacatgtggggcagttggttcaagtcttggttttatattgatttggagaaaatgtactaggtgtggctcgatcggcggccagctctatggtggcccgtgactttgttgcttgccctgacttcgaagtcagggagaatgattatgatgaatgggtgttgcatcgtgtgagggtgatcagcagcgatagagacttggtcgaaaagtatattgcatattaagtatggccactgagtggaggctggacagttggtaaaatcgtgtgacgaaggatgccgctaaagagtgccttttttgagaaggatgacattgttgtgagtcccgccattgctgtttagcttggtaggtgagacggggtggccttcgttagtgatgttgaagcggaggctgttaaaattgttgggaagtattctgcgaagactgaatttacaagaagcatagaaatccaagatggtaatatttgtctcaatagggttttcgaaatgagggagctagagtatgggccatatcccgaagacgtagaagaaggggaggaggaagattcgagtactattgcaaaggtgaaggaggttatcgaaggcagcgaagacatggttggtttgaagcggagggctttgcctactgaaggtaaaatgagaaaaagcgtgaaggggtcgaggtctccgaacaagatggagaccgtgcctgaagattttgtgggtttgaatgttgaaat

SEQ ID NO: 8020 - DNA, 527 bp, Zea Mays
tggaggcagcagagggggagccagtcctaggacccttgggggctggatcacctttagtgacaccctcgggtaaagcatccttagggacctaagcaccctcgagggctggagacacatggcaagatggtggggttgcctcttgcctagccagaagactagcagagggtgcaccgtccgagcattctacacgaacgtcgatgcccctaacctcaaaaagatcgagcaaaaggtcctcgggaataaccttctctagcgcgctgtcgatggcggacatagtcattccctagaggctaaccagccctgagagaacgaggtttggaatgtcattgttagccttactacgacgatccctatgtaccatgggagcacatcttcttcatcaccatcatcctcctcctcttccataacatatctgctgaccctcacaccaccacagctctccacatcatcctcaagatcggcatccgccgcatcatcaccaaggtttagtgcagcagagtcaacctccagttccaagctagatcaac

SEQ ID NO: 8021 - DNA, 542 bp, Zea Mays
gcgggggcgagattatcgggggcggtatcctcggcggcggttgtctgccgtgcgcgcgcgggatccgcgggaggctggtgagagcgggggcagtctacatatgacgcttgccactgcatcctacaaggtgtgcttgccagcaatccaaacacatctagctgcatatccttgctgggcaaggcaaggcaagctttgccagaagatccaaactgctgcattatcattgacatgttgtgcagccttgagacgtagacatctaagcgcatttccatgtatctgtaaaatgtaacaacaaatggagacacggcatggtttatttagctgtctgttttgctgtcagttcatgaaatcgttagtgcttatatctccccatgactatgagcctaccttgtcctgtcgcccatagatttgtgcactgtttggcaagtgcatgcgagacattagaatggctgtttttaatctagtgatggattcaagcttttccttcaacttggttcctaaatcctaaactccatcctcttggtttactataagtgccctgt

SEQ ID NO: 8022 - DNA, 539 bp, Zea Mays
acttcccattgggggctcttcttcgctgcttgcaggggcacttgggtccaagtctgagtccatatagagcgtgtcaaataccaggtctccactgccatcgactaaccatgcgaactccaagtcatcacaggtggggacatgaccgcgggtcactagggccgcgatcaccgttgggacgggcgcagtcgaggtggtaagacgccagggttgctgctagagccaccatattaggacgacacttctgctgacgcctcacgcgcacgatttgtgtgtacctgaagagctagatactcgggagataactcggaggaaaggcgacataactccggataagcaggagcacctatcgcgttgaagatagactcagatagagttagatagacttcatgacttgtaaagggatatccctctggtcatctatataaggttgagggggtacccctacaaaacgttctcatatcatcccatctcatatctcctcaccatctcataccaactacgacatcattaaattgataggagaattcatccattcccgc

SEQ ID NO: 8023 - DNA, 714 bp, Zea Mays
gaaaaaggaaggtcaaggcattccaaaactgaaacatactctgcagaacaactgcaaagtgctctcgctgagtaccaagaagatgcagcgctgttcatatttcgcttaaaatcattgaggcaagggcaattccatagccttttaacacaggcttctcgccatcatgctgctcaggtaggctaatccttcctccataacactgtcagttggcccaaagattggttgaatacataacctaactatcacactgttctttggactgtagttaagctttttcaggagagggctgaagtgtcttgaggcactcgaaccccatgtaaaagctatagctgagagacagcacattgactaccagttcagtggtcttgaggatgatgaatctgacaatgatgattacagctccgaccaggatgattgcagcgaagacggagagcttagtttcgactatgaaataaatgacaaggaccaagattttcttgcttcaggaggttcgatggatgtaagtttcatgattcatattttgctgtcctctttatgcaactagctcccgctcacctagatgtgaccataggttaatgttgtccagttcagtggtctcgaatgtaatggtttattatttttgttttttcctgatctgtgtggagaaattaatgccaaggatgcattgtctttctttttgttcacagttagataaaagagatgtgaagaattccc

SEQ ID NO: 8024 - DNA, 527 bp, Zea Mays
gtatccatattctcatgaaaacttttccaaaatctagaggtaaactgtgatcctctatccgaaacgatcttctttggtacaccgtgtagagacacaatccgagccatatatactctgccaattgagatcccttataagtagtcttgaccggaatgaaatgagctactttggtcagtctatccacaataacccatatagaatcatatcttttcaaggtgcgaggcaattcagtaatgaagtccataccaatctcttcctacttccactcgggtatcttgagtgggtgcaatagtccagctggtctttgatgttcggccttgactctttgacacacatcacacttagccacatgtgcagccacatctctcttcagcccataccactagtacttctgcttcaaatcctgatacatcttagtactaccagggtggatagagtaatcagaataatggtcgtccttcaatatggtctcacgaaagctatcaatctcaggaacacatatctgagccttgaaccatatagtgcct

SEQ ID NO: 8025 - DNA, 489 bp, Zea Mays
cggatgtgggtgaacgatagggaggtgctctgggcgggtcggggtgtgctccgccgagtaatctcagacacagtgagagttgatatggtgcatcaaggctgtgtgggcttcagtgaggggtcaggagtgtccgaggccgggatccgggcacgaggtgtggctgcagtagctaggcaacatggaggcacggtgatccagcgtgtaacggctccagcgagcccaaattcactacacttagacacaattaaggcaaaagaagtgtaaggtggggttccttaccgaggggtggtgctcagggatgcttggcacgacgtcgggggctctagtcggtagatgacgaggaaacacgacggagatcaccggtctgcacagggtgggggtcaaacgttgacgggactgaggggccgggaaaagggaaaaccgaggtgggttctcggtgggttggactcaagtggatctcaacatggcaaaggcgacagtaggggctcg

SEQ ID NO: 8026 - DNA, 1163 bp, Zea Mays
cccctttttaaaggaagatcccccactcgcacccctgaagcatcacgggtgaagtctccctcggcgtgcaccaaggatcccaccttatgacacgggggccaggccccgcgtgtcatacagactagccctaagaaggagcgtgcaactgccctgcggttacgcgccccttcagtttcggggcatccggcggtcaagaaggcgaaccgtgcaaggggcatgcaaccgcccagcggttaagcgccccttcatccttgccgcacccaacagtcaaagaggcgaaccgccgcgcaagaagcgtacaaccgccctacagttgtgcgccccctcagctccgtcgtgactggtgggggcccaggcccacatgacatgtaaccggcgcgccggttaccgtgtgcgaagaaactgcaccgccgcttgcgccaataccacgtcttctcgaagctgtcacgggagtctgaaaaggtaaatttttcagaactagtgcagcgactcgaggcagccccgcgcatggcccagcagtgctattaagtacgatggtcacgggccagtcagtcgtgggaataggcgcggtagttggcatggccataggcgggccggcagtaattgcagcaacaggcacgcaggagcagcggtccaacagccaaccagactctcgtcccacctgcaggctcgcatcctcccctgaggcaggaccgggggccactgtcagtaccctaaattaggggtaccctcttctacaacatgaagacgccgcacccatgcgacgacccctagccacatagggaacaacgcccgaccccaccgggtgggcagaccaaagggcgccacgtggcagggaaagacaacccatctcagtaagttcaggttccacagagggacaccggacccctatacatataagtccggaacccccgggaggtccgaaccctagcagggtctcggaacgaggagaaccctggcgtgagcaggggtccggtgctgacacgtgtctgggccttgcccttcacatcctgctcagacagagacccgctgcttgtggcccataacataagctatcgggtcgaacttgacgtgaagtcatgcagccccttcatttattggagaaaggacactctgcctgccactacgctgacaggtgacatgccccctcagcatttaatgcg

SEQ ID NO: 8027 - DNA, 316 bp, Zea Mays
cgcccgtgctcctggtcaagaagcccgatggctcgtggcgcttctgcgtcgactaccgggccctgaacgccctcaccatcaaagacgcgttccccatcccggtcgtggaggagcttctcgacgagctccacggcgccaaattcttcaccaaactggatctacggtcgggctatcaccaggtccggatgcggccagaagacgtgcacaagaccgcgttccgcacacacgatggcttgtacgagttcctcgtgatggcgttcgggctctgcaacgcccccgccacgttccaggcactgatgaatgacgtgctccggcc

SEQ ID NO: 8028 - DNA, 892 bp, Zea Mays
aaaggattctgacttgggagcattttagctggcataggaggtcggaccctggggttcgggtgaccaagggaatctctagaggggtggagggaatgccatacttttccacaaagctagtggctatgaaggagtgggatgctccagaatcgaaaagtacggttgcgggagtaaattcaacaaggaactcaccgagtactactcccggagcctgctgagcttcctgggcatcgacgtgattcactcgtgccctcccttggtacggggtcttgttatgctggctgacggcggagggagccttgggggcgtatgccgaggtattcttggggccattcaccgagttggagtaggcgggtcctggtggcttcagctgcggacagttgttcttgaagtgacttggatcaccgcagtgccaacatgcatttgccggaggttggttgcttgccactgagggggaatggaaagagctctgactctgctggctgaatcatgacggagtgggtccagctggtctactgaagtttggccccttgggtggaaacccaaatgatcgagtcttctggtgccggtcctgctgctgtgcccggagaacctggaacttccttttgagatgtcctttttcttcctccttagccctttcaacttgcatggccttgttggaaaggtgagagaagttgaggaagtcttggctagccagaattgtcttgagttctggcctgagtcccttcaggaaacgggccatcttcttgctctcgatactgacctcatctggcgcgtagcgggctaactcagtgaacttgtgcacatattcgctgacagatcttccatcttgagtcaattctcggaactcgtcctccttaagctgtaccagtccttggggcacatggtgttcccg

SEQ ID NO: 8029 - DNA, 511 bp, Zea Mays
gtacaggggtctcgaggtaaaactcctaagacacaggctaaccacgcaggggaccgcgggttagttttcctaaaacagaggggctctttaacacttttgccggggccgaaagggtaccgtgcgctcacagccgtccgatcataaacgtagcgcccagattaaatcaaatcatacgcgaaacggtacacaacgccaaccgtctattccgagatctacggttcggattttaatacttctcgaccgatctggttcatccgattgtgatcgaagggacccgaaccaatcctggtcgcatcttatgctggacgcgatcatggccgtcgcagacggatcggacgacaatcgttcatcttctccccccccccgagctatctcgtggcagcacaacaccctaaacgcgccggagcaccaccatcgcaacgcgaatcccttccccgatgcaccaaatcccgatctaactagccctacacgatgcagggaaagaaacgagttgcagggagagggtggtacc

SEQ ID NO: 8030 - DNA, 462 bp, Zea Mays
gaagacctcatatgcaaagctcaacgtctagactcagagacagcaagacttgtggagaaagcccgcaaggaacaactcccggacttcacgacggatggacaaggagtcctttggttcaaaaatcgtctgtgtgtaccaaaaggggaggcccgagaagtcctgctcaaagaagctcacaactcagcctactccatccacccaaggactaccaagatgtacctagacctcaaaaccagatactggtggagagggatgaagaaagaaatagctcagtatgtggctcgatgtgacatctgccaacgaacgaaggtcgagcaccaaaaacctgcaggactattgcaacccctcccgatacctgaatggaagtgggaagaaataggcatggacttcgtaaccggactgccccggacgcaaaaagggaatgattccatctgggtaataatagatcgcctcaccaaggta

SEQ ID NO: 8031 - DNA, 1320 bp, Zea Mays
ggttagtgagaagaatggtcttatctgtgcaacttatgacgccattatgcttggttaaccaatccattcctaagatcagatcaattccgtgggatggcagtacggctaagtctgccaagaatactaccccacttaaaataatcctgacttgggagcatttgaggcggcatagaaggtctaaccctggggttcgggtgaccaaaggaatttctagagatgcagtgggaatgccatgattttccacaaaactagtggctatgaatgaatgggatgctcctgaatcaaaaagtacagcagcgggggtaaattcaactaggaactcaccgagcactactcccagggcttgctgagcttcttgggcgtcgacatggttcactcgtgccctgccatgaaactgggtcttgcttagctgactgttggaggagggtgccttggaggcgggtgctggagcattcttgaggccattcaccaagttggagtaggtaggcacggatgtcttcaactgaggacaattattcttgtagtgactggggtctccgcagtgccaacaagcattggctggaggttggttgcttgcaacagatggggtatggagggaactttgaccctgctggacgaaacgtgacggagcggaccctgctgtcttgttgaagcttggtcctttgggaggaaacccaaaagatcaaattctctggtgcctgtcctgctgctgagctcggagaacttgaaactccctcttgaggtgacccttttcttcttctctagccctttccacttgtatggccttgtttgagaggtgcgagaagctgagaaaatcttggctagcgaggatagtcttgagttctggtctcagcccctagaagaaacaggacatcttcttggcttctgtgctgacatcatcaggcgcatagcgagccaattctgtgaacttgtggacgtattcactgacagatctcccaccttgagttaattcccgaaattcttcttctttgagctggacgatccctaggggcacatcatgctcttggaaggtggcttcaaattccgcccaggtggcatctctgatggcagcgctgaaagtatcccaccaggatatggccatcccggagagtcgatgagcagcaagatgaacacgctggttctcaggatagtcatcagcgtcgagcgggttgctggatctagcaaatgtgggaggcttgagccttagaaactctcccattttgtcctgaggccttcctccagttgggcgctggttctcgaggcttctggtgaggacctcaatgagtcaggtttggttggccagaacttgggctaagtcta

SEQ ID NO: 8032 - DNA, 629 bp, Zea Mays
caaaattgcagctggtatgaagggctgcaagtttactactggcgaattagcaagttcttatatagaaatttgtgttctggacgctacaagttgggctgtcaggagctctgaatcgaagttccgatggtacagtgtcctgatcaggtcgccatctctgtccctcgccgccgacgagccgcgcgcggattcgtgctttcgccaccgtgattctttctcggatcggttggatagcgcttggggttgagtaaatatcatcgccatggatatactccggccactaaattactccgaccaccataccgagctagtcatggatgcttcggatgtgttcaccggagacagccacttcacggccttgcgccatgtgcccgggcacatttaccacatcatcgtgactcgcttaagccatccgatcatcgtcggggagcccgccacggtattctccacgaatccactgcgccagtgaccacccattcctccgaccgccgcgcgtctcaatccaaattcaccggccaccgctcttgcctgctataaattgagcccgtcgtgagctccgcagggtaatcacacatctaagccaccaagtcttgtcttcaattgtccactaacgcccgtgaattgctcagttt

SEQ ID NO: 8033 - DNA, 749 bp, Zea Mays
cgcagtgctaagtccatgatggtggacggcgacgagtgtgtctccggcgagcctgtactggccggagaatgcaatgatcggcgctccagtgcggctgacacccaattctacctataacgaccataacccctcaatcaattgcaagattccagctcacaatcgttctgtccacggtggcgatggaaatcggagataacttaacatgttctgggtgattcaaggcggtctaatccaatcggatggttctgtgagcaacaggggacatgagggaggctagaacatcccacagaaaagcacgagctaacctgtagacgtcgggccatggcgaggtgttcacgggtgcggaaaaccgatttggggagaaagaggaattagagagctatggtggctaatcggaggcaggagcgggtgatttggcttcgtgattacctaacaaagctagcggtgtgcttgatttatagtgttcaagagcggtggctcccaattttggaatggcgtgctggcggccggagagaaagaaggtcactagtggctcagtcgtggcgctcgtcggtgcaatggttctaaagtggtgagtttaggcgtgctacggttactaccatgcggtaaagagctacgaggtggcataagtgaggtcgccggagtaccacggcgacaccggcggtctggccacattgcacggctataggcgcagttgataagcttcaccccgtgaccaaatccactccctcgcgagatctttttacttc

SEQ ID NO: 8034 - DNA, 428 bp, Zea Mays
tggacccacctcgtcacgattcagccagcagagtcagagctctttccattccccctaagtggcaagcaaccaacccccggcgaatgcatgttggcactgcggtgatcccagtcacttcaagaacaactgtccgcagctgaagccaccaggacccgcctactccaacttggtgaatggccccaagaatacctcgacatccgcccccaaggcgccctcctccgtcagccagcagaacaaggccccgtaccaaggaagggcacgagtgaatcacgtcgatgcctaggaggctcagcaagctccgggagtagtgctcggtgagttccttgttgaatttactcccgctcgattctggagcatcccactctttcatagccactagttttgtggaaaagcatggcattccctctactcctctagagattcccttg

SEQ ID NO: 8035 - DNA, 497 bp, Zea Mays
gggcggaacaatgccataagctcaatagcggtgaagatctttccaccccgaggggttatccgggcactagtgagcacgaatcacctcggcggcgtgaatccacgtgcgggggtcgccgacggcaagttcactgaaccagcagatcttttcggttactataccatcaagaatttcttcagtcagcctgacagagcgaatggcaaggagatttgctccagatttcatgcagtgactcgatcatctcactatttcaaagttgtagcctaacaaaccagctttaactttgttataatgttcaccatcaaatagtcgcaggatcttactcaaaatcgagctctaagttcatccaacttcactgttactgaaaattcagacttaaggctggctgacatcacaactttgggcttagttttctcccaactttgtataacaacaatgcttaatcccttaagcaaagttgtacttctattatagctctagacttttgatgtattgac

SEQ ID NO: 8036 - DNA, 403 bp, Zea Mays
ctacggtcaggatcaattccccgaaccggtaccctagcgtctaatcacagccctccgtcgtctgatctacggcccgagcgacgtcttccccaaccagctcaacacggcggcgacgtggccaaccacggcggcgatcccaccggcgagcaacgatccattgatttagcgcaataatccgacccctagaacggcgctacgcgtggagtagatagcaatggaggcgatgcggtagtactcaccgatggtcaagcgacggaggagtccgaccacgaggaagtacggcgcggtggtgaagcattccctccggcgagcaattggcggacttccccggccccaatctcaaccctccgaagacccgagctgcttacccagcttctggtagacccacgcggacacccgcaga

SEQ ID NO: 8037 - DNA, 571 bp, Zea Mays
atctggtctcgcttcggccttcgaaggccaagggtggcgattgaaagtgatgccgaagcgtgtcaaaaggctttcagcaatgtctgtgctttcattggcataagagacataattcaagagcacatagcctacagagtgtggccacttgtggatagctgggagatgccgaaggagactactgctggatccagcgaaggtggattagttcgattgaaatataccttcagatacagagagaagttcgacgaaccgaatgatgactagttgaaatgcattgaggctactagcgacgaattgcttgggacatataccagggccgaagatgatgctttgtcctcagccttcaagggttggagcaagaaaagattaaacagggtttttgatgtaattggcttcatataccctgattattgctaccccttgcgaaggcaaggaaaaaagagaaaaactgccgcttcggccaccactgctgtgccgaagggcaagaaaataaaggttttgacccaccggccacgatatattgaaacggtcgtagtgcctaaatttggtgaagggacctcctctgctgccg

SEQ ID NO: 8038 - DNA, 708 bp, Zea Mays
catggtgcaagaatctcgaagacacagagtactgctacgtggactacgggttgaatcatatattgcgcggggtctctattataaaaccaccgagtgaaggggtatcagattacttcaaccgtccgatcaaaacgaacggtcacgattaaatcgcagccgtccgtaccgttatgcaaccgagactgtgcgatctaaatctcacagatccagttcagtgcaaccatgcccgctccctggccctacgatctcgatagtgtggcattccccaatccgtaagtcggccgcgacctgagccctcatcttacccctaggattaagatcccacgactgagactcgtcccctaccctgacgatgtacaatcgtggcaccgcgcggtcaacaatggcggcaatcccgccggcgcgcgaagacccagtgaaccagtgctccatctgaccctttgaacgacattacacatggagcagaatctagcggaggcaacgaggttatactcaccggcggtcaagcggtgaaggagtccgaccacacgaaggtgcggcccggtggtgaagtaattgctccagcgagcaattcgatggtggtgaggcctccaccgcgcggacactccacctggaatgatccctggccccagacacttcaggcgagatactcatcagggcccaagtccaagcaattttgtggagcgctggcggcaacctaacctgatt

SEQ ID NO: 8039 - DNA, 419 bp, Zea Mays
tggtcagtcaccctaggattagtaacagctcgtgtgaaatccatagcggggagcacgcaccgatcgtgcaaagctcgggccacgtccaaccacccaagcccccggtctaaccccggtcgaccacaaaagcatcccctcctacccgtccgcgcaactcgacgcgcattcggtgagccaccgtcaccgtgagcagtgagaaaaggaagaagaggggcggccacacgaccatctgggcatctgggccgcgggtgagcggtagatcgggtcggtgatcgtcaccggtgcacgatggtgttgtctgcgggcgtataagggtgagccggacggagaagtggcctgaattgctcgccgtgtccacatcaccgtcgcggatccgcctcgcaccgtgtccagcctcgtcgggtttccaattctagata

SEQ ID NO: 8040 - DNA, 516 bp, Zea Mays
acgtcacaaccagtgtgggctcatatcgttggacttggatctttgcctcacagacttgctccgtgaggacttggtcggtcggtccgcctcacgaacttgcttggcagggacttggtcgatcgctctgcttcgcggacttgctcaacgaggacttggttgatcgctccatctcgctgacttgctcggtggggatttggtcggtcaattcgcctcgcagacttgcacgatggggacttgcccggtcgctcagcctcgtagacttggttggtgaggacttggtcggttgctccgcctcgcagacctgttcgacagggactttgtcgatcgctctgtctcgcagatttgcttgatggggacttggtcagtaaggaggttatgggccctattttgggtaccccattcctgggtacccgacaccagcccctgaccctccgtgcaacccttccgtgtttgcatggaggcttccgttgttgactgaattctcaggcgtgcgcaagcgcatctgctagatgtggc

SEQ ID NO: 8041 - DNA, 1100 bp, Zea Mays
gtcgggcgaggcggagttttgcgcccgagagccggtttggttttccatcgtattaggtgtcccatcgggggatggcaggcgacgtgtgtgcacagtggcgtgagcgtaatcatgttattgcgcctagatgtgactgttgtcttgttgccactatgctcttgtgcctttgtgtggggtaggtgtgcgcattaaatgcgagtgtcccctgctggcctttggttgtgccttgtcctgtttgcctaagactggctcgggcgagatggatagggcgattgtagaacgaggtgacttcgggcgaagcggaaatgggaggcataagctgtgagaggctcgggtgagacagagacttgcctgaggcagaggaccctcggggagggttatcattcatgacggcgtttatagggaagacccctgcagtgggcctcgggcgaggaggcggcttggcctcttaccttcggggattatgtctaggccattaaattttttgagcactttattagaggtgtaatccgagtacctctaattatcacacccgatagtagccccgagccttctaaggaagtactttggtacttgcttggaggctttgctaccttcttgtgtgggtgcgctatattcttgaggagtgggaggtttagtttttgatgggtgcacgtgagcacacccgttgggtgtagcccccgaggccccgaaagtgtagttgactccttcaggggcttcattctttactgtcgttggtgtgataggttcaatttgacctttggctgatctattggaacctccagcgtggtttgcgagggcagcccccgagccttagcgcggagcaaaaggacgatcgagtggtgcctcgacttttcatttgtacgcctctttgtcgactctctgcgaggaggaagatggggaatgcgtcatgctaccctcgatgggcaacgagcatgacatttccgttgaggtgttaccaggtaatccgagcgggtgttcgagctccttttgataggagtcggctagcggtccagagacacgccccaaaaagtacctgcgggtgattcgcctggtcccgaacccgtttgatggggttcaagggctagatgcctcccttt

SEQ ID NO: 8042 - DNA, 401 bp, Zea Mays
cagacgcattgtcaaagctggtatccagtcgggcccaagtcccacttgggatcttcgtccaagaagtttcacaccgagtattctctcagatcaggcagaagaatgcaacaccttgagccaaccagagtcggatcgcagtgaccggagagagcctatcatcaggtacatctctactatcctataaggctccaaggagggcgtccaccctgactcaccgtgcccccgctcccatcatccccgctgagatgccagccaagtcgccccgcgccgctccattctcgccttcacgccctgcctacgcaccctgtccccaatccctccgtgcacccccacttcgctcgctatggcaagactaccgcggccgccctccacccccgcttcgctcgctatggcaagactac

SEQ ID NO: 8043 - DNA, 320 bp, Zea Mays
cttcgagaatggtaacggcaatggaatgaattgtgggtggcatatgcttccgtgcaatgattacctccatttgtttgattgccggaacaatttaccgatcacgaaacaatttaccggaaccaaacataatcttactgccgacatcgcttactccctgcctgaagacatcccaggaagcagccgctcgtatattttacctgctattctgtggcggacgatatgggattgtaggaatagatacatccatgatggtgcaacttccacagcccccggaataatttctaaggttgtacatgatctgaaaatttggcgccaccgtt

SEQ ID NO: 8044 - DNA, 541 bp, Zea Mays
gtttctggggatttttcgtgggtaattggtgataatcagtatgataatcatgtagagctttgtcatacctttccaacgagtacttatgcactcgattcggagttatattttagtagatatcgctgtttgaatccgggtatgttgctgtccaaaaaaacagatttgcaggtgggcgaacagcagtattattgacagtttctggggatttttcgtgggtaattggtgataatcagtatgataatcatgtagggctttttcatacctttccaacgagtacttatgcactcgattcggagttatattttagtagatatcgctgtttgaattcgggtatgttgctgtccaaaaaaaacagatttgcaggtgggcgaacagcagtagtattgatagtttctggggatttttcgtggataattggtgataatcagtatgataatcatgtagagatttttcatacctttccaacgagtacttatgcgctcgattcggagttatattttggtagatatcgctgtttgaatccgggtaggttgcggtccaa

SEQ ID NO: 8045 - DNA, 292 bp, Zea Mays
gagaacacgagtgccgttgattagataggaaatggtcgtgatcaaatcaaggtttacatgaccgtcatggccgtagatcggtaaacggacggtcgagattaactagtggcgcgtatcgattcggtgtagtggggagccgtccgatcttgatcggaggggtgcgctcaggtattgtttatttaaatctggtccgtagatctcgggatcaaaagctgttgtgcgtacccgttcacatgaaactctatctaatctggaccgctcagatcagatcttgcggccagggatcacagat

SEQ ID NO: 8046 - DNA, 310 bp, Zea Mays
gggagggcgcacgacgcttcggttatagcctccacgtcccggagtacccgacacggccatggacatgcgcggtcaaagcggagattctggtgcgcacgagatcttcggaagagaaacatctgacgaagcggggcccgcgtggcagtggagaaatggttcaaacggcgtgcaatgccgatgccgctgacatatggggtctatggtgcagtgaggtccgcgcgctcgcccgccacctgacgacccgggtccaccaatcagtcgcggagcgcgcgcggtttcgtccgtgggttctgcggaatgggaaagacgc

SEQ ID NO: 8047 - DNA, 407 bp, Zea Mays
gcaaacaggcctagggaagtcaaagggattcagaggtgacaggtccaatcaggggcctgaaaagtgacaaaggttggtaattcgacctttcaatcaaaaccgttcttcacctcgtccaccctcctaccccttcaaacagcttgtcttcatccgccctgccactgcccccacttcaacaagtcagccgagtgcccctggtgctcgtttccccgcccagcctagctcctcaactggttgcttcaattgtgggaagtctggacattttatcaaagattgcccatattcgaggcagaacaaatccaacaatcagcagaacccagggagctcaagtcaaggcaagggaaacacggcgaataattcagcgcgcaagaatataaagaagactgggcgaatatactacacacaag

SEQ ID NO: 8048 - DNA, 899 bp, Zea Mays
cttgtgaagccacgagacctcgactggtcgctcaggagggatctcactggagggcgctagaagggtggacatcggtgtcggtggccagggacaacaggtgtcgcggggtgtgaatctcgccggacttggggtcgctgggcgttgctgccatgaggatttgctgcatggatgaaggtaaggaagtgtaccattacgttctcctgagagccctctgcgtgtagtccgtttggatccgaataatacgaccggggttcgaactttgggtggtccagccatggcgcttccatggcgggttggccgccaccgtcatggcctgggtgctgctgcggtctggtgttgagaaggggggaagaagggccgctggccgttagattggagattgacggctaggttcggatctggggaaaatagctatgagtcgttgatcctggcgcctacggtggagattagatcaagatcgtgatgaatccgagccatcgagatgagatcggaggagtgataatagatcgggatataataaaatctagatcgttgcttttagatccagtggaatagattgggtaccgtttcagtttgagatgagtctaatctaggtcgtctgatgtagatcggacggttgatgccacccgataccccttcggccatgaccttttgttaaagagcccctgctctttttcgtatttaacccgccatccactccagctattcatcgagtcttagaatacttgtgtcgtagcccctgtacttaccagtaattgaggcctagttcagacagtgagaaaaacttataaaataatttagaaaagggatttttaatgtgaaaacaattcctagaacttgtatagttcctagaaaattcatagggagcccaaatttattcattccaattcctataattt

SEQ ID NO: 8049 - DNA, 2135 bp, Zea Mays
ggagggggtccatctgaagaaccgggccatcaacctcttatggcccattgaaaggggcagcattgaaagcaggcccatcccctggcatcgcaggtccagcttccagaatgtgaccattctgaaggggagcatcctggatgggaccaatggaactatccgatgacaatcccgagtgctggttgctgagttgaagttcatctggttgaatgggttgttcatcaggcacaatgggctgagggatctgttgattaggttgaatgttttcaatccattggtcccaatccccctaggcattaccatcgtgttgggccggcaaatctcctcccaatggctccggtgggaaattgagatcaaagccagctagtggcaaaggttgacccaaaccaaagaaaaccacagggagctgatggccatcttccggagcatgcggaatagggtcctcgtcttgagcctgccctccaagcatgttctattgaataatttcgcactgaactgtccaagaatctccaacgaaaccatctgcctccgaaaaaacaatgaactgaggaacttcttctaaggacgtgacacgcacacaaagcaaggtcctggtcacatttcgacgatcctcctcccagagaatcagcctgccaaacgaaccaatagctgctttcaagtattctgaggaacagtaatccagaggaaaaccaagaagcataagctagcattcatggttgaaaaagagagccctatgattccaggcgtcattgtggcgaagagcagtgaaagaagcatccaaatattgttgagggccaagcaaaaccaaattatcccgctcaagaacactgttaaattgcaccaacacctgtcccaagtgtgagcgttggatatctctcaccccaatccttcggtgctccactaaatattctctaatcacgtctctgaccgtggggaataagacctcatgcgcaagtaaaggatggatattaataatcgcccaatcctcatgcattggcgggagtctccgcgagactgacctggccatgattttcgcgatgctggaccgccctggcgctgaagccaggcgggaggaagggctccgggtcgacacgccggtacgccattgcaagattgactgaggatcgccggcgagcaagaggcaaaggagcggtttggggttttggtgaagtgacacccagcgagagctccaaggacgctataggcgtctgttcgtatttttttaataaaaccgccctggcgaagtcttcgaagcaaccaaacttgggtggagacccatcagtcagagaccctggggtaaggcggaaccaggaactgtaatccaggaaatttgtcattccttccaaaatgtgactgctctcaaaggaagggaatgatgaaagaggaaatccgaattccgttttcttaaaattgcagaataattccaaatgcccctgaactttacaaaagcggcattggaacgccggggaacccacaccagccgatccagccttctcagagaagttagtggctgaaaggccaggcccagacatggagggctcattccgcaaaatgggccgccattaaagcttacgggtccgccattgaagcttacgggtcttagcaagaccagaatttgaatttgaaaattgacggacatcgcgcccatgacgaccgcctctaatcattccatcattatgattagagaaactcaccaagggagaaatcctgcgagggggaatgttcaactgaattctcgagttcatcgccgcgaatgaattccgaggacctcgataggttgaaggagctcccaatctcttgaaaacagaaagccttggcacatcataattcccagcggaacgaggaagcgtcctattgcgatgaattgggatagcatttgcaccagataacggtgcaagcttaacaatattagcaaacgaaattttcttcttgcccttaacaatccaccaattggcattttcctcctgaagaaacattatgtattcatacttccaatttgggccaccatgattccaaagattgaagaaagccctgaactccgagcggtcaatgaatttagagttacagatatgaaaaccaacggccttggaggagaccgagaaacgaaacatccgaccagcgagttgagaaacgttaaa

SEQ ID NO: 8050 - DNA, 1080 bp, Zea Mays
atccagtgactttttgtgggagcacattgtatcaaagttatagatggattatagctctacaactttgctgcagaaagttggcataggtttcacacaaaatcaggagtgaattgtgctccaagaagctctgtcaggtcgactgactgaaggaacgccatggtacagtgctcggatatggataagactgccagcaccggatgttcaccgccggcgacctctttgccgggattggtgccgcggccgtgtggattttgctcaccctgaaaagatctcaccgtggataaacttggagcacattggccactcggtcactcctccacttaccggcgacgtggccgcacggccatcaccggcgtgccgccgttctttgctgttatgccacgccgtcggtcatcttaccacgtcgcagtggattaccatacgccgtccttctattacctaaggccttgccacgacgttcgccacctatcgcacgcaccagtgaactctctcccctccggccgccagctcgccgtgatcaaattgtgagccaccgcccccggagtctataaattgagtgcaccatcagcttcgttatgtattcgagcatctagcgcacccttctgcacctcaaatcctccaccataaagcttcaatttgaaatttcccccaaaacactcaggaactccgcacagcttgacctcgccgtggtcagcccgattcagatccaatctcaccctcggtttccttgtttcaacatccttgcttgctcttgatgctcaccgaaccgttaaatcaaactagaccaccccaatccgcgggaacgtgtgctcccatgctcggtttccgccgtgcacgtggaccggccgttctcggggtgttcgggtcaaattggtgtatgttccgaggccttcgtaggtcagtgaagcctcatagatagttagcttgagcagtcttcgccggccatggccggtacggaccgcgtctgggacgatctgcgtgcgcgccgtggtcaggggcagtcgcggggaagaaatagaaagggaagggcctttctgtgatttgtcagtgacacatcaaaacagtagaagaacctgtctc

SEQ ID NO: 8051 - DNA, 343 bp, Zea Mays
aaatgtacaggatcccaggaaaagacccttgtaagctgctttcgccgaatactttccatctggggctacactaaagatatgtctgtcttcaatgtgagggtgcagctcaatttcggagagacaaacccagagctttaagtaatctgccaaaagcccaacagtaagaccacctctaatgtcagatatccatcttctgtttaacaaggcctcttgaactgttctactttttgttatcttctttgggattatagagtatagtctaggggcaatggtcgagatgctcttaccctgcagccaattatcagaccagaaaaggatactagactcatttcccacctcagag

SEQ ID NO: 8052 - DNA, 779 bp, Zea Mays
gggaactacacgaagaaagaagatcagttgatgaaagttgccttcggcacccgtgaaaaacgagggctgaatcgagtgatggatgctcttaactttgaatatccagattacaaaaagcttgacgaaggggccgggggaacaaagaaaaagagggttgtgagtattctgaaaaggcaagccatttggtccatcaaagaagatcagagggttgtcaagaagcaaaaagttctagcggagccgaaggattcggctcccaagaaataaaagcctatcatgatggctcctgcaaagatgaaggtacaagatgtaccagaaaagactgccggcacttctccgtcttcctttgtcgatgttttagaaatactgaaggtaatgactgaacccttcccgtttgcaatgctaagtcccctagggtcagatctgagtagcctattgtagtcaaaggagaagggatttgaacaaagctcgggaggaaaggagcctgcttcagctactggggaaatgccaggggcaaagaaacgacgaatgatggatgtgatgcaagccatccaaaagaccccacccccgtcttcgacggaaaaaactgttgtgcctgctgatgccgaagctgaagctaatgaattcgcacctgaagttgagaacctcgggaccacaatgtcagagattaacagacttatatctgatgtcgctcccgagaaagacatagctaaagtatccactgataaggctttagctttaaaagtgaaagaattgaaaaaggcttcttcggaggacacaga

SEQ ID NO: 8053 - DNA, 1105 bp, Zea Mays
ccgggagtaacttattcaaatcttgacatatggttctttctaaggaagcctgcatggctcgtcttgccgcatcttgaattctacgacaactttcttggtgttgagttaaaatcatatccataatgaatgaacgatgtgcatctgtcaacacagcactgtcgaccacaatgaggttagctcgcgtacgacggttatttcgacggtggcggcggcgccttttcggtgacatggaatcttggacataaggttttgaaaccataatttctgatgatatgggatcagaaagggttgcagttgggtcgacatgacctttcctgatgtcatcattggtgggaccaattccttgccacctaagcacacgtccatgttcaatcaaaccgggattatagaccggagatgggatgaactcaggagcctcaactcgtagctgaggtctagtatgtgactcatttttaaaggatgatgtattatactccatcaccacttctttccctttgtccatggacggttgaagaacctccttttccaccatggcggcctttcccttattacagggtggatgttgatgttgatctaccaataccacctcttcatttggactaattggatttgttgttgtcactgttttgtttggtggtgtcccaagtatgcttggaacaagttttgatgaccgcacccccagcatattgggaggtgtcaaagtaggagttgtctcttttggagttgatgtagaggaagcccttgactgtacaaacttggttggaggtgcctgcttgatgcacacaggccactccccaagggtagtatgacgaaaccttgcttctgtcttatggccgacagatttattgaccctcggcttggagaaaccaggaggacctgagctggaggacgcaaccttgtgcaccttgttagggtgttcttgggaggctgatgctcttgacctcgcagccatcctccttgcccttcgctttgcagctttagacacaactggaatgaaaccatcatgaggtttggagttgacctcctgctcaagcccaatcatggctggtgatgcagctgtggtacgcagggagccagcactatcgctagcatggagaggtcccag

SEQ ID NO: 8054 - DNA, 662 bp, Zea Mays
tcctgatccagatgttggatagagggtgttttgaacacctaaggcgtatagcaggagaaggaagcatgacatcatcttcatctgattcatccgctcgaactgtgctccttttgttctttggcagaggaggaggactcaaattgtttgaggtcaatggaaccttaggggctctttcaacgagctgttgtgagaagtggctagggacagcttcatcatcgtcctttaggacccacttgggagtctacggtggtcaatataattccaacatctaaattaagacaaaagagtgatcaagcaagaatcaactaagacgattatgaaacaataggtctataaaacattccatgggacgagagagaagcaaggagtaagcctgtgtgaggcatccgtcaagctagtcctaaatcgaaaaacaacggatttagttgggccttggcgtgaggtgcaaagactatctcagccgtggaccaggaagggtcaaattctacaccatactcccacttgaaacttatcttttcatgaaggggaggcactcattgttggatctagttcccaaccacatgaataatgtctggtccaagggcactgaggtcctaaattattttcatcgtgttcgttactgcttcaacatgcttaggtgaagggtcactcatccattctaa

SEQ ID NO: 8055 - DNA, 379 bp, Zea Mays
tctgctctttcaggcctcccttcctgctcactattgggctgaggccctcaccactgccacctacctcttcaatcgtctgcccaccaagccggttgctcacccccactccttacttcgctctcttcggcacccacccctcctacgatcatctccatgtcttcgggtgtgcttgctatcctaatctttcctccaccactcctcataagttagcgcctcgttccactcattgtgtcttcctcgggtactcctccgaccataaggggtaccggtgcctcgacctcacctcacatagagtcctcatctctcgtcatgtcgtcttcgacaagctgaatttcccctttcctcttcctcttccactgcctctctcaccgagctcggc

SEQ ID NO: 8056 - DNA, 406 bp, Zea Mays
gaaaaaagtattaccttcgaagctgagaggctatcttcggcagattcaacagcctctgactgggaaatccctgcagcaggcagtatagcggccctctcaaaaaaatacgacttcggacgatgagttacaactttcattctctttggtttcggcgcagtagagggggtcgttgatgcaattctcttttttgtcccttgctttcgagccggaaagcaatagtcgggataaacaaaaccaatgacattaaaaactctattcagccttttctttccccgggcgctgaaggcagtattcatggcttcatcttcggcttttgcataagcccccaacaaatcatcaatagtcgcctcaatggcctcaagccattcgtcatctagctcctcgaactgacttctgtagtggtatg

SEQ ID NO: 8057 - DNA, 465 bp, Zea Mays
tggagatggacccgatgtataagaagattgttgggaaccttgccgcgaacctggccatcactaccatgaacgtcaaatcaagatacttccaccgcactggcgtcagcgggcggggggtcctgaggatgtaccaagacataccttcgctgactgagcacaagatatttggcgctggaaagtctttcccggtgattgtccggcacagcaacagcctcagcgcagatgacgacgccaggctcgacgctcgtggcgcagcagtgcggatcctctcggatgatggcgaggtgcctcttcttgacctcacactgaagagcggcaaggcgttttacgcgcgcacaatcgccgacttcgccacctggcttgtctgtggcctgccggcgagggaagaccaagtgaagcgtgcaccgcacatccgcgacgccgtctggggctcgttacggaacaccgattcgtacaccaagctcc

SEQ ID NO: 8058 - DNA, 533 bp, Zea Mays
gtctaacgcataaaagtcctaagactcagaatcaagccggatggacggcgggttgattcttgaaaagtggagggctcttatgcaaagatgttgcggcgaaggggtaggacttgatcttgaccgatggattctgaattagcggttaggattagatccatactgtaatgaaccggtacacgatcgcattcgtccgatccaagatctacggttaatatattacgcgtgccagcggccctacgatcctagatctatggcgctggacgagcccgggtgaagcgttaccttgttttaatcctgcgcgctcatcagaagatcaacggtgaccgtgcgtcttccttcccacgccgaagccacggcggcaccgcccaggtaacgcatggtggaccatcgccggagatcacgcagtacgcgcacccgagccccaattacccaaccggaaggttaactacgcgaagaaggacagcacgaactcggaagaggcttcctcaccgtgattagtgccatacaactctctgcccacaagccgcggcggg

SEQ ID NO: 8059 - DNA, 1220 bp, Zea Mays
cttggtttcccagactaaatcatgcaggtcccgtgcctgtatcaaaggatggctagtatcaggcgatgggtcctatgggtgtgctactaacgctccctagccgaagctgtgttcaggtccaggtcccagtcgaggctgcctcctgtagtcgttgccaactcttttaggtatgctggtatccagcctcgacacgtcgagcctacatcccagggggccaggtaccagggaagagtcggcaacgccacacacaacagggacaaatagtatgcaaataagtgctaatactgctcgataagtagtactcaaaagtaccttacaaaaacaaagttattacatccgccttcaagcgggaccctagccttatgtctacaggtatgacctactcgacatcagtagggtcgcgctggaagcacgcgaccgccatctgcgcgacatcttgtacgacctcctaggtggcgtcttcagcggcccggccagcggtcaccattggaggcggcaccaaagccatcaaagccaaagagatggagccgcagctcggctcgcttcccaccccacggagttggagctagaccagttcatggtggtgcaccatgaggcactggtgaagctcacgtgaaagatggagccgcagctcaactcgctctccacctccataaggctgatgaacatccttgaagccgaatgctggaggaagaagcgtcgccaccacggacatcttgcagaggtaggcgatgatggctgcctgaaggatgaagcagggcgtgaagtgctgaggttggaggccgagctcctctagcagcagcaagaagaaagacgagatcggcagcgccaacccgctggggaggttggagacgaagagcatgaactctccggcggcgagatcaccgtgaggagaggcgccgacatggatccttctggcgaacgctggcacaccccatccgggcaggttgcgcaccaagttgagtgccacctcaggctggaggcgctcgggagggcctagcaaggccatggcggctacgacggcataagagcgcggagaactcaagggcgaaagggcgctgcgagtgatgagaatggctaccgcactcgggggaatcccctttttaaagaatgattcccccactgacgccccgaagcgccacggaagatcttgcccgacgcatgccaaggtgacccagcccctggcataggggcccgggcccacgggtcattgggcgtcg

SEQ ID NO: 8060 - DNA, 638 bp, Zea Mays
gtcctctactgcgtcgagacacggtaagaactccccataccgatccgcccatgcacctacatcgtgtagcaccagattgatttgggaatcgcgcaccggaatgcgtagattgggtgggccggccatggtgaccaccgcgggtggaacgttgtgtgccgccgtgttgatagcttggggtggaagaggggtgagggtcgttggatcctcgatgaagggtgcaggtgtggcgatgggtataaccattggatcagccacggacgctctggatcagtcgagtggataccccttcggatatttgaatcgtgaccattgattgtcgatccagcgcaccttgtagcataccctttcgtgttatattggagaccatcagatctagattgggtggctctgggtccccggtacctcttcgccgttgccgatttgctaaagagcccctgggttttggtgaaaccaacccgcagtccattgtggatgtttactgagtttcgggaacctttgcgtttcaaccctgaactctctgcaaattgcgcgcgtagtccagacaaattataaaatagagaaattcatttagaaaaagatttataatacaaaattaattccaataacttgtttaatccctagaaaattcatttcaactc

SEQ ID NO: 8061 - DNA, 445 bp, Zea Mays
gatcgttcacgaaaataaaggcgcatttatgggagtaaacaaatacaaacttacagccgctcgtccacgttcgtatctgagatactggcggcggttagcggcggcggaagtgagaggaccggccggcgattagcggcgagaaaatggccagcaccggcgctggcgatgacatgccacctgtatcgtctgtgcataagccaacaggtacgtctgtttcgccggtcgtgcatcatgtagcgtctgcgatcgccgtttacacagagggtgtctccgttactccaccagtggcattgagggcacctggacatatcgatgaacacacaaaaacggcagacatggtcgacgcagagaagcacatccccatgagacatattgggccgcatgaacaggacacacctcatattcttcaaagccatgtaagttctcccaaatatgatactcttat

SEQ ID NO: 8062 - DNA, 541 bp, Zea Mays
cgaaccctgtggcaccgagcctagagccaggcgtggtgaagcccgacatgggaagtcgtgcatgtcagaagggaaccactcgagtggatcccacgcctggcctcggactggccgtccataaatgactggtcacattaaccatacctggcatcgagccacagcgtgggcgccggtccacttcccactcatgacttacaaactcctcgaggctcatagcgctcataacctttgagccctcgaactgtggtgcattaatggcccatgcgcccctcggcctgcgtcccaattatgacctatcggaataggcctgagtgcgcatacctcccatggggcattacacaataggccgcaccgagccccatgttatggaagccaggggtcggcatagcccaaaatggcaccagagaccatcaccacccccacatcatccactatgataaatacgtgatagccaggtagccatgagccccacaagtacatgtggcctcacctagggtaaatgctggttctacccctgccttacgactcattcctagagaag

SEQ ID NO: 8063 - DNA, 425 bp, Zea Mays
ctttgttgtgaagaatatcccctattggaaacccggtgactactatgactttgtggtcgtcaaagtagtgatggagcttgcgagcggttagaagtaccgcgtacagtagtttttgaacatggggatacttctttttagagggtccaagaacttcgctgatgaagtagaccggatgttgtactggatatgtatgtccttcctccacccgctcgactactaacgcggtgctcaccacgtgagtcgtgcaggagatgtataacaacagatcttctaccggctgattccgcgtggctcggcgtggtggcttgagtactggtggcatagtcaggaactttttcagtgcttctagagcttcctatgcttctgtggtccactgaaacttgtccacattcttgagcaatttgtagaatggtatgcctttctcg

SEQ ID NO: 8064 - DNA, 379 bp, Zea Mays
tgtgtggcccttttcttcaccgcgaacaagcaaaatggcttccatggaggcacatgaatctaccaccgaagcttcgaccaccccttccccctctcggagcaggcaggcgaaatgtgctatgggaaggttgctgctgagagcttatctgttgctgatatgactggccctgagattgagctgtcttttcctcaacttggactgggttgtgaatgcttcggacatgccttgggttgattcttcctctaaagcccctagcaacttcggtgtatctgtaaattcctcccttcttcattcttggctcttatgtattaatccatcttctgttgtaatttctccagagagtgttggggtttccttgcgaagtattgggtaactggtc

SEQ ID NO: 8065 - DNA, 494 bp, Zea Mays
gtacaataaacgaaggaaaaaaggaaaaaggtggcacacttccgttagcgctaatgtttgacaaaagctttacaccaaatcatgccaagctccaaaggctccttttctctcttgctcactcacttgggcaccaaacgctgacagacttaacgagctgcaatggaaagtccctttttcgtcctccctttggaccgtcatgcagactgcagagcatgtcggtggaacagaggtgcggtgccaaacagaaaagcagaggcctttctgagcctgacgaaacctttgtcgttctgatgatgccctaacagcatgaatattctctccgaactcgtgctaatttaatctacaaatataaatgcgtaaaggatgtgatgattgagcatgggcaacgctgcataggcacgcctgggtaatgcatcattggaatcccttacttttcaacgtgcttaatgatgggtgtcagcactgggtactcagactagtgatgccagatttgg

SEQ ID NO: 8066 - DNA, 360 bp, Zea Mays
ggagatcgattggttgttcccaaggaccctgagctcaaaaagaagatattggatgaggctcacctttcaaaattctccatgcaccagggcagcaataagatgtatcatgatctcagatccttatactggtggaccagaatgaagagggaaattgccaagtatatatctgaatgtgacacctgccagagaatcaaggccagtcatttgagggtagcaggccctttgcgaccccttcccataccatcttggaaatgggaggacatttgcatggatttcatcgtgggattgcccaatacctcccggcaccatgattctatttgggttattgtggataggttgaccaagaccgctcatttctta

SEQ ID NO: 8067 - DNA, 331 bp, Zea Mays
tggtcgacatgcgctcgcgatgcaatccgtggccatcaggtgatcgctggaccgccgcggctataaatagccctatgattccctgcgaggcacgaccatcacacacaccgtgggttgaatcgaagccaaattcgtgatgtctctgccccctcctctcaaattggttgtgcacagtaaaactagaacctcttgcggtcgtgtagccccaagctccgtcctcaattccacccgagcacgccgcgacgccattttcccccaaatccgattaccgcgcaccgagaaccgctcacccgtgaccagcccgctctggtaagacgctgtccaattcaag

SEQ ID NO: 8068 - DNA, 1513 bp, Zea Mays
attgacatgcccgaaatgggcgtgccacagccaggcaccatatggtgtgtgcgccgccagacacattggacatgcgatgttggtgtcaagcatgtagattttctatggagacgatctctatggagagcgtgctgatgtcaagaagagtttctatggagatgacaagttgtttgtacctaggacgagtgacgcaaagatattttgccacaactttgtcttcgagctccgaatctccaagtatggccagacgctgaacaaggttctccagtcgaagtgtagagtcttcgatctgctcgttctcccgaagcactatctgctcatactcgactcgcagactctgtgccatcgacttcctcacccgtttgtcgccgatgcgcattgtcttgattgccttcatgcctccttggtcgtcaacttcgttccaagggtggggaccatctcgggggaaccattgagcagatcgcctccaacgcagtctgatcattatggaagtcgttgtcgtcgttgaatttgatgatgtcccatagatgatgggcctagagcttcagcttcatcaataatgactagttgtcgtaactggccttcatcaactgcagtcagttgtcggagccgtcggtttccctgatgatgtgttccatgacgacctccctctgatggtacggaccgcgagcggcgagcatcgtgggtccgtgatcgacgcggcggagatcggcttgggaacactccgctacccttttcggaggattcgaccttctccttccctgctggcgacaccatggtagcacactctcttcttcaacctcgctccgatgccaattgttagctcgatgtcccgacgttgttcgttggcggcgtggtccggcgaacgagatcgcacttggaactacttgtgaaacgcacacgatcacaattggacatagagtggagaatgatttttggtgttgcgcaaaacctgcagcttttctgttcttccttttatacttactgaagagtgaaatgatcattatagtaatccagccgctaagtgtgcaattgaggcgtccatccccatatccacactatgtagccggctaacaaatctaccaccactactacatgcatggctcacctgaacaacggatcggcaaccaggtggcgcgactgaaaatgcagactgacagaaacacgaactgaaagttctgaaacaaatacgacaacaggatgaagagctgcagcgcaatgctttaagcaacaaacatgcccttaggccttattgtggagactggagaggacaaactaatcatgtggaaggcattatgtagtgatacactgatacacagcggaccataactacagatctattttctatggatcacaaacaatgcctaaacgaccttaattctctgattatttgatggcatggtggaaaattggaaatactgcaacgattttgtcttcaataatgccacttcaagtgtcactggtgtttcggacagttgaagaggagagagccatttggtgttcagccatggct

SEQ ID NO: 8069 - DNA, 484 bp, Zea Mays
gagaatcatgttagaaactagtgtgcaacgtgtaattgtgttcgtgtagtgaataataggtcagtaggtatcgttggtgtcattggcaaatggggatcattcctgttgtgcgataaattttgaaaggcaaagaacatgagtagtgtgtcgatcaagttaaccgataggttctgtaaacacgcttgtgatgcttttatgtgcatgataagatcgatgccttgtcgtcgtagtctcaggaaattttctgaaatgtgctagtgctctactgatggggttaaatgaacttgagatgtattacaatagctgtgtgtcgcgcaggttatccaaaaatggcgaaaggtggtgtatgttggtaattgggaaatagtcacgtcataagccaactcgtgttaagcagaagtcgattgcgttaagtgattgttatatacatgttgtgtctcggatttcgataataataggctagtcgacaagtatgttgtatagc

SEQ ID NO: 8070 - DNA, 604 bp, Zea Mays
ggcgttcgcggcaccctcacaggtgacaagggaggcataagacatcagttgtgtcattatttttgggaggctaaccagctcctcttgcaaccaactgaggaagcgggtacctagctcttcacctgacgtatggaagggggctgtctcagcacccagatcacgataggcttcgacgaacaacgaatgcccccgctctacaccagcatgcatatccacaattaaattctcatgacatgtctttgtgcttgtcagttctaaatccggcgcggtaacgcgatcttgcatgccctatgcatccaagcgtacctttggcactgcctcccaagccttgcctagttggtggctcagttcatcattttatttttcaagagtgttggccttatctcccaggcgttgactcttcaggtcggatgccgacttgtcccgtctagcttcggtattatcggtccggaggcgctcaaacttattcttcagctcagtcctctcgacatgcaaccgcgaggtcgcaaaatggactggggtgtcggacgccactagttcagtgaagacaccaacctaacatgaccagacttcataaaaatgagagatagagtgaagataaaga

SEQ ID NO: 8071 - DNA, 455 bp, Zea Mays
cctccctccgccagcagcaggaagagctcgacgcccttgtacgaaaactcaaccgcgtctatggtgatgtcgagcagagacacatcaaggccaaaaagccccgggcaaggaaggtatgcaaccatcacgctgagagtaccgacagtgcacattattttctcaatctcgggcagaacatggcattagcagtagccatgatgctctgatccatccccgagtcgaacaaactagaggtgagggccatgtacctaaacctccacaactttgtggagagggtcactgtgcagcaagccgagattgatcggcagttccccctcagaacggaaagctatgcccacagacgacctcatcttggagaaggggaacacaacactcccaatccacaaggacgcgtgttcccatgaaggaccgccttgggggcatccgcaacgcctaacacatcctcgacaaccagc

SEQ ID NO: 8072 - DNA, 773 bp, Zea Mays
cgctgggcggaatcggcaacagtgtgcccacgaattggtcgttgtcgtggaagattcgcaccgggccgctgcggaccgtggacggcttccctaacctcacccttgtctccggtaagcccctggataacttcactttgacaagagctccgttttgcgccggttgttgggtcgggggaaacacggggtagccatcgcgggtgattgtcggcgtactccgccgagcgtgcggggcgtcgctgccgtgcgcagaggcaagttgggtggctccggctgggtagaagacggagcttccgcgaccgtcggatcgggcgcggacggataggattaaacgtggaataccccttcgcgctaggagtcgtggaccgcggatctgggatccaacggttgctggcgcattagagtacataaccagctcgatctaatccgggtgcttgatctctgatcggacggctctgggcgcgtacccgttcggtatagattaaatctaatctgggccctcggttctggatcgaagagatctgattatcccgtacccttccaccatggaaattttactgaagaaatcgtctgttctcatgaaatcaacccgccgtccactgtagggtttggctgagtctgtggattacttatgttttcgcccctgcacttctgtttatttagcgcacagtccagacacctattaaaaccaggaaattcatttagaaaatggtttttcagtttaaattaattgcagaaacatattaaattcctagaaaattcatattaggttcaaa

SEQ ID NO: 8073 - DNA, 420 bp, Zea Mays
cggcactctagtgtgactaagtagtaaagaaccatatagacatttcaaaaacttgtatgaaaactagttaggaaactggtgcttgagtatttcttttgacccttttcactaaggttgctccataattgttgtctgtagacaatggaacactaatattttgtaagataaatcctttgccagttgtcatgatgtgcgccatgaaatgttcacacgaaggccacaatactaaagcccctttagctgttaagttcctttccattcaagggtggaactagcaccaagtcggctgaggctcgaccccctcctactgtcgccgtaagtatagaaccctctcctaagcttcctacaagtttgtaatcattgaagcttaggagggactaaatgtagaaaataaggagtatgagccccttgtagcatatg

SEQ ID NO: 8074 - DNA, 633 bp, Zea Mays
agcgcctgcgcgagagccgtgtaagggtgaggaagccgccgccaagattcgccaccgataggggaagtagggcgccatttgtgccagcgggagggtggtcgtgatccagcggtgctgtgtgagggtttaatcggtgggcgaactgctagtgctccgggaatttctcaccagcgcgctcttcaccgcgcaacagccgtcgcccgtggacagccatcgattcgtcatccctgccggtgagagctctccccttgcattcgccgtgcctggaattgcgtgaatcgcgttgtaaattagatattagggccctcctggatgggatggtcgaactccggccatctctctgtcgtcagggctggcggcgccgccggtcatgtgtgctggtgcgacgaggaaggaagacctgatgcgcgccgttggatgtgtgtcggacggctaggattagattacatcataccccttcgctcggttgaatcgtagccgtcgatccgtgatcgggtgacctagagcggatttagtcgcttaaaatctactccgttgatgggggatccagcggttgggatcgcgcaccggttcacttgtgtcacggtttaatccggtccgtttaaatctaatcaagcggccacgatcctcccg

SEQ ID NO: 8075 - DNA, 549 bp, Zea Mays
gagaagtcaaaggagacataccttggtgaaacaagtacgatgccaattccttgcccttcattgcaaacagatccatcaaaatataaagtccaaggagtaatagtgaggcatgacatgtctagtttatgagtatcattaatccgatgttctacaataaaatccgctacgacctggcctctcatagatttcaatggttcataggccaagtcatattctatgagtgcataagcccacttaccaattctaccagtcataattgggttatgcaacatgtatttgatcacatcggcttgaccagaaacagtacaatgactagacagtaaataacatctatacttggtgcatgcataaaacaagcataagcataacttctcaataaaagtgtacctcgtttcagcatccaccaacctccgacttagatatgtcaccacatgctcctttccttcagtttcttgtgtcagaacagccccatgaccttatcttcagctgcaatgtataatcagaatggtactcctgctagtggtgcttttaatacgggagctgaagaca

SEQ ID NO: 8076 - DNA, 368 bp, Zea Mays
gtttcatacgtttgaagtagtgatcagctctggaagttcaattataccttgtttgcgtagtatccaatttgtttcatggaatgagacgtcatcattgtaggatgcagatccctgtgcggtcaatacttttcatttttaagttctgtgtacttgcatataaccatcaacaatttttttgccactttttgtgcaagaaatctagccagttgaccattcagattatactaactgatagtcttgtgaatatgttggtgaggggtcatttacttgttgcacatgtactgatgtacatatcacattggagaatgttctgcgtgtaaattcatttcagggagaattaaatactgaggttcctatacaacgttctg

SEQ ID NO: 8077 - DNA, 457 bp, Zea Mays
ttggagaatccgcaggttcccgtggccagggctgtccgcgctaccaaccgtggtgagaaccccctttccgtaatcgccatcaccccctctaggtttggcaccgaccaattttgagtttggagcgtccagccgtggaattacgcgtccgccgatgatgctccgccgtgggcggactgtgcgtctccgtcatgtagaatagggggagaagaagaactgtgggccgtaggatctcgggttgacggttctgattagatcagtgatactcccttcgttcgggccgtcgatctcgaatcggacgataggcgcttacctctgtattcattaaatggtgaccgttgatcttagatcgtgtggatcccatggcgtaccggttcgcgcatctgttgatttaatctgaacgcgtgatttctaatcggacggccgatattatccgataccctttcgccttgaacatttt

SEQ ID NO: 8078 - DNA, 799 bp, Zea Mays
ccatttttctacaattttgcacacatttcctaagtggtcagcaaaaagaaaaggagaaatctataacagaactgggtcgaaataggcccaactggcccaagtccacgcagaactgtgcgcgcccgcaacccgcgctggcggatttacaccgaggcccctggccattcaaacaatttggaaagagcccaagtcttgtttctatgtctctctgacacttttccttctgccccccgattctttcatattcacaattcccgtccccgagcccggccggcggtgttaacgaagataaaccttagtcatggtggcgcgaagcttgggcactctcttaaacactcttcaattgcaatcctaacgtaacccgaatgattttggggcatgaacctagttaacaggcactgcatcaacccacctataacctaacgacctaacccaaacgttttcccgaggcaacaacaccgtggagctcaaacaaatagaatggggagcactagtagttcatgtagtatacgatgctcatgtgagccgactcaagacaagtgggaattggtcggtcgacacaggtgcagttcatgggtctaatacgcggcgtcgagctcgcgttccaagctattcagaatagcaatgaccaaaaggccactttggtcacgcgaggttgagacgtcggcgacatggtcaccagacacgcggagctacttggccagaggcttgagtgtttcccgggtatagtttggggaagtgaaggcaacaatactgtgttaaaatcacttacagcagcttatgacaatggcaaggatct

SEQ ID NO: 8079 - DNA, 687 bp, Zea Mays
cacgagtcctctaggatgacattcgtcgtggaacaaaaccaggcatgtttagggaaccctaggatatccacatccactaagagggacatgtgagacgaagaagcacgcgaaaacctagaccatcttttgaacatcaagcataaatgaggtctagtgaacaacttgccatcattgagaaccctagatgttgtttcctcatccgacagaaacaacaagaaatcctccggcgaggactggtggatggacatttcatcaatgttgacatcgaagctacgagccacctcttccaacacctctgatccttgcaccacatgcctagttcctgcagtggtgacgaacaaggccttacgtaatttgatctcctcccttgccatctcatcagtgaacataaggacacatgagacatctgttgatgggagagtagcactctagctttccaccttcaacaaagtgagatgaacttcaatatcatcaaatgatatgggagagtccacactcgcaccagcacgcacattcatcatccatgggaccttttcctttcttgctcttggaccttcatcatggggcggtaatctgcaaagcgggagagatacacacccagaccaacttcttcttctaatgatgagtaacacgcctagctctgccctacagtgatgagaccttctgagacgatagtctctagaacac

SEQ ID NO: 8080 - DNA, 496 bp, Zea Mays
caccctgagttagtaagcgcgagcatgttgcaccgtcttaagtcgttgccgacttaagccgattgctccgttagcagggcatagtggccaccccgagttagtaagcgcgagcatgttgcaccgtcttaagtcgttgccgacttaagtcgattgctccgttagcagggcatagtggtcaccccgagttaaataagaatacaggtcgatcatgaacaagctgagtattcttgaggccttttttattgatgatacatttccttttttacagagtacattatcgtcccgatagcttttgaaatacagctagggataaaacttcctgaggtgttctatattccaggagttcccaatttctgtgccgtccatttgagtgaggcgatatgatcctggccgagtgacttctgctaccatgaatggtccttcccataagggtgacaacttgtgtcgtccctcccccgttagaattcggcggaggacgagatctcccactgaaaag

SEQ ID NO: 8081 - DNA, 619 bp, Zea Mays
gtcgtattaccactagctttaatagtaatcaagaagctaaagctagtagcggtgtcatcatcagctacctacttgctctctggctgggtggttaagctattcgctaccgtacggccggtcgcggggggtcatcacatcacatcacacatgggaggtgctcttatccatcattcgtctagactagatctacttcactactagaggtgatggtgtttctttcgggcttgttcctcccttcgatccgctcccaggcaacaacaactcagctactactagtagtttgctggtgagtcacaactcaactcacaagcgggatagtaggtgtttgcgtgcagcgcgtgcgtcgtcatttgggtatcatctaatcagtctccatggcaatgccaaggtgccaaacgaaagccttgttcacctggagtaaaaaggaaggctaacgctcggtccaaattcgcgtgtgccgaagcggtccgaccccgaccggccggccggacccgtcgtcagtcccgcgtgtgcgctgacgggtccgcgacgccggtcctcggctgactgggggcagccctctcctccccgtcgcggcccgctagctagctagcgccaagtcgcaggccgcagccacgtc

SEQ ID NO: 8082 - DNA, 1249 bp, Zea Mays
tgcatgtatgctgtgtcatcaagaaaaccatgaaggaaagcattgctgatgtcaatttgcctggtgtgccatccacgagagactgcaagggaaagaacgagacgaacagtagccggtttaacaaccggactaaaagtctcatggtaatcgatgccatactgctgtgtgaatccccgagcaacgagccgagcttttaatttgtcaatggagccatcaggatgttgtttgacacgaaaaacccacttacaactgataatattttgaccagggggtttaggaaccagagtccaagtgttattctgccgaagggctagaaattcatcctgcatagcctgacaccatttgtcatctgccagggctgttttatatgacgagggtgtagtaaagaaagcccgtcgacttggattataaaggatagttccatcagcatgaatccgaggcttgtgaatattatgcttggatcgagttaccatttgtggagctgcagcatcaataccagatggaatggatacaaaagttgactcttctgccacaacttcagggggtgcaggcgcagcagatggtgaagccaagcaatttgttggtgaaatggaatgctgctcagtgtgtggtggtggaacatcgtcagttgcactggagtgttcatcgacagcagcaggtgggtcatctgaacagcgactacctgtagaacctgaaacagtggcaaaaggaggctcgagtgagccattaggtagcaataaatcaagtctgtaatgctgcatatggtcattggaaatagctggttcttcagaaggaaacaaggaagaagtggagatagaatcagagggtgtggaagatgaggcaaaaggaaaaacggcttcatcgaacacaacatctcgagaaatataaattcggccggaagatcgatctaaacatttgtagcctttgtgcatagagctatagcccagaaacacacactgggtggatcggaaagctagttttcgactgttgtaggggtgtaagtttggccaacaggcacaaccaaatatacgcaaaaaattgtagttaggtgactcatgaaacaaagcttccataggggaagaattctgaagcacacgggtgggcatgcgattgatgagataacatgcagtaaggaaggcttcatcccaaaaccgtataggaagggacgagttggcgagaagagtaagaccagtttcgactatgtgtctgtgcttgcgttctgctacgccattttgttgggaggtatgtg

SEQ ID NO: 8083 - DNA, 651 bp, Zea Mays
gccaccactcgaagcagcttgcaacgaactagcaggaatcaactcggtgctatcaacagagcccaacactcggtcggtggggacgctgccctctaaagcgaccccctggtccaaggcttgggctgtcaccatgccactggaacgtggaggcgaccccgcatgaacgtccatggaagtataagagggagaccccgctcggacatcctcgggggctgggtcatagtttgcactgcccgcttgaaccggatcattcccggcagcaccctcgggggctgggcagtggcttgcacttcccacccgaaccaagtcatccccgacaacattctcgggggctgggcacgtgtcaacaccacccttgggatccaagctctctgcggtagccacctctaaggccgatgggccctcagttacttccatgggaccaggacgatccaagtcagtctcccgaccctcgagatcgcgctctaaggtcgacgaggcacgggatgacctcaacccagcatcaagcacatcagcacaaacctccatcacaccaccgcccgctggctccgataacaaatcctctggaaccatatcctcaagagtctgatcaaaattagccaaggacagttcttacagacacatgagagtagataaagcaggagaaggaac

SEQ ID NO: 8084 - DNA, 1325 bp, Zea Mays
aagagttctctggttccccagttcctcttagaagaaaatatggagcctatcctgtgcacacagcctagaaggtttgcagtggtagccattgctcgagcgatagctaactctcgcaattggcagctaggcgaggaggttggatatcatataggtcactcaaatatgtcggatctcaactctaaaaggtacttaactctgttttatctaatgccatcgttttaagagaaactcgactgctctcagttatcacacaatacttagctatcatatgcagctcatggagtggatttatgcctttttgtgatcgttctgactcggataattacttggagtaccttattctgcagatgtggcaggggcaaaaatggctttcctgggtgcattttgcttctctagttattatcatgcttgaaaaatgctttcttatcatgcatgcattagcttcgtcatagtgtgtgctttagtatcgggtgctttggttgtgcatcatcccataccgatcatccttcaagtgtctttcatgaatgctaatttgattgaagtttttttggttatgactacaatcattccattttaccctcctatcattgtcaagtttaaaattgttccttgctagaaccctgatcctaagaaccttacattttggactcaccaattctatgcccaagactctcaaagttgatccctatctgcatacctcttcttgattcctttgattagtctttttgcagcttctaataggatttttccaataccacaaatggaatcctatgtttccaaaataccatcaaactatgccaaagacaggttcttggtcacacatgtgttgaaacaatgggtgttaattttgcaatttgcaatttcagtgtctatcatctatgattattcttgacatactttttttatgtcaatgtggattccacgtgcacattcactagttttacacaacattgaacaccaccattcctgagtagctttgttactctgaatttcttgttattctccttattattctgttgagtattcaatttgcctaaagcttatggtccatttttacctacctttgattttgtctgccctgttatgctatgtaatttactttctaaacttatttgacatgtgaaccaggtcaaaaattgtgttcaaaacagctggtgtagtattggagcaaatgtgtgataggggaattgctgcattaaagtataaggtcattattcttgatgaggtacatgaaagatccgtggaatctgatcttgtccttgctagtatcaagcagtttttgatgaaaaagagtgacttaaggtaagcaatagagtaatttccac

SEQ ID NO: 8085 - DNA, 514 bp, Zea Mays
ccaaattcaggaatcacggctggttcaatgtaacgcggtcggtgagtcagaaccttcatcttcttgcccttcggctcagctatgatggccgaagcagcaatctttcctgaagcagtaatctttctctttaaccctcaccctcgcaacgcgtagcaatagtcagggtatacgaacccaatagcatcaaataccctattcaaacttttcttattccgaccaccgaaagctacacacaaggcattgtccttggtcttgaagtatgccccaagtagctcgttgctagtagcttcaatgcacttcagccagtcatcatttggctcatcaaatttatccccaaacctgaaggtatacttcagccggactagaccaccttcgctagaattggtggtggtctccttcggcatttcccagctttctacaagcggccataccctgaaggctatatgttcttgaattaaatctcttgtgccaatgaaggagcaaacagtgctgaaggccctctgacacgcttcaa

SEQ ID NO: 8086 - DNA, 505 bp, Zea Mays
tgttccagtcggcatggcaacatggttttatcaagacttaaggagcactgttttttcagtaaaatctgaactagaatgatccatggtgtctgttttatgggagtgtctatgcataagcctcacagacaaaaatctattgatcatgtctccagtctaacaaggagtttgcatttggaatcatcttgcattctagctagcctggccaaattttaatctccctgcaaaatatggcctccatttacattgggtttctaccaaattttgttattttgttggtctggctttggcttgtcctagcaaacaaacctgatgatgttgtcaagaaggctatggactttatcaaatctacaaaaaggtgttgtttaatcatgcatgcttattctatgttttgccaatgtgtagtgtggatattctttcaaatcctttttcgtcagattttgatgttttctccagttattttcaggttttatgatactcgcgacaatagggaggttgcttttgatta

SEQ ID NO: 8087 - DNA, 523 bp, Zea Mays
ctgccccgcctgcaaattaaactcttctctcgtaggcacatgttattcacttgagattgtatcaggtaagcagctaactagcaaactggtcagatacacgcttttcgcgcttttagtttcgaacgaaacaggcacgagattgtgccctaataagctagttgtcgacttgggtcgcgcgtgttgctgcattcgtttgttttgcgtgtgcgcgctgcacatgcatgtgtacgcatatataggtctaggtcaagataaaattagggtgaacacatcttgggtctagccgtctagctagcgcgtgcacttgtgcagtgtccagtccacgcaacatgcacagagtttcgggatgctcacagagaggtttgctggtagtagtatatagtaacgacgtgtttagcactcaactagtactagctagctggcggatacgaagcgatatgagagaccccaggccagagatctatgcggcatgggatctatcactcagctcgtttgccaattgtttgcattcccttgcgttcta

SEQ ID NO: 8088 - DNA, 411 bp, Zea Mays
tagttctaacaatggttgatcggttctctaagtatgggcattttattgctttggggcatccatattcagctgcatcagttgcaaaggccttctttgatgaaattgtcaaacttcatggtttgccatgctcgatagtcagtgaccgggacacggttttcacttgccatttctgaactgaactgtttaccatggctggagttaagttacagatgagcttgacattccacccacaatctgatggtcagtcagaagttgttaacaaaataatcaccatgtatcttcattgtctagctgggaccgtcctaaatcatggctgaaatagttaccatgggcagaatttttctataattcatcatatcaatcgacactgaaatgttctccattcaaggttgtctatggacaggaccctcc

SEQ ID NO: 8089 - DNA, 486 bp, Zea Mays
ttcttgtcttctgagctgtagatctgattaaaatctccagctattacccaagggccagcgcatgtctccctgacatccctaagctcctggagaaaggaatgcttgagagggtcttggtgtggcccataaacacccgtgaaccaccactgagcaccaccttcctcttgcaacttgactgaaactgtgaaatcatgcaccaaactctcaataacagaatagactacctctctacaagccaccaaaacaccacctctggttccttgcgctggggagtaaacgaagtcactaaacccagcaccaagaatagacaggatgtcaaaagctgagatagagcctagcttagtttcctgcaaacagacaaccgctggtttgatgctaaggaccaaggacttaacaatgtctctcctagacctgtcattcaggccccttacattccagataagaaaaacaggctgcattataacagggtacactaaagaaacacga

SEQ ID NO: 8090 - DNA, 302 bp, Zea Mays
agtagcttcaatgcacttcagccagtcatcatttggttcatcaaacttatccccaaacctgaatgtatacttcagccggaccaaaccaccttcactagagtcagtgatggtctccttcgacatttcccagctttccacaagcggccatactctgaatgctatatgttcttgaattaaatctcttgtgccaatgaaggagcaaacagtactgaaggccttctgacacgcttcagcggcgtcatcaatttcgaccttcagccttcggaggccgaagcgggaccagatggggcgcataatcattt

SEQ ID NO: 8091 - DNA, 623 bp, Zea Mays
cggggagaaaagggataagagccctaactttacatgcactccatgcataaacaacgtagcttcctatagaacaaacaatgccctaatatgtttttttatgtttcaacaaatgtctctttggcatggacatggttactacaccattgattaatacagacaaacaaacatatttttatctgggggaagttggttaattttttgatacaattgaatgcagactgaaatcactaagtgcaacagaaacaacacacaaggtttaactcatactgatgcataggaacatgaatgaggtcacctgaatccccatggtgttctcgcattcgctttcctcgatgcggtactcatgcatcacccagctggtcctcagcccctgaggagctcgacccttgtagtagaccagtgtcttcttcatgccgattgatctgttctggtagctgatttgccgatctttgcctgttgacttccagtatcctgcctgggttgcgcggtttgtgcggcatccatttggatacttcctatcccttggcccaaagaagtaccactcggagtctctaccaggcaggaatgatttctcttccaaaacaaacatatctcaaaaattcagttcggagtgatgaaatctc

SEQ ID NO: 8092 - DNA, 426 bp, Zea Mays
aggagagagtgggaccattccccacaacgatataggaatggtgggaggggtgggggatgggagcgagataacatgcccacagtagaggtggtgtggtacgaggcaaagtgtgccacctagtcggtggggcacggagtcagcgccatctcccgaacgaggcggagagggaggcctggtcccaccctccaaccagtggggactaaggtgtcgtggtaggggtatatagaggcgtgagtagaggtggagccggagtcaccgaaggcgggggcattgtagggtggcatcgctaggagagacgactgagggggacgtggtgaagaggcacccgtgactgggcccgatcacgtggagatggttctggtctaggggttgtagatcgacgaccacgtcgggccatcgccacgatcgatgggaccagcttgggtg

SEQ ID NO: 8093 - DNA, 1014 bp, Zea Mays
gcgactttcagaactgctgccactttgattggatctgtggccaccccctcgacgctaatgacatgacccaaatatgagatagtttatttgcccatgaacatttggagagctaaatctgccactggtctcgaataagcaactgcaacaccaactccaagtgtatcaaattgttgtcctaggtgtcactgtaaaccaagatatcgtcgaagaagacaagcacacattagtgtaatagtggctgcaatgtcttgttcatggcaccttgaaacgtggctggggcatcggtcaacccgaacgccatcactcgaaactcaaattgatcgtgatgagtctaaaatacagttttgtactgatcttggggtgccatacgaatttgatggtacccggctctgagattaagggtggaaaaccaagccataccatagagctcatccaagaattcatccataatgggaacagggaacttggtcttggccgtgattgcattgaggtgacaataatccacacaaaagcggtaagtgctatctttcttgcgaaccagaatcacaaaggaagcaaagtgactcttcttgtgctggataagacctgactccaacatttctgccacttgtttttcaatctctatcttaagcgcagggcatagcgatacagatgcatctgaactgggcgagcctctggaatcaggggaatgtggtgatcgtagtcacgtgtgggagggagtcccttgggcaaatcaaacaccgaagaatatttgtccagtaatgcttgcaactcagctagaagattgtggataagtgtttgttccttgtttgacaggtcactgatactgcataactgaacaaaagcaccctgccccatggacgctttaactccataaagtttgactgatgaagaacccactggaatggttaaccacttgccagaccagtgcaccatcattgggctttgttgagctaaccagtccagccaatcaccatgtcataatgttgtaaatccaacaccctgagaatactg

SEQ ID NO: 8094 - DNA, 707 bp, Zea Mays
gtgggagataagctccagagcgagcaccaatacgggagaggaggagagatattgatgcgtgtctggctttgacgataggaagcagagagagggcggtgaggatagagatggtacgtaggatattttcttcttttttctagattttcttttctctcttttttatcgacaatcaaagatattttgatcacgatttctagtgataacaaaaaggtcgaccgtattgcgacacagtttgattcgattcgaaatccaataaatttacctgcggtctgaacacatgatttcatggtcacggtaatttacccgagaatcgaagctcaattatgattctcggacgcgcaatcacggttttgatttagcgattacttggaatcagatgaatttacacccgtcatttatatccaaaattttggatcgggcaagaaacgacagaccgaaataaactgatttcgacactgataatttgttcgacgtaattcgaccgaaattagccaaaacaatatctgcgaacgtatatgcgattttgtcttcgaaacagcgtgctgaagaataaattggattataacctcgcacacgatttttctcagaaaacccgtgacacagattattttgcctcaaacattttaatcgtcgagttcttctcaatctgttcggtataaaatcgtccgagtgagtcgggcttccgaatttgtattcgcgcgagcgac

SEQ ID NO: 8095 - DNA, 505 bp, Zea Mays
caattccatgcgctctcttcatgcctgatctgcccgaggcgacgcaaggctacggtgagcagcaggatcccaccgcccagtctatgcataatttgtttttgtctttgcccgccagcgccgccatgcaagaattcaatgcacaggccctactcgaggccacgcaagactccagcgagaagctcctacccgatgcaatgcaacgcgactgttagcccttgcacgacgacagcgttaaacatgtagatcagatgactatgacaggaccaccgcagtggcattgcatcaccgctcatagagccatagcagggcgatcagagattgcacacgaattcacggattagcccgacgttgatgacatgttccctccgcctttttttgccgcacgacgtcatttctatagcatgtggcacattatgaaaaaattgcctgagaaaattgatgcgcgtcttctaaaggacaacgagtttagaaaaatggtaaactcatgtgtatggggatcagaaaa

SEQ ID NO: 8096 - DNA, 530 bp, Zea Mays
ccgcgtgcccctgtccagatgggtcgatgcaagatggaacacaagcgatgggatgaggcttatattatcctgcaccagggggcgcttgcagtaggggttacaagcgttgcgggagagcgagagagagagagagagagagagaaggagagggttcggccttgaggcgggccgtctgaggctgcttgtaccgcgtctctcctactctggctgcctctgctcgtcagcgccgtgcgttcgtgtgttcgtacgctgcacgttcgtctccctctctcctcctctgtggagccctggacacccccttttatagacacaaggagatgcccagctgtacaatatgggtgtaccttggagctacgtggctggcagggatgtgccctgagccctgtacagataataacgtggccgtcggaggagcgccttgagccctgtagatgtaccgatgtggccgtcggaggagtgccttgagccctgtaggtgtaccaacgtggccgtcggaggagtgccttgagccctgtagatgtaccgacgtg

SEQ ID NO: 8097 - DNA, 305 bp, Zea Mays
caggtccaaccaggggcctgaaaagcgacaaaggttggtgatctgacctttcaatcaaaactgttcttcacctcgtccaccctcctacccctttaaatagcctgtattcatccgccctgccactgcccccacctcaacaacttagccgagtgcccctggtgctcgtttccccgcactcccgagctcatcaactagttgcttcaattgtgggaagtctggacatttcatcaaagactgcccatatccgaggcgaaataactccaataatcagcagaacccagggagttcaagccagggcaagggaa

SEQ ID NO: 8098 - DNA, 744 bp, Zea Mays
ctgctaccaaaggtgctactgccgaaactgaacaggctgtggccaaagacggaagtgacaacgaaagtgaggaagacaatagcattttgagcccaatgaagcctagtcatattgagtttgtaagatccaccgtaacagcaggggatttggttgtgatgaagaagctgggctattttggggggaaatgatgatgaactgatccgttttgctaaggaagaagtagttccagagccaaaggaagatgaggttgttgtgtttaaaagcttcttcagggcagggcttcagttcccctatacgatatgataagggaggttttgaaaagatttgaaatatgtctccatcaactgacaccgaatgccattgttaggctcagcatttgcatatgggctctccgaagccagggtaaaagtgtgaatgccaaagggttctgccaagtgcacgagctgcactatcagacgaagactagagccgatggtctacataagaacttcgggtgctataattttgcataccggaaggataccaaggccccagtgattggctaccgtactaaatggccaactaggtggactagtgaatggttttacgtgaaggctgacgagaagaagagggagaagctcatgactatggtaatgagtcctctgagattaagcttcggcatgacgaggccattatgcaacatgcaactctactcgccatgccagctggccgaagtagaattcagggtggtagctgggcatatta

SEQ ID NO: 8099 - DNA, 548 bp, Zea Mays
gcgcgccaaaacgcaagcgcattacatccatgcaaaagtctacaccaagaaactatccgcgcacagaccaactacaggcgcagccggaccaacataataaatgtggcagaccaagcgtgcaacgcccctatggacatagctggatgcgcgaaggcgcacagcctcatcatacaaactatagtaacacacgtacagcgagggcatcacgccttacattggttcaactttcggaatgattcccatctccctatagttaaatagcattatcctaagctcctcaccctcaaaaagacttcgcaactccccctcacctacactcgccccagccggcgaggacaacaattcctgcttgccagccctgcccacacgaagccgaccgccgtccacttcacccactctacgcttcgccaccgcccttcgccgcctacgcccagcactcggaccaggcacaacttcagcatccgcaacacgcggggaagcctctgccgcatccacatccaaggccgcaaagtaatccaagtcctcatccgaagactcttccgtccact

SEQ ID NO: 8100 - DNA, 283 bp, Zea Mays
aggttcagtgagtcgagttggcgatgttttctcagttacaaatgtagccactcttgcttccacgatgctgggtgcatgcatgctgccctttgaaatcaccattcgaggtttctgtcgctggagaaccgatacagtgacgatgcatgcactagtgcctgctgtattattttagcttcgctaatctgttgcagtaccgacatacatttatacagttcttgttgttattgtagtctgaggtaatccatgtgattaatgctctgtgcagccctgaatgaagcgttaa

SEQ ID NO: 8101 - DNA, 286 bp, Zea Mays
tcaaaatagataggaaaacaaaactgagcatatcaaattatcaatataggcatatgagaaatatttacaaactgaaattgatggatgctattagagaaagtgttacaattctgttgtcgagctagaggtgctaggatgaatgcatatcgaataagcaagtttctctgatacaggttcgcctaattgaaaggtgatcatctcgtttttgcttttacagaatgtctgcatgcctactcctgtagatcagattcaggagtctgagagagctgaattagacgacttatcg

SEQ ID NO: 8102 - DNA, 464 bp, Zea Mays
ggcgaagtccaaccccagtttggtgctacatgcctcgtctgactcatgggtgacctctaagcccttacacaaggcaatcggcccgtgcgacgaagtccgaccctagtttggtgctacattcctcgtctagactcatgagtgacctctaagcccttacttacataaggcaatcggctcaggcggcaaactttgaccccattccggtgctacatgcctcgtctaactcatgggtgacctctaagcccttacttacacaaggcaatcggctcaggcggtgaaggttgaccctagttcagtgctacatgcctcacttaacctagggtgcgctcaagccctactttacgaaggcaataactaaaggttgcacttcgacccatgaacaatgttatgcactctcactacacctcgacagcacagactcaattctcacttcataactcaaacaaatctccttcacattttcc

SEQ ID NO: 8103 - DNA, 485 bp, Zea Mays
cggcagtaccctcgggggctgggcagtggcttgcgtttcccacccgagacgagtcatccccggcaacatcctcgggggctgggcaagtgtcaacaccatccttgagaaccaagttctccgaagtagccgcctctaaggctgagggtccctcaattacttccatgggagcaagatgatccaagtcagtttcctgaccctcgagaccgcgctctaaggtcgacgaggcgcgggacgctgcccgggatgatcccaacccggcgtcgagcacgtcagcacaaatctccatcacaccatcatccgctgactctgatagcaggtcttctggaaccatatcttcaagagtctgatcaaagtttgctagggacaactcttgtagaccaatgagggcagacagagcaggagaaggaactccactactttccccgctggcgacataccgccgactgttcttccgagtcaaagggacctcatcttcttcctccccg

SEQ ID NO: 8104 - DNA, 865 bp, Zea Mays
gcttcagacaacagaccccgcaataactgccaattagaaaatccttacagcttcggtattaccgctagggtttcgtccgtcgccgcatcgttattggcggtagacttcgaaagtctgcgtgccattaattgctaaacgccgattagccgaacctgtccatcaatgggcacattgatgggggtggaattaaaaagttgccgcgtacacttgacttggaatcccagttgcaaatgcagggtacggcagtacacacggggtttttttaaccgaacaggaataaccagcgcgtggaactgtcagtgtgaaacggtggggaagggggatttggtttcggtctttatagtggtggtatggtattaatgcgagtgggtggagggaattgaattggagaccacccgcacctaaccggggcatcgcaggtcaaatgccggtgggcccggtagtttagtggcaggcaggcccctcgcagtccaccacggggcaagggcagtgacagtgagaagggtggtgctggtgctggttgcgcctatgcgttgtatcttttcccgatacggtcaggtcagccatggggtgctgctagtgctaggggccagcttgctaccacaagtgcgcctccactccctagtgctttgattgctatccagcgtctgggctttggttggcttcgaattgatctgtggatgaatgggacaacgcgggtgtgtctgctggtactagtgtggagacgtcgctttgctccccgccttttaggcagggttcttggaatcttggtgcaggactgcgggccgagtgcgatggaggccttgttgaatggtgggtgttcttgtcggtctgccgtctgcgttctgcacagaggttgttctgt

SEQ ID NO: 8105 - DNA, 725 bp, Zea Mays
accgtgtctcatatttcaagggtactagacgtacgaaagcctgtatgatggctccacaatggtctatgttaaatgttcctgaatatatagtttcgttagaatgctcgctgctccgccaaatatattttttcgccatcagtatatcgttcataacaaaatcagtatatagttttctattagagccagactaggggcagactggagttacaaccatttaggtttcagcataacatatttatttgacattgcctttctttcttattttccctgcagggaaaggagttcttggttactgtcactataaggaaaattgacaacaagtggtggtataactcatgcagaaaatgtgcctgcacagctgtcactcacggagactcttacaaatgcacaaaccgtgattgcgctaacattgctatgcccgtccaaaggttagatgacatgccctcgagttgagcagcactcttcccttcgtaaacttactgtaccagtttcctgtgcatcaaacatgacatgaatctgtacaacaaattcagatactggattctctatcacccctcagccccccagagacacacaaacgttgtaccttctttacgtcaatgttttcctgtttacatattggtttctttaggacttacaagcctactatgttaaccacactaagtcgttgacacctcttatttcaggtataaaatacttgtcatcgcaggagacgagacagctga

SEQ ID NO: 8106 - DNA, 751 bp, Zea Mays
ctctcttgtgttctgacgtgcacctgcacgtaccatcaagtcgcgatcagcgacgttgtcctaccaaaagcatcacgtgggatacctcgtggtgcgcagttgggtcataaacatcgacaacgaccacttcgccttcgccatcgatggagaagttgaggctctcgaaacggatcatcgctttggggatcgattagcgtcacggctagccatctagagcttgaagaacttcgccgggcacgtgcaagggcactctgtggcacacgaactgtcagtgtttcaaacctagctctgacaagtaaatttgtgtgcgtgttccgggctccagacagtgtgcgcagtgggcgcatgatttatattggttcgggcagaatgtccctacatctagtcttcgatggcttgcactactgacaccattgttgatcaatgctcgtagtaggggttacgcgggcgagagagagtgaggagaggctcccaagctaagggcaacaagatggagtcctaactaagtattggctaggctgcaaggctccagtctcctggtcctcatcggtgtgtactcgtcctcccgtcgggctttcttctatgttcatccgggtccttgttcgtcttgggaccgaccacctccttttataggtcaaggagggggtcgccagtggtggcttactcaaggagtcatcggacgatggtaaaaccgagcgttctaccctggtgaagcgatgtgcgcccatggccccgaggtcgcctagttctc

SEQ ID NO: 8107 - DNA, 439 bp, Zea Mays
ctgaaaacgactgagtgtcgggcgaccggattcactccctttcgcctgctatacggattggaggccatgaccccataggaaatcaaacatgggtcttcgcggacaagcgcttcagcagtacccgacgtcgacgagctaacctcccaagatctcatcgacggagaccgtgtcttcgccctccaggccctcaacaaataccaagcccaaacgaaggcctggcgcgaccacgcagttgttccaaaagaattcattgaaggggacatcgtacttgtccgcacaacccggacagagtcacggggtaagctggagccaaagtgggaaggaccatttatcgtcaagacgaagtcgtctcccagcgcgtacagactaacaacgcaatctggcgaagacctggaacattcctggaatattgacaatctccgtaaattttttgtttaaa

SEQ ID NO: 8108 - DNA, 591 bp, Zea Mays
ctgatgctgctcctgctgggacattggtggtggtgcccctcccagaggctggtacgaccttggatattcagaagcctgccagtactcgcccgaggcgcccttgccgagccaatcaacctgatccttctgctgatgagcagaaaaagaaaaagagacgcctccggcgagtatccaatttgggtcgggacgttggtacttcggttcctgctgctgaagaagtgcctgtgactgaatttattgacgctgaccccaatgggtgtgcccaatctgctgctgatcccaatgtgggtgctccatctgttgctgatcccaatgggggtgctgcctgtgttgctaatgaagacgacggggaggaagaggatgaagttcctttgactcggaaaaacagtcgacagttcatcgctagtggtggtggagttccttctcctgctttgtctgctctcattggtctgcaagaattgtccctggcgaattttgatcagactcttgaggatatggttccagaggatttgctatcagagccagcagatgatggtgtgatggaggtttgtgctgatgtgcttgatgctgggttgaggtcatcccgtgcct

SEQ ID NO: 8109 - DNA, 330 bp, Zea Mays
atttactaaacatgactgaggtcctattttaggattgaatgatatctgactgtgttggtctacatatgcaaataataaagctctaaatggatattactggggtggcattcacatgtaggcatgtagctttcttttgttcttgctcaaacagtttccattattttgttggctcagtatcatggatgacatgaggcgatcagttttgacactattcgaacttgtaaggtcttaggccttttgagaaaacagagaacattaactatgccatgattcatgacaatgatttaatggaaatccggtgtctttttaaggtcttaggccttttgtcat

SEQ ID NO: 8110 - DNA, 573 bp, Zea Mays
gtgggccttccttctcgaggtcttgaaaaaacttggttttggacagatctggtgtgatataataagcgggttgttagctacctcttctaccaagattttactaaatggtctgccaggggaaagtattgggcatcaacgcggactgaggcagggtgatcctctatcgcctatgttgtttattcttgtaatggatgtcttgaatctgctcgtgcagcgagcctctgaggaagggtttcttcaacctctctcttcaaggaatatgcagcaccgtatctcgttgtacgtggatgacgcagtgttatttctaagtcctactgccctggacatcagtatggttatggatattcttcatttatttggttcagcttcaggtctaaggactaatatccagaagagcagtgtgttcccaatctgctgtggggaagaagaggtgaattgtttacatgacttgctgccatgtaatatttcagattttccctgtaagtacctcggtttgcctttgtctcccaagaaactcacaagggaccaggttcaggccattgttgatagagtggccagccttctgccaggatg

SEQ ID NO: 8111 - DNA, 563 bp, Zea Mays
caaagacgcacttgtccgggttcagcttcgtgcgcgttgcccacagcttgtcaaagactagggtcaagtcttccactagagtcgaccctttcttagtcttgaccatgatggcatcgacgtatatctctatcctgtccctaatcaggtcctccaaggtcttactcatcgcccgtacaaatgttggtaaggcgttcttcagaccgtagggcattacaacataacaataaagcccatccactgttacaaaagtggtatgcttcctatcttctctagacatatggatctgatgaaaaccagagtaaacatctaagaaggacaagaggtcgcacccagaggtagagtccatgatttgatctatgcgtggaagtggatacgggtccttgggacaagccttattaaggctggtgtagtcgatgcacatccgaagcttcccgttttcctttggaacgatgactgggttggccagccatacggggtgatgaacctcttcgatgaagccagcgtctagcagcttccggacctccttacggatgaagtcctgccgctcaacagactgtctccga

SEQ ID NO: 8112 - DNA, 545 bp, Zea Mays
gcgacgtcgatccctagtcaatggtacttgcggatgcacatcagaacacatggtttatacaggttcaggccacatgaatgcgtaataccctacgtcttgtgcggtgttgagtgttcgattgggatgagtttgtggatataggcgattgtggaggtgggtgaaagagtttctatcgatctaatggtagatgggcgagagagagagagtttggtagggtacctcagcagccttatatagtcgactggagaggtatccctctacaaatcatgaagtttgtctaattctatctgaatctatcttttgttgctgtgagcactctagatcttctagagtcaggttgcatccttctcagtcatctcccgagtatctcgctattcagttgcgcatgaagcatgtctttggaacatcagtgatctttctgcgacgggtgcactcggatagcaaccttgtgccatgttcttcgggattgtttcttgctccgagtgttatcttcttcggttaaatttgttttgcctgagtgcggcccaatagtatgccctgctggt

SEQ ID NO: 8113 - DNA, 320 bp, Zea Mays
ctgctgtgcagcttgcgcgcggtcggacgctgcgccatgggcccccagtcgtcagccaagctacgcacgccagtacgtccgctgacttgtggtcacgcgcagtcagcgctttcttctccacacgaactcgggcgtgggacttcaaccacttgcgcgcggaaatcctggagctcgaccgagtctaccgcgtcgtggggataagaccttcccctgggttctccgaggttcctcatgagcgactcgtgaaccgtgtttccctccctgctaccttctcgcgagagtatcgctccccagaacccccgccgccttcgtgttcctcg

SEQ ID NO: 8114 - DNA, 889 bp, Zea Mays
tcaagagcatatagcgttcagagtatggccgcttgtagaaagctggaaatgccgaaggagaccatcaccaagtctagcgaaggttaactggtccggctgaagtatacattcaggtatggggataagttcgatgaaccaaacgaggactggctgaaatgcatcgaagctacaagtgatgaactgcttggagcatattccaaggcataggataatgcactatccatagccttcggaggtcggggaaagaagagattaaacagagtttttgatgccattggctttgtttaccccgactaccgctacccgtagcaaggacaagggaaaaagaggaaagctgctacttcggccaccccagacaaacctgtgccgaagggaaaaagttgaaggtcctaactcaccgaccgcatttcatcgaaccgaccttgatacctaaatttggcgaagggacctcctcggctgccaaagcaaaaggaactattcctcccgagcagaggactgaagaatcggctataatgtcgaaggtgcctacagtgaaggtagttgaaacgaaggttgataaggctgaaaagccagaaactgaagaaataacaaagatgtcagaggttttgagccctccagtaaaggcaacagtaccgaaagtacaaacgggttctattgtaactcctaaaaggagaaggatggtaaatgtattagatgtgttggaaacaaccgactccataagtcccgctcccacagggaaggttgccgaagctgacaaaacgcaacccaaagctgatactaagcaaatagaagttgaagctacaataacccaggttgaaaccgaagcagggcccacaatgcctgctgagacaaagcttgccacaaccgagcagtgggccgaaagaataac

SEQ ID NO: 8115 - DNA, 795 bp, Zea Mays
gttgtttcttgttttccatagagcccaacctgctccagctataacccaccacatgaacctgtttttgttccctcccgatttatccaggaaaacgtcttgaaaattgttaatagaacatgggcttctagaccagcccagattgtttctcacccaacaccaagtcaccactgctagtctgctatgggacattgaaataacaaatgatccactgtctcatctttcccacataacttgcaaactttgaaactataacagtttcttcttctgaattgttttgctgtttgaattctgtcatgccatgccatccgcaagaaaatctgaactttaagaggtatttttgccatccaaatttccatcatcctgatcaatgatcccaccaaaagttatgtatccgtacatgctctttgtggtgaacttccctgagttttctaatttctaaaccaccttctcatcttcttctgttaatgtgattctttaaagcttttccatcatatccctccactctgtcatcttcttttcaccaaaattccttctgaagtccaaaactcaatcccttttcccagcctcctccacatattttaaacagacttgggaaagtaaccttgaaagagcactccatccgtacatacttccaaaatcttgtttgtctacccccttgcactatattgcccttgcccatcataccactctctcactgaatgtagccccctgccaaaattgtgatccacttctactagtactctagcaaaaacctctacctaagatatttccacctcaacaaattcatgtgtaagc

SEQ ID NO: 8116 - DNA, 381 bp, Zea Mays
gtgaccactatgccctgttaaacagagcaatcggattaagtcggcaacgacttaagacgatgcaacatgctcgctcttacttaactcgaggtgaccactatgccctgccaacggagcaatcggcttaagtcggcaacgacttaaggcggtgcaacatgctcgcgcttacttaactcggggtgaccactatgccctgctaacggagcgatcggcttaagtcggcaacgacctaagatggtgccacatacttgcacttacttaactcggggcggccacagtcggtctgagttaatactaacttagactggcgcagcacactcggcgcgcacacagttactcatctaggggcgacctctatgtcccatgaagaagtctcgaaat

SEQ ID NO: 8117 - DNA, 431 bp, Zea Mays
ccgggatttttgtttgtttgtttgttcgattggcccgttatgcgacgtgtttagttgttgtcgttttaggattgttccgtagttgtgggtgtaggcgcgtggctaggttttttttccctttgtgtaaggtgtatgcttcaacagtgaacaccgtatcagagtttggggcttcggacttgtatgtcaaatgggatttctgtggcgatttcgcgcgatgatcaactgaattcaataccctaatctggaaaatttcagttagagatgacaaaatgctgttaccatgatgattcaatgtccaaacatccattccagcgccacaggtagaagataccagaaacagtatctactcctataaaacaccaatttttctggttcctactatcgccccttttgcaaaagagtcattatacttctttctaatctaacatgtg

SEQ ID NO: 8118 - DNA, 773 bp, Zea Mays
gtatcacatttgagtcccaaaggttcgggacgcttcaggtggtatcagaggccataggactggccgtaggtcgcagccctgaccctgaaacttgccctaaaaagaaaatacctctttccccaagaaaagtcttctctactcctccccgatttaacagacccttcttttcctattccagatggaagactctctggccattaggacatcctactgctcggaggtggaagggttcccacatcttttgcaaagttgtgcgcttcgcatgggaatccgcaagaagtcggaatacatctggaaggagtatttcgagggtggaatggagaaatgctctatggcagtctacctgggagaaagccgaaactatctaaaccatccttccttccaagtcacttttaccggataccgctttccagatacttgccaggatgttgaccgatcagccctccgacaactatgccagaactacaacaaggtgatctttgaaaccccccttcgctactttccacccagcaacaagaatacccccacctggaggaaaagacttcaggccctgtcaggaggagatcctattgagaatgatcccaccatcgtctacatggctggataccttcacacccttcataaccaatatgatgacctcaccctccactgcacctacctaacctcccgggtggaaagtctggagcaaaaagtcaaggaactttcaggggaaaaggcgtcccttcaagagagcctcgcaatagcagaaggcgaggaagccaatacccgtgagg

SEQ ID NO: 8119 - DNA, 309 bp, Zea Mays
cactttgagatgcctacgagtccaggtgatgcagagataagtgctatgctggacatgttggctggggattcttctgactcggtccctgctggaacaatggctgttgcaaccatcccagagcttgaaaaaatcgtggacactcgaaggcctaagggtactcgcctgaaacgtctctgccaggtcagtcatccaactgcacctgccgaggggaagaaaaagaaaaagagacggcttcggcgagtgtcgtgtttggaccaggatgctggcccttctgctcctgctactgaagaagtaccggtggaactcttt

SEQ ID NO: 8120 - DNA, 718 bp, Zea Mays
aatgaatgaaggtaaaaattaccggtgaatacatagcgctgcaccccagccacggtggcacggtggcagcgatatgccgacgagaaattccccacgcgcagaacaccaatcagccgaggtgagctcccaatcgtacccagcatggcccggcgatgctcccacgcagtggatttggttccttggtgggggctggtgggcaatcggcgatcaaccacggcgaacagcagcgctccattttttctctccctccccggatccatggcaacaccatggctacgacactgtttggaggtcgaggaccaccgcacggtagcagcgaagcaacggaacctagttttatagtctggactccgaatcctacccaacgcgagaagatctcaacccccccgctgattcctccaggtgagcgctgcaacagatttggggagcaagaagctgcctgacggcgtggacccattcgtcagtcacaaggcggtttcacagagactgacgggttggtcccacccgccggcgcactccatagatcgggccaggctgtggtaactggtgggatggcttggtgggctgaaatcggaataggcccagtcggagttctcttctttttttttcttttccattttcctttcaattgttcaaactaaattcaaattcttgttttgatctctaggtttcaattatcaaaaagtctacatgaagtatacttccatggtatgaaata

SEQ ID NO: 8121 - DNA, 353 bp, Zea Mays
caataggcgctttgtacggaggattcaagcagaggttagagaatctttaaaaaggacgaaagggggtgaagcgatgggccctgatggtgttccaatcaaggtgtggagaagtcttggcgatatagctatagtatgtctaaccaagatgttcaatgatatctatgatcgaacaacatgcttgagtagtggagaagaagcatattagtaccaatcacaagaacaagatacatccaaagttgtactaaatactaataatcagagaataaagttgatgagccaaactatgaagctatgagagagagtcatcgagcattgtctgcaaggtacaacgtggatacatatgaaccaatttg

SEQ ID NO: 8122 - DNA, 484 bp, Zea Mays
gtcgagggttcatgcaggcaaccaatcgcgcccttagtgagagcccgatgttggccttgtgcctagcagcatggcctgctaaagactgaacgattggacctcattccactgtactttgtggtcatgacgtgcgaggcgaactcgcctcctctatgccatatatgcctgcactatcaatggtgcacctcttcctcatccttagcaccaccaactgtctactcctctatgatccatgccccagcactactgatagccacctcttccttgcccccacaccactagctagtggcctcctcctccacaccacccgcacggccacaccgcaagcaccagcttcaagcgcgtcaacgttgagcacaccaactttgagtttgtcggtgtctaatgaccagactgggtttggcttagtccttatcgccatgtcaaaaggtaagatcatacaccggtcaggggtctggctacttgcgcattcttctgattttcc

SEQ ID NO: 8123 - DNA, 515 bp, Zea Mays
tccaccactctatgacgcatgtcctagtatttggagctatgatccaggggggccagacacacgaattgacttcccggtctaaatcctgcaggtcctgttgcgtgaatcaaaggataaaagataccagttagtgggggccctatgggcgcactactaaagcttcctagccaaggctgtgtgcaagtccgggtccaagtcgagactacctcctgggggccacgtcacgaatttttcttaagtatattggcatccagcctcgacatgtcgagcctacataccaggggggccagataccagggagaagttggtaacaaacgcacacagcaaaggcaaatagcatacagataagttctgtcactgttaggttaatacttcccaaaagtatcttacaagaccaaaaatattacaagccacttcccagcgggacccttgccttctctctgtagattcagctactcgtcatcaacaggatcccgttgaaagcgctcggccaccagctccacagcgtatttaat

SEQ ID NO: 8124 - DNA, 370 bp, Zea Mays
aagagcgatttgggatggattttggcgaagctaggtccggcaagagttgatttggtggctagatggggatagacaggccttgttcaccaatcagatggagatgatttgagcgaagtgagagaccgatgtaggatgtgcacctttggacacggtggactgcggtgacacatttggctatggctgtgttggatctaaaagcaaggaaaaaatgcaatcacaaccagggatcaatttcaacaatcttatgttagtgctcacatgtactaacaaaatgatttgcaataatcgtactttaatatgttttctttggatttaccacaaaactttgttggcataggtgacaacggctgccgcgacaactcctcggtcc

SEQ ID NO: 8125 - DNA, 553 bp, Zea Mays
tgaattgggacatcgtcgctattcttgctaagacatactaagaacaacgttcattttagcctcatgagcagtcatttgcatctggagatgggtctgtctctcctcttcagggagattccggtatgtagtaatgaaggcatcaatatcttcttaagaaggtcacactatatggcctggactgtcgccttggacaggcgggttggatatgaactctgaaaagggcctctacggtaacaaaacgacatagtaaggacattacacatgacaaatacatgaactcataggcaacatcgcttaccacaactagaagattccaggcagagtacgaagggggagcacgagcattcgaagctttgcctcttagcatcgaatcgacctgactcaacccgtcctcctcagatatttgcttgttggtaattcgagtggggtcattaacactagtgtacaggtaagtagggtagactctatccttcaaaggttgaatattcttgaaaacaaagtcaacaacaacagctttagcagtcaagcctatatccctcaatgcacatatctc

SEQ ID NO: 8126 - DNA, 507 bp, Zea Mays
cttttgtctgggcttggtatttatttagagcctgtagagcgaagacgcggtctccgtcgataagatccttcgaagtgggttcgtccacgtcggggacagctgacgagagtgtccgcggggacccatgttttatttcttgcggggtcatggcctccgatccatatagaaggcggaaaggggtgaacccagtcgccctgcactcagtcgtgtttagcgcccagaccgcttcaggtaacaaatcagcccacctgcccttttttcgtcgaggagcatcttcttgacagctgtgaaaaattttccattggcgcgttccacaactccgttggactgcgggtggtatactgaggcgaaggcaagcttggtgccaatggagaagcagaaatccttgaagtcttggctgtcaaactgcttgctgttgtcaactatgagttcggacggtactccgaagcggcaaacaatgttttgctagaagaatttctgtgcagtttttgatgttattgtggaaac

SEQ ID NO: 8127 - DNA, 292 bp, Zea Mays
gtcttatgctgctgcctggtggtggttgagctcgatggctggtcaccggtgcccgtggcgacgagctcgacaaccggactgctagcacctttcgcgtcgtgcgtccaacatggatccaggatctggcaacctcttcaccccctgcttgtgccctaccacactccacagatttgtcgtgggcccatgcctgccgccctcccctcgtcggtggctcggctccaatccacgacggtcgacagcagctccagcttccaccgccagttcgccgcagtgtcgcgctggcctcccctcc

SEQ ID NO: 8128 - DNA, 955 bp, Zea Mays
cagagtaccaaatagaattcgacttgctgttcacatcaatcgaaatatattgtttgggttcctgttcgcattagttcagactgtctaaaagctcaagggacagacgacacagtttttgttgttctgctttttgttcattgcactgacctaacgctatactgaattttgcttcccatcaatcccactaatagctaggctgttgttctccttgctgttcattgcattgtgctcccatcaatcccatcagttggattagcataagctgctttgattttcagcagtccaaactcatacatatgtatgctcccatcaataccatcaattggattagcataagctgctttgattttcaacagtgcaagaacacataagaagaacctttgatttatcttaggttaacaatatcaacagtcattctattaacaccacctttttccttcttttcattttccagtctaaggataccactccaaagtgttacgcatccagaaattgttgttggtaagcagaaccctagcccaaagtctcatgctaataaccccgcaaggaaactggcacgtaaaatacttgaggacagcttggtaaagctggatagcatgcctagcataaattctagaattatcagatgggaacttgggtcctcctggctacaacagttacagaaaaagaattctccagcatctgtgaatgttaagcggaatgcaacaaaggctgataaagaatcagctgtcaaaggtcttggaaagcattttgaacaattaaagaaaattaaaaagaaagaatgcaacattgatggttccagttctgagaaggaagaatgtaacagtaactgctcgtcaatgaatggtatgcaagtatcagataagatatttgttgttgaaacgaataagggagctgatgtaagcaagttaatgtcagaggatgctttctttcgcttgaagagtttgggagctgg

SEQ ID NO: 8129 - DNA, 755 bp, Zea Mays
gtttaatttaaatttgtaaagtagcgcgtgcacctcttgttgtatctgtttcgctcggcttcgagtgataggtctagtaggaatgtttgccaaggttgacgatgctggtatggtcacatcatcctccccccttgaaaaagagtcgtcctcgactcttccaatccaaagaaaggagagaggtcggccacattaaaactagaactcacaccataagtgtctagcagatcaatttcataagcattgtcgttgatcttgcgaagcactttgaatgaaccatcagctcgtggttgtaatttgcttttgcgttgttcacgttaactttctttgcgtagatgtacccaaaccaagtctcctggttcgaacaacatctgtcttcgacccttgttggcacgcttttcatatttcttggtcattttctcaatatttactcgagctttttcatggaggttcttgattaactcggctcgtttgctagcatcaaagttgacccatttctgcacaggcaatgacaaaagatctatgggagcagtgggtttgaagccatatacaatttcaaatggacaaaatttagtaatcgagtgtacagctctgttgtatgcaaattcgacatgtggtagactttcttcccaaagttttaattttttcttgaggatagctcacagcagcattgataatgttcggtttacaacttcagtctatccatctgtttgtggatgacatgttatagagaacagaagtcgtgttccaagttttcc

SEQ ID NO: 8130 - DNA, 563 bp, Zea Mays
gaagacttcttcagcgacatcagggaccgagcacatgttgacggaagctgggagcgcagccaggcagcgacgtccaaatcccaagtacactggaccgatgtgggtcgtgtaatagtgtgtgggttaatcgcctgtgggtcgagtgggtagctggtggcggtgtagtcataagagaacttggctggctgagcaggggatcgaacaagagaaacctaaacagaatacaccttccccttccccaagttcttctcgtttccctctcgttctcagttctgagttctagatccgaacaggagctaacaattggtatcaaagaggttcaaccctgggagaccttcctcccgttccgattcgtcgacctcgttcgacagcggtcgcgagtatggatcaggcgatgcagcgggtgttggaggagatggcgcggatggaggcccgcttgaccgaggcgacggtgggacgttgcgacgtcttggagcaacgcgtcgccgcgacagaggagaaaacagaggcgcgcctcatctcgttggagatggatcaagcacagattgagtcctggcacccag

SEQ ID NO: 8131 - DNA, 325 bp, Zea Mays
ctacagggggatgttaccttggatttctacaagggtttttgttttgaatcatattggacctccatgcccggcttcaaggaaatagtgcaaagcacttgggaacaaccagttcattcagacgacgccattctacgtttccatgtcaaaatgcgtcggacagctaaggtactgaagatttggcggaggcaaaatataggcaacatcccattgcagttggcaatggtgcaagtaactctgctacttctggagcgggcacaagaagacagacaactctcacgggaggaactggagttccgtcactatcttaaagcaaaagcccttagat

SEQ ID NO: 8132 - DNA, 348 bp, Zea Mays
aaatatagatatatttcttcctctcgtcgagcctgttccagatctcatatcctttttacgggatcgttaaaacatctctcttctcaaatgtcatgctgctagcatctaccccaccgtccatccaggcgattaacctcgtttgccctagcgtctatccctgtctacctctccaccgtttacccaagacatctacccatcggcactaccttcatctacctccatcaactccgcctcgcctctgtgcccgaagtacctcgtccacgttctcccgcaaaccatttcgtgtgttcctgaattgtcacgcaataacctctctgatgatctcatgttctctatcctccacctcag

SEQ ID NO: 8133 - DNA, 1719 bp, Zea Mays
gaccggcccatgcagacagaagcggtggggcaagagtgtattcggtctcctccccacgtcatcgctgacgcttgcagaaaacggaagctcccctatgccctatggcctatggccgctccattgaccgtggaggtggtgtggaatattgcgttgcttgcgcgagctcttacgcatcttcttctcttcgagccttccacagttctacctcccgcccgctggtccctagccgtcaagagattccacgctactggctttcttgccccacgccgtatggttatcgtccagcacgagcggagaaactgaaacacgatcccaaccaattcagaacccgatttggtgatcacctccattctcggtagcacttaattccagggacagcaataagaattgctcctctccaagttcttttggagcgtaatcttatccgtttgggtcggattgatatttgataacttgattgccatttggggagttgcgggagagagagagagatgggccagagcaaggcggagttcttgaagcagttcggtggggactacggttacccggacgcgcctaggggcatcgacgagctgcgggccgccgagttcaagcgcctggaaggtgtgatttcgcgatctcctaaattcattccgcgaccttcttttattaggaagtttgagctttgttgatgtggctaagaggagttatgtcaattttgacgacgtgactgagaatgtatttcgttaagaggataattttaagcttaacatgtatagaagtttgcagcttgctactttgctagtttctaaagatgtgtttgttttgaggagcagggatggtttacctggaccatgctggtgcgacactgtactcagaggcacagatgacggatgttgctagagaccttatgtctaatgtctatgggaatcctcgtatccttaaatttgggaggtctgttcacaagagattgttctttcgttgatatgcatttccttttaaaatttattgtggttgtgttctttgacatgccttaagatagccagaacgattcaagcatggctacaatcgatgctgttacttctgtgcggcatcaggtactgcatattataaaaaaatggacctatcatttcttatgtttgtattttccattatggaacttcttttttctttttgaaaatcagctagcactgcagcagttcgtttaagaaagccaatgctagtgattggcatccgttactgatattatgctaacaagtcacaacaactatttacatgtctatttcagcatatgttctaaactagaaatactcaattacatataattgaagttgaaaaggagtatggatatagttttcatgcttcactctgatcaaaagaactgtaaaatggtgctaacgttgtacacaattgtatgcacatgagagaagttgcaaccagccttttcttgcttatgatgcaaactttatcctcacaggtcctaaaatacttcaatgcatctccaagggactacaaatgtatatttacatcaggggcaacagcagccctaaaacttgttggtgaatgttttccatggagtagagacagttgctatatgtacacaatggaaaatcataatagtgttcttgggataagagagtatcctaccatggtttacaactctacttattgactagttaatgtatatatcattatgcaagtacatgctccaatgatgcaatgtatcatcattgcttgatc

SEQ ID NO: 8134 - DNA, 371 bp, Zea Mays
gtgatactcgccaacccatccaattgaattaggagcccactcgtcgccgggaacgcgttcatccacccgcaacatccatggtcgtcgtggccagtgcaaaccatagggtcattagtgaaattaggttggggaaatggatcagggtaggtccaattcggtgacaggcgctcgggagcgccggtcttggccccctccggccggtttagctcgccggagctaagctttccgcacggaccgccgccggggacttcaccatgcaaagggaaagaagatgggggttcttagtgcaaatagtcagtgacttggttaaacagtgaaataacctgttctcggttagtaaaaacttcggggccctttctgtaaagacacca

SEQ ID NO: 8135 - DNA, 430 bp, Zea Mays
aagcactagtttaatttgaccaaaactcacttgggagggaagagcggggctcaccggagcgacgggggagtgcggcggcgctagctcgattggctcgggggaaagcggaggagatggccggagctggtgtggagggaacggggctcgggcgggtccttttataggcgcccgggagagggatggaggggacggcgagcaccgacgagctcgccatgatggcgggaatggcgctaacgtcgattgagacggctcgggtaggcgggtggggggtgaggggacggttcgggtacagtggcggggtggtcgctgaggtcgggcgtgccttaatggcgaggcgacggggcgagaggggctcggcggtggacgcgccggtgaggcatgggcgagaacgacgaagctgacaggtgggcccgagctgccagggagaggg

SEQ ID NO: 8136 - DNA, 801 bp, Zea Mays
gcggccacaatttccgaaaagttcagtgtctaaaacgtaaatatagggactgaactgtattgttctttatattctcgtggacagcgggtttatttgtactaactcgaggggcccatttgcaaaagacgtgtaaccgaatggggtatgggctgatcacagccgcccgatcggccatgaacgacgccgattagatcatcactttaaccaaacggtacaaaatatgggtcattggatacaagatctacggcgtaggtttcaaataagcacgatctaatctccttcgctcgatctagagtcagcggccaggatttacgcggaagggtacgcgacttctaatccgggtcgtctagacgccatccaacgaccacggtgccaccagccaccccctcctccaaccctgccgatagcaggcggcggtgccataacttcccacgacggagcatcagcggagcatggctattcgatgccccggtgccttattcaaaaattagctagttgctatacatagtagggagagtggtgggttccagggaagtgatcacattacgaatcggctcgcgatgacgccgagccacagtgaggcgcggatctatggcgtgagaaacaacgacaagcaatcgtcgacgccccgacaccctaatccgagcacaattcggcgcgaattgaaccaaagaaggtatctaagagaaggagggccttatcggagtattggacagcgcaggagccggtcatcgacgaagggcgtcacactttatcactcccaactccggtcgtagctggtgattcgtagggtttgccgat

SEQ ID NO: 8137 - DNA, 286 bp, Zea Mays
gttaggtggtgtggccgtgtgggtgatgtgtgaataatcaacggtctagaggtttacgttgattcatcaggctgggtttcacaatcgctttaggctgtaatttttgggaggcagtgctgcaatcgtgcagcttatatgttgccacagctttgttactcatagtgcttcacttttgtaagggttagggaataaccagatcggaactccacagcgatggtctgctcgtatccagtgtggctgagatagaagcttggagtgtgtttgcatcccatttttccttggaaaa

SEQ ID NO: 8138 - DNA, 678 bp, Zea Mays
atcgaggatccggatttaattacctctagatctagtaacaaccgtacgatgcgagatcaacgaccaccacttcctcggccgaaacggtacactaggatttaatcccaaccgcacactaccggatcaatggcccacgtcccggctacaaccccgcgcccaccaacgtcgatcatgaggcggtgccgccctttcctcacggcggcaagctcgccggaataccgcccccgaagttctaagggtagaattcctactccgcctagttcaacaggaaggggacaacacggtgaaccaaatggttagtgacataccgaagttgggcgcacgtgtacatgatgcccaggtcgaggcggatccacggcggtgtcgtccctccggtgagcaattaaaccgccgctgatgacgctccgaacacaccccagctaccgcgagattccttgaacccgaccaagccccctcgcaccacgaaaccgcccgaacgttgtttaatcccgaacaccacggcggcggcggatttctcttcctcgcgattcaagacgacgacgccctcgcttccaggtggctagccggtgctttcggaggttgggtaaacgagagggaatgccgctcgggtcacccatttatggccgactcggtgcaaccacccgcgaacgaggagccgcgttttccggtggatctcgc

SEQ ID NO: 8139 - DNA, 466 bp, Zea Mays
tgggcatcggggtcgtctctcggcatgctccggccatggcgccacctctcagcttgggggcgccgccgccttacgctctggtgaggggagagatgagagtgggatgggggaatatgtgcgggccgttggatgttgagtgtgcggctatgatcgaatcctgagcgtaccccttcggctaaagtcgatctcggccattaggtgttgatccaacggctctggcgtgggcgggattattgatctaatctggtcccttgaaaacagatccaacgacctggattgggtaccggtcgatttagttaacttctaatctgggccactggttttggatcggacggatcacagtgcctcgtaccccttcagcgcgactgttttacaaaagagaccctacgcttgggtataatcaaccctcagtacacatgccgtataaagtatttacgcagtgacccagaattcttatagaataccc

SEQ ID NO: 8140 - DNA, 397 bp, Zea Mays
gaaataactgtgggggcaaacttgtcctaataacgggattggtctatcttgctatcaagccttaatatgataagtgctttaggttatctgtttataggatcaatgatgaaataagtgctgccctcatgtgccaactatgaaacccttcatgcatcccatggcacatcaatatctccggtgagctggatgatccagtaagtaatgagtgaccctttgtcggcaaggttgcagtgttacagtgtatggtagtacaaatgagacacagactccacactaagcttgattatcgttgtcctcgcaataaatgagtgtatgtaatgcctgcttaagcaccattggactggtgaagaacagaatgatggatgctcttgtatgggaaaggaggactggcccacgc

SEQ ID NO: 8141 - DNA, 405 bp, Zea Mays
atggcgaaaggtggtgtgtgatggtaattgggaaatagtcacgtcattagccaactcatgttaagtaggagtcgatggcgtaagtgattgtgatataaatagatgtggtgtctcggactgtgataataataggcaagccgacgtgtatgtcgtatggcgggctatgccattcctttggttaatcaacttgctagatgactttagttaagcttgtagtcacggtaaattgcttgttgtattctaaatgcgtatggttacggtcgcggatgaaaagtattagtgctcatgtgatgtctaaattaaaacgcaaatgattgggtgcttatcggggagaatgcgtcgttgattggttgtagtagttttagtgcactaaatgacttgaataaaatttgcaagtcgacttgt

SEQ ID NO: 8142 - DNA, 990 bp, Zea Mays
atcaaagaattgccagccctcactatgtcttgcttcaagcatgtttacctcaaggtttagaatctgcaactttgaaaggtttccaaaagaacttgggattgtgccactgaaaaggttgtttggtaggtctacgacttctagatttgaagcattgcctagggaagttggaattgtaccaaaaaataagttgcttcctaagtatagtccttgcagatgagggagcacatcaccaatgtttgatggcaatgtgccgcccagcatattgtggtcaaggcctaatatcataagagaagataagttagtgaaagtatctgggattccacctgataggttatttattgctagatttaccatttgtatgttcggtatttgccaaacttcattaggaatgcttccatttagttgattgtttgaaagatcaactaacaatagtgtggagaggtttcttaaggttggagggatgaccccactgagataattaccataaaggttgataccttctagctttttaagaaaggctatgttcggaggaatatgacccgtgagatggtttttagagagatctaggtagactaagttggaacagtttgtaagccaatctagaataacatcctccaaatggttgcttcccagaaagagtaagtccaggtttcggagcttgttaagaagaggtagggggccaatgaagctattgttgctaagatcaagggtatgaaggaaggtcaggtttccaacagaggagctgatttggccagccaagttttggccggtgaggttgagctccgtgactcgatatggtcgcgtggaactgcagttcacaccatgccaatggcagaagtggatgctggggttccaattgctcaaggctccgtgcggatcactggtgatgcccttcttgaactctagcagagaatgaaaatcttggctgttgttatggtgcgtcgagcaatggactttgtccactgcatgacatagcagcagcagcagtac

SEQ ID NO: 8143 - DNA, 354 bp, Zea Mays
ctgcaaatcaccacgactcacaccgatacggaatccagtttattcagttcccgaatttcaaatcaagtgaatcatcaagttccacagctaatgaagtgtacatacatacaccccactaacttcccatgtctcagataacggagcacaactggagagagggaagataagtacatggaggcataagccagaccagaaagatgtgctaaaaacaattgcagcggctttagtctggcaacaacaactgcagtggcttcaacaagggatcaaaaagctggtgactaggccccacatatctaaaacccgcccatgtacaaacatcaaaatagcatgtgccaacctgacattcagttctat

SEQ ID NO: 8144 - DNA, 520 bp, Zea Mays
aaaaggggtgcaacaggagtcctcatgaagtgtattccttcggttaataggagacaactgctagatgagattcatgccggacagtgcggaatacacgcagcatccagaactctggttggtaaggtctttaggtctggtttctactggccgacatcaaagagtgatgcagccgaattagtccagagatgtgaagcttgcaaattattgtcaaagcaaccgcatttaccagcacagcaactgcagaccatacccgtcacatggccatttgtgtgctgggactagatatgattggacccttcaagaaagctcagggaggctacactcacgtgttggtcgccatcgataaattcaccaaatggatagaatacaaacccattgcttctctaacttaagccaaggcagtggaattcatacaagatataatattcaggtttggggtaccaaatagcatcataaccaacctggggtccaatttcactagctctgaattctttgatttctgcgaacaacggagcatcca

SEQ ID NO: 8145 - DNA, 542 bp, Zea Mays
tccacatactcggccactgaagcagtctgccgaatacgaaataatttgcgaatgaacgcctcatgttcatccttgccaaaacgttccagcagcaagcggcaaaattcgtgccaacccaacacactcgacgactcttctagagaagataaccagcgcgccgccaccccaacaaaattcatgtacgctacccgcacccaaagctgaggctcaactgaatacatatcaaaataatcctgactgcgacggatccatagtttgggattctcgccatcaaacacaggaaaattcagtttaggtaagcgaccacgaacttcaccacttagcccccccatgagtattggatcactgctcggaaactgaacaggcatatgatgtacaaccggaggagaagcaaacagtggtggattcatagaggtgaacgtacccttgtccgggggagggagaagagtcgttaccgacccaaatcccatctcccggttccctgattcgcagcggtgcccacagggcgaagcagctgtcgatccagccggaggacgctcgac

SEQ ID NO: 8146 - DNA, 658 bp, Zea Mays
cggtggtggtggtcaagcaagatgggaaggaacataacatagctggtatataatttgctattcgtattagcaaatgaatcatggcagttagcagtacaattgattcttccaaaagaaattaagaaagaaagaaaagcattgtgcactgtatatgttgtaccctgcctgcctgtcttgatcatagatagatacataacatacctaacaaagcattaagcctgcgtgtttccacgagcagcattgatcgagagtgtgtgtgcacccatttatggaccaagcatgcgctagggtgcgcgagaggtggcaacagtaaccatatgcaagagatcgaagcctttgggcttgtactgagggagggcacaaggctgtgcctgtgccccttgctttctgcgagaagcagcgtacaggggaggagtgcatctgccacacagccatagtaattgcttcgcatgaatggtgatccatccatcgacatcctctcctgccattgcagcagactccagcagcaggccacatgctagctcctgctgcgatgcaacggtaccgtcgccattgatgatgcgcccggccgccatataattgggggttgcgtcgtcaattcgagcgcagaagttctgtcgatcgatacccatccatccatgcatgcatggggctctcc

SEQ ID NO: 8147 - DNA, 407 bp, Zea Mays
gctcaaccaactctggtccggatgttcggtaagctctcttaaagatgggggcggtgccaggaagaagctctatagcaaactcaactttccgctctggtggcatacctggtatgtcctttggaaacacatatgggaacttagacacaaccctgatactcttaattgggtctgcttcactgcctttgacagccatctgataacaacttcctttcttcggctcaggcgggactaactcggtcaccacttcctctcctagcggggacaccaacttgattgtcctcttatcacaactgataactgcgtgatacttatctagccaattcatccctaggatgacatctattccttgagtacccattactatgagattagcgggaaacactatcccccttatttccacacttacg

SEQ ID NO: 8148 - DNA, 802 bp, Zea Mays
ggaaaattagtttcacaattttagcatttttctacatttttctacacatttctaaagctctgctgtaaaagaaaaaggaaaataattaaacagaactgggccggattcagcccaggcggcccagatccacgcggaatcgcgcgcgcgtccccgcccgcggggcgagtttgcgcagaggccctcggcgttttggctaactggagatgggttcggttactgtttttctgagtcactgacgattacaaaaagaccctccggtttctatctattcacgatttgaagtccacgacgccgttcatgcgtggccgtgctccggcgagcatctacgccggccgattagggcaacggctgagttctctgagcagcgggcacgaaattaacactaccccgaccatttcccccaacccaatttggctattcaacaactagggagctctggccacgttggccgtgagcatcacggcaagacagccgtgttcccggcgatgggtggcggtctagtcaaattaaaggggtcggggagcatcgcagacgtatgataatgctcaaacaagggagcagaggacgggaactgaccgaagttgggctggcgacagtgagctcggttgcatggtggcggaaatcggatttggggggaattccaaattcaagttctctggtgggaggtttgggatgcaagcgggtgcaataactggtagagtacatggcgaagccgagggggggctcaatttatagactccgagagcggtggctctcaatttgcccacggcgagctggcggccggaggtgaagaagaagcctg

SEQ ID NO: 8149 - DNA, 487 bp, Zea Mays
cacgaagaagcagcggaagagggaagtacagggggccacacctacgaacatctcacagaggtggacgaagatggctgcctggaggacggagtggggtgtgaggtgttgaagctgaagcccaaactcctccagcagcagcaagaagaagggcgagatcggcaacgccaacccgtagaagatgtaggaggtgaacagcacgaactccccggcggtgagatcgccatgagggacggcgccggcgcggattcttccggcgagccctggcgcgctccatccaagcaggccgcgcaccaggttgagcgcctccttagactgaaagcagtcaggatgaccaagcgaggccatggcgtgtgcggcggcgcgagcgtggaacagaggagcacgaaggcaaaggggtgcaggcgattgggagagaatgcgaaaaggtaactgctgcacgcggggtgaatcctttttcaaggaaacctgagtccttgttcagggaaac

SEQ ID NO: 8150 - DNA, 562 bp, Zea Mays
ttgagcttttgggctcacgtcgagcgattaaatgatatagtgggtactcagacacgtcgatcagactacatttttaattggctgagctatggcattggctaagcattggctgcgtcctggcaacacgacacattatttgtgtcgtaagaacttagctgcgtcatgtgattgctatgttgtactctcgcttaattggaccactcctgttgagttggactggcatcgccgagtcacgtatttttcgcatgtcctgtaggcactgtttgtctgtcgttattaccagccacaattgcgtctgttgcgcacgttgtgtagacttgtcgcgtaccccaattaccgagccacaactgcgcctgttgcgcttgttatggaggcttgttgcgttgtcgtagcccagatggccacacacgcgttgacgccagatacgatagagcttgtactcgcgtggattgtggtgggtcgttcaagccctaaagtcacattatgcgcaaccttcgtaaacaattttgtctagctatatattttatttgcttgtgttgtgtggcatcatatatttatttat

SEQ ID NO: 8151 - DNA, 730 bp, Zea Mays
tttagagggaggtgggtgcagcaccttggggaggagaggagcggctgcaatggggggggagctgcaaaaatgagggaaggagggggcggctgctgctatgagggaaggggaggggcggctagggtttttgagaagaggagtgagcgatgcccccgatgcccttgatgcgaaaccgacggctcacaaccaaatcccccatccatgccccgattcagacaaatgaatactcaaatgtatcgtttaaatgagatcttcacatctgcggactccgaacttccaacggctcacaaccattttccctcatccacacaccgaagatcaacttttggtcaacaattgatttgggatattacattctaccccccttaaaaagaattcgtcctcgaattcgaccactcacagcagaacatccaaggtaccccaaatagcaccaccattcaaaacatgaatccattattggtattaatcaacacaagaacttctacctcggactaatggtataaggaagctacacaacctaacaacaagcatgaaacagcatgcaatgaagctcaaagcaagtcatagatgcaatcaacactacgatttcacaccatcgaatttggatgcagccatacatcagcatcaatgtcttaaaacgacactcttttatgaaggggtaatatgcactatgcacaacccttaccatcttcaacaattcattttaattcaatggtgaaacatccacacc

SEQ ID NO: 8152 - DNA, 539 bp, Zea Mays
taattattgctataccaaagaggattaaatatttaatcgcaaggcatcacaaatttcataagtaaacccgatatacgtatgactcgctagcacaacaatcacgttcgttcggtttaaccgggctagctcaaacctcaagaaaacaataaccatagacacgacctataaacgcctaagccaggtagtcatcaacagactaacgaaacataggcttatcccttgtagacacctaatttcagaatgcgaatagcagtaacctaactagctcctttttcaggttaacccacataacatactaaccgaataaaacatcaagaaaatgctaaactatatgcacgctctaaactctactaagctagggcacatcacggggagatcacaacacctaggttcatcagcctaggacattaagaagaacaagacaattcaactaattttctaaactattttctcatactactacgcatcgcacaccaactaaataggacaacacattcctttattaagtaggcagagtgccgtcaaacattacatattca

SEQ ID NO: 8153 - DNA, 377 bp, Zea Mays
gggcaccgccgattgctcgtcggagctatcaagccttcgtcgatccgcacgttgccgtggtcgtgggtgattcactccaaatttaggtatgaagcttcccagatactttcgtcaccacctccgcatcgtttaccgtgtaccggcgttaagtttaggtcatcagctcggtgaggggcatgcatcatctatggcaccgccgcggaaaccgggcgctgtcgtcgtgcttcgtcaccggttggggcgtgcgatctcggtcgtcgatccatgggtggatggctgagattagacgctaggtaatggttcgaccgatgtgtacgcaactgtaggattccgagcgaacggtcatattagatcgcagccccggtatctcctctgcc

SEQ ID NO: 8154 - DNA, 358 bp, Zea Mays
ctttttggctgcttgggttcagcaaacattgctgagaggaatctgtctgaaggcacatggaggattaaactgcaccgaggaaaggtcattgctgaggggaatctgtctctgtctttcccttcccctgtggtcagaactatagcaactgctggatccacaagcaagatacttgcaatcaagtacacgttgatgtggcctcggcccctcgctcactttcgcctggtcaatccattacatccgcacgcatgtgcgaccacagcatcatgatggggaatcgatcgcatgagctacagctagctccaaaagacagtttttttttcttgcttgcacactgacttttttctttctttctgtcgag

SEQ ID NO: 8155 - DNA, 633 bp, Zea Mays
ttttttttgggggtgggggacagggttgcgcggacgatcgtcgcgtccggcagcaaatgatgattctggcctggcctggcctcctcttcacgaaatcttgctcccccttggagattgatgccactgttgttcgtctttgccgcggctccgatctgtttagtctcggggggattcggttcatgctgtgcttccacggatgtttctgtgctatcttgaaatgttcaaccgtgtcaagagttaatgctgctactgggattgtgggagtgatgttcttatttagattgctatcatatcctcggtagcaacctttaagcaccaatctggcagcaattcattcaactcatctgtgctcattccttatttttgctgtggagtctccaatagctttgcgttcatctgaaatgtcggcagcaccatggcaaatttatctggatccttcgcaggcatgggctaggaatggcatcagtttgtcccatgttcccatggatgcaataattaatacgggtaccacctacatatgaaagcgggttacattttctgagtttaaaattcgacagatttcctttttttacctgatgtaagtgcatttattcgaggattgggaaacagaaaaatgcaacgcgttacttctcg

SEQ ID NO: 8156 - DNA, 496 bp, Zea Mays
aggggacctcgtactcgtccggacaactcggacagagtcacggggcaagctagagccaaagtgggagggtcctttcatcgtcaagacgaaggcgttccccatcgcgtacaggctaaccatgccatccggcgaggacctagagcattcctagaatatcgataatctccgcaaattttttgtttgaatccttagggctaacgtgcccttgtaattcaccaaacattatcatttcggcccgcactcttttcctcccggggggtgaggtttttaatgaggtggagccatgtaatatacccgcaaaaaatcccccgcaaaaaataagacgcaatatgtcgaaaaagaccgcatcgacggtcttcggcattcgaccacaccgaagtcaccgcgaggggcagcgctggccaccctcgcgtgcgacactccgcgcaaaagttgcctaagggtgcagccggactagcacaataagtgcgcaaaattgaagtctcttccaaaagac

SEQ ID NO: 8157 - DNA, 690 bp, Zea Mays
aaatgttcctgataaggtaacaatcaaaaaaaatatgttgaatagtctcattctgattacaaaagcagcatttcatacttcctgtccacccacgtttagctaaattttctttagtgagaataactcctctccctaagtaccacaagaaaattttaattttgagagggatttttagtttccaaagcaacatattacttcctgtgcacgcgcatatcaacttcaaaaactaaacatgtatttgcaaacataattgaaaccttaacaactttgcttgaatagattggtcttcaagatctaaggatcaaatccaagctttaaatgttgaatcaatatattagagatggttgaaagcactaggaaagattgatacgaggagagagagacaagaaataaatgaagatcagaaaagtgagaaatgctaagcggaggaaaggactggcacctcaacgctaagctatgtagcaccaaccttcagcaccatggctaatgatgctaagatcctatcatgtcactatcgagagtgatggctagcgtgatatctcggcatcatatcctatgagaccgagatatataatctcaattagggatggcaacgggtgggtgtggtgcggttggagcaaacacccatctatgttgacacctgacacatcaaaccacaccccacacccgtaatgcctaatggataaattt

SEQ ID NO: 8158 - DNA, 527 bp, Zea Mays
gtgagtttgaatgtgagcttctcccgatgccccatcctgctgctccttcagtgcttcttcttgacctgttgctttcccgtgccctgtgaagagaacccaacacgtttgttagattcctcgtgattaatgatgcccattctatgcccagatattggtatattggttagagcatcgctgcataagcagggatctatgtagaaatgtagattgagagatgaagggccaaaatgttagctactcacaacaggctttccttttttcacctgaaacctcaaaaggttgatgcaaaattttataggccatgacctccaagagtgggcatcctacagtcgcccaacgctagatacagatggtcactaaactggttgtggcaaaatccagcatcaaactaaacagcccatcaatttactatacctcaacagctcaacctatttgtggagattcagcagttatgccaatcctactctaagcttactatcgagattattagggttttttaagtttgatgctgatgccctcagttttgc

SEQ ID NO: 8159 - DNA, 298 bp, Zea Mays
gccgacccccgtagcaacgccatcgccggtgagaaacccctctgtcgagctcgccatgaaccgtagggtgtttctaccatgtagtgttggggaggggcactgtcgcacgtggggattcatatcaaccagcggaccgtgccgccatggggtgtggtgttcaccacgcggtgtatacgggtggaggagacgggtcgtaaccactgatccgtaaaccaacggccatgattgagcgctgaacgttctcatcagtggctaaatctgggcccttggtatggatcgggtgatccagattggatcg

SEQ ID NO: 8160 - DNA, 436 bp, Zea Mays
ggggaattaggttcataatgtcaccaattgggcgtggagcgaatgaattaggaaatggaggatgggagggccggaatcgcgatctctggtgagctcgccgccgtacggtgacctgctccgccgtgggtagtgacggggggagagagatggggtcggcaccgttgatctattcgcggacggctggatctgggcgtcggacaccgcttcgggggggatgggatccgtgccgtggattgggatccaacggtcactggttaattccgaccacataaaatcctggccgtagattagggatccaatggatccggttgggtaccgcttcgttgaagtagtgatctaatccgtgccctccgctgcggatccaacagccctgagtgcaccgtaccccttcgccgtgcatttttgttaaagagaccccgcactttacacgaatcaa

SEQ ID NO: 8161 - DNA, 684 bp, Zea Mays
agtttcttcttcaagggatagtttggtatattatgtttttccacaaatgactttgttacgaaggagtgagatgctctagaatcaaataaaactgatgtaggtatggagttaataagaaacataccatacaccatgtcggcatcctcatgaactgattccgctgtcacatgattgactcttcctctactctggttctgcggagtcttgttctgtgcagatccacgagtaggtgtgttctggtcaatcctctggttgttgttcttctggggtgtctgttgattatgccttgggcagttgttggcatagtggccaagtttgccacacttgaaatagccattaggttgaactggggtagttgtgttgctgttctcggccggtgtgttcatggtgcttccttgacgattctgttgttggacactagacctttgaccggtctgagtgctgcttctctgctggttctggtattggttgctcctctgaccttgttgtccagagcgttgtgcttggtaattgttgtttccactctgatttccggagtggaactgagaaccttgggagttgttttgacgggaattcctgctggtctgcccttggtactttctcttgtgatccgacaactctttccttttgttttcaaggccaattgccttgttcagcaaagtcggaaagttggggaagttgtgg

SEQ ID NO: 8162 - DNA, 375 bp, Zea Mays
ggtcgaggtcgtggtcgcgggatgggtgctcgtctggcccatggtattgcagcattcttttccatgtgcagaaatatatcttcagatgtgcatgagctggctcggcggcagtgggagactgacgacaatcttcgtcgtcaagcttcctctatgggtatgccatttgccccttgttcgcctgatgtgcctcttcatcctcctcctccggaaatcaatgagtggcaccagcaggcatatggggtgcctttcatgtctccagaagatgaagaagtttttgatgatcgtgagcagtttgtcccgcctccccaccagggggatccgggtcaatcctcttcttatcctccgccccaggatccttcaggaagctatcctccc

SEQ ID NO: 8163 - DNA, 512 bp, Zea Mays
atctaacccagatggtcaataccaggcggggtggtggaattgatttacctcccaatcgacacactcggaggatattcagacaaccccagccacaaccagcagagatggatcctttgccaccgcctccaccagcaggagttgacccactagttgcagctgagatgaggatgatgcaacgaatggcagataccatggcggatatgcatgctcagatgcagcaagaacgccaggagatgcgccaggaacgagaagagatacatcgagagctatgccaagaacgagaagagatatgccaggaaaggagggcacaacagcaacagcaacaacaacaacaacaacatcagcaagcaccactgcctccaccaccaccactagttccaccactggacaagcaccaagagttcatgagccataagccaccgacatttgctagttctcctgatccactggacgctgataattggctgaaatttgtggaaaagatgttgattattgcacaatgctctgaccgg

SEQ ID NO: 8164 - DNA, 646 bp, Zea Mays
cgagatctgggcactgcaattctggttgtcaggcgctctaaatgaggaatccgatggtacagtgctatacaaatatcccaggttcagagaacctcgccgccgatgagcggtgcgcccggattcgcgccaaccgctgtgattcgtgcccagcgcaagtggataacggagaggagtaaaaatcttggcgctcggattagttccggctcgctcacagttgtgcccgccgtacccacttggaccgcagctggccgagatcatcctcaccagcgttagccgcttaaagatcgtgcgccacacgtcttggaagtctagcatgtcacaatgaaccagtgttgcaagcatgtccatcgcctgagaatttgccacggtgaaagccacgaattccttgcgccagtaacctcccctctccccggtcaccaccgcttctccaaattgagtgccactgccgttgagtgctataacttgaagcctcagggaactccgctagctaattatgtgtccaacgcaccaacacttgcctccaattgtccaccagagccgcccaattgcccatttcctccaaatcggtctaaatagcgccgcgtgagcacctcgctgtggccagcgtgctacaggtccgttcatgtcctctgctctcttgtttcag

SEQ ID NO: 8165 - DNA, 361 bp, Zea Mays
atgaccaccaccgtggttgaccaggccgccgcatcgccgttgtgccaccgtgcggaccttgatccgccgccttgcttcctgctcagtagggaagaaaagcaatggccttagatcctgtgatgggcggctaggattagttgataacataccccttcgtcccagtgaaccttggccgtccatctgcgaacgagcggatacggttcaatatcagttatttaaaatctgagtcgtagatgcgagatcctgcggctgtgtgggcgtaccggtctgagcgcgcagccaatttaatctggatcgtccattttaatcggacggctctggcctgccgataccccttcggattgcacgttttgcaaaagag

SEQ ID NO: 8166 - DNA, 529 bp, Zea Mays
cggattctaggtattgcaaaatatctgaagaatattctgacccactacttttctagcagattctgggtagctcgtagataaaactaacttgggattagaaaggagaatatttggagtacatttttactgccctgagaagagaaaggagacaagtttggagcctgttcctgggagatgactcagctgctggtctgctttgttgtcaacaactagagccctcattcttttaccccccgtgtccagcatgcaaaggcttacttcaacttgttcctgtgcttggggctggtgtgggttatggtgaaggtgtccacgtgcatatattcatgcactagctgggcctcaagtccacccctcctgtgaacatgtggaggccaatagagtttaccctttttacttcttgccaccaccctcaactcccataaagggctacttcagtctatgctccttgaccaccacttgatagagcatcagttgctatcacccttgtgcacaaggatggtcaactgaaaccatccctccacccagaaac

SEQ ID NO: 8167 - DNA, 587 bp, Zea Mays
ctagcttgtaagtctggtgatagcgacagtactgagatcactgtttgtttgttttgcttagatggcggcatgttaatatatgctaggaattgtggtgggatgtgtctaccccgaagcgagatgtaaaagcagttctgtttgcttgtttacattgatattagggcctaatggaaatgaatactggtatatgatgaatagtttgtctcccaacacaagaagtggttctttagttcacttcaaataagtattgatagatggacgatagatacagttcggattaattggtactatttgtgtattcctgtcagcgttgttgatagcaaaaggcactgaatcagtgctcataatccaggtgcttgttcatgattgctgccgttttggtccacacgttctcttctaggggcttatatagcttctgttttttctttagctagaacagattatgctataccttctgtccagtttgtggcttctcttcagcttgtagtaatatagtgcctatcatgagacatgtaggaataatagcaatacgccaacaccagaatatatgtaaggcttctcaggatatttacatatcagcatgtagc

SEQ ID NO: 8168 - DNA, 360 bp, Zea Mays
ctgaaggtggcggctcgtcaaggcaggagaaggtggaacaaagggagcaagaaactatgcctaaagcaaaggtagccaaagctacgcaaaccacatgggaggatgaggagctaggctttgtcacaagacatattagtggtgaagagttgaatgaagaagtttcaaagctgggggaaaaaggccacaccttggggtacgaccctggtgctttactatttcctagggaagaccagatgatgatgtgcgtactcgatcccaatgaaatgaagattgatcagaatataacccgaagcatcgggtttcctaacattgaagagaagttgtgcctggtgaagaagaagaagctctcccacatcctgg

SEQ ID NO: 8169 - DNA, 1435 bp, Zea Mays
ccaccaggattcggcacacaagaaaaacttttcatctttcctggtgagagcatggtgttttgatcctagaattctgcccacagaaatggatcttcatattattgaaccaggccctgccgttcttgagaagagatgtctatcttataaaatctcgatcggagtttgcccggtggatcttcagtctgtgagcctggatacaccgtcttcttctccaccgtcgtctgggaataatcacgatatgggaggtgatcgtggcggtcacgttcctcctgctcgtcgtcaaggctcttctgcggttcctcgacgacctgtccaacttcgcttgggcccgcggaccccatcgggctccggtcatgtcgggcatggatcaggaagtgtggaaacgtcgcagcctcttggctctggaatcaaggggtcgcactgggttcagcggccgccgcagttatgtttgatagaagccgaagaggctgtgaatgcaggaattattgtggagacattacaaccgcgtgtctctggaatcgaggagacttctcggactctgcagtcagcgcattcaagccttatggataccgttaagattgtggctgctggggttaatgtgtcgcgcggttccaaggggtgggaccatcctttggcggctgctgtgcatgggaacgagtttttggaattggccgaggagactgtgaatgcaggagttactgtggagatgttacaaccgtgtgtctcgggaatcgaggagtcttctcggattttgcagacaccgcatttaagccttatggattccgttcagagtgtggctgctggagttaatgtgtcgcgcggttccaagtgttgggaccatcatttggcggcagttgtacatgggaccgagattttgccaaggacgcagccccgtttctctggattcaaggggacatcttgggttctgcaaccactgaagttatgctcgaaggacgccaatctgtctgtggatgcgggcgatattgagctgcacgtttccagggattgggaccacctgctggcaacccatttgtctgatcctatgcagcattttgaagggttgatgggcttatctgtaacactttcgccccaaccatcgggtggtgatgggccgctggaagtgatgagctcgcctcttcaattgattatccaacatttttctgatgagctgctgggcctaaacaaaacactttcgccccagctaaatgtaaccactgggacgctggaggtgttgaggttggaatcgcctcatcgtggtgaaccatttctaagaatagggttgctggactcacccttgccgccttcaccccaacagtcccttaatgctgggatgttgattttggcaggattgagcccacccctccaagacacatctaggatggatgggtcgcagggcttgaacagggatacttcgcccagcaacctgggacgctgg

SEQ ID NO: 8170 - DNA, 620 bp, Zea Mays
gctttgggaatccaatgctcttcgataaagtgcttatgattttagcaccggcgcggtcgcgaatgcatcccaaaatctcttcatcgaccccaccgaagagcatggatccgggttggtagccacaggatatggcaaactccctaaattctgatatgtcccttcggaaaattgttggccacccaagtgatgaatgtcgaaattcttatcttccgaagaggcctcttcaattctctttcccttatcagaaggcgctgcgtctacatctttctcagcaaccacatctgatataagtctgttgatttccaacattgtggttgcaagattatcagcttcggctgcggcagtatcttcaccatcgataggcataatatctttatccgctgaagctaggggcagggtatgttcaatagcttgcatcacattcatcatccgtcgtttcttctacccccaccagttttcccctcggtagtcggagcagtttcctttgactgtaagaggctagtgagatcaaaccatagaggacttagcatcgtgaatgggatgggttagtcattaccttcaaaatttttgaaacatcagcagcagaaggcgaagaatgactgtaacaccctgaatttctt

SEQ ID NO: 8171 - DNA, 450 bp, Zea Mays
ggctgctccacatcagcggtggaggagcaccactatcttcttcggggcattcgactgccccgaaaacatggcaggggccgatgtactaccgctcatcaccgctcctgtcatcgccaacatgcggttgcaccatgtcctgattgacggaggggccaacctcaacgtcatcagtcatgctgcattcaagcagctgcagatcccagggtcccggctgggaccctctcgcccattctccggagtgggcccacaaccggtgtatccccttgggagcatcgcactcccgattacattcgggacagaggagaacatccgcatggagaacatcgtgttcgacgtcgcggaggttaacctccccttcaacgccatcatcggcaggccggccctatgtcagttcatggccatttcccattacgggtatttggtcctcaagatgctgtcttcggcctgggt

SEQ ID NO: 8172 - DNA, 561 bp, Zea Mays
cgggaacggaaaaggtagctttagtatcagttgttgaaaacaaccggtacaaaagcttcctaggagtgaacgcaaaagggagatttagtaccgattatttaaaacaactggtacaaaagctacctagatgggaatgagatcataaatatgaaccgctccccctctgttattcgctctgttctcactagtgctcctccgtcgtcgccatccttgatcgtccagcacgtattctctccaccgccaccatcaccgaccacggtggcgtttttgtttctgctgccacctggttaccagtgagctcggcctcaatcttctccactgccactactgccatccccatcgtactgtgcacattctctagaactccgccatcaccgaccgcactattgtcttcgtctccattgctgactgttcaccagtgcgctcggcctcgatcttctccaccattgctaccaccatccctgattgtcctacacacattctctccactgccaccgtcactaattgcgccgatgtcttcgtctccgctaccgaccggtcaccagtgcgctcggtctcgat

SEQ ID NO: 8173 - DNA, 541 bp, Zea Mays
cagaacacatccatcctagtaggtacctagtgcacagctggttccatcaataagggggtcgaccgaggatatactgttagtttgatatactggttccatcaataagggaacttggagaaaaggtgattcaaaagaaatcgagtccaaaccctagctgtacccggccaccgtcgccggcggcctccccttctgccggcgacggtgaaggcgatggcggcgcctcaaggcccgcctccgtgtccctcctttcctctcctcttgcccccatcttgtccttggcgtcatatcacttcggggttctaatagcactgtcgatccggtctccgcgggtgtagttccccgctggcggactgtgggcgcggtcggcactgccgtcgcgagcacctcacgaatctgtcatcgtagatgtgctcatctatggggtgttgtggttgtcatagagtttgtggtcgttcatagttgtaaaagttcttattaagtttatgaccacatcgctaaaaaggtgtttctgatcactgtcaccccaggacctatccaaatc

SEQ ID NO: 8174 - DNA, 564 bp, Zea Mays
cctgacgccgacaaggaagaagactcgcactggctccgcatcaagtgcacggaagcgatatcctgctacatggctcgcctgctcgactcccaccccgacatgctgctcaccggcagcaggcggcacctggtcagcgaagccttggatgaactcgagtccatctttgaccgcaccatggtagatcgcagcggcaagccaccgggcaaagacgacctgcacaagatcatcgacgacgtggcgcgggtacgtttccaggtgcccgtcggcgtcgctcatggagctgcagacgacgacggggaggaggcggtacagtctttcttccacatccccgaggcatgcgggcttgcaatggagctgctgcagcttgaagcgtccacgcgctggagggtgatgtatcgggtgtggctgggcatgctcttctactccgccagcatgtgcaggggctacctgcacgctaagagcttgggtgaaggtggcgagttcctttcctacgtctggctcgtcctctcgctcaagggggccaagaccctggccgacaagcttcagatgttggaggtggaaggg

SEQ ID NO: 8175 - DNA, 1083 bp, Zea Mays
ccccccgcgcacacgccactgatcggacggcccagcttctttttcctctgcgcagtgccatctcccattgacccgtgggccccgcttgtcatctctttccaccccgtccaactgaacgcgcgtgcctggcgggtgaaacagaagccgcgcaatcctcatggtgttccctcaaccgaatcccaacaaaacaccaagatccgcgcggcgccgccgggatcgctggggttgttggggtccgcctgggttataaaacaaagaattcgctggccgcctcatactcatcaaccgagagagagagaaccggtgtgtttgcacgccaccgtcggtctttgggtgtgtcgtcggccaaaggctctgatcgggtctggtgcgtgtggagtctgctgggcgctgatccgcgcggtcgcagtgtgatcgtagtcccaagaactagccggagccaggaatcctcgcggattgctaaacctcgtcgtcgatcctttgcaccatcaccggaggtatgaatcccgtcccttgttccgccaccgtgtaagcttcgagatatgctatccgtaccgtaggttagtgcactatggcacctaggcacttcacaccggcgacgtccgctgctgcggcgtatgcaatggtgtcgccggcccagctctggatggtaggaggaagacgagcgttggacggtcgatgggcagatcgacggtccaatgagtgccacggcatgggtggtgtctgggccgcttgatccgaaagcaagggccaggatcgaaacatatgaaacgcttcgatcatgaccgttgatccttgatctaaggactagtatgtcctgcgcacatgggggatcctcgatcgtcgattgttgatccgatgcttaatattacataccggttcagtaaatacttcaatctatttgcagccgtccgatgatgatccaatagcccacagttgtcgataccccttcgtcgtgcgcttctttcaaaagagcccctgcctttttatttattcaacccgccgtcctcgcgggagtaggctgtgtctagtatattttacagagtaaaccccgaccttttctgtattagtgcgcccagtcca

SEQ ID NO: 8176 - DNA, 852 bp, Zea Mays
tcatccaatggtcatatgctcttcatgaagttgcttctcctagtgcaccctctgtgatgacgcgacatggcaccctcgattcccaccggaaccataccgccggattttgaggcctaaaccggtaaaaccagccttctgtagcggtggatggttttgacgctcaaccaccgaaaactttgtgattagagtactccatacacatccaccatgtcctagacacgtgttctgctagtccacgatcatgccggtgacatgaactgctccactctggtgcgtgtctcaagtgtcggccactatgtatagtcaccaacttctctagttcctcaatgaagacccagcactcatccttcaccactcccggcccattggcacgaacccacatgaccttcatctcaccttcaccttcatcatcgaccaccatacatgtactacacacctgcacaccataagccgagagacatggttgcacaacacacacttgtactctcgtgattgcactaactcacaccaaagcactacccatgttgacaatcactcatcatcaacccaaaccacaaggaataagtcaaccttgtgttcgtaatctccccttgataagtgtattgttaataccaccgcacgaacacacaaatcattagaaaagaagatggtaggaacctgctcaaatgaccgaaagccaacaaaagagaaatgtgagtcatcgagagagagcaaagcttggtccttaaagaaatgggcaacggctcaacacaaccaagcacaaatggctagtcctcaagaagaggtagaaatgggctcaacaccactaactagaactcaattccagattggggcataaaaatagcaataggg

SEQ ID NO: 8177 - DNA, 1728 bp, Zea Mays
aagcatcataatcatcctatcagtcttgagttcgatctctttacatgtaaacaagaggcatcctcacaagcgtgtcaaaactgtttgtcaggtatgagttccacttttctccagactagttgatcaatctgatgcccctcctgaaaagctatcaccatgcctaggctaatgaaatatgttaggctgtacacaatggtttgaagaaacaacagctcctactttcagttatcatccagtataatcagtgaaggtaactaaaacaaggagtttgcatcatcatcaccaataatccctgcacgagcaaactccattcctgaagtggtgaaatctgttcacgtccctcacaacaatctcccgatctgtgaatttggagatgaacttggtgactgaatgacagtcctcacaaagcctgagattctttgtgatcctgatagcctctccactgccagtcttgataagcccgaaagcaacagccaacttctcactgtggccaagcaaaatcctctccttctcctcttcttcaatatcatacagaactgatctcgtgtcaggaacatagccctcatttttcatctgtgtcacaaattcaccaatcaatgcttgcagctcctccacctgtgggttcttgttgtcaactgaaacaaatgagtacagcttcttcttcacctctatccagctacagccaggcaccttctccagtgcatgctcctcaagtaactcctttagtacatcaacttggttctgcaatttagctcgggcataaatatctgccaagaggacatagtttccagcatttcggggctcaagatcaaagagatgagagcatgccatctcagcatactcaacatggccatgaattctgcaagcgccaagaagcgagccccaaacttgagggcttggttgaatacgcatgctctgtatcagctccacagcttcatccaggcgcccagcacgaccaagaaggtcaaccatgcaagcatagtgctcagcacgaggtgtgacattgtactccaccattgattcaaatagcttctttccctgctccacaagtccaacatgactacaagccccaaggacgctgacaaatgtgatgatatttggtgaaatgccttcctcaatcatctcctcaaacacctggagtgactcacgaccaaagccatgcattccatatccagatataagtgaattccacgacacgacattccttctgcgtcctatccagttgaagatgtagcgcccggtctcaaggcacccacatttcatgtacattgccatcaacgcattcagcactgaaacaagtaagtcaaaacccctccgaaggatatatgcatgcagtactttgccctgaccaagtgcatttaccccagcacaggcatgcaagacgctgacaattgtgatcgagtttggtaccaggtctgcatcagaggccatcatctcctgaaagatctgaattgcatcaccaggacgctcgttcttggcatagcacccaatcatagcactccatgacacaagattcctatcaggcattgaagtgaacacacgctcagcatagctgacaatcccaagcttcgcgtagcagtcaataagagttgtggcaacatgcgtgtgtaatccatagccgcggcggatggcatgagcatgcatctcccgtacacgggcagaggccggcaggtgcgacgctgacgctgcaatgcaggccttaagaccgtgcgcgtagctgtagctgtc

SEQ ID NO: 8178 - DNA, 447 bp, Zea Mays
ggggaagggcggtgggttctatttttgtgaaatcaggggactcatagcaaagttgtctctacgaaggggtatcgaggatatctgaccgtccgatcggcaatagagcgccctgattagatcggccctagccaagtctcccgcttccccctactactgttggatccaggatccatgtccgggatctgaccatgctagagctcgatcacagccgtcggatgagtaacacacggtacaaatttaccatgcaaatgagatgtttcccactccatcatagtcgcaatcaccgaatcctacggtcaccagtcatcttcttcaccgtgtgcatgctcatggcgcgccccgacactccaacgcacccaacagcgacgaggagcgcccccagtcgatgtccccaccacagttcgcccacctcccgtgcaccccagatataatcgctataaatccgac

SEQ ID NO: 8179 - DNA, 399 bp, Zea Mays
gtggaatggagccgatacttcatgaataggtttatatgggtaaatatgagtgaagtgtgtgcttggtttgaatttaggcgaagaaaatggaatttgggcactcggctcggaaacaatcgctcgaaacgaggaatttggtgaaattgaagcctggtatgtcggattggcgtgaaatttggcgaatatgtaactggaggtgttgtgaaggtgcctgaaaaatttgggttcaatcgaagcatttttggctggtttggacatttcaccgaacacgtggcgtgcggtgaattaggtttttggagatatggccatttgaggattgaaaccctcccaaagggagctagaaacctgcagggatactcaagagacacataggaacaactctcaccatatggattcaca

SEQ ID NO: 8180 - DNA, 282 bp, Zea Mays
gacgatttccgggtagtgaagaagtttctgcgcgtggcgccatcacggttctcgcagattgtggtgtccatcgagatgttcgtcgacctcaagaccctgacagttgaagagctggtcggtcggttgagggcggtggaagagcgttttgatgacaagatcgatcagatcgtggacaaggcagagcggctgctgctggccgaggatgtttggctggagaagcataagcatcgttttcaccccggcaacaagtctggagggagtggtggtggcggtgtctcctcc

SEQ ID NO: 8181 - DNA, 393 bp, Zea Mays
cacgaactcacgctccaatgcagcaatcgtgtgctcgaggagtatgacattggacaccatgagcacggtgtcgttgacatagagcaagaggtagacagtgttgtcgtcgacatagagcaagaggtagacagtgttgtcgtcgagccgaaagatgaatagggacgtgtcgacaaccagcttggaagtcaaagagggtcgaaggaggccatagtcgagagtgtcatggaggtagtgaagaatctacttcgcatcggtgaggtgtggcttccgcggggtgtgcgtgtgaaggcacacctgctggaccgcgtaggcgatgttgggccaggcgaaggtgaggtactagagagccccggcgagtctccggtaggccgtcgcgtcactgacggggcatcg

SEQ ID NO: 8182 - DNA, 523 bp, Zea Mays
gttgggcagtagttcatgtcatctgttaattaagcatcattattggcaccggacaaatcgtgtaagcgttcggttacgagtgcattatcacataaccactccctctagctcggatttattagcaagagctagcaaaggcaggtaacagaagggacgcgcgcgaaaagttgcaggcctctcgatcggccacagagacatacgtgttccttgcataccttaacgccgcatccgactgcatgcatgcgtgcatgctttctctcccggtccgccgtgttcgccgatcgtgtgtgtgatgtgcacgcgagtgattagcacgccctaccagtcggatcggattctcctttcgcccggccgtcgtcgtcgtcgtcgtcgtcgtcgtcgcacctctctcccgtcccgtccggcgtcccgtgtgtgcgtgcatgaggccgacggcactggtttagacgttggaccaaacgaaaataataatgcgtcgtttaggcagcaggctataggtaagcatgcactagcagcagcagca

SEQ ID NO: 8183 - DNA, 440 bp, Zea Mays
ccattaagactctattggttgggtaagttatgtaacttgttatataggtcaagttgttgtgtatggccaagttgatataagtctccaaattaggcttaagtgatttaggagtatgccttatcctttctaccagcattaagtaactcacactagattagaccatattaaattagatatgatctagattagactagtttaagttagatagatttatcagtgtaggatatatcttgttaggatatgttagaatcttttgagataggatggggtatatggtgtaggtaggtcagaagctctattaggttaacacagagggattatgcaactatcggatgggtaaggtagttgcatatgatcagatagttgtatatggtcaagttaatctagggcaccaatttagcttaaatcatttttataggagtgaggtctaatccatttca

SEQ ID NO: 8184 - DNA, 375 bp, Zea Mays
aacaggatgattagctgtgtggtaatcatatcgctctattattaagacttgataccctccctgtcttcgtctgcggacgggcagtgagcatgggccatcatgtgttgttgacgaccggatgacaggatcgtcgggctgcaaatacagcctacgtgcaaataaacccaacagcccatcactaggctaatgcaaacggcgtgtcgaccgggccgggccgggccgaataggactagtttgagaaacattgaattgccatcctgaatctctaattcagagcggtcctagctgttgtttgaatcaactgagacagacagtaacactcgcgcttcatcagccactgttccagatcttgggacagaacacacctgcagattt

SEQ ID NO: 8185 - DNA, 501 bp, Zea Mays
tggccgcgcttgcaacaacaacttcttttgcatccttagttttttcgctagaagcttcggtacaagcgggagctgacatcttcgcagattccaaaacaaagtctaatacactagccattctcctttttcttgtagtcactacgaaaaaacttgatggctttgatagttttgttgtagttgctgggctcagtacccttagatgttctgctgccttctctgatttcgactctttggcaggatctgtacgagtttcgattggcatgacatgacctaattctatggcggaaggggcagtttctgcaccttcaataagctttggcacatcggccatctcaatgtgtctcggtctacgtgtgaagaccttcactttcttcgccttcgacgcactagaggatgccgaagcagcaattttcctttttctcccttgtttccgaacaggaaaacagtaatcagggtagacaaacccgataacatcaaaaaccctgtttagcctctttttcc

SEQ ID NO: 8186 - DNA, 460 bp, Zea Mays
tgaagctgttggtgcaactaagcatctaaggggtagaaatctccctagagctgctgctggggctgttaacaaaacatacattagaacaaggaagcgtgttgctcgtcctccacagtttggtgaatctgattctgataaagaaatgcaagaacaaggagaagaacttgctgttgcatccactaaagatccaactgaagatggaacaggctttgaactagctgatgaaatgcttgattagcagtttagcatttatttaatctagttctagtgtcttgctgtcctgcaaaacaatattgcaatttatcttattttaatcttatcagttatcatcttatgacctgcattttagtcctcaccccctaaactcttgttatagtcactgacagcagcctacaagtttggcattctaataattcctggagttcaaaacttgaaatcaatgtgccgcactgctgctttg

SEQ ID NO: 8187 - DNA, 580 bp, Zea Mays
atgcgaagctcttcttctctctcccaagttgcttcatcctcactatggtgactccattgtaccttgcacatctttatcaccttatttcttgtaactcgagtcagagtgtccagaatcttgatagggtactcaacataggtcagatcatcttgaacactaaggtcctccattggtagttgctcctcaggtaccctgaggcacttctttagctgggatacatggaatacatcatgtacatcagtcagattgtcaggtagctcgagttgataggccatctctccaacttgcctaaaactcagagtggtccattatagtgaggggacagtttgcccacaactttaaatctcctcattccacgaagtggtgaaaccttgaggtacccatgatttctttcctcaaaatccagtggtcttcttctattatccgcgtagctcttttgccaggttcgagccaccctcaaattctctcgaattatacgaacttgttcgtctgccccttgaataagttcaggccccaagaactgtctttctccagtctgatcccaatatagaggagtcctgcacttcctgccgtatagagt

SEQ ID NO: 8188 - DNA, 651 bp, Zea Mays
cgttcgtgggcgcaatcggtcggcggtgaccggggtattgctcgccgtcgattgcagtcgctaggcgccgctcttcgtcgaatctggcccatctgattcctcgccattggtacggcactgcatcccttagttcctaccagacttgacttcgatttgggcttgaccgatttgggtttggggcgtcgggccccctcgggcgactggccggagatggctccgccgtggctctgcgcaggcatggtcggaggtggaagagtttgcgcgtgccgttgatctgggagttgacggccacgattagatctgggaattgggagatttcgcgccgttgatcctcctatgggcgatccagatcactggtattcataccctttcgcgcatacaatctcagttgtagatctcacatccaacgcttgtcgtagcgtaccgtttcgcgtatgatttgatttaatctgggcgctccgtttgagatctgacgactgtgagcgcacggtacccctttggccgcactttttgttaaagagcccccgaggaaatcactaatcaacctgccatcctgagaacactattctctgtgtctcggaaatcttacgccagagccccctgacctatccagaaattgaggcccagtccagagatgattaaaaacagaga

SEQ ID NO: 8189 - DNA, 1042 bp, Zea Mays
gcttcggcttcggcctgggctgtggcagcttcggcaactttcttcgtaggagcaggagtcaaggcttttgtggtctccatgacagcgtctagcatgctagccattctccttctcttgggagttgtggcgggagcctttgtcacctttggcaattctgcctctactggtgggctctgaatttttggcatcatcactgttttttccaattctggctctctggccgcatcatctttggcttaggctagcccgattataagcaccttcgacactacaatcgatccttcagcgctctgagtggagggagcaacttgttttgcttcgacagtggaagaggtcccatcaccaaattcaggcactatgaccgtttcaatatatcgaggtcggtgggtcaaaacctttattttcttgcccttcggcacagcagtggtggccgaagcggcagtttccctcttttttccttgtcttcttaaggggtagcagtaatcaggatatatgaagccaattgcatcaaaaaccatgttcaatcttttcttgccccgacccccgaaggctgaggacaaggcatcatcttcggccctggtatatgtcccaagcaattcgtcgctagtagcttcaatgcatttcaaccagtcatcatttggtttgtcgaacttctctctgtatctgaaggtatatttcaatcgaactaggccaccttcgctggatttagcagtagtctccttcggtatctctcagctatccacaagaggccatactctgtaggctatgtgctcttgaattatgtctcttgtgccaatgaaagcacatacattactaaaagtcttctgacacgcttcgacatcactttcaatagccaccttcggccttcgaaggccgaagtaagaccagatggggcgttggataatttccttaatatcctccctctcaatcagattgttcttaacataaaaccattcctccatctaggccctgggccatcttttccggtatgttggaaccgggtagcttgcattagagcgagcaatgaatccgtaacaaccga

SEQ ID NO: 8190 - DNA, 699 bp, Zea Mays
ccaaaatcaaaggataaccttaatccaacctcataatcttggcttttttttccaaagaacccctcctcctgttgttctccgcctgctgccagcgggcggcaccgccgttctccgccgccccacaacgattttccccgttgatcccctcaggaaacgtgaatccgtcgattgctgccggcccacaacgatcttctctggcacctatcatggtcgacgccaacccacccaaatcatcttggtgcgctgccatggtcgacaccgacctgcctcgatcttctccagtgcctgctggtctaacgagtccttcgccacctgctgttgttctctctatccccagcccttcgatcccggccacatagagctcaactccatggatcccgcacatctcatttcatcctttggaacaccattctgtttgggtttagataacagagttcagcagcactcaagcattctgtttgggtttacatagcagagtttagatcagcagcgttcaacattctgttaagtgcaccaccaccactccatcagcaacatcgaagaaaaccaaagcaacagcaagtagtatcagcggcgtgtatcagtaggagcactgaagaaaatggttttgttctggcagcagggggcgatgggtctatttggtccagtacttttctttcgtcttctatccacgatagccatatgctatttgatctatga

SEQ ID NO: 8191 - DNA, 419 bp, Zea Mays
cttatgctaatctgtcctttataatgtcaggaaaaacaacagtccatgctagtaaacatgtaagttcactctacttactagcatgcgttttcttccatatttatattctgcagtgtctttgattgcttcactgtacatgctatagtagcattactgccacatgctaggtagttcttattttgtgacatccaaaattaagcatgcacaacactctagatataatatttgctgagaactgcaacaactttgtcttcaatggtgcaaatccagtatctcaatggtgctgcgaagtcacaattcacaaatgaatgcatccttcgctatactgctggagtagaaggcctccaggagttccttgccagttccattaggctagtgcagtagtgctcttgacttatggtcatcttgggtgtgtattt

SEQ ID NO: 8192 - DNA, 827 bp, Zea Mays
ccatactaaatcacccacttcaagcttaactggtttctacgttaactaccagcaattctatattttcaatcatcttttcaatgttggctttagttgaagcatgaattttcaaaataaagtcagcacgctccttagcatcactatgtacttgctcggtagtaggtaaaggcaaaagatcaataggagcacgagggttaaagccatacactacctgaaaaggacttaccttggtggtggagtgttccgcccaattatatgcaaactccacaaacactcttcccacattttcaagtttttcttcaatattgctcgcagcattgcagacaatgttctattcacaacttccgtttgtccatcagtttagggatgacaagtagtagaaaacaacaattttgtccccaatttgttccatagagtacgccaaaaatgactcaagaattttacatcacgatctgaaacaatagtagaaggcataccatgcaaatgaacaaccacaacaataacgatcaattgcatcaactttgaatggcatcaagtgcatcacgttttgtccccaatttatccccaatttgttccatagagtacgtcaagtgcatcaactttgaaaaagaggttagcaatatgaatggcatcatccgttttgtgacaaggtataaaatgtgccatcttagaaaaacgatcaaccacaacaaaaacactatcgctccccctcttcgtcctagaaatatctgcccacggaactgaaggaataggaagaggcatatacaaaccatgtgggttcaatcgtgacttagctttttgacacgtcgtgcatcttgctacaaagc

SEQ ID NO: 8193 - DNA, 393 bp, Zea Mays
gttcaacggtggacgggttcggtttgcatagaggaaagagggtccatggaaccagtgagttaggaaggcagagagggtgaattaacgcccgcacgaagtgcggagtggaacaaggaagctcaccgaaggttccttaacaccggagaagcactagcaacgatagaatggggtagaaaacttgagcggcgacccaagctgcaaggtcgacggtgactaatattttaggcgagtgaaagagggagccaaggcatgtgctaggtgtggtagacggcaaagctcacctagtagatcttgatggtggagaggggttgctggcttgagaatgtgacgaagacgatgatgcacgagcgcgaagaggaacaaacttgctaagatcccatggccaaatcttgc

SEQ ID NO: 8194 - DNA, 573 bp, Zea Mays
aaccaatctctttaacctgctttgtcaggcgcactgaagaagtttcccatggtacagtactgaaaaagatcttcaggtgcaatgcacctcgccgccggtgactcttgcgcctggattcacgctggcgctgtgattcgcgcccggtgatacacggataatgactctgggtaaaaagatcttcgccgtggatgaggtcggggcactgtggccgccctattgacgtacccccttgcgtcgtgatgtggccgcgcggctatcgtggtgatgatcgccgttaacccaagcacatcacgctactgaccttgttactacgctgtagtaggtcacggtagatagcccctctgtcgccggggacttaactcagtgaatgccacattgagcagtctacggtgactcctcccctttcttaccgctagctcttctccgcccaaattcgtcgtactcgcgaccgctctctataaattgatgccccagtgagcttcgctaggttattacgcgcccagtgcaccagttgtcgcctcttatcatccaccgtagcgtcccaatttcgcttttcccccaattccgttttcc

SEQ ID NO: 8195 - DNA, 2051 bp, Zea Mays
ccggggccggcggccaactcccaggctgctgtcgccgcagcttcctctagccctggcgcgtcggcttccatcccctccttgtctcctcctgtgtcccatgcaaccaaggggcgctccaagtccgttcggtggggtgatctcagtccggcttcttcggatggcgcgacgtcgttcgactcccggccttccttcaaggatgtgctggtgagaacagcgaacccttcgctgcccggccgtgtggcagcccaagggtctgtcccggcagctggaaagtcctcggcgctgggaatggtgtaccgtcagccgcaccccctgtctacaaaacggcggagccccaggcaggccactcaacccacaccggcaatccgcccagctccaggattatctgaccatggatggacgacggtggagtccaagaagggtagaagtcgccggctgaaggctctgtggctcccgggccgggtcccggctgatcttgttgggcgttgcttcaactgcttgggctgcgatcaccgggctgcagactgcggcagcgaacctcggtgtttcctctgttctgcgcttggccacaagtcctcatcctgccccaaggcttcggtgtggaggaggctcgggtgtcctagacctgtgaagtcggtctgggagcggctttcaccggcggtacagggaagggtccaacgaccggcagggcgtcgtccggtttggcagcgtattgctccaccagaagccattccggtcgtcccttctgtcccggtgggcaacatgctgggcgtctcggctgcacagggtaatggcggccctgccagctccaggcgcaaacggtggaggaagaagaagcgcaaggagcgtgaagataagccggctttggagatttcggctccacctcctcccgagcagacgcttccggcgagtgatgagactgcttgtgttattgattggtcggttcagatgtctattgcggaagataatctcaagacggctgtggtgatcacagtggttagctctagagacgtcagcgctgacgagatcgcgttggttttggccccacggctggaaatggaggtgggaggattggttctccgtcagttctcccagtccagcttcttggctgtcttacccaaccatgtgcagctcgacacgctggtggatcgcttccatatcatcagagaagaaaacttcatgctctcctctaggcgttggacgaggttcgggggtgctgttggtaattccttgaagcatctcgtggaacttgagatcagaggtctgccgttgcacgcgtgggagacttcggtggtgcaacatttgatcaacccccatgcttgcatttcccaggttctgcccgacacgctggaaatcaggaatctggaagtctttcgatgccttgcttggtgttgtgatcctgaacatatcccatctaagaaggacctctggatcactgaaccagaccaggcttctgctgctgaagggaagaaggctctggtgtatccggtgcaaattcgttggggccctgttgatttgaatctcatacctggcgctccacagccgccagttggtgctggtgatcaggacaaacctgatacccccccttcacttagaagatgtggtgacaaccctccacccactcaacatgctgcagcctttgaagaccccgacataatgacccacaatcagcggcggccggtgcatgaccgattgggacctttgaggcgctcggattcccccagggaattgagccagccttgggttctggttgatacagaggcccggagcagccagccctgtgacctgcttgatgcagtggtgtgcagcagagtagggattcctccggctcctgcgccggatggggctctctgtctagcggctggggatgtgctgctgcggcgcgaggggggctgcgatgaagtaatccccatgaccccgttggccgcttccagcacgtgccattccaccggagggagacgcagactgttgttgaagaccgctactaaactagcaaagttcaggaatccgcctatcgcgttcttcagacggcggcggcgcgcccagaagac

SEQ ID NO: 8196 - DNA, 402 bp, Zea Mays
gccgggggtatggccggacggagaagaggacaaggggaaatcactggttcggtactggtgcgttggagcagaggcgccatttatttcttcactctttcgtcacgcacgggcagagcagaggcaggcagaggcaggggcgcagggccggaccggacgcggacggcgctttttattactgctctccgtcctattttacggtacagctaaagccaatgcaacggtggtccgctttgcttgctcctggcagagacagacggggagacgggaggagcacagcgtcatcgccgtcgccatccgtatgccatggctcagagcggaggtgcatgcagaagcgaacaaaaggcaagggagaaatgcttgctcacctcgggctcgggatcacggagccttgcacacgcgccg

SEQ ID NO: 8197 - DNA, 429 bp, Zea Mays
gtgacagcttttgcagaaggccaaggagcagcacatagaatgttcaagataattgaacgcaagccagatattgacatagatgataacacaggtatcatattggaggatgtcaagggtgatgttcaactgaaggacgtgtacttcagctatcccaccaggcctgaacatttgattttcgatggattctcgttgcaagtacaaagtggaacaacaatggccctggttggtgacagcggcagtgggaaatcgaccgtgatcagtttggtagaaaggttctatgacccacaggctggagaagtcttgattgacggggtcgacattagaggaatgaagcttggatggatgagaggaaaaattggtcttgtcaaccaagagccggtgctattctcaactacaatcagggaaaacattgcctatggaacagaaaag

SEQ ID NO: 8198 - DNA, 477 bp, Zea Mays
ccgaggaaggccgcctccgtgctgccgctctggacgcgtatgagcatgcccatgaggccctctgggcgcaggccactgtcgtcgtcaacgtgaaggcgctcatccctgtccttctcgatcaggcgacaaatacctacaccaagtggcgtggcatgttcctcactgtccttggcaaatatgccctgactcgtcacgtccttgaagatgaagcgttcccgtcgcgcccggcatgggttcaagccgattgctgcgtcctgacatggatctacagcaccgtttccggcgacctgcagcaatctctgatgatgcggcagggccccgctcgcggggcgtggtgctacctcgaggatgagttcctcgaccagagggagtctcgggcgcttctgctcgaaacaaaattccgcaacttccgccaagagtccctgagcatcaccgactactgccgccagctcgaatcgatggcggcttcccttgccg

SEQ ID NO: 8199 - DNA, 577 bp, Zea Mays
cggcaggtgtcatcaaacagttgaagcagcttacccatctggacctcaccgagtgctacatgttagagcacattggccgaggaatcacgtccctcacagagctgcaggtgttcaagggcttcgtgttcgcaaccgggactcgggggaaggaggcgtgccgaatacaagacctcagaaggctgaagaagctccagaagctcaccatttgcatcaccacggatgctaatgtaggcaagcgtgagatggcggatcttaagtacctcgctagccttcggaaactcacgattacatggagtgagataccaagcatactggagggtggcacgaagaaagcgagagagaagcgacgtggacttgttaagacgtggaccagctttcagttgccaccagacctcatgaaattggacatccggtgctaccccaaggaagagctagaactcgaatgcaacgagaagctcgagaggctctacttgagaggtggagacatgagaaggtgttccacgaaggaaccatcctccatcaagacactgcgtttgaggtatctcaggcactttgagatggggtggagtgatatccg

SEQ ID NO: 8200 - DNA, 312 bp, Zea Mays
ccgatacgttaccactaagagacaccgcatttgcatccatcaaaatatcatcactcatggcatcatcagggtttgcttgcgtaggcccggacaccggaacctacgcagcaaccgatcttcagtatcatacaaaacgaacactatcagtctaccccctattacactctctcaacctgcgccgaagcatctaccatcgtaggaccctcagtgacacctccttgaagcatggtttgctcttcggctccctcctccgccgaagcatccctccgggtcaccgagctttcaaggccagcgaggtcctccacatcttat

SEQ ID NO: 8201 - DNA, 707 bp, Zea Mays
gtctacgagtagcaggggacttaatggaggctaaaacaagaagcaaggatgcttgaactaacctgtaggcgtctggccacgacgaggtgttcacgggtgcagaaaactgatttgggggaagaaagaaattggagctctctagtggctaatcgaaggcagtagcagattctttggcttcgtgatgacttaacggagctaggggtgtgctcaatttatagtatcccagagcggtggctcccaatttggtcatggcgtgctggcggccggagagagggaagagcactggcgcaatagctgcgtatctttcactgtggcaggattaccagcgacgagccagcaatatagagcggcttactacaatgtggtgaagcttcaaggcacgtggcacccgatcggtaggcggccaactcgagtgagcttatttgagcaggccgtaaagcaagggggtatggcggccagcccctggcgtcatccacgacgaagatctttttaccctgaagcgttatccgggcaccagtgagcatgaatcacctcgccggcacgaatccaggcgcgggggtcaccggcggcaaggtgcactgcaccagggatcttcttcagtttactgtactatcagaacaccattcagatcatctgacagagaggtttgcagcgcccagatctccaacttttatgtgagaacttgctaatccacctataacaaattt

SEQ ID NO: 8202 - DNA, 721 bp, Zea Mays
cgacgggctctggtgaaattaggaggtgaggttggggctacacggtcgcaaagtgctactgattcaccgtgcactgctaatttgggaagaggtggaaaagatttcgcgaatttgggcttcaaccgagttcactagtgaggtggtgagtacctcgccgtgggtggcggagctatttaaaggcgcggtggtccgactaacgatccacggtcacggattacattgtttgtgcatggttaccacgtaaataataggcatagtgagggaggagcgaggcatcagtgacaccgcggcggaaatgaccgagccacggcgaccgctggtggaatatcttcggccacgctcggctaggttcgcgggatggtgccacgtctgaagttatctcctcgcgatagatcccttcaccaattcatccgaacacatctgattctacagtgccccagatctttgtctttgtttcagatattttcagtgctctggatcttcaatgttcttctgaaccgacccccttccaccctctctttctcttgattctttttaagaatagggtaagctccattaataaagattgttcactaaacaatagtcttcaaacttactataggatccctggtccaacactgaatggaatcaaagatatggtgccttcaatttggtcccattccactgtgaccattctcgttcttaattcagtttttagtgacacttcatggctctgacagag

SEQ ID NO: 8203 - DNA, 538 bp, Zea Mays
cactggcttaaggcgacctaggaacatccatttaatcgacacaaaccccactggaaactatctgtccacgatcagggcggaacccgtggtgtcaatcctgtgttcccaataatctacgctcggattggtcaaacggccactacgaggagcttcatgaatacacagagctgctaaaacaaagcttgaatcggacagggccttaccagagagggctggccacggtggagctgttcttcgcggtggcggcgacaaatttgggggaagtttgaaattccagagctcgggtgaacgattaagggtgggagcgggtgctaaggcttcacgatgacatagcgcagctgccccggccatcaatttatagagggcttcgacggtggcgctcaatttggccgggcagagctggcggccggaaacagggaaggatcatggcgcagtgggttcgtgtcctcagtcgtggcgagctcaccggcgacgatttgacggctgtaacgagtcacggcgacgcgacagaggtgttcggatacgtggcacaaggccg

SEQ ID NO: 8204 - DNA, 407 bp, Zea Mays
ctagatctcgagttgggggtaggaatcagggctctagtccgtgattgggtgttcctccggcgatgctccgccgggtgggaggtatgtgccgccgtcggaagcaccgtgggggggggggggaagacaaatcgtcggtcgcggattcacgaatggacagttaggattaagtccatcatacccgtttggtcaagtgtatctgtgcccttagatcttgatcggacgttccagtggttgggttgagcgctttaaaatctggtgtgttggtcatcaatcggacgggagccaacgcttaccggttgatgggcaggcatatctaatcctagccgtagatttaggatcgtgcgaccctggtcgaaacataccccttcggccatgaatttttgctaaagagaccccgccaaactttg

SEQ ID NO: 8205 - DNA, 427 bp, Zea Mays
gtttctttagtaaatatgtctcaattcgggcacaatgttgttgactgtgcgagcttcggactcctctcaaatgtcgtgccgttgttgcgcttggtgatgcccttctggctgctgatttatgagccaaggtaggtgtcaatggtggtggtggtggtaactgagcccaagctgcttgagaatgacttgccgaagcaactgatgttgtgggttgctggttgcctacatactcagggatgtatggcgaataacatgaggcagtatgcaagacctgcttcggctgattctatcgtgctttggcttcaactatctccttttgcttttggatcatgacttggcacatccttattgtgtgtcccttatcctccccacagaataagtagaacaatctcctggattgagtgttgaaccttcctccgaagcttcttcc

SEQ ID NO: 8206 - DNA, 657 bp, Zea Mays
cgggggttagatgggatgttagggaaccgctcgagtggactccacatctagccaaagaacttctctagttatcaatactgtgctcatcacattaactgcgctcatctcattaattatgactggcgctgagctgtggtatgcaagatgacggagggaagacaagaggattggttacgaaggctaggagttggtgtgggtagaggtggacatgcagagcaatgatgatgcttagattcccgtcgtcggcacgcttcaccaaaaatcttaaagaggcatggtggagatttatgtgaatggataatgatacacggaaaggcatttaccgagggataactatttcacaacaatcccttccgagagaagcaatatgtaaccttccctctccttggtctatgaaaggaggagggttcgcttgacaaaaaacggaccaaacccaagaaccaacaattgatacatagatcttttagcagagcaacccttagagacttgggatctttgcttctcttgccctcttgtaacccctactacaagcaatcaggtgtcggtagcacatgctaccaaagactggaagtagggacgttcatcctgaactagtataaatcttgcacccactgagcacaccatttggatccaaaatgcgcatacacaaatttactc

SEQ ID NO: 8207 - DNA, 426 bp, Zea Mays
aacccagtgttcacctagtgtgagtctatgtgtactcgtggggccaggggctgcctggttgccgcgtatttatcatgggggccgccccatcattccggctacgctgacccgtggcttccgtagcctggggctcggtgtagttcgtcgtgtagtggcctgcggaaggtctccgcgctctggcctagtccgataggccataagtgcactgtagtctgaggatgtgtgggtcattaatgtgccgtagtccgaggggtccgtaggttatgagtgggaagcggaccggcacccatgttgtggctctgggctaggcgtagttaatgcagccaatcatttatagcgggccagccggggccggacgcgggatccattcgagtggttcccttccgacacgcccttcctcccttgtcaggctctgtcacgcccgac

SEQ ID NO: 8208 - DNA, 861 bp, Zea Mays
gaataatattacaaaattttagaaagtggaatggctcaatttggaccaagtatggattttctatgatttttacaagttctagctctaatttatatattaaaactccatttaaaatttaaattctctggtttaacactattctggattgggcctcaatttctgggaagtgaaggggtctcggtgaaaaagagtccaagacacagggaacaactggttggactgcgggtttatttatacaaaggacgaggactcttctgtaaaacgcgcacagcgaaagggtacgctacaatctcagtcgttggatgcaacactgagggccacgattagatcaaaccagacaactcacctgagccactgcatcaataactgacgctttggattttaaaatgcctagatcgatctgcaagcgtccgatcatgatcaaacgatccggaacggatcaggccgaaccggtgcatctcccttctaatctcaaccatccatcaagatctgacggcgcacgcgattctccccaatccccaccgttagacggcggcgccgccaacggccagtggcggaacatcgccggtgatcaacaattcggcgccctaggtcactatctcaaagtccgagagtttctacgcgatacagaattgatggcgagcacgctggagtaggtcttaccggttgtctcggcgtggagagcatccggccacggcgaaggcggatctgcggctaagcgcaggtcgacggcgagaaattgcagcgccgcagagaactcccacacacttcctccactacgaaacgccttcgcttgatcacgtgaagccccgatcttgccttgagggctgccgacggctgtgaatcgcggattcgacccct

SEQ ID NO: 8209 - DNA, 475 bp, Zea Mays
ttcaccgggacctgttcgttctctgtatgctagcttgcttggattcggacaatcggtaccgtccctggaaggggtagcttggatttggatgaggactctgttgcttcgtcgatcggggattgagtgttcgatttcgagtccgcttgcttggtctggtccgccggtgttccagggagttcggcgtgtatgtgtgtgttggtcttggactgacaagtctgaactgtatatttttttcctcctctttgcggatacttcacgtttttattctgtgttgcgtagagcgtacgtgagtggtcttggtttgtttgattttgcccttgagcaggcggactcagttgctcaagtcttgattgcccccatctaatcaccggagcacagtggctttgcttgtatctgcagccagttcgtctggaaaggtttttttatctgtttttttaaggttgcttttgaatagtgatcgtatattcgcgctttg

SEQ ID NO: 8210 - DNA, 488 bp, Zea Mays
gttcagggccagagcagaccagcatcaaccagcgcctccagatctaagttggtgatggaagacatgggccatgggtcatggggaggaaggacggtgatcttttctgccatcgaaacaaaccaaggggcgagaagaagacgaagctctttgggcagaagatggaaacgatgtttgaaggcaaaggattaaaactgcaaaggtaacgatctgaagccctccctcttggtcaactttattggatggaagaagccaccaaggtgtgattcgataacggctggacgacagccgtttcgaatcccgcgcgcacgcgtgccacgaacggtcggttggcaggcaggacgtcctatcgcattaaatgaccgtgtcccctccaaggtaaaacacgccatgcaccgttccgcatcccgcctcaaaaggtacgccatctccccttgactaccttaccttttgtcctctcgacaaccgaactggtgaaagggaaatatgcc

SEQ ID NO: 8211 - DNA, 497 bp, Zea Mays
agcacattcccttcccacagctcatcctcaggcgcgtcccacttctcacactcggccgacctagtccctcacccgcacatttcctcgcatccacaccgcactcgaatgtcgctgacagcagggaccccttgttaggtgttctcttacctcgcgtcagagatgggccaacagcaaaccgaacaccgagattctcatgtcgttcgttctttcctcagccagcaccttgggagactatatatacacactacgctgcatccccttgacccataagcctcgtagtagatgagccgcgagcccattgaagcgagcgatgagagaacagagaggtagggagagccgtcagcatcaccctgtgtacgccaccgttcagaggctacaaggcaatcgaaggagttcgcgagggcgcggggatcgcgtgcgagaaaattgacggtcgcaaagttccactaatctgaaccacttgtgtctaatcttacaacacacagtgtcacacccgg

SEQ ID NO: 8212 - DNA, 449 bp, Zea Mays
ctcggtatcaccggccagtgggggtcgccggcgagacttgaccgccagagcggcgccaccgtcggtagcgattgggttggggaagatggtctcgcgccgtcagatggaaattggacggtggcgattagagcagaccttacctattcgcgggagtcatccggtccgtccatctggtctcgggcggatgctaatcggtgtgcgcgtgtattagatctggccctgaattttagatccgacggtgacatgtgtggtcgtgggtgttgtccgatccgatccaatcagcgtcgtccgtttctaatcggatggccgtgcttggccgataccccttcgacctcgtgacatttacaaaataaaccccctagtttccagtattcaacccgccgtccatgcggatgttgttctgtgtctcggtaacacttgcaccgagacccctgcacttttcatatttt

SEQ ID NO: 8213 - DNA, 747 bp, Zea Mays
cgcatcatcacgaatggcacgaggaagaggcggatgtggaggaggggtatgggagtggcacagcgagcagtgagatgcgagagtggcggtccgatctccttccatgctagcgatgtgagccagaggtgtagtcgcggcacgagaaggcgagatggccacgatacttatatgcaggggaaggaacacggaggttgcgcgcttcgcggagttcagttctggggtctgcggcgcggcgggagtcagctaatcaccatgcggattccctggcagcgttagttcggtcagcggggatttcgcacggcaggtacacgggcagtggattcactcgccgtcgtagtcgagaagaaggagacagggtcgcttgatgcctagaaactgggccccgcaaatcagtgagcttgggaggagcgagcgcaggagaggctggcgcatggggccctgctgtcagcgccagcggtgtgcgtgagatcgtggttctgtggctgcgcggttgaatagaacttgggatagggatgggacttaccaacgggccccacatagcagaagcacaacagaagtgtggcgcgtccgtggtcaaggctatcgagcgggccccgcagttcagtgacagagcgcgggcgcagagagaaagggagaatgggtcgagcgcgcgctgataaaaatgggccgcggggcaggtgaatcagcccaaaaccaggtctgccttatctttttctttttctttatttccttttatgtttttctagt

SEQ ID NO: 8214 - DNA, 413 bp, Zea Mays
tgcaaacggtggcctaaaccagatgagaatgggagtacgtatacacttgtgctagtgtcgtggcaacgtctttcagctaactgtcattaattccttggcaactattcttacagataagtgatatggttgcagtggcgaagatcatgaacgcatcgctggtgatccctactctggatcatcagtcattctggactgacccaaggtcagtgactctatatctagctgtgctgaaccagcctgaagaagaaactgcgagcagactgacgactagtgtttttttttggtatgtagcgatttcaaagatatattcgacgtcgatcacttcaaggagtcgttgaaggaagacattgtgatcgtggattccctcccaccacattacagaagggtgaaaccgtacgtgagagcgcccacct

SEQ ID NO: 8215 - DNA, 445 bp, Zea Mays
cacgaaaaatcaaagtcttttccaaaggacttcccgcaaaagtcgcctacgggtacgcaaaatcgaagtctcttccaaatgacttcgtgcagaagtctcctacgggagcgacctgatcaacgaaagcatgcagcttcatcacacaaaattatgtgatacacacagcgagggcatcacatataacattggctcaaccttcaggatgatacccatctccctgtagttgaacaacattatcctcagttcctcaccctcgaacagatttcgcagctccccctcacctacactcaccccaatcggcgaggacaacaattctcgcttcccagtcccatccacgcgaagacgacctctctccacctcgccatgataacgcctacaacttcgcgacaattcactcactctccgcttcgccaccgccctccgccgcctatacccagtactcgcg

SEQ ID NO: 8216 - DNA, 1103 bp, Zea Mays
cagccatcaagaggagtgggagtgggaggagggacggggtcttaatgtaactcgcagtcacgtacggcttagccggcgcgcgcgtcgtggaggcgtgccacttggtgggtgtgaagaacaaggacgactcgttctatgtggtggcagctccggggtattttaatggcgggtttggcgtctgctggaggggttttatttcggagatcgaccgcggcggcattacctgtcgcgccgtcgctcgtcatttgtaggcgataaacaaatggattgatgatacgaacgaagcagagcgaggtgattggatgaaatggtcgcgttctcgctttcgttgggcacacttgcgtcagtaggagcagtttcggttcttctgacagttgctgatggtatatttcgttttcttttcagaatgttcggtttgcttctgtcagtcagctagcatgcttggatatagacttttgacaaacaactgcacacagcatgcttgaatagactttacaaacaactgccactcggtttctcagattgtttaaagaaggagacagacctatacatatacttttacagcatgagttaaaacgaacatgattacctcatttctgttcactcactctctttctctctggcttagtaatgcatgtagaacaaattatggcacaagtaaaattcagttacaccactgcagcatatacacctgtaacaatcaatactgatgttctggttatgagccgacaaaaataacattcggagtcaagagatacttcgggttgcccgcagccattgcctccgatccgtccgacgcatccgctggaccatgtacacagaaagtgacatcaagattgacgaaatgttattccctttcacgaaaccttccgtataggacgccggaacgtttcctaataaatcgaagcgctgcctttgtcacattaaccgatctcctgtcagcataaacagatgaaatatggtcgctttccgcacagatgggtcctcgagtatttgatggatccacacaaagccattgctagcgtcatcagcttcgatgctcagcgcgggtgacaaacaactttcacagtgaaacagtcccgttgttacaattacaaagtgaa

SEQ ID NO: 8217 - DNA, 355 bp, Zea Mays
cagtagagtaccatagcactgcatagttgacatgatttcagatatgcatgatggtcccgagaatgttacaattacgacacaagacttaaaaaacatgtaagaccttgtgcgattgtttattgtttttattaatacttgttattatcagtaaggtcatgttttaaaattggcactatttttttgtaaaattgtacaggaaagtagcaaggagacgggagaactatgctaacgatgtagctaagctgttggcattttttacgacgtgcaagaagcaaaatccacagttcttttgtgactttcagctggatggtgaagggaagatagtatattttagtcacatgctagtatgcaggcg

SEQ ID NO: 8218 - DNA, 544 bp, Zea Mays
cgagatttgggtaagcctgttatgaagtccatgctgatggtctgccaggagtggtccggcacaggtagtggaactagaagcactggatacttggcacggtcaggttttgcactttgacagatatggcacgattgaacaaaggcctttatctactctttcatccctggccagctgaagatggatttggctcgcctgtaggttacgggaaaaccagagtggcccctagagcactatcatgtagtgcctgcataaccttcgtttgaagtgattcgttatgtcccaacaacactcgccccttatgtctgatcaccccatcagtcaactcatacggaggtaactcaccccctgttgctagcactccaagtatttctgggcttgggcatcattctcataaccctgcataacctcttccaaccacttaggcaccaccgacgagctagccaactgatttaacgtggctgtatcttgatctatgcctggtcgacgctacaatgcatcggccacccgattttctgccccctttttgtagcagatccggtattgc

SEQ ID NO: 8219 - DNA, 795 bp, Zea Mays
cacgggatacgatcccatacctggaaattccggtcggagtccgagaggccgcacgggatacgttcctggaagagataccaacattgccaatataaaggcacgtgtatcagatcattagagatcaatagtcgccatatcaatgtctcggttcgtctttatcctacgtcttaccgtagcaccgagcgcgaggacaatgactccgcgcgtccaggagctgcttggcgacgagcatcatccacgaaatatggttgacaacatggctctgatcattatagaccagacgtactctgccttgctcgagatctacgggtccgagggatcgccttccggcgacggggacatccagatccaggtcagccagcccgtggaccctgccgaccctgagtcgctgatgctcagcgtcaacgccagccccacgcactgctgcattagcctgaccgacaccatctacgacggcggcggccaagatcaaacgaatgccacctcggcggagcagagcagcaacttgcagtaccgcctcactcgctcgaccatcacctcctcgccgggcacgcttcacctggcacgagtcgacggcgggagacggggggactactgggcatgcgcggacgttcggccggacgtcgctaacaagggcatcctcggggtgctggagacgatcaatgcacgcctcgacgcggcgatccagttggaggccacactgctcactatggcgaaggaaagtggctgctggagccctaaggtcagagagatcgccgaggtgcacgtggcgttagtgaagatgagagcggcgac

SEQ ID NO: 8220 - DNA, 291 bp, Zea Mays
ctgctgaaagagaggggtctgactgctgaagctgtggtcactgattttgttttcaagaatattcagccattgaaagacagggcctacccagcttatctgtatcgagggctagccgactcaactcgggttactaacagaagaattccttctgcagacttggtgagtcgactagagatgatccttaggggtaaagtgtcaaatgttggtgctccagtggcgtactcggcctggaacctgcctccttccaaagccttcaccttttttgtgtcgaatccacctgccactgatggc

SEQ ID NO: 8221 - DNA, 394 bp, Zea Mays
aaaaaataagaaagaaaaacagaaaacaaaagaagaagacacgcatacgcctaggccgaaatccctctctctcgtcccaaatcccctccaccttcccccagcctagctggtcctctacacccgcgctctcctcgctcgctgtcttgcaagacccgctaccagcctcgcgcgcctcaacctttctcatttctctagaggatcgacaggcgaggccacattgccatcctctcacgcccccattctcggatcgctgaccggtgagacccgcaggccaaggagtcaccgcgcgctcggggattcagtggctggtacgtggggccggtactccagatttgtcctcttctctacacaccatagcaatctcaacagacctcgtaacaaacgcagccaccac

SEQ ID NO: 8222 - DNA, 632 bp, Zea Mays
ggagaatgtaacctattggaaatcctgtgactactatgactttgtggtcgtcaaagtagtgacggagcatgtgagcggttagaagtaccacgtatagcagtttctgaacttggggatactttacctttgagggcccgagaacttcgttgatgaagtaaaccggatgctgcactgggtatgtatgtccttcctccacccgctcgactactaacgcggtgcttaccatgtgagtcgtgcaggagatgtataacaatagatcttctgctggctgattcggcgtggctcggcgtggtggtttgagcactggtggtgtagtcaggaactttttcagtgcctctagagcttcttgtgcctctgtgttccattgaaatttgtccaccttttttagcaatttgtagaacggcatgcctttctcgcctagccttgatatgaacctgctcagggctgccatgcatccagtaagcctctgtaccttgtttgtgaccgcggcgcttccattctcatgatggcctcgattttttctaggttggcttcaattcctcggtggctgacaatgaatcccagtaacttccctgccggtactccgaagacacacttttctggattgagcttccaccggtattgcctcaagc

SEQ ID NO: 8223 - DNA, 312 bp, Zea Mays
gcaatactgattttgtggcggcctcaaccgtagtgcctgccgatgataatttatttggctctggatctgagtgttttgagtctgatggtgagtctgggagtttgttttcctggacggaggagtcctcggatgaaggcttggattattttgctgttagatgtggccgcagcggagtcttcgccgcgtgtggagggtgccggggctgctgatcttcctagtgcgagtactgagtacaggcggcgaagggtggtgtcaaaacacagtgtgggtgagttttcgcgaagtggtaggcgccgtcgtatggggatggag

SEQ ID NO: 8224 - DNA, 719 bp, Zea Mays
gaagttgaagccgccgccggtgaaactcaccaccgcgtgttgcctgccctcggtattgggccaggaagatcaccttcacctgggaaagccgtcagtgccctcgatttgagtcgaacaccgccaagactcgtgcaattgctcgccggacttcggagtccgccgtgcgccgtggggagctaggttcgcctcttcgattcacggtgagtagagttctacgcaacatcctattgttaccgcttcttgctgccgcgtccggattagagtttaggggcggaaatcgccgtaacgcgtgctccggcgatggcgccgccgtccctggtcggggcaccgccggtgtttgagccgtggctggggcggagtggatggaccgtcggatcggttctggacggcggagattagaacctggaatacctcttcgtttgattaaatcgtagccacccagatccgatcggacgaatctgacagactcgggttgtaatcaaagcaacgccgtaggatcttgatccggtggacgaagttgcgtaccgcttcgcggacggcgagatttaatcctacgcactagaatcagatcggacgaccaaaaaccttagatacctcttcgcggatccgttttgcacaagagtccctctgtttattgaaaaaaacaacccgccatcctcggcgactgttgactgggtcttaggaattttacactgcaacccctgatctctctggaaaat

SEQ ID NO: 8225 - DNA, 355 bp, Zea Mays
gtgatgtgcagctcaatgacaaacctaccagtttcactaagcactctgaaatgcaacagtacttctgtatatctctttttaagtatagtctgtgtacaaggacagaacacatatcaaagatactaccagattaaaatacaggatcaaaggttccactcacccaaatcagttcattgacaaagaaattaactacgtcagttgtttctgtccatttgcctacacaaagtctaaacacgcaaaaacaggatgagagaacgaatcagcactgcaatggactaagccaacataagttcacgttgagtgatcaatgaagcgtcatctcctttgtgatcagactatgtacattcgctaatct

SEQ ID NO: 8226 - DNA, 471 bp, Zea Mays
catgggcctaggccgacggttgccctgttgctaccagtgggaggtgaggctggaggtttgtgtggtgggggctgccataggagtggtggtcgggcccccacggtgatggcagcgtggtcctcttgtggcggcgtcctcgatagctcccgatgttgcggttttggtcggccccctcgatcgactaaaggatggatcttgagcctctctagctagatcaatctctcctcctgttcggccggtggatgactggatctatgcgttggacgtacggtaggaggtcccatggcaaaagccatgcccgcctgcgggcgcagctcctaccttattgagggtgtcattcacggaatctcccgccctttctgtggatgtcctcacctaggccgtctagggtttcgccgtgtggatttcctactggggtggtgcgtcggtggtcgatagaaggtggcaatgcgcggtgtcatcggtgatggc

SEQ ID NO: 8227 - DNA, 695 bp, Zea Mays
gcaagaagctgtacatcatgtacggcgggagctgggagctcacctcccacaggaacgtcaagtccctgcgccgcgaggtcctattggcaactccaggggtcccgaaggctactccacatcaacgatggaggagcaccaccatcttctttggggcatccgactgcctcgacaacatggcaggggccggtgtgttaccactcatcactgcccctgtcatcgccaatatgcggctgcaccatgtgttgattgacggcggggcaggcctcaacgtcatcagccatgctgcattcaaacagttgcagatcctagggtcccgtctgggaccctctcgcccattctccagagtgggcccacagccggtgtatccccttggaagcatcgcactcccggttacattcaggatcgaggagaacttccgcacggagaacgtcgtgttcgatgttgcggaggttaacctccccttcaacgccatcatcggtaggccggccctgtatcggttcatggccattgcccattacgggtatttggtcctcaagatgccatctccaaccggggtcctcaccgtgcggggcgaccgcaccgccgcgcttgcagccgtagagaagctgcaggccctggtggtagagaccgcttgcccggacgacggaggagggaacccctcaacctccggtaccaaggcgctccccacggtgcca

SEQ ID NO: 8228 - DNA, 340 bp, Zea Mays
cagggacaatatgtatctggattcaagcagtgataagagtccactatatcaagagtctgccgatagcagtttagcgacacaccttttgatgatggcagtggtggtggtggtgagttcgagacggcgtctccgatatatttcacatgtaccattaatttaagttctcaataaattagtggttgatatctaaccatattttcataactatgtgggggagtcccggttcgagtacactacaaacaagacaaagatcactgcgcgcctaaggagcataccaggcctacaggaagcctattggacccctcgattctggtagtgacagacaagatttatcttcgcc

SEQ ID NO: 8229 - DNA, 369 bp, Zea Mays
gcatagctagttgaaaatagattagtgtagaacattgatgtcgttgtttgtatcgggcatgccaagatcggtgtagaacattgatgtcgatgtttgtaccggccatgccaaagaaagcataccaaatccataagtcataggtagccataacttcgagtatcaaggtagggcgtgaattccaaccacaaaactaaccctaccactatgtaggacaaatctgtcattcacagtgcatgcaattaacggaaccgagcatgcctggaaacccccttgcctcattcgtatgcaagatgcgatagatatcatttttgttgggtgtcctaaggtaccatgcactaagcacattaatgagggcgcgacagaatctaa

SEQ ID NO: 8230 - DNA, 704 bp, Zea Mays
gttttggtgtcactaaagtacatcaaagatgatatcttatggtcatttctcatgtcttttgaggtttctacatatttgggcttcactttcacccatgagccctaagttagggctaagcactctgtcctagggttaatcacatatcaagtcacatcagtacaacttgtttgaaatttttacctagtgaatgcattctaggtttaacaaacacatgatatgcaaatgctcataatgttatgctcaagttttagtaacagtaacacctgaggtgttacattatcggtggtgtgcactagaagaaaatgtgccactttcttcaatcggttcactatgacccagtttgaatcacgatgtcgagaggtgttgggcagacccacaatgaaatccatgctgatgtcatcccatttccatgaaggtattgataggggttgcaaggcaccagctgattttaagtgccttgcctttatcctctgacacgtgtcacattccgctacatattgggctatctcccttttcatcctggtccaccaatacaggggcttcagatcatggtacatcttggtgcttcccgggtgcatggagaatttggagagatgagcctcatccaagattttcttcttgaggtccctatttttaggaaccaccaatctgtcttcaaaccatagtatccccttgctgtgttagcgaaagcacttatacttccc

SEQ ID NO: 8231 - DNA, 347 bp, Zea Mays
attgcacagagacaaactgctggcgattggcgtccttatcgccaatcatagtcagggttatggaggaaaagacagcgaagaaggcggcaccggacaaatctgaagttcatcccttgaacgtgatcaaggtcacgatggaggaccttgcagaggcagaccggaaggagattgaagaagaaatcgcacgagagatggaggagaaatggaacgagagattggcttgctttcgaaaaaccaagaatggtgtgatcaaacagattggtggggcaagcacgtccagcaagaaggtaagttcatctgtcacttgtgaagaactagctcacatgattgataccgctgtagctagc

SEQ ID NO: 8232 - DNA, 572 bp, Zea Mays
tggcgcgtgcgcactcgcacacgtcaccaggtttctctgccacgacgcccacccacgcacccaactctcttcttatagccccgccagtgccccgcactcacccctcacctcatttcacacaccctcgcattctctcgtgctctgctctcgccgccagacaccgccagagacccgcgctcacattcccgaccgttcagctcaccggagactacgccaagcatccccgagctccaccccgaggtgagacatccgtcaccgtgcccaatttcccttattgcgccctgtgttcgtccaattttgctttcgccggtgctcgaccgtggcggtccaccgtgctcgcgcggtggccgattgatttagtccggtttagttcaccggagtagttccctgtgtcgcccctttctctgctgaagctagcccaggccttaacgagccttaagtcccctccccgtggccggaatcgctcaccgaagtttcttcggcccgcccgaggccacctcaccgccgctctcccctctctgcccgtggattcatggtcctttccccgccattgagttcgccgtggcgccctc

SEQ ID NO: 8233 - DNA, 350 bp, Zea Mays
gcacaatcggtgcctaggccccggtgtggagcaagtagttagtaagtagtacatgaatggatgaggaaataacccgaaagggtaataaggaaaagcacggctacgaggagagggcagaagagcatatggatatgggcagagcagaggagggcagagcgagacaggggtagcccggcaggggcagccacgggcaatgcgtgtcgtcagcatgcagaggggccagtcgtggttgcagtttccatgcatgctgaggtcagcattgaatgcctcgcgtctgccgtatggggctctgacccaggcgggcagctagctgtcaaaggactgacgagtacgaacacacagctcccaac

SEQ ID NO: 8234 - DNA, 739 bp, Zea Mays
tagaactaaacatattgaagttgattttcactttgttagggaacgagtaaacaacaaattacttcaaattcattttattccttctgaagatcaagtggctgatggtttcaccaaagccttgagtgtacgaaagttggagaatttcaagaaccatctcaacttaggaaagttgtgattgagggggagtattgaatgaatctgttcgcatgtatccagaaggttctttactatagatagaatatgctataaatcttctgtaatcaggaaagtcaagaaccttccctgcacatgatttgtctcctttattgtaagccacgccaggggctcttcctggctatatataacacgtagacggcacgaggtcaagtgcacgtttccagccctctgattgttttccacattgtgaatccatgataatttacatgacaaagtatataataaggggaaatcctaagaatataaaatatgggtagaatcctagtaagaaaacaaaacagtattataaagaataagatgaacctatttactgtagtgtctttttatttcttcccaagtttggacaacaaatttttacctcgattctgagatttgtttatgtaatacatagcaacagaagttcaccaataatggaataggaatgtattagatgtttaccaacctcttggggttcaactaatactgaaatgtacatttctatgctccatcctgcaacatctatttactgatgaaatctgctgcg

SEQ ID NO: 8235 - DNA, 385 bp, Zea Mays
tttgcatgtgacttagaaattcttgctcttgcaaaggaatggaataaatacttgggaatcttgggtaccattgaagggggtggttgggattgtatttgtagccaccaaccgcctcctacccattgccactttcctaccacgcgtggacggtctgtgcctctagttcgaacggtctgcctctgcaagatcaatgactgaattgcaacggtcaattgtaattgctatatcaatggctatactcgcattaaatgtgtcgttagatgtcagataaagtatgatgcggacggtctagtcgtgcctccagatggtccacgtagacactaaaattcattttaccaaacttggcactttcaggttggtctgtttttgtacaggcagacgattc

SEQ ID NO: 8236 - DNA, 557 bp, Zea Mays
ccacggacgacgggttgatttgtgagaaggacaggggctctttaataaaagtgccagcgcgaaagggtacggttagatctcggccgctagatctgatctgagcggcccagattagatcgggattttaagtgaaccggtacgcatactggaccgtcagattgaagatcaatggcccaggttttaaatactgagatcgatccgcactcgtcggatcaagatcggacgccccacaacgattcggctgaagcgatacggggattctaatcctagccgttcatgaagatccaacggtggcaaggttccccccgatcaacggtcaggatgagccatggccgagacgccatcctacatcaaatcgcgatcgcacaatcacgatccgacggctgttcacatcgacttacctcaacccttcattgagggtccgatggccctcacccttcttcttcacgcaaggcatcaggcaactgcgttgtggctgttcccagcccacgacggtgtccgccagccaggagcccgagcagccccggtgatctccaccctgcccgatccgcagccgc

SEQ ID NO: 8237 - DNA, 604 bp, Zea Mays
gaagaatggcctgttgggaagctcgctctgcacagccaggtgcagtgggaaggccatctctgccgctccgatagtcgtaagtcttctcttaggcatgcacctacaccttctcctccgtttgcgctcggttttgtttagggggaagcgtcatactgctggtagttgctcgtcggagcagtgcctccgccgtggacccgcctttggccatgaacgtgtagtctgcaagcagtaatccatcgataggtggtctctatcaaattctgggtggttcacccattatttccctctggaatccggtcaacgtcggactccaggcgccggattgttgtgcgctggtggggtgcgccgccgcaggcctctgtgccgtggaacctgagcagcggattaggggtggcgcgctgatgtcgttggatctacgtaggatggacaggattagatcatggggtgatggcatattgggcgtatatcctagtgtatatggttgtgattagatctcaagtcaccccttcgtcattttaaatcggaaccattgatcggtaattgtacggtttgggatgggtagtggcctggtgtgatcctcggccgtccgatgtgattgtgcgcg

SEQ ID NO: 8238 - DNA, 525 bp, Zea Mays
ctaccatacctatctaagggttgggccttggggatacatatttatagccttaggggctgcactacactctacacaaatgtgttgtcctctagtctgtcttgttgtcctctagatgctaaaggaggaaagtcaaaagactcctgctgtcctctagatgctaaaggaggacagccaaaaagactgttgtccagatgctatccttgagcagtcaaaagactgttgtcttccataaggctgaaaagagatgctattgtccctgcaacatgttgtccctgtagcaaagactaagatgctccttggactaagatgccctgcagcaaaaggactgagatgttgctgtctctgcagtcctccacaagaccacatgacttattctgtcatagcagttgacgcagaattcttcggctttgatcgtgaagtccacgttccatgccacgccctggcacgacacgcgttcctcgttagctaccatcacccaaagtgtggggcggggattagtggctaatttgaggcgatgcatgatgt

SEQ ID NO: 8239 - DNA, 396 bp, Zea Mays
tgggaatacgaagctatcaaacacagtttaccagcagatttcattttgaatctcattggacaaaattgcctgattttattacaacagtggatgctgcttggaattctgttccttcctccccttgcccttttgaaacccttcccaagaagtttagagccaccgtcaggcgtctccaaagctggtctcaaaaaagggcgggccatatctcctctcagcttgggatggcacgggaaattattcacaagctgcagtctgctcaagatatcagacccttgtcagtgctagaaaattggctgttgaagcagcttgatggtcatgttgtggccctttcaaccttgcaacgttctatggctcggagccgctctaggattacctggttggctgagggggatgcta

SEQ ID NO: 8240 - DNA, 785 bp, Zea Mays
ccagttctgactctaccagatatacaccaggattttgtcatcttctgtgatgcttccaggcaaggcttagggtgtgtcttaatgcaaaatgagaaagtcattgcctatgcatcccgcttactcaagccgcacgagcagaactaccctacccacgatctggaattggcagccatagtgcacgccctaaaaatatggaggcattatctgatcgggaacaaatgccacatcttcactgatcacaagagtctaaagtacatcttcacgcaaccggacctcaacctccgtcaaagaaggtggctcgaattgatcaaggattatgacctcgaaatccactaccatcccggaaaggccaacatggtagcagacgccctcagccgaaaacctttcggggttaaaggaacaaactttctggaagattggaagaaagaatcagctcagctgaatgcatgtctgggagacaacgatggcctggaagtcaagccaaatctagaagatctcatatgcaaggctcaacgcctggacgcagagacagccaggcttatgggaagagcacgcaaggagcaacttccggaccttaggacagacgagcaaggagtcctctggttcaagaaccgcctgtgtgtgccagtgggagaggcacgagaaaccctgctcgatgaagcccacaactcagcttactctatccacccagggaccaccaagatgtacctagacctcaaggtcagatactggtggaaagggatgaagaaggaaatagcacattatgtggcccgatgtgacacctg

SEQ ID NO: 8241 - DNA, 982 bp, Zea Mays
catggaaacactttgatgcctttcaccgtgagaaagccgaagaggctcttaatgtacgtgttgcgttggctacagatgggttcaatccctatggaatgagtgttgccccgtacacatgttggcccgtgtttgttatcccaatcaatctccccccggtgtgtgctttcaaaggcagaacatattcgtgtcattgataattcacggacactcgggaataaaatgagcgtgtacatggagcctttgattgatgaattggtacgtgcttaggaggaaggggtatggacgtatgaccgagctacaaagacaaactttgaaatgcatgcttggtaccagtactccatgcatgacttaccggtgtatgggctattctgtgcctagtgtgttcacggtaagttcccatgcctagtttgcaaggaagctcttagattcatttggttgaaaaagggtggcaaatatttgtcgttcgataaacatcgataatttctccctcctgaccgcccattccgcctagacatcaagaactttacgaaaggtgtcgtagtgatagaccgcccacctgcaatgatgaatggtgccgaaattcgacaacaaatagatgggctcgtggccaatctagaaggtgttttgtgggatatggtgagcagcatatgtggacacataagttgggcttgactcggctcccctattatgacgacctgctccttcaatgcaacattgacgtgatgcacactgaaaagaatgttgccgagacactttgggcaacagttatggacattcctgataagtcaaaggataacataaagacaagagtggatctagcagcgttatgtgatagaccaaaccaagagatgaagcagcctagtggtggaaagacatggagaaggcctaaggacgatttcgtcctaagcagggctcagaggatggaagtacttcaatggatcaagatgttgatgttccttgatgggtatgcagctaacctgag

SEQ ID NO: 8242 - DNA, 523 bp, Zea Mays
cggcggccagggatccatggcagggcatcccggtgaggtcaccaacccgaggcgcctgcccctaaattcaactcagcactctcgacgcaaggtaataatgatcgccgaccactgggatgaaggcactggcagtgctgcacacgagcacattggacccgcggtgaagctccttctccggcgaggaatttcccatctcaggccgccgatcaccgcctgatgatgccacgcgcaccttccctgctcactagcaaaccctatacttccacatccagatccgtgccacggcgttctcatgtttagccatggcggcagacatgcctgagttctctctgttcttcccctcggcgccctctgtgctttagctcgccaatggcccagagaagagggattcggccgggttttatgcccctcccgcaggcggaatccaccccccgaggaacacggcagaggggatgaggctccaggcgaatttttcaccgcactgttgaagccagcgccgagaagacggcgcggttatcacaag

SEQ ID NO: 8243 - DNA, 738 bp, Zea Mays
gaacttaggactcagttctaagcatgatcttgtgactttttgtgggtgcactatgtagcaaagttgtagctcgtttattaggctataactttgatacagagagttgaaccggttgttacatgaaatcaggagaaaatcgagcctaaagttggtctgtcaggtcaactgagtagactgcgccatggtacagtaacctgaacatgatcccaggttcacccccctcgccgccgatgaatccacgccgtgatcgtcgctgccgttacgattcgcgctcactagtgaccagatagcgcttcggggcaaaagatcttcgcctggggataactccggtagctggccgtcgtacccccatgccttgcggccagcgcagatcagttcaccggcgttggctgctagtcgatcgcctgccacgtgctacagcgttagaccacgtcgctgtgaattgcgtctcgcatgcacgctgatcgccggtgtactgccacggtgaaagccactaacccgagcaccagtaacctcctattcctccgaccgccgcgcgtcttcgtccaaatcctcggccaccgcttagcgatcctataaattgatggtccggtctgttgcgtcatgttatcatgaagccaacgcacccacgcttgcctccaattgtccaccagagaccgcgaattgctcacttcccccaaactgagtttccgccaccgtgaaagaatcctcaccgcggcagctcgattcaggtctgct

SEQ ID NO: 8244 - DNA, 511 bp, Zea Mays
ttgtatacctgcagaggacgtcgggttatttttagaaaactgcagggtctcttctgcaaaacggcctagacgaagcggtatgcacatatcatattcatagccatccgatccaaaaccgacgctccagaataaaacgtcaatatttcgaatcagtatgcaacacagagcctcggatctagatccaatggtcaggctttaaaacgttgcaattgaatccgtacgcccgattcgaagcagatggtcccgatcgaatcgacgcggtacacccagtggatcggattaatgccgtccgatttcaaatctacggatgagacgccatcacccctgtggcctaatctccgtcgttcaccacccgatcgacggctagcgattgttcttctacccccgagccctaggtctgacggcgcgacgaccctccatggtggcgccatgggcggcgagccctgagcgagtgctggggagacctaatcttaacgtgatcatgcacaaaacaaagagggaagagtggcgg

SEQ ID NO: 8245 - DNA, 988 bp, Zea Mays
ctgggaggctgatggcaaaattctacctgaagtttgatacaatgaagcttatagtcaaagcttctggctattgcagtttggaagatttattgcatgtcatctgtcactctgcagagataacttgtaggtgcatgtccagattttgaattgattattaagtgtcaagcattttattttattttatttttatgttttggtgtatcaagggatccaactacgccgaaatgataagaagattctaaatgacataaacgctgacaaagatggtagacttctatttcatattgtcatgaagaatggaaaaaggaagaagcgtgttcagacaagagaagagaaaatattcttgctagcaaatgattgcttaactggagactctctaatccatgatttatccctcaaccaggttgtttgcttgtttaggttcagacaccccttgattttctcccctactatgttgacttaagtggactcccatgcaggaaacaaatgcaatatgctcaaatggatgtaggattgccaaatgcatgcgagaatattttatatacaaaaagaattacagatctgccattaattctatgatccttgcaaatagtctgcatcaaaagctttgggagagcagtccatttctgctgaaacaactgcctgggattggaattgtaacagcaaaggttattaattttgtgattgctatataaacacttttgtatctgcagtcagcataattaattcttgagttgatcacttgccacctcaggctctgaagactgctggagtttatagctttgagaccttggcaactgctgatgcaagaaagatagaattggccacagggcgcaattatccatttgggaatcatatcaaagaatcaatgtcatcattaccacccaaaattgacatacacatagaggaaactggaaacagacttgggaaatcgaccattactgtaacactaactcgtctatcacaggcagttaaatccagtaaacgc

SEQ ID NO: 8246 - DNA, 370 bp, Zea Mays
gatttggagagcggtttacgggtaaagaaggggggtcgtgcccacgtcttaaggattggagagtccacgcagcgagagagaggaaagcggaacggtggttaaatccacccgccgaggtgaacgcaaggtcggggcgctcgcggtattctcgggaggttgaagacgagttccacgcgggacaacactgaccaatgggtcccacatcgcggtgacctgccgtgcgcctgcccacggaggtccaccggccagccaagacacgcgcgcacaacggataccgacatgtgggcccgcctgtccggtccggctgaggagcagcgcgcgcgaggcaacaatagtcgggccgcgcggggtggtttctggctgctgggcc

SEQ ID NO: 8247 - DNA, 981 bp, Zea Mays
attttccttacaactgctgaccacttgtggctagatccaactgtgctttcacttgatgtacttgtcccaatgacagatctgcctcctcccgcaccatcccctgtatcaccttgccagcagcttgatagaccatgttaaaatccccagccaatagccatggttcactactgagagctctgaaatctagaagttcccgaaggaattgaattttactctcatcttcttgcgggccataaacaccagtgaaccaccaattaccatccatcccagcaaactgaactgaaaccgagaaattatcaatacgagaggagatgacttgacatactgctcccttccaagcaatcaggatgccaccacgagtaccattggcaggcagggtcaagaacttatcaaagtctgaaccacacacggagaggagcagatgggtggaaagcgatgccattttagtctcttggagacaaataatatcagccttggaggatagaattgtgtctcttacataatctcgcctagccttattattaaggcaacgggcgttccagacaagaatgtttgatagattcattgtaaacaaataaaacatgaccaaggaccgcaggaattagcagccagccaggagctccggacctctaaaatcatcaaagcgctccgcctgccagccaaaaatggcagcaagagcaacgaggtgagagtccgtcagttgcccctcgaacaacttgcagtagttgtcttgagctttttgatcaatggcttcatccttggctgcaagacccaggctcctgatgactttcctttgggctccagtgatgaccggacccagagaacagggtttgacaccggccaccctcctgctacgacgaggcgcaacagcagacgtcttacaacttcttttcttggcaaccggcataggcagcagctgcaccactggcttggttattttctccaggtcattgagaggggcagcaggctcatccagctcag

SEQ ID NO: 8248 - DNA, 440 bp, Zea Mays
agatctgtcatttataattaactgcaaacaaatctaatggttgtgaggcatcaccaggaaataatctatatttcagacgcctgaaatattgcagaacccttattctttagttgctactactgctgctgctttcttgggtttatgtcttaccatcgcaaaactatttttagtgaagtgaactctgctacccaaatgttgtcttctaccatctaattgattcggtgcctttgttccttcttgcgtagatagcttttgacggagtttgcagaaggctactcgtcgctgattccatttgggaggttagttccttaccgtgcttttacacttctcgtcgctgattccttttgggaggttaattccttgtcgtgcttttacacactaagcttaggttatgtcagtgatatacttgttttcagtggcatagtattttgtttatgttg

SEQ ID NO: 8249 - DNA, 328 bp, Zea Mays
gacaggggataccctggcctaagcaagggtccggtactgacacgtgtccaggctttatcctgtgcgcttgcgctccccgctcaggcggagacccgaagctgccacgtggcttgttgcccgtgacgtaagccagcgggcggagcctgatgtaaggcctctgggccgcacggtctatgcatttattgcggagagaacgcgtcgcctgtccaccctgctaacaggcgatgtgtcgcctcagcatttattgtgacccgtccactcagttggtaggcggcgtccaggccatcctgcaggcggcgtgcctgtacagtccattgccaaacagtac

SEQ ID NO: 8250 - DNA, 625 bp, Zea Mays
gcagggcagcagacttgaagcagactcgcaaccggcatccgaactctggtgcgaactcgagcttgctcggccatgctccatgcctccctgtgcggcggcgctgccgcggctgagatttcgcgccaccaggagtaataactgcttgtagccggggtcacgcgtcggccgtcgctgcttcccaccttcaccgaccactggcaaaagtgaagtgcccctccaacccaacccagcgcccagcaacaaaaaacaggtaagaaatctgaagcaccgatttgaacttcaaattactttggcggttgcaacttgcaagtccgggctattagctctaggtaccaaggtacatgtcagctaagtacagtattatgactgaagaaaagttcaaaacacttatggaagagctaacatcttttcctttgtggctttctcctaattcaaacagctattacatcttttattttaaacttcactatataaacaatacagtatatagtttaatatagtgtattgcacgattcgtatatacaatcttctagtcacagccatacatcatctttatgtggctgcaccggacacgggtccgaagacttcaaaaaggaaccgataaaattgaatttacgctatccag

SEQ ID NO: 8251 - DNA, 805 bp, Zea Mays
gggtgaagccgagaagatcgccgccgcccagggaactcacccacactgcctgtctgtgtgcatggtcgggccatggaacatcgcgagtggaaagtgacgtcattcgcaggctcagtgggaaggattgatcatcaaggcgtcagaaattgctcaccagagctcttcgctgtcgcggggccactcgccaccatgggcatggccgtctatgctgacatcggaggtaagaaaccacctatgaagtttgtgttgccctccttctcgtggtgcaccagttttgtgcaccggacgttgctcgagcttgttgccagctggcgccgccactaggttcctgcgcgcagatgtgttgttcgtcggggagagagaagttggggaagatagtgccaacgtcgttgatctggtaatgggcgggcgagatctggccattggatacccctttggtgaatcaaatcttgactttcgaactagaagcgtgcgaccagggatggatcaaagcgctttattatctgaaccgtggatcgcgtatcctgcggcccggagagcgtaccttgatccttcatcgcgcggccccggttggcccgaaccccttcaggccaccgattttgctaatgagcccctgtaatattctcaaataaaccagccgtccagggaggcgaagcctctgtctagggaatttttgtagtttagcccctgaccttcctggatttaggtgctcagcccaggagatagaaaaatcagataaataaatttagaaattggttttcaatacacaaataattttagaaacttgtttaattcttgtttaatt

SEQ ID NO: 8252 - DNA, 631 bp, Zea Mays
aacaaatcatgctctaacttggtctatgtcgaattctatcctcgatgatctactgggaatcaccaatttgatccgcacaccattctagagcttagtccatgcacccccgcgtccacggcggcgtggagaaccgatttgggggaaaacgaaattgctcgggctatggtggatgacaggccgaggttagagttgcactaggttcgttatgagggggcaaagcaagagaggtgctcaatttatagaggttggccacggttactccgaatttggaagggatttggagggcggcggtgacaagacattgcactagcgagcacgctgtggcgctcgacggcatacaaatgcagggagagtaattctgggcatgctactgttatgactacgtggtaaaggaccacggcgtggcacagtcgagctcaccagcgacctatgacaaccatgtccgttcagccacgtcgcacagcccccaagcccatccgataagctacagcccgcgacccaatccatctccctgctagatcttttactccccgcggttatccaccttgcaccgagcacgaatcgtgacgaccggcgtgaatccagccgcggggatcacaggcggcgaggtgcgatgtatctgaagattttt

SEQ ID NO: 8253 - DNA, 631 bp, Zea Mays
attggatctgctcagtcttgaacttgtttgtcgttgaagatgatccatggagctagctgatgtcgatgtcgcctcccctattgtcggtgtttagtaccggcaatgcaccactaggtgtaccacgagatgcttttatgagtcgacaacatcaactgtaggtcgatggtttgcttcgagatgcgacaaaacacacgatttatacaggttcgggccgcgaatgcgtaataccctacatcctatttgcggtgggttgtattgctttgatatgtggaggtttacaatgagggctagggtttagatgtttgatgagagagcagggcgtgtataagattggattccctcagatctaccttgggagggatccctagctcgccttatataatccggcgtggcttgggttacaagtcagtttccttatatatctcctagacgatttagattacaatagagtccttgtcttgtgcgtcaagtttgttcagttcgttggcctcgggcctgagttagtcggtcagcgcatgtagaatacgcctcatttggacccaggggatatccacccccacacgtcagtctcctgcaatacaatatgaaggttcaacacaaatgtaatttatagctatatggcaaaaaaaca

SEQ ID NO: 8254 - DNA, 369 bp, Zea Mays
gtggggtcagggagtaccaggagcacatcagagcactgaaacaagcgaatagagggcatgaacggacctgtagagtgttgaccacggtgagcccacacacggcggcgcggagaaccaaattgggggaagagagaaattgggaggctctagtggataatccgaggtaaggaccagtgcgatggatgcgtaattacctagcgaagccgcgtgtgcgctcaatttataggctcccggggtggtggcgcgtgaatttgtgttgccgcggtggtggtcggagaagaaaggggttactggcgcacgagattagtggctttcaccatggcggctctccggcgatcaccgggcatgcatgacgtgattcactgcgac

SEQ ID NO: 8255 - DNA, 1280 bp, Zea Mays
ttggcgccgacacgcgggccatctctgtcggtgtctccgttgcctcggttgtgtgctcagctcgctgacgtgtgggaccacctcgtcatccctatcctccagctgctatccgccacacccgttgacgctgtccgctcggatttggatcccaacaacctgcgtgggatgcgggtggatcttggctttaacccctcaaccacctggcagccttcacgcgcgcgcactctggtcgcccgccaccgacgcatgggccccctctgcagtgcctccgtctccaacggagtgcgagcctagcggaacaatctccgatccgttcgcggaattttcctcccccgtcgcggactcgtttcctataaaacggccacaccaccccgcgtcatcaacctgccgcttgttttccttgccacccccgtttgccgtcgtgagcgagagatctccgctggacaagccgccttcgtaattccgccgctaccgccagtaaaaccttgggcaaagaagtcggaagggtgcgcaggttggggaattgccggttcatcgcttgtgcggctttagggcgggcaacttctctgcaatcgttcatcggaacgccgctcggtctcaggatccgccacacgctgcagctgccgtcaccgtgtcgtgatcgctggtatgggcccctgagtatttgtcgtattctattatgcgttttgcactcttcgaattggtcgttgggtgtttggtgcgacggcggccttagctcgggtagctgtccaccgcggtggtcgtttcccccgccgggcgcggtctggaggtaggagacacagtggttgtcgtcaactgtgtgatggacgacccagatcagtctgggaaatccccgagcgctagaagatctggtacgtaggggcagaatcgggcgaccgtgagccaccagcgaataccgcttcactgcgatcaaccctagcctttggatcggaatcgggtgttgcagataaggtgctagtggaatatctgcgacaccgttgattttggatccagggatcacgagcgcatgcaggtccatgcgatgaatcatttaatccgtgccgtcggtgtctgatcgttgggctcatctcgcgcgataccccttcggccggggatattgcattagagcccctccgtttctgcggattcaacccgccgtccagggaatagtgtcctgagtcttgggtcgttttgcaccgtagccctgctcttctctgtatattatacgcccagtccagaaggttagaaaacccaggaaaaataaatagaaaatggttttt

SEQ ID NO: 8256 - DNA, 585 bp, Zea Mays
gcccaactggcctttgcagtcacgcggcccgaccagcactccatcgcgcttgagcgacttacgagagggacccaccaaaccgcctctctcttgcgctcacccggtgccctgacatgtggggtccgatgtcagtcactcgcgttacgttcactgctctcgcgcgcctcactgactcgtgggcccaagccgtcggactcctcccttccaccgaatccacacacaactgtcgccgcgacttcgccagaggcttgaccatctcgcgcccacttctcggcctcccaaacgggatacaagtaggtagcgcacgcgctattttcccctctctcctcttatccccaactcctcgccaccacaagtacgccgtcactcaccgcccgagagaaaattgccgccgccggggatagccgtcgctgggggatcaccgctctcggtgttggctctctggggaccgtactcatctgcggaagctgtctccgccagcaattgggtggtgcggcccacggggtgacgccaattgctcgctgtggcggaaaatcttcgccgggccgccaagctccgtggtcggacacgccaccgtctcggatt

SEQ ID NO: 8257 - DNA, 615 bp, Zea Mays
tgaggaacaaccaaatgttgcaacggcttgggattaatcagctgcgcacaataatgactgctacaagagtaaggagcaaagatgattgttcagaggaatctgggtctttgtatgacggtgaggacagtgaaggctctgagcaagaggaggtcagcaagttactgattcgtctatttgttttctcattttacatatcattactcttgcatttgtaaacaaatcgatatgcacattattgtgttatgcctacaggatttccaagttgcaaaaggtgtacgtagccacaactcaactcatgttgctgaaaaaactatgcaaggaacacgaggacataaaagggttgtggcccctggtgtaaatgaacaccaaattagaatcactaggcaaaggagtgctaccataaaccaacaatccttcctaaacctaactaccactacacatcctagttcaacagctaccacaaaccaagaatccacccagaacattacttctgcaacatgatttacttcaagtgctgccgctgaacaaaattacacccaaagcctaactgctgctgcacaagctaattctcccatacaagctgacatcagcgaccacattgcaaatgaaggcaag

SEQ ID NO: 8258 - DNA, 358 bp, Zea Mays
agaaaggtcagggggtctagcgcaagatttccatagacacagactactatacattagactgcgggttgatttatcaatactggaagggctcttttgctaatacgtcccgcgaaggggtatcgaccaacacgggccacccgatcgagtctggacggacgagattagatccccatcgaatcaaacggttacgcaacgctgatcctcggatctagatctgatggccaccgttttaaatagcgcggatcgaacgaagcccattcgatccagatccaacgaatcatatccatcatgtgaaggggtatctccaagttctaatcacatctgttcgcatcagatcaaacggcgccgaccacatcac

SEQ ID NO: 8259 - DNA, 701 bp, Zea Mays
gccggaatagcacaacaagtgtgttaatcgaagtcttttattaaaaagacacttcgtgcaaaagtcgcctaagggtgcaccagaacagcacaagtacgtcaatctacactccgcgcaaaagacacccacgggtgtagccggattagcacaggcgtgcggatacggccaacagggcacattacaatacaaattacagttacatacacacggcgagggcatcatatattacattggctcaaccttcgagatgatacccatctccctgtaattgaacagcattatcctcaattcctcaccctcaaaaagatttcgcagatccccctcacctatgctcgccccaatcggcgaagacaacaattctcgtttaccaacccggtctacccgaagacggccacgctccatccccatatgacggcgcctaccacttcgcgaaaactcacccacactgtgtttcgacaccacccttcgccgcctatactcagtactcgcactaggaagatccccgacaccctccacacgcggcgaagactccgctgcggccacatctaacatagcaaaataatccaagccttcatccgaggactcctccgtctaggaaaacaaactcccagactcaccatcagactcaaaacactcagatccagagccaaataaattatcattggcaggcactatggtcgaggccgccacaaaatcagtat

SEQ ID NO: 8260 - DNA, 429 bp, Zea Mays
ccgtgtaaaagtcgcataagggtgcagccgccccccgccggactagctcaataagtacgcacaatcgaatactttcccaaaaagaccccgcgcacaagtcgcctacgggcacggccggatcaacgaaggcacgcagcctcatacaaattacagttacatacatacagcgagggcatcacacattacattggctcaaccttcgggatgatacccatctccctgtagttgaacagcattatcctcaattcctcaccctcaaaaagacttcgcagctccccctcacctacactcgccccaatcggcgaggacaacaattcccgtttgccagtcccggccacacgaagacgaccaccctccatctcaccacgatgacgcctatcacttcgtgacaactcactcactctccgtttcgccaccgccattcgccgc

SEQ ID NO: 8261 - DNA, 346 bp, Zea Mays
ttgggacacgtggaacaccgggtggatggaagaagaagctggcaacgccagtttataagccacggagcccactttagctgcgacggtgaaaggaccaaaatacttgaaggaaagtttctgacaggagcgacgagacaaggatgtttgtatatacggttgcagcttgacgaaaactgaatcaccaactgaaaacacacgttctgatctgcccttgtctgcctgtttcttcatgtgatgcttggcacgagatagattcatcttgaccacatcagtcataagggcacgatcggataaccattgatgaagatcaggaacaacacaggtatccactgctgtcaaaccaaaa

SEQ ID NO: 8262 - DNA, 950 bp, Zea Mays
gatcaaattccttgctggtaaccatcagagagactcacgcagtaagtattcagatattttagcagatacacgtcgccttttctcggcccctcagttagatgttacagaacataaggttaaggccttgaatgtgtccatacttcaaatcggcaataaactcatccagcggcaaacggatgactggctgtcatattcaggatcaaaacaagcgtacttattatcggaggagtctccagcatgaaaagcttcgctgtctagtggagtctctaggatgatgtgaccacacgtccacattcaatgaaccggtaaagaagaaagaaaaaaatgggaaatgacactccactatacgaagtgcaggtggttgtgctgtgcgtattaatttgtaacacttttgtcactcatccagttaacatgtcgagtaccgaggaacaccaacgtatcaacaagttgtttttttttttggtggggtggggggtcaacttgtgaaatcagtcccaaaactatgtgctagccatggaaactaactgcagaacatttgacaggacacccaaacttacggtttagcaaatgctactctgactgaatcgagaaatgcacagagctaaagtacaatggagacggcagaattgaaggcatgcagtgctgaactgatgatgaagcaaagatcatacttacagacccaaaaaaaaaggcggcagcgtcccaagcgtccggccaatctgagttgatcagggacacaggccaagaacagagaaatgttagtgcgctacttgccttggtccaggctgctggctctggctggtctctggtcgctaacctctgctggagacaagacaaggccatgggggcggcgaggaaggccggtagatataagagcgagctgggagggagggagcaggcgaccagtggagcaagtagcgggagcggcagagcacgcgggcgcgtcttgt

SEQ ID NO: 8263 - DNA, 379 bp, Zea Mays
catatgttacagttgcagatgaggcactgaggcgagtaaacaagaggggagggagggaggcagggaatcagagcgccattcaatcccttgtctcgtaacgtttggtgccatgccacactccgatccggccccgcgtttgattcccacgcccagcaagtacgcgccaaaaaagggggtttcccccagtgaatggacgacggagcgatctagttggactgataaatggcggggaaatctggttgcgtcgcgtccattaactccgccccagctaacgatcgatggctgacggacgattcgtgccgtcgaatcaccaggcgggggacatgccatgccacgcgctgtgcgcggaccacgacgtggctcggggcttcttttggtg

SEQ ID NO: 8264 - DNA, 305 bp, Zea Mays
ctgcaataacattgtcttccaaaaacaggatataactgcgcgatactgagataaccaatccatacccaagataacatcaaatgcccccaaggaaatcacaataagattagctgaaaagacctcatcagcaagaatggcggaacaaccctgacaaactgaacaactactaatggagccattagcagaactaaccataattgggtgacccaacctctgcaccgaaagaccagcccgcgacacaaaattcttcgaaacaaacgaatagctagcgccagagtcaaaaagagcatgggccacaaacgaat

SEQ ID NO: 8265 - DNA, 287 bp, Zea Mays
aacccggcccgctactgaagtgacgtcactcaagtgtccacggcccggcccacccagtcatagctaactacacgacacccacctgtcttcctcggctcctccaccccggtcctctcctgccgcgtcgcgttcgcccctcgcagcgggcaactcccaccgccgccgcttcgcatccgcccatctgcttccatcgtctcacggaggtcgctcacttcgccgccgcccgccccgcctctcccggtgccacggggccctcggccgcgccgtggcgcttaaaccctagatct

SEQ ID NO: 8266 - DNA, 329 bp, Zea Mays
ggcgggttgctcaccttgaggggtagcgctggagtcacggggcaacggcggaggcgcaaggacgcgacggggcaacgacggggggtatccggctgcgcaagaatcgctccggtgagcgtggaccggacgaaacagagaggggaacggcaacgacagcgggtatctggctgcgcaagaatagctccggtgagcagctaacagcaaggcggaactcaccgtggcacgggatggggtgcgaacgcgacggtggccgcagaacaggcagcagtcgacgacgggcggtggcagagctctctgctcacgtgggcagagcgagagagagagagggt

SEQ ID NO: 8267 - DNA, 409 bp, Zea Mays
gcaaccacatctgatatgagtcagtcgatttccgacattgtggttgcgagttcctcagcttcggctccggcgatatcttcggtatcgacaggcttcgctgcttttgccgccgaagctgagtgcggcatctactcaatcgcttgcatcacatttatcatctgtcgtttcttctgccccccgaccttctcctccgcagtcggagcggtttcctttgattgtaaaaggctagtcagatctaactgtagaggacttagcagtgcaaatggtatggattcagtcattaccttcagaatttccgacatttcagcagcagggggtgaaggaggactcatagtcttctatggcacatcatgtaccttcgtatcagcagaagatatcctatcgagttttcgtttctcgagagtcgaat

SEQ ID NO: 8268 - DNA, 424 bp, Zea Mays
ccaaccatactttacttgaaatatagaactaacaatccataaactgtaagtaccgatcactgcataaaggaatgggatgggtggcgttctccgacgactgaggctctatgggtgaatggctggcgggcatacaacagtgggatctacatgggcgatggagccctcatccatggagtcgtaggcactggcttcggagggagcagcgtccgacctttccatggagcagtcgacacaacctacttcatctgtggattttgatgaggggattcaagcacaacatagagagaggaagaggagattcgagcatgaaacagggggaggttgaggagatttgcaccggatctggtggagatgaccactgctggttgaacgtagagacagagttgttcctttgtttctgaaagttgcctagagggggggtgaa

SEQ ID NO: 8269 - DNA, 596 bp, Zea Mays
cgccgcgctcggcgtcgccgacgtccggacctacgggctcgacggaggcggcggcgccgccggcgagaatctcacgaagctgttcgacgacttcgaggcgctgcttgggacggtgaccgtgggggagctgctgccgtggctggcgtgggtcgacacgctgacgggcctacacgccaaagcggcgcgcacgtccgcggagatggacgccttcctcgagcgggtcattgcggaccaccgccagaggcgccgtgccggacgacaccgtgaaggtggtgatggcgatgatcaccgggacttcgtcgacgtgctcttggacgtgaacgaggcggagcacgatggcgacgacgctcgtggagtcctgtttgacgacgactccatcaagggcattatcttggtacacgacgcatatgcgcgcatacatgttcatgttcttaacaaccaacgactgctacgaatctgaagatggactgcgcgcgtgtacatacagaacatgttttccgccgccacggacacgacgtacacgacgctggtatgggccatggcggagctcatcaaccacccggacgagattcgcaggctccaggacgagatccgag

SEQ ID NO: 8270 - DNA, 715 bp, Zea Mays
cctcggcccactctcccttgctcagcctgccagcatgaccaagcctgccttgatgccgacatgtgggcccatcgcgtcattctcatgatcccgacgttggcttgtggtgtccccatgtcaggagctccttccatctcacgtcatgtttggagcgatgctactaccggtccatgccacgcggaatccggggctccctaaccaaatcatcgggattctcggccaattgcgtttccccgcagctatataattgtgcccccttgggccatactccagcaatgctttgggcgccgttgccgtgaagttgaagaagaccgccgccgctggggaaatcgcctatgccgctgttcggggttcgtggggggatgagggtccatcgccgatacacaccgcacctatccgtggccttcgcgggctaaggcatcaaccggaacacaaccaattgctcaccatggatccatctccgttgtcgtccacgtcacgtcgttgttgggttccttcatagctcaatcggctggtaagtaccccacacaccaatcgccccgttgccctcaacgttttgaacctgttcggccatgggttggtgtagcggtgggtcattgctccttcgccagccatggcctctgtcgtggctatgggcggcgccgccgaggctcggccgtggggaggagcctcacgtgtggacgtctatctatgcagcaatggtcccgatttgatc

SEQ ID NO: 8271 - DNA, 790 bp, Zea Mays
ccatcccagccccaactgcgcctccccttctctctttgcccaacgggcccgccctgtcggcgccgctccgtcgcccgcacacactctctctctctctctctgcgccatgggccccgccctgtcagcgcccattttctgcgcacctgcacctgtccgttgacaccccgatcccacccatcagccctgtcccctaaaatcgtcctccaacgagctccacacgcacgccgaggaacctgggcccacgtcgtgcgtcaaggctgcaaccatcccacctccggccaattgaacctctttactaccccacttactctccccctccctcattcgcacgtccatagaactaaggccccatccacatggtgcgcgcatgccaggtaagaacctccgccattcaccatcatcctgagccccttcctccgccgatgttggggccccgccatgcccttcaccatggtgagcttcaccatgacacccgcaatgcggaacacgccccaatttctcccctccccttctgattcgctctattcacgttcactcgccgtcctttgtgcagtcctagtgccgttgttgtcgaccagagccatcactatggcgttgctgccatagagaggtccctaaggtaaggaacctcccctacctctccaattccttccctcactctctgcctcgtgtaattgctagtcagagttcccagcgccgccaccgaggcgcctcatcatggatctccaccctccggtgcccctactatggtctaacttctgccattgggttccccgcaccccaatcttct

SEQ ID NO: 8272 - DNA, 599 bp, Zea Mays
ggccttcgggcggagctaaaagctctttttggagaagtcatcggtggtctacaggtagtatgcggcgcagcgcaacatggcgatgttgccaatgtggacgcggtagcggcttcgcgaacactcgcggcctgtctcgctgagaaaccaaccgctgtgcaaggggaggaagatgatttgtatccatcgaaacgtgatcctatggttgagaaatagagagatgacgtggatgctccagaggcgagatttgctccctcctttaatatatagaaatagctgggcctctatgttatgatttctctgagagggaggatggcgggtttattcgtgaaatgcataaggtcgtttttaaaacattaccatgactgaaagggtttgcttgaatctcggccgttggatcagaagcccatggcccggattagattgtatccatcctgaatcggtatgctacgcgggcccttagatccatttccaatgcccctgttttaaatacctacgcacccgccccagccattgattagttgatcgatggttcagcccaaaccgttcctagcttctaatcttatccgttagatatgaatccatcggcatagacatcatct

SEQ ID NO: 8273 - DNA, 343 bp, Zea Mays
attggacacatggcaagcagtgttgatcgcttcagcccaaaaacgcctaggagtcctatgctcatcaagcatcgtcctggccatctcaacaagggtccaattcttacattcaacaatgccattctactgtggcacatacgaagaggaaaactgatgctcgagtcccaaagaagcacaaaaggttgcacactgagtatttttgaatttcgtgccattgtcactgcgtatagcttttatggaattttaggaaactcattttgcaaccaaagaatcaaatctcaagcatgagtaaaagcctcatccttccgccataaagaacacacaagagtagcgagagaagtcg

SEQ ID NO: 8274 - DNA, 842 bp, Zea Mays
cttggaagctgatcagcgaccactgaactgacaaaggacacagagctgcccgaatccagtaaaatgaggacagagaatccggcaatatctccaacaaactgcatagacttatacattggaactccctccagaacggactgagacaacaacaaacaacaaaggccctctgaaattgatgccacaattcctcaatgaaggttcaaggactgattcagagtcatccgaaggtaactgaaattgatgccacaattcctcaacaagatgcaactggaccgagtcaggacattggtggccacgctgaaatggctgcccacatttatagcacaacccctgagctttacggaatgcatacactgatgataaacggtcgcttgttgcagtccccttgttggcctctgatgttctgaattcggtagtcttcgtagaagttgtcgccgccttgggtggaggaggtagaggcatagggccacgagcataagatttgctcgcgacagtagaatccagcttcttatagtccttggtccgggaaccatcgacgatctcctcctgcaactgagcaagaacgtaggcagtatccaaatcttttggccgttgaatcataacagtggatttaatatcaaaacgaaggccatctagaaatcgcatggtgtaatacagtgggtctgacatttcctggtaactattgagctgatcgaccaaatgagcaaaacgttccacatattcccccaccgacccttgctgccggatatgaaataattgacgcactaggctagcatgctgatctttcccaaatctctcacggatcaagttcccaaactctagccaagacaaactagcaagct

SEQ ID NO: 8275 - DNA, 577 bp, Zea Mays
catctatagctgcaatcactgttcacttgactccattggccctgacctatgacaatccagcattgtagtgtgctcaagtaggtttcaggtgtttggaatctagatgttatgtttcaccattttaccttgctagcctaacccgatggatgacatgttattatgttaagtgtgacatacaagtgaaatgctgattctggttcgcttgttatctcatataatctgatcaatttaaatttgcctatatgcttaagagtaattatctgtatatttttaatctgaccaatttgattaatttgatatcgtttgttagactacaattgagactaggaatctatatatacccctatagctttggagtgttcatcgccaacatgagtgtgctaggctgacatatatttattgttcttattcggtcataagtttctgaatcgagaagtagtatatcagggtacattccagtgggaattggagtttaaaccctctgaagttacaacgctgctaaaaaaatcgcatggactttatgagttaaatgtatatcagttaggatttccatccggcattgttaagttcctttggt

SEQ ID NO: 8276 - DNA, 783 bp, Zea Mays
cgacggtggaccgaccctgcagatcgcgttccggatgattaatgggatcaaagctaaaattgaagcttgggaaggctttaagggttcaccaggaactaggtacatgattgagtttaggccgaacgaggatagaggagcggatcgacagagagggtgcatagggcggcgttcttcggagcaacggagtgttccggtggtgggactttggtaaactttgattgattggcgtcgagagcaacaggaagctaaggacatgctggaacacgaggcaattgagcgagtactaacccgaagagggctggccacggagaggtccttcacggcggcgctcggaatagggtggaatggatttgtggactgtgtgagttctccggtgaaattcagtcgattgctcaagtgctcgtgtgcatgatgtggtgaagaagcaggacccgggctcaatttataggccgatggctagagttggatgaggctcgcggagctgtaaatgtgctggcgagctcacccgtgcgggcaaagccacggcgatggtccggcgactaccaattaaccgggcagtgccacctcgggacattagcgccacgtcgtagaagatttttaccacggccacagacccatccccagccgcggtggtgatcttatcccggcgagatttttctgatctcctgtgaacagtacgccaatccgcctgatttcaaagggctactgctccaaatttcatgtagttgctcgcagacaaatctgtatcaaacttgtaccctgatcaatgttctttcattgtgc

SEQ ID NO: 8277 - DNA, 1144 bp, Zea Mays
gttgtatccacaatcgaatcgagctacctcaaaacgtaggaactcggttcaatagttgttcggggtgctgaagatgaccggtatatagagatgtcccagtcggtaatccccttggtcaacatgatgccaaagaatggagtgtccgactgggtgaggtcagtagtcgagatcccaagagcctggagtgttctggggaaggtgacattgatgctgctacctccatccaccagaaccttcttgacccggctttcttgaatcactagggcgacgagcatagggtacttgccggggtgatcaatgttgagccacttgtcggctcgactgaacatgtttgcatgttccgaccaccgatatggggccggggcaatattggttgccactaggacctaccgataggtgagcttctgttgcctcttgttctcttaggcttcatggcctccaaagatgatgttgacctccctgtcaatgcgtgggaaagccccatcaccaccttcgccttgctgttgtagttgaccctgattggcgggttctcctcacggtgggggaggcgatagcgactgaaacggtcgaccgtgcccgacgaagttcttgaagtctcgacaattccagagagtgtgacgcatatccttgtgatttagacactaggaattgaggatctcatccagtgtccgtacaccaccacgtggcgcaccgcgggaccgggggtgtgcacttcttctcgaggcctcttatcccaatgcttatccggttgcttgttcacgtccttcctcggtgctggaggtgcaggcttcgcactctcgaggaggtcttaggctcgctcgtcagcagtgatgtagatgtctgcctcccggaacggttgttccgaggtggcgggtgccttttggaggatagcccggacgaaggccaagtcattggaccctcggtagaagtcctcgattatgactgtctctgcgacatcggggatgcgatttctcatcgtctagaaatgtctgaggaatgagcgtagggtctcgtcgctctgtcgcttgatggacttgaggtcccaaggctacgccggtttgtcggagagggattggaagttcgcgacaaaccgacggctgaagtcatcctagtcgtcgatgcagtactgaggtagatgtcggag

SEQ ID NO: 8278 - DNA, 483 bp, Zea Mays
gccctcgcgaacggttcatgcgtgcccctgttgcctcgtagggtcggttagttatatgagacctcagcacaggagtctcaatagtggctcgcatatcgaaaaatatgagacaacacacaagaccgagcgtatatgtgaccacgtatggcggaaggtgagcaggacatacaacgacaggtgaagccatgccacgtatgaccgtgccctaggacagactcacgggacccgccatgcactaccaccaagacatcagcaacagactcgctacatggaccaacgcgatagacagtgccataccgagggtacgaccatggcacaaaaggaaagaagacccaccacgtcgacctggggagacaactctctctctctctatttccttctcatcaaaggcaagactccactgtaaggcttctcccttgatgtataaaagggaggacacacctttcttctgaacagaggtactcttattgtaacacgctccca

SEQ ID NO: 8279 - DNA, 379 bp, Zea Mays
ctcttgaataagttcgggcccaaagaattgtcttcctctagtctaatcccaatatagaggagtactgcacttcctgccatatatagcctcgaacggtgacatcttcagactggcctgttaactagtatatgagaactcagcataaggtagactcttgtcccaactactaccatgctgaagggcacaatctctcaacatgacctccaatacttgattagtcctttcaatttgtccatcagtctgaggtaggccgaactaaaattcaacttcgcatccatattctcatgaaaacttttccaaaatctgggggtaaactgtgatcctttatccgaaacgatcttcttcggtacaacatgtagagacacaatccgagccatat

SEQ ID NO: 8280 - DNA, 772 bp, Zea Mays
gcgagtttggagatgcgccgtgggaggaagactgactatcttgaaatcccgctcaaggatagcatcaagggatggcgcttggagtggtttattgttgagaaccacggtcagggaggtagccggatgttcgtactccgagttggaccgagtcccccacggaccaggaggtggctgaggcaggggctttgctgactgaaattggactgctgaaggagaggggtctgactgcagaggctgtggttgctgattttgtcttcaagaacattcagccgttgaaggacagggcatacccggcttatttgtaccaaggtctagctgactcaacccgggtcaccaacagaagaattcccgctgtagacttagtgaaccggcttgaaatgattcttagaggcaaggtatcaaatgttggtgccccagtggcatactcggcctggaacctgcctccttccaaggcctttactcattttgtgttgaatccacctgtcgctgatggcggtttgggccttagagtgcgaccctctgccgaagaagttagcgctttggttacctcgctcggagaaattcctgatgatgaacatcaggtccactttgaggtgcctttggatcctagtgatgcagagataagtgctatgcttgaaatgctggccaaggactcttctgatgctgctcctgctgggacattggtggtggcgcctctcccagaagctggtacaaccttggatattcagagacctgtcagtgttcgcccgaaacgcccttgtcgagccaatca

SEQ ID NO: 8281 - DNA, 1084 bp, Zea Mays
aagaaaagctccggcgtccatgcctcgatagtgcagaggcatggagatggtgtggatccgtgcagcggcgatttcgacgaggaggggaacgcaccacaccacgtcttctcttgcagctgctgcatgtgggtctacgggaccagcatgggtgaactggcggaaaggtacgacggggtatggcgaggggcaccgtcggcacccgtctcgcaccacgagatgagggcagagcacacggacagacacatacgttggcaaacagatttgggggaagtcaaactgtgaacaggaaataggatggtggtaaacagatccgtggatggcgagctctgaacaataaacggacttacattcgacgactcctgacgaaaggacgatggctatgatggaggaacagggaggacagaggtggttgcggtgaggacgaagcgggtcgttgctgtgacgcacccacgatgatgaagatgcaggcggaggagtgcaaccgcgttggagcaggcacgggtcggggatctgagagacgacgatggacgtggaggcgagatgcgtgcgtggggagctgagaccagaggccaggtaactgtcacgtggggccgaccggacgagcatggagcgagcgttctgcacatccgtggtagagaagcgttgccgaggtgcactggtgtgtgtacgtgtcggaaggcgagaggaccatcgtgtgggaatacggagagaggccgaaacgcgagcgtgttttaggactttagattaaatccacgtcaagccaaaatgcaagtgatcgaatacaagttcagggctgtatcatgtaaaccaaccaacaacacatactcaaggtgttctgtgtgcgtgcgttttaataattccaatgcaatcatttttggtatcactcagagctgcaaactgcaaagcttccatgaaaaaattctcgtactagccacgccccattcccccgccgcacgtgcctcaaatttcttcctagtgtgttggttgtcgttgcaccgagagacatcgcgccaccaccgaggtatgtagcttagttagtttgtatatagtttagtttagttagtatatagtataggtagttagt

SEQ ID NO: 8282 - DNA, 678 bp, Zea Mays
ggagaactcaccggtgaacaccgttttcacgtcctactgtgcaattccgacgtggatgagtgctaacagaactatgggatccgcgcgaactgattaaggaagggcttaccggtattggaatggctcgaggtgttggccacgatgtcacgcggggttgcggcggagtagaggctccggcgagcaattgcttaaatcgtggtactcttctgctccaattgccgccaccccagcttccgctgcgccttggcgactgcttgagtaccgcgttgaggtgaaaagatggtggcgacagtggttctcccaattctatgggctttcggcggcggatctggttcctatggtatgtgcggctggcgagattcgctagttgctcaccggttttatgtatgggacgggaggagtccgagctgggtcgattgaagacccgacagagccctgcattcgaactttatcgcacgcggttgcaacaacccgagatgcgcgcagttcgttgagagaaggtaggcggagcttctgcgtagctggccccacatggcgatgacacgctgagagagaaacgtgccaagcgactgaccccggggccccacatgtcagcaccgtacgaatgagggtgtgagcgcgagttagtgggccgccgggagcacaatcggcccagtgaccgaattggtttattctttc

SEQ ID NO: 8283 - DNA, 363 bp, Zea Mays
acgacggcgagctggagtaggttgatggagaacgatgacgacggttcaacacacagcagcagggagctagcatggtgaagacaaacggcgacgcacaacagcagcacaggtttggcggggactacaggcgcgaacgacgaagcatgtggagtcccgcgagcgatggcaatgatgcggcgtgacgacacagcacgagcgtggggaatccaggtagatggacgggcttcgggacaggaacatcaaggaatggcgagaggaggaagatgaacatgaaaatggcaattgctgctggctaagggagtgcagcgtccttatataggggaagagagacaggagattggccagattaactttccctaatgt

SEQ ID NO: 8284 - DNA, 346 bp, Zea Mays
gtgaactgcagtttgtagtacaacctatgaaaaggctcgcgatgttgggtcggcgccaaccaggcttgctcaactgtatgctggaaacctggtaatttggtccagaaattctcaaatttaaaggaacgtggacgcctcggcatagtagtattggataggagcagcgggcagtggtcagagatcgaggatgatagcgcatgtagtccacatataccgaacatctcctcccactcagagttgcagaagaatctgtctagtcttacgagagtggggtgtcgtctctcattgctccaagtgaacttcctgttttgcaaaggaatttctttcaagtcgcaaatgtcgagag

SEQ ID NO: 8285 - DNA, 651 bp, Zea Mays
agagtcaagagaggtcgtcgtggccgaggtggctaatgcgatggtgccaagtggaggcaagggcagtggaggcaagggcataggattggacaacatgggcgaaggaaggtggggtgggcaagcgaatcgggtataggtgactagagctgtcgtagtgagcaaccacaacacgagtggtaagatcctgtatggtgagcccaagggatcaaactccatagagcatcggttgccagtgatgaagcgacagaccgagaggaggttcttgattatgttaggggcaacaaggatgttgttgaggtacaaaggactaggaaggattatgtcacctactaaggtgacaggctgagtcaacccattaccgatagtgatggagaagggaaggtagggctatgggcgtggagtaaagtgatggttctagggttgggaatggcatggaatggggcgccagagtcaacaacccagtcaatgggaggacggggcagtgaagacaagggttgtgagaagagagacaagggaggcacccctatagagccaccaggaggagagctagggccaagagtggcgagcatgctgacgacaatcatggtgggagatgataaggtctcaatcgtcatggaggcaatcgcgacactagggaacacaagcggctta

SEQ ID NO: 8286 - DNA, 661 bp, Zea Mays
tcgttcgttcgcgttcaaacgactccgataaaactggtgaaggggtactctttattctgatctaacatctatgcagagatcaacggtccccatttaatgaaatgcagaaataatcgcggctgaccatgaccgatctaacgtcactgagcgtgcgacccaatttcgttactcagtcgcgacggtggtggcgccctcgccgccccatggccgtccaccgcccccgcccgtgaaacaccaggccgaatagcgcaacacaaagaggacaacatgacgaatctatggaatacaaactaacccagaatcgtaacgtggaggcttctgcccacggtggagtgcggagcagcgacggagtaaatgcttcggcgaggaattgccggcgagtacgaccatcatctagctcctgaaggacgtccagattcgtagtgcgttggagatcatcctaggttgctttgcgtgcccgaacgaccatgcaggcaggcgcccacgatggcgggctcgatttcctcacgcggcattgttcttcctctcgacttgctctctgttcttccatggcgactggcttggcttgggttctagggggtgtgggcttgtttaaatacctagagacggggggactcatgttaatcctgaacgagggcacgtcgaccgggaaatctacaca

SEQ ID NO: 8287 - DNA, 1058 bp, Zea Mays
gtcgactctggtgtcccagaccacgtctgccatctgcagaagtccttgtatggactgaatcaagctctgcgggcctggtaccagcgcttcggcaccttcatccgacagctcgacttcatcacttccacctccgacacatcccttttcattttccaagaggggacgagcctcgcctacctactgttgtacgtcgacgacatcgttctcaccgcctcatcctcggccctccttcagcgcatgatggatcttggcgccctccaccactttcttggcatcattgtcacacgctcctcagatggcctcttcctctcctagcaacagtacgctgtcgagcttcttcagcgcgcgggcatggctgagtgtcatccgacactgacaccagttgacactcacgccaagctatccgtgaccgacggggttcttctgtcagagaaggacgcatctgagtacaggagcctggcgggggctcttcagtacttgacgctgactcgtcctaatctggcctatgctgttcagcaggtgtgcctcttcatgcacaccccgcgcgagcctcaccgtgcgcttatcaagcgcatcctacgcttcgtctaggggactctctccttaggtcttcacattggcactagatctgtcgacacactgactgcctactctgacgctgactgggcaggctgtccagactctcgacggtccacctccggcttctgcgtctatctcggtgacaatctggtttcttggtcctccaagcgccagaccacgatgtcccgctccaacgctaaggcagaatatcgggccatggctcatgttgtggccgagtgctgctggcttcgacaattactccatgagctccacatccagctaccctccgccactgttgtcttctgcgacaaagtcagtgcagtctacatgacagccaaccccgtccaccacaagcgaacgaagcacattgagatcaacattcactttgtctgcgaaaaggtggcccttggtgagatttgggttctccatgtgccctcctctcaccagttcgtcgacatcatgactaaagggcttccgac

SEQ ID NO: 8288 - DNA, 770 bp, Zea Mays
tgagagagcatcgaggacaccccaacaagcgccggaggaaccaccgggcccagcgcgatgaagaggaagtcaccaccacggaccgaccacccaggccactagccaagaatagtgatgaccatttccataagctgatggactccccatgccaaaaccacggcttcgtgtccgccacaagcttcgggtgtgcgaacgtctgaatcgcttcatctcaaagtcgcccaccaaaaaagcgaagccaaaagagccggtgaaacccgcagagcaggagacactcaccgaggaattccttgagacgacaggatgcctcatgatcttcggtggggttgaagcatacggcaacaaatgctgcctcaaggcggcacaccggaaggtccacgtggtggaacccaccatcccgcgatatctccggtggttggagttcccaatcatcttcgaccgtagtgatcacctagacaggatctcgcatctcggggcttaccccctcgttgtcaaactaagtgtaggctcgaagcatctcaccaaggtgctcatgtacgggggtagtggcctcaatatcatgtacattcaaaccttcgacggactaggaatcgattgctccgcgctgcgaccaagtacggcactattccacagtgtcatccccagaaaccaagcctacccactcagacatgttacactgcatgtcacgtttgacgatccttccaacttccacaccgagcggctacagttcgaggtagtcgactttccggggtcctacaatgccatacttg

SEQ ID NO: 8289 - DNA, 577 bp, Zea Mays
gcagaagacatggactgacctggatcgcgctggccgcggtgaggtgctctttgcggtggcggaaaccgatttggggagaacccaaaattcgtgagctttggtgaatgattgagggtgggattgggggctctggtttcgtgatgatgtagcgcagctgcctcggccttcaatttatagagggcttaggcggtggcgcgtaattcggccgagcaattctggcggccggagaaagagaagagcactggcgcagtggattggtgtcctgcatcgtggcaattgctccggcgatcaacggggagcaagagtgagtcacggtgatgcggtagacaggctagagacacgcggcggacaacgacgacggcttaatggcggtgagagtccttatccgagggcggtgagcaaggggagaggtaccgcggctagctggagtggcttccagctcaccggcggcgatgatcttttaccctgcaacgctatccatcaactccaggcacgaatccagttgccggtgacacgaatcgcggcgaagaatcggtcgtcggcggtgaggatcactgaaactgatccaggcggttac

SEQ ID NO: 8290 - DNA, 952 bp, Zea Mays
aggcagcccagcaggtttgtcaaacaactcatggtattcttccaccaactgagccatttcaaaaggtatgttctggaactggcccttgtcttccacactcaactccaatatgtgttcccaggcctcttgtttaagaatccaatttaactgcaccttggatagttgatggcaggtgctcaactttggaaccaccccttgtaagcgtacaactctcgattcatattcaaactccagccacttaccaacccagtgtactttcatgggactgtgggcctctagccagtccattcccaaaatgatatcatacccacttaatggcagaaatttgaagtcagtatggaaagtgatccctccacacaaccactggcagccaggtacaaagtatttgctccaaagacatctcccatcagccacttttacttgaacaggttcgagtatgctctgaactccagtcacctttcccatcagatggtcactcataaaactcgttgaactgcccgagtctaccagaactagcagctgttggcgttgaattaacgcccaaagacgcacggttcgattaccctcacttccactgactgcattcaccgaaatggacaacactgcttccccatcactatcaatgccaccctcagtcacgaacttcgtttgttcctcttcttcgcctgtaactgttagagcccacatctcctcaactaggtgtagggtacggtgttagaacagcggtgtgcatgcccccattttcccccacatttgaagcatagccctttagcttttcgatatgccttgagtgcagttaatttactgtcctccagcctgcttgcagaaacagggtaagcaaccctgttagtggtagctgacaacgatgatcccgccattgttgtgcccttctgcaacggcttggaaaatccccctccatcttgcctccgatgttcacggcgtcccgaatgca

SEQ ID NO: 8291 - DNA, 450 bp, Zea Mays
gttgctgaataagggttcagtgacctggtttcgtacttgcagtgtctcgctccgaccacgcaaaaatacagtagtaatgtgtaccagtagctgttggttgctttcgcgtcaacgtagacatcgtgaccggacgaactatgccaatttgactgataatacagcgcggtgcagtcgttccaaaaccatgtgccgactcgcctaatttcatgctcttgctctctggtcagcaacagcaacaaacttcaaacccgctttgacatggccgtttaataacaataaacaccccgctgccgcctgagcgtggtcggccggggcgggcaaaagcagctgtggaactgactgacaccatctcgtcacgacgaaaccgctccgctacacgcttgctcgtactaaacaaaacgaattttcggtcgacgggcaaccatcaatcatcatttaactaagctcccg

SEQ ID NO: 8292 - DNA, 719 bp, Zea Mays
gttttcaccacaaaactactgtgcaggagcgttttcacaagaaaccttgccagcaggatcaccagaaggagaaggtttactcgtaccaacggatgcaacaagcatgtcagcaacaatgtcctcaggcaccacgacgccgggtcttttcattaggattcaaccggcatgaatagctttgtccatcgctttgtcacacattgctttcataataccatagtcatcctctaataccttgatgtcgcgacgagcaatttccaactcttgcgaaacaagtttcttcgaagcacgcaaccctttgatgacagaatctcatgaagacagtaacttattaagtcgtgacactttagtctgagaaaccctcaactcatccctatgacggtcaagcttcgaaatagtaaagcgatgactcctctccaaagtagtaagggagttgctagcatcacggtacagtttgtctagactgtcatgagaatcaagaagtctttgcatctcctcctgcagacaagaagagtactaaacatccaaccaaaagcgcaaaacaaaggcattgtgaacaatcagaaaagtctacctcatgggctctcttctctgaatcaagctaagtgttcaaggaagagttcatggtccgggcaccatccaagaacgcagaaacctggttcagatcggcttgactctgagcatacctctccttagtgtcagaacaccgtcgagccagaact

SEQ ID NO: 8293 - DNA, 297 bp, Zea Mays
gggggatagtgatattccttctccagctatgtccgcccttgtcagccttcaagaactatccgtaacggattttgaccaggcccttgaggatgttgtccctgaggatatgctatcggagccgactgctgatgacatgatggttgtttgttctgaaattccagacatgggattagaggtatcccgagcagtgtctcatgcatcatcgactttggaaggcagtcttcgatgtcaagacattggtcaggattgcccgactcacatggaggtgactgaggatccttcagccttagaggtggc

SEQ ID NO: 8294 - DNA, 806 bp, Zea Mays
caaagaggcaaagttgatcaatctggataccaaaatgcttccaagttctgacagaaacttattagaggaggcaactctcaggacaaaacatagtagatgaagtaaattcatcaaaaaggattgcatctccaatttagcccatcaatttttttccataccacagaaactgcactgacacaaacctagcaaaatacagttcgcattacattacttcaacattacaccaaactgcatagcatttaactgttatgcgtcaattgaagtaacctcataggtgcattcattggggggcaagcttcggcatcatactgtcgtcgcaaatgaggcatgagactcatctatccccaaagacgcgacgaagaggacgtacacgccagtcgagatttgcctgcagggctaatcgaacaggagctaagggagcagggccagcggtaactcgaacgatgaagaggaggtggatcaagaggtgacaggaatgcctcacggggccttgccaggaggtgaaggagctcgacgtgtcccgcaccacctcgcacaggagctccagcgcctcctccgtcatctccggctatagacgtgtagaggtgtttctcgcctcccggtgttgcagacttgaatcaaataatgaatagatcgaaacgagcaagaaatggacacttcataaccaggagaacaaatggttcaaacttgtgtggttatttcttataagtcaaagggctcagtaaaaattatcaagagagaaatagcaccggcctgctcctcgacggcaaattgaaacaggcggcaaattgaaggtttcctacatc

SEQ ID NO: 8295 - DNA, 877 bp, Zea Mays
cagaggccctcggtttattagctaaatcgaagtaggtttgcttactgctcctctgtgccactgacaaattgcagaaatgccctccatattctatctcttccccgcgaatgcccctgaccacggcgcgcacgcagatcatccctgacgtggtccgtaccggctatggccggcgatgactgcttggaataactaatgggaaggcttcactgacctaaggcgacctaggaacaaccctaaactaacatgaaccctactgggagtcgcttgtccacgatcacggcggacaccgagcatgggagcacacgttcccgcggattggggatggtctagttcgatcgggtgggttgatgagcatcacgaatgcatacaggtactgaaacagaaccgctgagagcatgatcagacctggaagtggctggccacggcgagggtgcttttacggcggcggtaaactgatttgggggaaaacggcgattctccggctaggggagctaatcggagacaggagtggtggctatggcttcgcaatttagagacgaaggtcggagctcggttgatttgagcgaagggagcgaggatgtggtgaatttatagccgcggtgagtcactgccgcggccatggtgataaccatcgccggcattagctggcgatcaactgcggcgtcaagcgatagctgttctcacgggtttgccacgtccccgccgcgacagtaacacagtcacatccgcgcggcgtggatgaacggaggggagcggtgccgatgaccggatatggctggaatgagaagtggccgcgtggcagccggagttattgctctccaccgcggcgaccttacccggagcaaaaagatcttcgcacggagatgctcgccgcccg

SEQ ID NO: 8296 - DNA, 452 bp, Zea Mays
aaaagttgtttgcgtggcttgggatgaagacttcggtgcaacagtacctctgttcttgctctgtcttcaacaagcaaagctgaaccggtctctcctccattgtcttttacaggcccttcccgtacccgattcaccatggcagatcattaaacaacggacaataagagcaacaaaaacaccaagtataaagtataagctaataagtgcttaaaccgagcacagaaaaaatcaggcgaaaggaacagctggaaaaaaatcagttgacgaggtgaagtgaactaagaaaactgagcagccaaacgcccacagtgcattcgatcagtttccaacagaagtacagaaataccactactgttccaatccaatcaagcaacacgactgcataaagagctcaaacaacttctaacaggacacctcataggctcatacggaggaaaaggagcaaatacgcg

SEQ ID NO: 8297 - DNA, 402 bp, Zea Mays
atatcctgagccaaccagaatcagattctgatgactggagggagccaatcatcagatacataaagaacgaggaggagctggttgacaaaaatgcagcagagcgcattgcaaggcagtcaactcactacaccctcattggggaaacactatacagaaggggcgcgacaggagtcctcatgaaatgcattctttcggctactgggaagcaactgctagatgaggtccacgctggacaatgcgggatacacgcagcatccaggactcttgttgggaaggtcttcaggtctggtttctactgcccaatggcgaagagtgatgcagccaagttagtccagaggtgtgaagcttgtcaatacttatcaaaacagcaacatctaccagcacagcaactgcaaaccatac

SEQ ID NO: 8298 - DNA, 755 bp, Zea Mays
gcacgataaaaaggaagttagaagccatcgggtgccctgagaaccagcgtgttcatctggctgctcatcaactttctgggatggccctatcctggtgggatacctttagcgtcgccgtcagagatgctacctggccagaatttgaagctgctttccgagaacatcatgtgccccaagggatcgttcagctcaaggaagatgaattttgggaactaactcaaggttgaagatctgtcaatgagtatgtgcacaaattcacagaattggctcgttatgcacctgacgatgtcagcacagaagccaagaagatggtccatttcttgaaagggctaagaccagaactcaagactatccttgccagccaagatttcctcagcttctcgcacatctcaaacaaggccatacaagtggaaaggaaaagggaaatggaaaagggtcacctcaagaggaaattccaagtcctccaagctcagcagcaggacaggcaccaaacaattcgatcctttgggtttccacccaagggaccaagtgtaacatcccaaaatctcaacccaaggtttggaaccctaatctcctaacccccccccttatttctatttttctccctaaactccacccttaggtcatctcatcatatgcatacacttggattgttaggaacacctcacatagattattttcaacccttaagattattcagcaaattgttgattcaaaagaaaaggaaataaaaagaaacaaaaatagaaaatgga

SEQ ID NO: 8299 - DNA, 615 bp, Zea Mays
cggaagaacctttagaagcggatgaatgggtgagagttatggaacaaaagtttggattgattcgatgcatggagacacaaaagcctttgttcgccgcacaacaactgagagggtctgccagtacttggtgtgaaaatttctcagcaatccagcctattggacatcagattacctgggatgagttcaaattggcattccgagagcactatgttccagagggagtactccagatgaggctagaagagtttatccagttgaggcaaggaggagatacagtgatgcagtatctcaacaaattcaaccacctctgtcagtatgtcattgaccaggtggatactgacttaaagaaaaagaactgttttatgaggggacataatgacatgcttcagcagaaaatggcgacatgtttggaccttacctacactagggctgtcagtactgcactggtagtcgaagccaaaaatgcaggacatgggaaatcaaaggggtttggaggtaaaaggtcaaatcaaggactagaaaagagaacaaggttggtcatccgaccttttaatcaaaatcgttcttcgcctcgcccaccttcatattcattcaagcaacctgtctttattcgtc

SEQ ID NO: 8300 - DNA, 537 bp, Zea Mays
gtgattcgctggtttggcggcgcggagcggaccttgttagcctggccgagcgcctcctgagcccagctacatggatccgccggagtcgatcaactgaccgagcgtctccttgcccccacggagtcgctcttgtcaagatctgacacattcgctccccattttctgccaacctcggaagcccagcacacaataaaattttgtttggtttggagagaaatttcggccgttcttgctttgtttttttttgtagctttgagatcgatcgcaggtgtaagtcaggtggcagcgtgagacccttacccttctggggtggatgagctgacacagttacacgcctgcgagatcacccacaacgggagcgctctttcgttacgcgcgccgcgtcaaatttccagtagcggctcgcgtacatcagggcgccacatttctttagcaaaccccacatttctttttctaccatttccttgttagtccagactccagatgggccattcgcctattatctcgagattttggtctgatcttgctcaacttgcc

SEQ ID NO: 8301 - DNA, 506 bp, Zea Mays
tccttctagggtggatgactcaatggccctcgtgttgaaccctccggccttgactgacgttgtcgctagacccaagttagggtcacccacgtccattcctatcatcgatgggtcaggcgttggcgagggatccctcgggttcacgtgcgggctggtccatcggtggatcgctctccctaccgaatgcgatggacaaggagcgacgacttgtcggtggtctcgctctagatagacgaagctgtcgagatgagggtaatggacaccatgatggccctccaaattgaggcatttgctttgatccaggtatgttatcccaaccccttgtgtctgcatcctccaatcttggtttaagcctttcattcctcaggacctgaagaggagagaaggtttcctcttttcgcaggtagaaggaggtgtggggcgtctttctagagaggaggcctggcattaggaggcactagagattctgttctggagacagcttgtcatgccacagccgacgctcg

SEQ ID NO: 8302 - DNA, 462 bp, Zea Mays
aaagcgatgttcgaataaattatgtcagggtttgtagaaaaatgaaaacccaagtgataatatgggtatacgacaactaatagaatttcaactataatctcaccctaatacaatctaagtcaagcagtttaaagaagagtgggaatggacttcaggagttgaagggacaagtagtccttttggtactcaatgagaaaattgcaagaacaaggaagtaggaaacatatttttgggagaactttttagagttctgatttgtttttgcagtttgaagagtgattgggtattgatcaattgtatagtttttaaggcatcgcctaggcggtaaggtggtcctgcgaggtaaggtgtcgccctcgccttgctccgacacctaaggcgggtgggagaggctggctatcaagggcgagctcgtggatgcagcagtggcgagtgcagaggcggcatggcgactgctgcgga

SEQ ID NO: 8303 - DNA, 522 bp, Zea Mays
acgcttcttcctccagcattcggcttcaaggatgttcatcagccttgcggaggtggagagcgagttgagctgcggctccatctttcacgtgagcttcaccagtgcctcatggtacaccaccatgaactggtctagctccaactccgtcgggtgggaagcgagccgagctgcggctccatctctttggctttgatggcttcggtgccgcctccaatggtgaccgctggcccggccgctgaagacgccacccagggggtcgtacaagatgtcgcggagatggcggccgcgtgcttccagcgtgaccctactgatgtcgagtaggtcatacctgtagacataaggctagggtcccgcttgaaggcggatgtaataactttgtttttgtaaggtacttttgagtactacttatcgagcactattagcgcttatctgtgtattatttgtccctgttgtgtgtggcgttgccgactcttccctggtacctggccccctgggatgtaggctcgacgtgtcgaggctgga

SEQ ID NO: 8304 - DNA, 400 bp, Zea Mays
gagaggcgctaatgcagtatacaagatgcagcagagagattaaggaggccaatgatgacaaaactgtcgttttctgttgtccaaggaggaggttaatttcgacggtcattggctgactgccagtcaaaaaggtagggtaaaataactccaggccaaattcacccgcatcagcatatatatgtacggcatgtgacgatagatgacgaaaaacagcaataacaacatgcagatgcagggactcagtccaagctcttggtgcaattaacatgtccatgattgaaaacttttgcatgtgtgacagtggggttcatgtgatcagttgcttggataattacatcatgagagtgactgggtgcgtctttgcacttgcaaggaggcctgtcgactgtctccctactgc

SEQ ID NO: 8305 - DNA, 460 bp, Zea Mays
gcgatatcttttaaaatataattccgaatcgagcgcataagtactcgttggaaaggtatgccaaagctctacatgattctcatatttattaccactaatttcctatgaaaaatccccagaaactgctactactactgctgttcgcccacctgcagaaatctgttttttggacagcaacacacccggattcaaacagcgatatcttttaaaatataatttcgaatcgagcgcataagtacccgttggaaaggtatgacaaatctctacatgattctcatattgattaccactaatttcccacgaaaagtccccagaaactgctactactactgctgttcgcctacctgcaaaatttctggacagcacctctaccgattcgcatagataaacatataatcgattggattgcagcacaattaaacaagatacaaacacaaaagtcaccttaaatcctcccctt

SEQ ID NO: 8306 - DNA, 498 bp, Zea Mays
ttaacaaggtccgcatttcgtataggatatcaggagagagagtgtgcatgggggagggggtttaagcacccgttaggggggtcgacacgagtgaccggacccaagcgtcggcgatggggcgatcgacgcggtgcaaccgtagtcgccagtccatggcctcagctctgtagtccctaagaatatcgggggatatcatcaaagtctcagtcaaagacgaacttgttgtgtcattgccagagtagccagcagcacaagaggataaatgtgctaaattttcatgctggaagcgagggtggtggacgaagtcgggggagcgttgtaggcgaggcgtcgtcggggacgatcacatcgacgtggtcctagaaggcccacacaaacggatagcacagaagaacacatgttgttgtctcaatgtcttggccattgacctcacatatgccattggggacgatgcattttcgatgaagattgttcctcatctgaagcctttgcaacccg

SEQ ID NO: 8307 - DNA, 902 bp, Zea Mays
ctgaaatgtgcggcgacatcatgaagccggagaatggtacccggcacaacccgtctctcgggacgaagccttagagataggggaaacccttgatgaaaaaacacatcgagaatggcgcaacacccgccgccgcgaccgccgtcaagctcaggaaagcgagcaggagctagctgagcaagatgctaggcttcgacagaagaatccgctcctcacccgaaacctgtaccctgacttcacccgagcattgaacacgccgagcgaagttggaggggtcctggtgcagatagccgatggcctcccgcgaaccccaaacgcgaagggctatcgacgggtacttactcaggcagccaatcatcttctacctcttgcccacccatcgaacgatctacatcacgccatcaacaaccgatgagacgcacagagcaacatcagtgcttcgcgcgatcgtcggcacaagaatgaaataaggcgtcggggggaatacgaccgcgatcatggtgtagcgacacacaaccgtgcgaccaggatcgaatcaccagcagcctccactaatagttcggtccagggacggtcgaggtgacctaacactcactcatctccccaagactgatggtgtaatcatcgacaggaggatacgtgtggggtctctgggccatccattggcctcccaattttaaagtctctaacatcgacaaatacgaacccaagcaggacccgggatttggctagctgtctacactaccaccactcgggttactagggcaacgaaggacatcatgacgacgtacttgcccatcgttctagggcatgatgtgctacaatggcttcgacatctaccccgatactacatcgatgattggggagattttagtcgcatgtttatcatgaactttcagtccctc

SEQ ID NO: 8308 - DNA, 1163 bp, Zea Mays
gagcgatcaggggtgaacccagaacaaaacaagaatgagggcacacctataaggatggacactaaaatattagagcgagagcatcttagttatgctcagcaggggacttaatggtgaaaatctagacactaatacttgcaataaagaaatgagcgggggcctaggccctcactcccttatatgtaggtctgcccctaagagcaattagtcgacccctagtcggtccctagtcgtcctggaccttttatactagtagttatacttatatatatcatataaattagaacaaacaaccatgatatacaaaataacagattgcttaagaaataaacctctagagacgtcagtgatatggacctctagagcagccaccagcagagggacgaaggcaggatttagggctttagatagccttagggttttgacagaggagaggagaggcagaacttaatgttcctgtagatgggcaaaaaacattggtctgtagcccaacacaaaagttcaagcaccaacgactagaatctggaaaagtagatgattaatcgccgttaacgttgactagtcagacgatctggacaaccatgttccctaatcgagtcgtcctgttaatcggctattaacaggcgaccaacccgactaatcacgattagtcgaacaacgacttgcaaccattggtggctaggatgattgtggccaagatagtgatttgattagtgagacttcaggaggggtgattgttggaggtatggttccaccagaaatgaggtaagtgataactacagagttattgagtactcatgaaagaagtggtgatggggatcataatgatccaattattaatagtcaagacgagacagaggatgatgaagctgtgattgttggtacaatcccgtgttctattgggggccgaggtgaatgagaagtagagggagcaatgacctatagtgtactatcgaagactagctaagaagcagggggagcaaccactacctgaacagccacaacctgaacaagttgaagctccagtaccatacctctcttcagactcctctccaacaccagttggtaatgttgttccccttctaaacatgtagaattacctcttgcacaaagaagagatcctagagtcaatgctagaaaacctccttctcgttatggttatg

SEQ ID NO: 8309 - DNA, 298 bp, Zea Mays
ggtaatgcttgacacgagctggcgtcggagaggacgttcccggagagggtaccgtcggtgttagagtacgtggtgacgaagagctcattgtagccggagtcgtggctggattgcgtggtggcgaagagctcgctggagctggagagcgtggcgctggagtcggtggagacttggggaatggggtaggcctactcggagaagagttgcctactcccccggctccctcaaagtggacgtactcgatggtgaagttgtcgtacgtcggagtcgtgccgtcgtccaccgccttgtcccaggc

SEQ ID NO: 8310 - DNA, 869 bp, Zea Mays
cttggtgatgcagcgggtggccctcaacgattggcgtctcctggaacgagtcggtaaaaatcacgcgtgcgggcttgctctggtcgccaggggctagccactagagcctctccagcgaaggccgacaccctagccccaacaccaccaacaggggcggagggcccagtgtggctcggtattgccccagcaataccttagcctaacccaacaacggaccagcagtaaaacaaatcccaaccctagccggctatttcctgttcactccgaaggaggcgcaagccacgactgtcaacgcctaccaatccacacgaccacaaccgcccccagcctaaggtccgagctccgtcagtcgtgtgctggtggcccgaccacaatattcatgacgacgcacctcctcccatcggtccagaccatccgcctgcattgagatccttcccgcagccaagctcctccccgacaactacgtcgtgctgagctcgtcctatagaacgttgctcctcccacttcctaggatgctgcaccaatctcctcccctacagccgcgtgtcggcgctcgcgtcgagctcctccccagcatttcctccccgactaccatcgcctgtgagtgactttgttggcgtcgagctcatcctcggtcatcatggcgagctcctccgagaccattgtgtgggtgcatgtgggttgtgccgaattaaacaaacaatttacatttaaatacactgaatacatgtggcctctgtacagcattgagcattccgcctgcttcatgattctgcagctccgatgccgagcaaacaaaacaagcagtagagatgaagagaaactaggcaaatgtggttgtctatcttctagaaatggactcttatttt

SEQ ID NO: 8311 - DNA, 369 bp, Zea Mays
ttggggcaagattcgccagacacagggaacaacagccctagactgcgggttctaatctcaaattccagaggggctctttaagaaatgtacacggtgaagaggtatccaccaatctgggccgctagatgaagcacggacagtcgtgattaaatcgacccagaaggtatttccgattaaatccgcaccgcatatctaccatcccacggctatcctcctgtccaacactccggtgagcaattgcaagcccccctaagccacaatccgatcctaacctcagcgctccagataaccacgataatgagaattccagggagaggagccataccggttgaatagtcgagaagatgctcggccacgttcgtgcggatc

SEQ ID NO: 8312 - DNA, 644 bp, Zea Mays
gggaaataaggtctgttatccagttgatgacataacaagaccagtgatgtgcacactggttataagatatggtattaacaataatcgcatgaagaaagtaggaacaagcattgtgatcctaggacacaagtttcatggaagcgacataccagatgattattgcaaggtagaagtggcgatggtcgtccaaggatctgaggacgacatgttagacatcactagacccgaaggaatcgagacacttgaatagccataaaaaatttcatcctttggcctcgaagggatgtcgaattggttgatccaccaacaccgtcgtcgtttcatccccaaccatctcggcctcctcaaactttagtacctttacatccatcatcacctccataatcttcccatgctgctcctcatcctctttctaatccaccgtctccaccacaagcatcaacatttatgacaccaccaccttctccacagccatcaagggattcacgacaatcaaagaaatctaaattccctctaccaaaattggtgtccacattcgagaaaaagaagagtaaagctactactgctggcacaactcgatttttgaaagggattggacgggacctcacgtcacgtactgttgatttggccgagcacgaggagtc

SEQ ID NO: 8313 - DNA, 679 bp, Zea Mays
caagcccgaggcaaaggcgatgtaccacaacctccacaacctggtggagagagcaacggtacaacaagctgaggttaatcagcagtagcatgccagcacagagagccgtggcacacacacaacctcatcctggagtagaggagcgcaagcctccatgtccactctagcatgtgtccacataaagcatctcatcggaggcattcgcggtgcccgacacatcctcaacaataagcatcgggaacgataagaggtcgagcaaccacacgaaagaagatgcgcgagcagcctcagctcggctagggtgggaccacacgccttcgggcacgagatccgaaaggcacaatttcccctgaaggtacacacgccggccaacatcaccaagtatgatggctccacaaatctcgtcatatggctagaagactaccagctcgcgtgccacatggcgggaatcaaggacgacgacttggtcatccagttccttcatgtccatcttgcagaaggggcaagggcttggctcgagcacctgcatgccgataccatacataatttggccgacctccgaagagcactcgttgggaacttccaaggcacctacaagcgccctagaagctcttgggacctcaagaggtgcgcgcataagagtggagatagcgttcgagactacatccggagattctca

SEQ ID NO: 8314 - DNA, 662 bp, Zea Mays
gacgcgtcgatggtggaaggccggaacgtgtagaggggctcagtgctgtcacagctcgcgagagggttcctggtggccagatccttcacagaaaaaccagaggggtcaaactcaatggaacaagaattgtcggtggtgaaccaacgaacagaaaggagattataggtgatgtgtggggctatgagaacgtcgttgagatagaacgacccatgtgacccacatagtggaaccatttccaatgacgattgaggtgggatgggaggtaggagggggtgggagcgagatagtgtgcctgcagtgggggtggtgtggtaggaggcaccagagttgaccacctagccggagggggtggggtcatcgccatggtgctgaaattggcggcgaggaaggcggggtcccatcctccagccagcggagactaaggcgtcgaggtggtggtccccagggcgggagatgtggcgtggccagagttgtcagcggtacaccgaagggaagcgcagtcaggaggaccgacatcgaaggaagggaggcactcgaggcttgacctagccacatggagacgttgaacactaaggtacggttggcgacgggctcgtcgaggtcaaggagagagtctgtgtaacatcccaattttcaacccaggtttgaaaccctaatctaac

SEQ ID NO: 8315 - DNA, 768 bp, Zea Mays
cctacccctatatactggcattctttcaacgcggtcgatcggcgcagttctctctgctcgtatagccgaaaaccatgggcagcgcaccagcgctaggatatactgaaacagtgggtgctgttgctcgctcagctcgctcgggtggtatttgtatcaggaagcagcagcaggccggcttgatttttcatgcatgtgcaatgtgtctactgttgtaaaatataatattaacaatagagatgttagcgtttcgatccgaggatccaaccaactagtgaattagtactgtgtgcctagatctagatgtgtgatgcaaggagacacaagtctttattctggttcggataagagaagctcctccttctagcaaaggagaatgagacttatattacttgcacacaagtggttgtagtatgggatacaagccggtagggagagggagaagttttcaagctcctgttgatgattgaggcaagtgtcaatatcagtcgtagaggtaaaaaccgcgaagtgttcccctccctgaatgaagccatgggctcctccttttatagcctcaactcaaggagggctccgaggagcgccatggtttgtcgcgtaagggagaggagatgtgtccgaacctctgcagccgatatagtcgtcgatacggccttcgtacttgctgttgacttgaactgggaggaggatgtctgatccttgtatttgcatctttgaccatacagagagccgagatcagggtccggggctcggacgcgtacccaagcctgc

SEQ ID NO: 8316 - DNA, 437 bp, Zea Mays
agggagagggcggcggcgccggcttgattgagctctggggaggggtggctgaggcaggtgtgaggagaggtggagctcgggcggtcccttttataggcgcccgagaagggaagcgaccaaaaaccagctggcgccggcgaggtgcacagcggcaacgatgatggcgcacagcaccggggacaagatggctcggggcaggctgtcgtgtgagagtgcgagcacagtgcacagggggcgaagcggtgcctaactccactggagcaggagtaatggcggtgagagaaagggagggtggtggtcagcggggattgcgctagtgagatcatgagcgaggagaaagggctgacaggagggcccacttgccagagggggagggggcacgagcgagcggggcaaggcgtgaatgacaagtggggtcgagcgacagtgagggaggg

SEQ ID NO: 8317 - DNA, 750 bp, Zea Mays
gcttctgagtatccaaagttgtatcagcctctgggaggggtgccactactaacgccccagcgggagcagcgttggaagaatcctcagccagcaaatcaagcatagcgcttatctctgcatcactagggttcaggggcacctcaaaatggacctgccgttcatcatcaggaatctccccaagcgaggcaaccaaggcactaacttcttcagcagagggtcgcactctaaggcccaagctgccatcagtgacaggcggattcgacacaaaaagggtgagggctttgggaggaggcaggttccaggccgagtacgccactggagcaccaacattggacactttgcctctaaggatcatctcaagtcggctcaccaaatctgcagagggaattcttctgtcggtaacccgagttgagtcggctaggcctcgatacagataagctgggtatgccctgtccttcaacggctgaatattcttgaagacaaaatcagcaaccacagcttcagcagtcagacccctctctttcagcagtccaacttcagctagcaacgcacctgcctcagctacctcctgatctgtgggagactcggtccagctaggggtgcgaacatccggttgtctcaccgaccgaggggggagagaatttccataattctcgactatgaaccactccaggcgccatcccttgatactgtctttgagagggatttcgagatactcagtcttcctcccatggcgcatctccaagctgg

SEQ ID NO: 8318 - DNA, 1132 bp, Zea Mays
gctaaaatagatgtaacttgattcagtgtttaactgtttataaatggcttttccgtgcctaagtgtatatatgttgtttctttagctttgaatatgagtgacgatcgaagaagggcgatgtacgatggattcgacagtgtcactcatggtcactctgatgcatgggtgagagttgcagatgaattcgtggcactcgcatttgttggtgatgctcgtttagcgaggtgcccgtgtataaaatgtcagaactcggttcagttgaaaaaagtggagctctcgtatcatgttttcaaacatggctttatgccgaactatctggtatggcatgagcatggagaggtggaccatactattgagtcggatgtggaccaggatgtagaccgaatggaagagatgttggataatattaggaatgagtacccagaactacacaataatcaagcttttccagtggatgtgagagagttctacaagcttcttgaagcctcagaggctaaagtgcatgaaggaaccaatgtgagcgtactgcaggtggtaacacgtctcatggcgatgaagtcaaagtacaccttctccaacaaatgttacaacgatattgtgaaactgattattgatatcagcccaccgaatcataacatgccgaaagacttgtaccattgcaagaagctcgtagctggtctcggcatgaactaccaaaagattgatgcttgcgaggacaattgcatgttgttctggaaggagcatgaaaataccacacattgcatccactgcagtaagtcaagatatgcagtggtgctagatgaggatggaaacgaggttacgacaaaggtatcgatcaagcaactccggtacatgcctatcactccacggcttaagcgtctctttctaaatcaagagacaacaaagcaaatgaggtggcataaagaaggggatcgtcagggtcaagatccggatgtcatagtgcatccctcagatggcgaggcctggcaggctctcgaccgttttgatcgagaatttgcaagagaccctaggagtgttcgtcttggtttgtcgacggatggattcactccttactccaataattccacttcttactcatgttggccagtttttatgatgccctacaatctcc

SEQ ID NO: 8319 - DNA, 490 bp, Zea Mays
aaatcttcgtacggcacgaagtctcgtccacgggttcgcctagccggggaacaggggcaccgtcgttggcgttgtgagatctacggcgcgctgcaagtctccgtgatcggctacacctgtgcctcgaatgcggtaagaaatcatcctcgattcaccactcgtcgttaaatcctcagcacattggtgttatccacacttcgacccacaactgcaagtagctgttcatcgctcgccagggcttggcttcctggctctggcaatggccgccctttggaagctaggtagaagacgaaccccggcccctcgatttcgcagtgtgcggctacgattagatcgtgccgtaacggttcgtttggacgagggaaaaccatagatcgatgatcgtggggctgtgggtgattcgggtttcatagaatccggttcatcagatcttaatccaagggctgtcctcgcgtatcacttcactgggggcgcgatctaatctagaccg

SEQ ID NO: 8320 - DNA, 293 bp, Zea Mays
gagtgctcgggtggcttggcgggcggcgcagagctcgccggagctaaggacggggtcgggacagagggggcaagcatggagtgaagtgtggcgcgtccgagggtggttttgaagggcgcgggcgagctcggcggagggctgctctgacacgcgctcggggcgtgcgcggggggagcgccagtgcgtgctctaccgcctcggcatggcgtcgagcacaaggcagcgctgagggtcgccatgttcaagcgctgattgtccccaaatctttgggattaaggccatgatccctttgt

SEQ ID NO: 8321 - DNA, 652 bp, Zea Mays
caattaaagggttcgaggggtttgcggggtacctaaggaggctagaacaagtggcagagggacttgagctcacctgaatcgagctagccacggtgaggtcttcttcgcggtggcggaaaccgaattgggggaagtgagcgattctccggctatgggggctaatcggagacgagagtggtggctatggcttcggtatgacctagcgcagctggccgggggctcaatttataggtggagcgagcggtggccgcgaattttggacgagacacacggcggtcggaagtgaggaagaatggtggtgcagtgaacacgtgttcaccgccgtggcagtaactccggtggtcgacggggagtttagagggagtcacggcgatgcgatggcgcgattaggacacgcggtggccaacggcgatggcacgacgacggtgagcactttacccgcgggcggtgagccaggggaggagtaccgcagctgaccggggtggcttccagcttgacgacggtgaggatcttttaccccgagaggttatccacaagtccggtgcacgaatccaaacgccggcgacacgaatcacggcggagggatccgtcggcggtgaggacagccatgctggcgatctgatccagtcgggctactgtaccatggcgagac

SEQ ID NO: 8322 - DNA, 282 bp, Zea Mays
cgcctggacgagtagacaaagacgaagaccctggacggctaaacctggacgagtagacgaagaccctgcacggcgaccctggacggcgtcggacacttggtggcggcggatggatcaggtcagctggtgccgtgtggtcaggtggtgccgtgtgtagggtttgtcatattgctgtgtgtaggcctgggcggtgggctggtccgctggtgtgagacgtgggttgggctgtaccactgtagcactgtaggccctgtacgcatgtaggctaaggttgtaccgctg

SEQ ID NO: 8323 - DNA, 424 bp, Zea Mays
tggtccagataccatgtaggctcttttataaatgggggcggtgccaggaataagctctatggcaaactcaactttccgctcaagtggcatacctggtaaatctttcaggaacacatccgaaaattttgacacaaccttgatagtctcgagtggatctgcctccttgctatcaatagtcatctggtgacaacctccttttcttggctcgggtgagactaactcagtcaccacttcttctcctagtggggacaccaacttaattgtcctcttatcacagctgataattgcttggtacttatctagccaatttatcccaaggataacatctattccctgagtacccattactatgaggttagcggggaactctatcccccttattttcacacttacattcaagcaaacactatcagctcaaactttt

SEQ ID NO: 8324 - DNA, 517 bp, Zea Mays
acgaagggcgcccctgacgaagacgcccctgatactgaagtggagcagacagatattgaagagggcgatattggtgaagaagagattgattataacaccgctatgccatcgaagcccagccatttggattttgggaagtcaactgtgtctgaagctgatatggctatgatgacaaagttaggttacttccgagaagccgataaggggttgattcattttggtggggaagagactatcccgaagccagaaaatgatgaagtggtggttttaagagcttcttcaaagcagggttgagatttcctctgcacgggatgattgtagatgtcttggaaaattttgagatttaccatcatcagctgattcctaacggcattgttaggctcagcgtgtatatctaggctctccgaagtcaaggggtggagccgctcgccgaagccttctgccgagtacatgaacttcattatcaaacgaaggctagggaagacggactgcatgagaacttcggctgctataattt

SEQ ID NO: 8325 - DNA, 650 bp, Zea Mays
agatggatccgaagaatcgcaaccctaactgggaccggtgggggccgaaggatgctccgcagggttcccagtcgtggggtaaaaatcggagtctcagctggcggttgaagactggatctggaaagcctgatggcaaggatgacatccctatctctactcccggcgatggcggccagccaggtatcctcaaaacccctcaccctaccattctgaaagttgagaatgaattggtgcatagggttttctgccaaaaatatggtatgaatggccatcatgctagggagtgctttaaatctttgtggtgtgagatatgtcgcaaggaaacgcaaaacaccgctcggtgtgttctccccaaacagaacaaacctagcatgcctattgttgggatggcgccagatgggctagggttttactcttctcattttgccaaaccgttatccaacaaaccaaatcgcagttttattggtttggttaaaatcgttgagggtttgatctcggccgaggatcttgagaaggatttcggttttcatttcccctggggacgtacttggaaagctaccaagtgtcattctggtttcctcatgcaatttccctctcaagagaggttggatgagatgattaatttcccagaaatgaaaatgaagttgtcg

SEQ ID NO: 8326 - DNA, 321 bp, Zea Mays
gtttttgcttaaacgtttactaagacctgtgcctccttatattggggcactcacaagactcacgctataacccagtccagcccactcacgcgagtgttaggctggcgcacacgcaagccacgtcgcggcccagtagtcacagcttcaggtgcgtcgcgtgcagccatctcctgaacaccatcctccgtagcctgatcaccatcctcagcgctgacatcacagcagggaagcagaaagatatgcttttttaagattaataatcggcagaaagatacattatagttccgtgaggttaaattttgactataggcaacacttctg

SEQ ID NO: 8327 - DNA, 1024 bp, Zea Mays
cttgtacacccttttatttgttgataccttttgtaggctgcgagggacacagaagccctgaaggtggagaaggagaaacttgaggagcacgtggaagagctgactagccgtttgagcttcgaaaagaatcttagggtggatgctactcttgaattacggatttgagatgatgtggataaattaacggatgaatttatgctcacatagtatcacttttcagattgatctagagaagagcaaggcaagagaaatttgcaaactacaggccactcttcgtgagatggaacagcgggttgaagaagccatagagatgcatgaaagagaattagccaaaaaggctattgaggaagctttagctcaagaaagggaaaagatcaccgtattgactaatgaagtcgatgagttgaaggtacttttttcctaaatcaacttatgaaatatcccaactgtaggtatctgcaaggatttgaatattgcattattaatttaatcaaatcagatacaattacagcatttgtttcaagctgaatggtaaaaagaatagcttggctacaaaacatgtcccacgtttgattagagtatggtggaagttatttgtttatctttgtcatgatattttctttttatggatgactgtaactaacaggtattactatcaagagaacgagaagaaaacagtgcaactaagagtgcactcgttgttgttcgtgaagaaaatgatgtgctgaataagaaaattgtggttgcagatgcaagcatggagcagcttagagatactgtaacgaggttagttgctcaagtagactgtgccaagtttctttgattctagccaagggttctgaattacatatctttaagttgccaatactcaaaactagcattactttccgaatagcacttcaaaattctaaaccattcagtcattcactgtaataggacgtatcccttaacacagagagtttgtctggatctccggccaagatctgccaggaacataagcaattcctaggtgcgtaaacttggc

SEQ ID NO: 8328 - DNA, 419 bp, Zea Mays
tgttccaagagtatttggacaaggtgaacaacgataacaaccatattgacgacgactacatgccctccgagttgtcctcaccaacccctattgaagcacaccttaatgaagaatgagacttcgccaagcactttgaaaacatgtgggtgttgaatatgacttagtctcatagtggaaatgggggaaatgggggagcggtcgatggtggcaaatgggggagcggttgatggtggcagctcatgttaacatgggatgtagtcttggctaagctacctcgcccagagggcctccacactgacttagaatccttacggttgctttatcctaagtatgttttgtgaaagcctcatagtggatccctagccattcacctttgaagtgaatgtgagacacgcaaacccaggctagaagggatacac

SEQ ID NO: 8329 - DNA, 737 bp, Zea Mays
ctttggtacagatggatcaatagctcaccacatgaaaaatggagaatgaagcttctcaactcgctctgacagacacactgatgaaggtggccattgtacagtaactgaagatgatctgaggtgtgttgcacctcgccgccggtgacctcgcgcctggattcacgctggccgtcgcgattcttgccaagcgcaatgtggataactaaggggagtaaaagatcttagcgcccagattggctcggactcggtcactgttgaattcaccgtacccacttggtcgcggctggccggaatgatcttcgccggcgttggccgcttaccgatcgtgcgccacgtgcctgggaggtttaacacgtcgtagtgaacccttgtagcaatcccgtccatcaccggtggctttgccacggtgaaagccacgatagcgctcgcgctagtgacttctcctctctccggccgccaacacaacttctcaaaattagccgccaccgctctcggacactataaattgatggtaccgctagctccgttgggttgtcacgaagccagtgcacccgctcgtacctcagatcgtctaccaccaagctctaatttgggatttcccccaatccactctccgctccgccgtgagccatcgcgtcgtggaccgccgtccctaggtttgttcataccctcctttctttcgttcccgcatccttgtgtgctacgggtgcttataggcccagtcaattgaactagac

SEQ ID NO: 8330 - DNA, 432 bp, Zea Mays
gcgagagtagacctggagacggtggtccatggcgcggtgactcatggcggcgcggagaactgatttgggggaaatcccaaattggggcacgctggtggaggatcagaggcgatggctggggctctggcttcgtaacaacttagcggagcagactggggcatcaatttatagaagctttgagcggcggctccgaatttggaaggggaagtcactggcgtgagctaccgtggcggtcactgaggcaatgcttcaggcgacggacaggcttcctatgccggttcactgtgacgtggtaaagcttcgaggcatgtggcattcgagcagtaggcggcaaactccggcgaggtcaccaggatcggccacagggcaagtgggtacggggctagctcatggtctcatccacggtgaagatcttttcactgtcgatcataa

SEQ ID NO: 8331 - DNA, 359 bp, Zea Mays
ccacgagctaccagaggtagcaaagaaacagatccactaatccattatcttttttatcgactcatgtcttagactgattctaacctagtctatatcgatcgataacgtgttggtgtagtcggtcgatacctaacaccaatcgaccggtaccgatcaatttccggctgattggttgtctgcgcatactcatccaaatctctactatatattaaggcaatagtgtagaccatgggcaatgcccccgctcgccctcgccctcgcccaacagccatggatcagccccgctcgaccccacccacgtgcgcgatcctccactcgccagtacctgccccatcccagcacacacgccatcctcatcc

SEQ ID NO: 8332 - DNA, 462 bp, Zea Mays
gcgggggctcttcaagacttcgcttgccgcaactccaagcatcggcctcggcaagactcgaatacccggtgccccgagcgaagaacgcaatttatgcccgcatatgttggcaaaatgggcccacacggcgccttgctgacttacttggcccttgtgtaggccccattgtagggtaggattgatggtgtgtttgtttaggttgtacttaaccccactgtaatgacatgtaatggcccccaaggggaatattccagggataacgtaggtaaccaggggcatgatcgtacttacaagggcatgtccactctcctggttacttataaataccctcgcactgtacattgatgggacacgcttaacaacaccattgccccatcccgttgtgttgttgagcatcatagcattcctacctttcattgcttgggcccacctgacccacctgaccatgtgtcagtcggtatc

SEQ ID NO: 8333 - DNA, 355 bp, Zea Mays
gacaagtgaagatttcagcgtataaattcttcatctcttcagctttgccaaaacacagaatctcactcttgtgaaagttaattttgaggcctgacatctgctcaaaaaggaccaaaacaaatttcagattccttgcatacatcgggttgtcctgaagaaggaagatagtgtcatctacatactgtaaacaagcacaaccactttcaattatgtgaggaacaaggcccaccaaaagaccaacctcctaggcccttttaatcatgcaagaaagaccatccacaacaatgttgaagagcaacggagataagggatctccctgtcttaccaccttatgagtagagaagaaggggccagt

SEQ ID NO: 8334 - DNA, 565 bp, Zea Mays
ttctccagctatgatctggaggctcgcaacattggcaccatgaccatcttcaaggagctaatcaaatcaatcccacagcaagctcaataaaaatctgttaggatgtaacagtgacatcaagaatcaggaacatagaggggagtgaggacgcacctgcagacctgcttcggagttccctgatctgggtggcttgaattcgtcgttgatgtaattctaggacaggaaaggctggacaacagaggggatctaacctctgaagctctacgcgttctgaagtgccaaagatgtcatcttagagaggggaacaaagtaagcgtggccaggacagatcacatatgcgcgggcgttgcttaccatggcagcttgtaagtcaaggaagtgagtccagcgacgatctgaatccgatggaggcgcccaagctggtgtacgacagtggctcgaaaagagtcccgcacacaactatgaggtcctgactcctcactcctgtagaggtgaagtttgtctcccgcgcaccggcgcacgtcccctatcccggcctcccgcagtgcttcctgttgcaacacat

SEQ ID NO: 8335 - DNA, 721 bp, Zea Mays
gcctcacgggtattggtttcctcgccttctgctatttcgaggctctcttgaagggacaccttttcctttgttagttccctgactttttgctccaggctttccacccgggaagttaggtgggtgcagtggagggtgaggtcatcatattgattatcaagggtgtgaaggtatccagccatgtagacgatggtggggtcatcctcaataggatctcctcctgacagggcctaaagtcttttcctccaggtggtgtgtttttgttgctgggtgggaagtagcgaaggggggtttcaaagattactttgctgtagttctggcatagttgtcggagggctgttcgggcaacattctggcaagtatctgggaagcggtatccggtaaaagtgacttggaaggaaggatggttcggatagttttggctttctcccaggtagactgccatagagcattttcccattccgttctcgagatactccttccagacgtattctggcttcttgcggattcccatgcgaagcgcacaacttcgcaacagatgtgggaacccttccacctctgagcagtaggatgtcctaatggcccgagagtcttccatctagaatacgaaaagaagggtctgttaaaatcggggaagaggagagaagacttttcttggggtaagaggtattttctttttagggcaagttttagggtcagggttgcgacctacggccagtcctat

SEQ ID NO: 8336 - DNA, 658 bp, Zea Mays
ccaaagtgcaagacaaagtagtaaaggtgatcattgatggagggagctaccataatcttgcaagtcatgagatggttgaaaaaattggtttgaagttgcagcgacaccctcatccatatcatgttcaatggttgaatgaatcgggagatatcaagattggttataaagtgaaagttccgttcaagattggagagtatgttgacagagtggaatgcgatgttgcacccatgaatgtgtgtcacatgcttctaggaagaccttggcaataggaccgatattctcagcattatggaataacaaatcagtacacactagatctgaaagggagaaagtatgtactcaagcctatgacccctcaacaaatcatggttgaacacttacaaaagaaaactgaaattagtgcagcaagtaaaggaggagaagagcaaatgaaattaagtgtcatccacaattcggactttgaagatgtgtttccataataaacactagctggactacctccaattcatgggattgagcgtcaaattgatctcattccaggggttgcacttcctaaccgtccaccatatcgaaccaatcctgaagaaactaaggagatacaaaagcaagtgcaagaacttcttgataaaggttttgttcatgaaagtttaagcccgtg

SEQ ID NO: 8337 - DNA, 453 bp, Zea Mays
ctagaaggtgaaagacccttgcatggggccatggaccagttgccccacaaccacaaggtcgcctcgtcgtgggccggacaatgaccgcaagtgaaacggggtgacccaagaaggcaatgggctcgtgcctggatcgtctgtggattacgcacaatctcaaggaaccgtccctttttccactcctgacgccctcgaacgtcggggatagatcgagatggagtcggtgggttttccttaggataagctaagttagttcgctatctgctaggagataagttggaagagtatgatcatcgtgtgcgtagggagtatcccacggtcatgtatataaggcttagggggaccccatcattttcatctcattagcccctctccattcaggagacaccacttgtaacacaccacacatacagagccaccctaggaagtaggttattacacctctcaaagcgg

SEQ ID NO: 8338 - DNA, 484 bp, Zea Mays
cagctctggaccgggcctcaattaaatagaaacacaggggctggcgcgtaaaataacacagactcaggaaacagtataggtgaatggcgggttgtatttcaaagaaacctagggtttcttatgctaaagtgcagggcgaaggggcatggagcaccaggaaccgtccgattagacctcagccgccaggattagatgcgactacaaccgaataggtatggcccggcagtcgtcagatccaaatattgtggcccagattttataagctccgatccaacacgtgccgcccgatcccgatccaacgaccctcgatcaatcacccaagaggctatccccgctctaatatcaaccgcccaaaggggatcgaacggtgaccacccgtcttctacccccggccaccaacccgcggcagcaccggatctccacgatggagcgatctccggcgaatcgcaaaccggcattccactggcctaaaacccaattcctt

SEQ ID NO: 8339 - DNA, 829 bp, Zea Mays
cggaggagagttatcacagaccacatgaatctgcaatcagaacatatgctttgactaaggctgatggatcatattcgcaggcgtccccgtggaatagatcaaatgccaataagtcaaatgtgaatatgatattaatcccaggtatatccacaactacatcaggtagaagcattcaaaccaatatggttaatcctcaacgatttctggcaaactccatatacacaggagtacacactgaacgataggttcagtttggcttttgtgcgttttatagaatattgaggcattacactatatggacattcctccacctaaagccgagatgttttaaaagcatacatataaaatccccaaccataatcatccagttgcggccaatgtatgctatgtgatgatttatttgggaaatcttacgcacattatagataggggttttatgcagtgagctttggacttggattaatgtagtgacatgaatactacatatttgtccttcaacatgaagggttagtctcaacatccagcgagacacgcaacaacaagttgcttcattgttacaattctgcaaacttattgttattatcaccaaatatacagtcaatcatcaagatttagactgatacgcgcaacaatatgttagccataaaaacaaaatactttagggctcatgcacaccatttgtcgtttggagcaactagttgacttcagatcaacaaggacaatgaccatcaggtctagcgctcacaagaacattcattggttgcattgtgctttcaagcacataggagaatttgcgcatatataatggtggtaaagtgcacggcatcag

SEQ ID NO: 8340 - DNA, 362 bp, Zea Mays
gtccaatggtacagtgcttgatcggatcagaccgctagcgcagggagtcctcaccgccgatgaccaattcttcaccgcgattcgtgtcaccggcgactggattcgtgcctggagttgatggatagcgtcgcggggtgattgatcatcgccgttggtgagctggacgtcactccggctagccgcggtacctctcccctcgctcaccgccctcggataaggattatcaccgccgttaagccgtcgccgttgtccgatgcgtgtctaactctttccaccgcatcgcagtagcctgctctcgctctccgttgatcaccggagcgattgccatggcgtaggacaccaaggcactgcgccagtgctct

SEQ ID NO: 8341 - DNA, 278 bp, Zea Mays
atagtacttttcattactttccagataatgctgcgaagaggaaattacacttgagtaaatatcaaacatgaaagaatcagaaatctatataccagaaaactatgtaacctgtggctggtagctctcatcttcaatgtcgtttgcagtgtcactcttatcagtaacaaaagatgagcggccatctgtggactttgcactctgtaatttgttcccaagtttctgaagatatttctcagtttcacgcaatagttgcttgacacgatcagattttgcatcct

SEQ ID NO: 8342 - DNA, 319 bp, Zea Mays
cgactatcgactgtggaacgaccatgactgcaggatttattggcaacaccaacacagctctgatgtacagtacagagaacagtaggtgttgtcacggtcaatctcctcttttcagcataacgtgagtgaagtgagtgcgagagacagagacggcagcgtgtagactagagccccacgttctagatgatcaggagaaaagggggcggaacatggaacaaagaccagggaaaattgcgaagggggagagtaggagtacagtagtgcaggaggttgaaacgaactgctagtgtcacaggaagagcatgtggatacacggcgg

SEQ ID NO: 8343 - DNA, 827 bp, Zea Mays
gagcaatacaataaggtaatgacatagccctacagatttgactgaacatcattcacagtaactaaggaagtaaaggaccatctgaaatgttattgacactttgagctactcaaataaacaatgaccattactttggcgcggttaaggttagactttttgggttaccctaggatgaatcatgctgaaactttagtaaatggtcaattgtagtggacagtggggaccaaaaaaatgtggcacaacacttgacagtttaaggcagattcgaagtgtagccgtagtgtagggtttcaaaaatatgggaatctgcagagcaatagggcgtaatcgtttggagtaacattcgtttcctaaatatctaggatattccgcgggattttgactcccataaaaatgaaaccctaaggcacaccagatccgtgtacatgtttgcaccggggagtaatccattgttgtcgcatgtaatgaagttcggttaactggaatagtcgattggtgtagaaattatttcatcaaacggaggcgcatgaagtacacaaagcatagaagacgaagggcgtacctcaagaagcgaagattacggccaaaacaagaggaatcgaagcgatgatgtccggatccgaggaagccgtcgatgctcggagcgggaaaggaaggaagcggtcgcgacgaacctcggcggaatcagatttgcggcctcttcgtcttcgctcgcgaccggacctgcctgctgagcacctcgacttcgtcttccacacagccgacggggaccggcgccgacgcgaccttcccgcggtagatccgccgccgcctcgctggaaatccgc

SEQ ID NO: 8344 - DNA, 424 bp, Zea Mays
gtcgtaaatggtgtgcacatggtaatattcgtttccgtgagtcaaggtacaaaagattccttctatgcatgatttatgcacattacacatatatttatgcgtgcgtatatcgcctggcgcacgtggacgagcggctgtaaagttgtgtttgtttcctcccgtaactgcgcctttatttacgcgcacgaagagcacgtctttccttatctcaaaaccggtgggagattttaaatgtttgcatggtttacgctatcatgtatcacagcgttatgcagtcgtaaccgacaagcacatgcaaatattcgttcccgtgattcgtggcataaaagattccatttatgcatgagttatgcacatttgtacatatatttatgcgtgcgtatatcgcatgtcgcgtctcagccgggatacgtggctatcctat

SEQ ID NO: 8345 - DNA, 882 bp, Zea Mays
caccaagtctagcgaaggtgaactagtccggctgaagtatacattcagatatgaggataaattcgatgaaccaaacgatgactggctaaaatgcatcgaagttacaagtgatgaactgctcggatcatattccaaggcagaagataatgcattatccatagccatcggaagttgagaaaagaagagattgaacagagtttttgatgctattggcttcgtctaccccgactaccgctacccggtgcgggggcaagggaagaagaggaaagttgttgctctggcttcctcggctgaacatgtgccgaaggctgcagtcaaaaagatgaaggtacttacccaccggccacgttatattgagccagtcgtggtgcctgagtttggcggggaggcctcttcagctgctgaatcaagagaaactgctcctccgatgcagagggctgaagaactggctacaatgccgaaggcaccttcggttgagctagttgaaacgaaggctgacaaagataaggctgaaaggtcaacaactgaagaggtatcaaagatgccagggactttaagccctcaacagaagcaacagcgctgagggcacaaaagagttctgccataactcctaggaggaggatggtaaatgtattagatgtactggaaacaaccgactccataagtctcgctcccaaagggaaggttgccgaagctgacaaaacgcaacccaaagttgacactaagcaaatagatgttgaagctacaacaagccgggctgaaactgaggcagggccctcagtgcctgctgagatgaagcctgcagaatttgaagaaaaggcaacataagaaaaagccacagagcaaatttcgtttgaaaaggttgccactcctgctcccgaa

SEQ ID NO: 8346 - DNA, 409 bp, Zea Mays
ttactggcccgctataatctgcgccgtgaatcgagtcacgaggtcgtgcgaagcttgccagaagttttctccccgctcgggcaacccttcacagttcaccaagctgattgcccacacatggccacttcaacgctgggggctggatattgtcgggccactacctacggcctaagggaacctcaagttcaccttcatcgccgtcgaatactttaccaagtggatcaaggccaaggcagtatccacaataacgtcgaagactgcccagaagttcttctggcaaaacatagtttgccgatttggagtctcgtccgagctcacagtcgacaacggcaaacagtttgacagctagggcttcagggacttctgcctctccatcggcaccaagcttgccttcgccttggtgtaccac

SEQ ID NO: 8347 - DNA, 716 bp, Zea Mays
gcgatccactatcacccatatagcatccctgccccgaggaggacgaggtaggcccaccacaaaatccatggtgatatgctcccacttccactccagaatttccaatggcttcaataaacctgtaggcctcttatgctcggccttcacgcgctgacatacttcacaggcagccacatacttagaaacatcagccttcatcctcttccaccataagttttgcttcaaatctctgtacattttggttttgccagggtgaacggtgtaaggcgttttatgagcttctctcaagatatccaccttcacctcttatttctgaggcacacatagacggcccctgaaatgaaccaaatcattctcatcaatggtgaactcacagggtttaccatcgccgaccctctttcgagcttcctgcaacaaacgatcctgttgctgagccaagcgcactctctccagaagggaggattgaatgagcatccgagtcttctctctagcggtgccgacatagcacaaagcgacccccatatggtccagatctgcaatcaaaggcatggccacttttggaaccccggacctgctaagggcatcagccaccacatttgccttccccgggtgataatgaatggatagatcataatcctttatcaactcaagccactgacgctacctcaaatttagctctttctgagtgaaaatatacttgagactcttatgatcgg

SEQ ID NO: 8348 - DNA, 609 bp, Zea Mays
gaacaatcaacagaggagtatgaattcacctggaataggctggccgcggtgaagtgttcttacggggtgttcaaaccgatttgggggaaattaggaattcgagctctcaggtgaacgattgaggacgatctttggtggctgggtgcgcgatgatgttgcgaagctctctgcggggtcaatttatagatccccggggcggtggcacttaatttaagcggacagtgggggcggccggagatgaggaagaaccttggcacggtgaatatgtgtccaatggcgtggcattaactccggtggtcgacgaagagtttagagggagtcacggcgatgcggtggcgaggttgggacacgaggtggacaacggcgatgacacgacgacggcgagcagctgtatccccggcagtgagcaaaggggatgaattgcggctagccggagtgacttccaggtcaccggcggcgaagatattttgaccccgcgacgttatcgacttaccccgagcgtgaatcacgacgtcagcgatgcaaatcgcggcggggaggtcaccggcggtgggattcttttgctgcgtccgatctgatccgttgggggcactgtaccatcgtgaactc

SEQ ID NO: 8349 - DNA, 674 bp, Zea Mays
ctttggtagacacattatcagcctaagcaaagcttttgttggatgagtttattaatctgtcgacatttttgcatctttacatcagtggttcattgtattttcagggagaaggaccggtgtggaaaaggacgccgggcggtctggtaggctgggctacctgcaaagatcatgcatttgctttggttgctccatgcatccaccaatgattgcctcccgctggaatgaacatccggggcaggagaggaaagcatagaaaggaagagcatactggccttcttcctaagcaaaataaaggcaaagaagggtggatcactcgacctttccgacaacggtggaagagagctaggattacaggtgagaccaggtgaggcacatgagtaacatcgacgacgacgggacctgcgatgtggcacagtaggagacaacgacggagagtgtggacgacggtgaggaggaggggaccgtgacgtggacaccagggtgatgcaggcgacacgaacagcgtcgctgattcccttccccatctcccacctgcactgacacacccacgccctgatttgggatggatgtatggatctggaatcaagccgtgaagatatttgaatgttcgtttgaattctaagacaaggattctaagacaacaagacacttttcctcttgataatgtttggtac

SEQ ID NO: 8350 - DNA, 514 bp, Zea Mays
tgaggttggatcctaggtcgttaatgatgctatttggtatcccaaacctgaatattatatcttgtatgaattctactgccttggttgtggttaaagaggcaatgggcttatactctatccattttgtgaacttgtcaatggcaaccagcacgtgagtatagcctccctgagctttcttgaaaggtccgatcatatccagcccctagcatgcaaatggccatgttacaggaatagtctgcagctgttgtgtgggtaaatgttgttgctttgataagaactggcaagcttcacatctctagactaactcagtaacatcactcttcgctgttggccaatagaagccagatctgaaagcctcctgactagagttctggatgctgcatgtactccgcactgcccggcatgtatttcatccaatagttgcttcccaatggccgagttaatgcatttcatgaggactcccgtcgcacctcttctatacagtgtgtccccaatgagagtgtagtgggctgat

SEQ ID NO: 8351 - DNA, 529 bp, Zea Mays
tccggaggaatgcctggaagctctgccggaaacacgtcagcaaagtcacacaccacccagatgtcctgcacccgcaaggcagcctcaccctccaccaccatggagaaaaagattcctgacttccttgaccggccatccgaaagcaattgcgccaacaaggataacgtgaacttaggggaacttcctaagaataccacctccatacccgacgacgcctgcaataacactgtcttctaaaaacaggatataactgcacgatactgggataaccaatccatacccaagataacatcgaatgcccctaaggaaatcacaaccagattggccgaaaagacctcatcagcaagaatgacggaacacccctcacaaactgaacagctactaatggagccattagcagaactaaccaaaattgggtgacccaacctctgcaccgaaagaccagcccgcgacacaaagtcctccgaaacaaacgaatagttagcgccagagtcaaaaagagcatgggccaccaacgaatcaactgaaa

SEQ ID NO: 8352 - DNA, 873 bp, Zea Mays
ctagaggagcagatccgtcagttcgatgctgcgcaggcggcaccgggcccccaggcaatggaggccaccagaaaagccctcaaagatctccaagcagaacaccgcgccggggtccagcgcattgccgagtgggctggcgaggcaagcacgacattggtgccactagggatgagccccatcccagtgtcggagctgcagtgtcaatctctgatgccctcctagtgctggactctgccaccgatcgccttcggcgcctggatcagatcctcggtgcccgcctggaggcagagggcagcaagctctgctgggcggtggtagactatgtcctgacgtgcttctggagtcatgaccccgccatatccttggcgccggtgatcgatggtccagtagccaccacagaagatgccgcccgggagagtgtacaagatgcagtggagatggtggccgcgcgctttcagcgggatcctaccgacgctgaatagatgaacctatagagacaaggcgaggcttccgctgggggtggctgtaataacttttggccatgtaacatattttaagaatcgttaatcaagtagcactagaacttatctgtatgttatttgcccttgttgtgtgtagcgtcatcaacttccacctggtacttggcccccctgggaggtaggctcgacgtgtcgaggctggataccagtataccaaagaaaaaattggtggcaccatccctaggaggtagtctctaaagtttgagactacctacctctagactgggacctagacctgcacacaacttcggctttgaagttttaggagcacacccgtaggacccaccatctggtatctttcatcctttgactcatgcaacaggacctgtaggat

SEQ ID NO: 8353 - DNA, 951 bp, Zea Mays
gtgggtggtacatagaggcgaagataggcttggtgccgatggaactgcagaatgctctgaagtcttggctgtcaaactgtttgccattgtctacggtgagttcggacgggactccgaagcggcagacaatgttttgctagaataatttttggacggtcttcgatgttatcgtggatactgccctagcctcaatccactttgtgaaatattcaacgacgacgaaggtgaacttgaggttcccttgagatgtgggcagtggatcgatgatgtccagcccccaacgttgaagtggccatgtgtgtgcgatgagtttggtgaattgcgaaagggtttcctgagcgaggaaaaaacttttggcatgcttcgcatgacctagtgactcgattggctgtgcagattatcgcgagccagtaaaatccctgacggataaccttggctgcgagggctcttggtccagagtgtgaaccgcacattccactgtggacctcgcggaggatttatatgccttcggtttcggttatgcatttgagcatatgttggctgattccttttttgtacagctgaccctcgactatttcaaagtctctgctcctgtgcttcagtcgtttggcctcattgcggtcggttgggtgatagtggccttgcaggtatagtgtgattggggctctccagtcttcggccatgatgaggttgacaattcggtggccctccatgtcctgagttatttgcaaaccttcgggactacgaacggcgagcgtgtcgatgacgtggtagaacacgtcggaaggcaggccttcgcccttggccgccgctttggccaacgcgtcggcctcttcattcttgttgcggtcgacatgatgtagtgtgaaacccttgaactgcttctcgaggctgcggacggcggtgagatattgcatgagcacgggctcctttgctgagtactccttttcg

SEQ ID NO: 8354 - DNA, 425 bp, Zea Mays
ctggggctcaattcctgataaattcaagggtctctgcgcaagataacctagactcagggaatagttcctctggacggcgggttggtttcaaagtttggcggggtttcttttgtaaaacgtacccgcgaaggggtatcggtggagatgagccattggatcccaaaccaccgggcgagattaaatcgtgcaccagatgatacggtaagttatatatgcctttggattactatcctacgacccacgggacaccatactacgatcagatctgatccgtccatcggtcaatcaacgatctggatgtaatataacgaatcggtatttaactgcatcccccaccatccgatccaaaacacacgactcctggcgcatcattccaacatctaatctggaccaaccctatgcgatccaacggtggacccgattct

SEQ ID NO: 8355 - DNA, 780 bp, Zea Mays
aaaacctgtgccatgacctctctcgtcccatcttcttagacctatgtggtgcgccatggcggggcacggacagatctgtcgcctaggggttgtagtcgactgtgcgccaccactctacctcgggcgtttgtccggggagtgtcgcgggtggatggtggtgtcgaccgtgggctcggtggaaaggatcgacaatcggggtggcgaataattgctcaacggcaccgccatcaggtcgcattccgccatgggcggtagtctccatgtgataagctctggtatgaaaccccccttcctatggattcgctttgaacgcaaggtcgtgtagccgtagtggatgtggggaatcgggcgccgagccgctaggcagaccttctccggcgtgtatcgccgtcgcggctgggggtgaactggggaccctggccgtcgtgtggaagatgagccctatgtcgtcaatcttttaatggatggccgagatctaatctatgaatactcgatcgtccatgggaacctagccgtagatttctgatcggtcggatcaaagcgaatcaggttacagtaaaatctgggtcgtagatctttcatccgatggcgcgcgctgcgtatcggctcgatgttgtcccaatgtgatctgggccctccacatctaatcgggcggccgaaatcaaaacataccccttcggcttgcacatttcgctaaagagaccccctgctttaaccaaatcaacccgtcgtccgtagggttgttcgcctgagtctaggaaagttatagtttgacccctg

SEQ ID NO: 8356 - DNA, 409 bp, Zea Mays
aacagttttagctaggaatcaggagttttagctaggctcagatgaagacatcttatacaaagcatgtactaattaagcttccaagtcaaagcatccgtcttagacatagaacagaacagaggagatggaggagcaacagataaatagcaaagggggagactggaagactggaggagcagcagaactatggcgtcgctgaccctggtgggcggcggctggggaagacaggaagagccgaagaggacaaacggacaggcggtgacggcagacctggtcgactggggaagagggcctgaccggcggcagcagcagcttccacaagctctttctttcccaccgtttccctcctctcccacacggcagctctcgccctgtttccttctctcacatgcagcagcatgccagcagc

SEQ ID NO: 8357 - DNA, 458 bp, Zea Mays
gggatgtaggcactttgaggtcttcgatcggggcaacgaggacttcaatgctggtgtgttctagatcaaagacgacgtgctaaagggctctgcgggggtgctttacgataggatgtggggtcctcacggccgcggcgtcgtccgagagagagccgaccaagcgccggtgcaggtatgtttgtctttgacgatggtggtgtgtgtgtgctcgttgtctgaaacattgttatgctgtctttgcaggcgatgagggatgaaaaggtagaacacctcaccggccttgagagctcggtggcctgaaaggacgctacggtggagacgggagcggaagagcaatcctcactcaaggaaggtgatgcggagggtcctacgacgacgggtacttctgcgtaggttgaaagaatatagtaggaatggtttgacagtcttcgctatgtacatgatacttaagatcggct

SEQ ID NO: 8358 - DNA, 685 bp, Zea Mays
gaagcgcaaattgttacccgcgcaactgagccatcagatcaagactggacggttaggatcgggcgccagggtctttatcctctctagttagccaggggcggcgctttccgcggtctcggcggctcagttccggaggcgaggtagactggggcttctaggatgctggggtggtctggatacctagaaaggttggggaggatcggcgagccctatagcatggtcggtgttgcaagaacgggactgagacgtgcatacggtggagggggaacctcgggcagaccggaggttactccgttgagcaatcgcgcataaccaagggcagaccaaggcaaattagaggcggggttagatcagttaccttgagagaaggctcagggctctcgaacggcatttggggcacgacaaggttacgggtcgacggcggaggagctgcggcggtgtagagacaggaccgatgagcgtggaccgagagaaacagaggggaagggagtgaaccgaggggtgtcctaggtcgccggtgatggggcaaagctcaccgaggtaatagacacggcgagggctcgacggtgaccgcagaacgagcacagaaccacggcgaatggcagcggagctccatagatgcgcgtgcggtgtgaggtgagtgctggggtgctacgagtgcacgagtgagggaggaggagagcgg

SEQ ID NO: 8359 - DNA, 911 bp, Zea Mays
taagcctgcacgctccatcactctgcgacgggtaccctagtatttggaactgtgatcctgtgggtctgggcatacggcttagtttcccaggctaaatcctgtaggtcctgttgcatgaatcaaaggacgaacgataccagatggtgggtcctatgggtgtgctcctaaaacttcaaagccgaagctgtgtgtaggtccaggtcccagtccagaggtaggtagtctcaaactgtagagactacctcctaggggccgggccaccaattttttctttggtatactggtatccagcctcgacacatcgagcctacctcccagggggacaagtaccaagtggaagttgataacgctacacacaacaagggcaaataacatacagataagttccagtgctacttgattaacggttcttaaaatctgttatatggccaaaagttattacagcgcccccagcggaaccctcaccttgtctctgcatattcagctattcggcgtcggtaggatcacgctaaaagcgcgcggccaccatctccactacatcttggacactctcccgagcggcatcttctgtggcggctaccagaccatcgatcaccggtgccaaggatatggtggggtcatgactccggaagcacgttaggcgtagtctaccaccacccggcagagcttgctgccctctgcctccaggtgggcaccgaggatctgatctaggcgtcggaggcgatcgacggtagagtccagcaccgggagggcatcggagatcgacactggcggctccgacactgggatggggctcgtccctagtggcaccagtgtcgtgcttgcctcaccggcccactcggcaatgcgctggaccctggcacggtgctctgcttggagatcttcaagggcctttctagtggcctccatcg

SEQ ID NO: 8360 - DNA, 553 bp, Zea Mays
ccaagatcagagaccataggtgttggttcatcatccagagggccttgttccacccaatagtgcacctcgtaaattatcttgttaatttccacatcacctgcgaatggaattgcctctggatcaatgacagccaccaacattctacagaccccatgcttgcggaaaaaaggcatgtccacttcaaccgtgaccccaagtgtcgaatccactccccaaatgtgttggtaagtgcaaagctgagccggcagtccatcaaactgcacccacacattcgtcagccttgccttgacccgtccttccgccatgctagtgctagctatgaattccatcactgccttctgtgatttagcacgaaccggcccccactccaccatacgctgcagtttcgaggctgatggaaaggtagttctgtaagaactagccgaaacttgttccaccttccaaggagcagacccgggaagcaagcggtccagctcacggttaacattctccaagctgatctgtccctccgacacttgtatcattgctgtcctagcatcttgcttcgtcttca

SEQ ID NO: 8361 - DNA, 517 bp, Zea Mays
ctggcaagtgtcacaccgggccacatactgagctatctcctttttcatccctctccaccagtacctggtcttgaggtctaggtacatcttggtggtccctgggtggatagagtaggctgagttgtcagcttcatcgaggaggattcctcgtgcctctccctttgggatacacaaacggtccctgaaccaaagggtcccttcttcatctatcttgaggtctgggagttgttccctgcaagctctttctgcaagacttgctgtctcggtgtccaggcactgagccttgcgtatgaggtcttctagcgttggcctaatttctaggctaccactatctcccaaacaagcattcagttgagttgattctctcttccagtcttccaagaaatcggttgctttctccccaaaaggtttccggctgagggcgtctgctactacattggcctttctggggtggtagtggatctcaatgtcataatccttaatcaattccagccatcttcgctgacggagattgagg

SEQ ID NO: 8362 - DNA, 683 bp, Zea Mays
gtgaggaccccagcaggggacgacatcttgaggaccaagtacccgtaatgggcaatggccatgaaccggtacagggtcggcctgccaatgatggcattgaaagggaggttaacctccgcaacgtggaactggacgttctcagtgcggaagttctcctcagtcctgaatgtaaccgggagtacgatgctcccaaggggatacaccggttgagggcccactccggagaatgggcgagagggtcccagtcgggatcctgggatctgcagctgcttgaacacatcatgactgatgacgttgagcccagccccaccatcaatcaggacatgatgtagcttcatgttggcgatgacaggggcagtgatgagtggtagtatgccggccctgccatgtttttggggcagtcggatgccccaaaggagatagtggtgctccgccaccgctgatgtggggctaccttcgagacccctaggatcatcgaatggacctcgcgacgcagggacttcacgttcctacgggaggtgagctcccagcttccgccatacatcacgtacaacttcttgtgacggtcgttgtcatcaccggagtcggagtctccagtgaggatgtccttgaggacttgctcgggggactgatacccgaggtcccgttctcccgtggccgtgtcaccttcgttgaccttctcc

SEQ ID NO: 8363 - DNA, 1089 bp, Zea Mays
gcgagcgcccccttggtcagactccaggcgcgcggcccatctctacgccttctctttcttttttttctgagcagctggcacgtgggacccaatcgccatccggtcttcttcttccccgcgaagatagcgcgacaatcacggccgaaatcaccgctccgcgcggctcccgcgggcctgacaaccaacctcccgagaatataaatcccaaccccgtacgcttgttcctccatcctagcacgggttcgggagcacccaaaatcaaccgccaccgtgagaaaccgagcgaaccgagaagcgagagagagaagatcctggccgccgtatgggcatctcatcggcggcgcggctctggggttggcatgcggtcaaagctagtcgcctaggcctcctgcgcataatcttggttttcatatgtggcttcatcgaccgtggcatcgcgaattccacgccgttgaggaagaagcgccgccacccgccttacattgctgaccggatcgatcgaccctgcatgaaccggtgaggtacctccacctgatgcgcggtgatctttgcgtcgtttagcccgcgaaattttgggggtaatcgttggggcggggatcaccggcgagctccgcggccatgggttctgtccgccgccgtgtgacctcggtttcattggggtcctctgggggatgaagacagcccctggatcattggatctgggtcactgatcaaatatggacgaacgagatcgagtcaggggtgttttagatccgggtcgttgatctgaccacgaacgtgtgtgattagatcggggtgtaccgtttcgggcatttgatcaggaccgtgtgatgtcaatctaacggccctgggtgcatgataccccttcgccgtggcctatttgctaaagagaccccgtaatattcacaaatcaacccgccgtccatctataggttaatctgagtcttgggcaattttgcgtgttagcccctgcagtttctgataatagtgcgcccagtccagtaattaaagaaaacaggaaaagagatttagaaatcgatttttaatataaaaataattgcagaaacccatttaattcatagaaaattc

SEQ ID NO: 8364 - DNA, 524 bp, Zea Mays
caaaaccttagctctctttggcttggatacaacggaagaggacgtagttgccattttcctttttgacccttgttttcgagcgggaaaacagtagtcaagataaataaatccaatcacatcaaaaactctgttcagtcttcttttgcctcgagcaccaaaggcagtggtcatggcttcgtcctctaccttcgtataagccctagcagcccaccactggttgcctcaatggcttcaagccaatcatcattcggctcgtcaaactgacttctgtagcgataggtgtatcacagataaaccagactaccttcgctagagctagcagcggtctccttcgacatctcccagtcattaagaagtggccacaccatataagcaatgtgctcctgaaccaaatccctggtgctaatgtaagtacacactatgttgaaggccatcaaacatgcttgaacttcgtttccacttgcaattgaaggcctcctgatgttgaagcgtgatcgtatgggacgctggattatgccctttac

SEQ ID NO: 8365 - DNA, 592 bp, Zea Mays
ctcagatcttaaatagctaagacggattcctacgcgtaagatacttatccaacgacacagatctaacaaccccaaccgttatgcatgatttaatctcatgcatcgaatctccgatcgacggtccagattggaccatgccgaacgaggacgctgttctaatcacagccgttacacccagatcagacggtcgagacgcgcgcttccccctcctaggtgtgcaggcgacgccgccgcccaggtttacagcagcacgcccgccggaggcccctacatacagccatctggctccccaaagctatctaggagggaactactcacaaaatggaagatggcgatcgttataggaactatcataacgccttactgtcgtggtgatgcttggccacgacgcaaggcggacggcgacgcagttcaaactttgatgagcaattcctacagcgacgcaacgttccgggcgtgggtgagtctcacacgggctttagagatgattagggatgaaaacgggccggatacagccggatacagggtcatcccgtatcctaccctaatgtatttctctcggatatgggaccggatacaggtagttaagatt

SEQ ID NO: 8366 - DNA, 492 bp, Zea Mays
ctcaaatttatcaaacatgttctcacatcaacaaccaaagacatggcttggacaacgttttgatcctttctttgcaagagaagagaaagctcatttgtgatacggaggatttgtaacatcaacttcatcataaacacaaagctgaaacactccattttcccaacaaagccacctgcacctgatggattacgctcatcttggtgcacaatttctaaaacttctatcactgattcccacattgactcaatacggagcaaagtcttgtaatgagatccccatcttgtatctccaggtcttgacaatgatgtttcttgttgtttgcctctctttgatgaaatttctccactctctaactttgataagagattcaaacgatgcttatgttgtaatatatcctttcttttgcaagaaataatccatgatcacttaccatctcaactaatgctttcttcaatgattctgatgttgtgtccttgacatgcttgatgccca

SEQ ID NO: 8367 - DNA, 572 bp, Zea Mays
aaaaaaatgaagaataacaatggttcaattgcgacattcccaaataatgtgttagcttttgtatcaagctagtgctagaatgcctaatatcttgtttgttgtgagcaagctaagtcaattttgtgtcaaactcgagagatgatcattggtgttttattaagagagttattgggtacctgggaacagggtacccaaagaaggccccaagacctacaaaaaacggcccgcctgccaagtagttcgctgggaaggcctaaaacgtcactcaggcacggcttgccaagttgattggcccacttaacaaatgcctgtcaagcaacccagcaggcaaggctgccgaggaacctgcccgcagagcaacccaacgaggcaaggttgctgaccaacctgcccaccgagcaacctagcaaggcgaggttgccgaccaacctacacgccgagcaacccagcgaggtgaccgaccaacctgcccgcctagcaacccagcaaggtgtggtcatcgaccaacgggcctaccgagcgacccaacaagatgacaaccggctcttagaaagagtcggcctggtactatc

SEQ ID NO: 8368 - DNA, 1285 bp, Zea Mays
tgaacttattgagatactacattacagtatctcccccttgctttaaccggatgaactattcttgcttcatatggagcactccctctggaacataatgctcccagaacgctagcttgaattcctcccaggtgatctgatgtccagccggttgaattgctacaaaatttgcccaccaagtactggcaggccctctcaggttttatgcaacaaacagtggcttttgtgtctctatgcagcggattaatccaaacttctgttccataactcttatccactcatcagcttctaaaggttcttctgctttgatgaagagcgggggtcgagtctcagagaattccgaatatgtagtatcacacagtccttggggaggagctctgcctccgtgctattggaactgattgcctgccatttcacgcaataagcgcgtattatccacagtggcattgaccagggcagcgatagcctcgaccaaagttggtggtactggtggcgggctaggagtatcttccgaacagcgggaagttcccgcaccatcatgttctcgagtccatgatggcatctgaggcaaagaaacatttggaaaaaatataacatgccagcacacaccatcatactacattaccaaaatgtagtaattatacagactccagcgtacaacttgacttcagtacttattttacataagtataacatctaaactatactattcgtcatccttggttgcttcatttcctgctgtaggagactgttcgtcagcaaggttcatggaaggaccgggcctaaaaaggtccaacttctcatcaggtccttcatttgctgttcctgatggtccggctcccattgcagcagcatcggaaggcacatccgggtgcagtcaagcatacagtacatgtacttcttcatgtaaagtattatagtacacttgcaagttgtcaagggccgcactaagatctgccacacgagctcgagcttttgcttcgcggtcccaagcgatcgaatgcgagttgacggcccaattaatggccaaatcttgttcggatatctcatattgcaagtggctgaggccagctgacaattcagctatacgctggctgtcctgcgcccatgccctattccagtgacgtagctctgaccgaagttgttccaccttgccctccaaatctccaatcgggtcattgctgccactattactcccttcatgtctgggggctagctgatggcgaggcacgccaaaaggtccagtagacttgcgtgcagttttccttgtacgcgccatgtctccata

SEQ ID NO: 8369 - DNA, 630 bp, Zea Mays
ctagcggatttgtcatgggtttactgtcctgacagaggatacccacgagtccgttgtttacatcccttttcttatccgtggccttgctcttcccatttctcccttctttcgtggtctccttgacttttacaatctgaatctgactcacctgaatcccaactctattctacaaatttttgtctttgttcatctgtgcgaagcctaccttggaattcttcctcacttcggtttgtggaagtacttgtatcattgtcgtcccgggatggctgggggcagcaccagctcatgggtggtgcgagtctggagatgagccgtgggaggaaaacagaataccttgacatcccacttaaggatagcattaaaggatggcgtttagagtggttcattgtggaaaaccatggcaagtccctccccctcggtcagggagacagccggatgttcgtgctccaagttggattgagtcctacagacatggagataacagaagccaaggttctgcttgctgaaatttgtttgttgaaggagagaggtttgaccgttgaagctgtggttgcagactttgtttttaagaatattcagctacttaaggacagagcatacccggcttatttgcatagtggtgtcactgac

SEQ ID NO: 8370 - DNA, 909 bp, Zea Mays
gcaagaaaactctagactcagaaaactccccacaggacggcgggttctaattcgactaaacgcaggggctcttatgcaaggttccagggccgaaggggggtacgcgctgattcaagtcgttggatcgggaataggcgccccagatcagatcaaccctggtcaagtcactcgctccccccaaaccataggatccggaaacgacgtcccagatccgaccacgtcattatgaactagtacgtgcttacagccaccagatccgcgatcgacggttcagattaagaggcgcgaacgtgtatctcaacttctaatccggaccgcccaaaaccatcggacggtcagcaacccttcttcccttccttgccgcagaagcgcggcggcgcggaacaccggcgtggcggtgccattaccggacgctcagaccacgaatttaacgcgctaagctttgaatcgatgagtgaaacatgatgccctacactagaaggacgcgagggatggatacttacccctccacgctatgcggtcagacacggcgacggcgggtggtgatttcgcaaatccgacgagcaatcagatggacgccagtgaactgctcgagtggacaaccaccaacactatccccggcttcaggtgaactccccgtgaacgccaattgaggcctgagcgacgataaccgtggcaatcgcggaggcggcggcgaggtcaccgcgattcgcactctcactctggttctacggccctggcggctgggtaaggtggacacagggtgccacggacgggttggctattttatatccgcgggaatagtcaatgcacgatgccgcccgcccgagatctccggcgaggtcgacgaggagcgcgcggaggttcgttgcgccgttgcggagctggtacggatccgacggtttggac

SEQ ID NO: 8371 - DNA, 842 bp, Zea Mays
agctccagcgcaagtaggaggccgtgcatgcttctattgtggagaacaaaaccattgggcgaagaactgtccaaagaaagcagctcagcagtcgccggccgtcaataccccagaaagacaaggagcaccacagcaagcaccaggaggtcgtggtcaggcctacaaccgtggaaaggtgaaccacctggaggccgaagcaatccatgatgcttaagacgtggcagtaggtatgtttctagtcgaatcctatccagcaaaagtattatttgacactagtgccacacattcttttgtttctacatcttgggtagaagcacataacatccccatagaaccaatgatcccacctttaagagttaattcagttgggggaaaagtttagtccgataggatttgtccaaatctaaggattgaaataagggggataaacttccccactaacctagtagtaatgggaaatcaagggttagatgtcatcctagggatgaattggctacacaggaaccaagccactgtcagttgtgacaagagaacagtcaagttggtgtccccatctagaaaggaagtagtaactaagctgtacttgcctgaactagaagaaggagcctgtcaccatttatcagtagatgacaaggagtccaatccgattaaggcaattagaattgtgtcagaattccccgacgtgttccctaaagagttaccaggtatgccacctgaaagaaaggttgaatttgccatagagcttatctcaagcaccgcccctatatctaagagagcctatcgagtgtccgaaccagagttggtggaactcaagaagcaaattgatgagttgttggagaaag

SEQ ID NO: 8372 - DNA, 670 bp, Zea Mays
atttttcttgcccgcgactgttgttgattgaatcgtgcacgatgcttctgtggaatatatgtcggaattttaggtttccaaatgcagtcgtcgttgaaattccaagctttcgggttttgtatcgtagcagtgtcataccattatgttcggttcgacgacacagacatacagttatacagatttcgctgcggttcaagtttcaggggtcaggatcatacccacgtcaaatattcttgctcacatggtttcagaacatatggtgttaccagcgctcgaatcatttttcaaaccatgcaaaaaactgcatgccctcgggcctcggggtcggggatgcagattagcacttggactccacttggaaaatgacagatgggctaatttcgtttgttttagtatactgctgtagctaatcttcgacgtttactaatatgtgtcatattaaaagcacaactgtacagttattttggaaatggatactcttataatgctgaacttctcgaagttgcattggacctatcgtatatggttagttgttgtgtaagactaagaccgtacttttcttgtcaatgtggtcgctatcttgctttccatgtgcctccaggctccagctgtaccttattatctaaaatttcctgtaaatcctatgacgtcagggtaaatcatacagtga

SEQ ID NO: 8373 - DNA, 493 bp, Zea Mays
gtactggtcaactaactcaaaccaaggtaaaccataccaccccgtcgtagcaacgccgcacagttgtctccctccgttaagcacaaggggaggaatctttgaagggacggggatcacccaactgagtggggactaagagtgagggagcacgccaatcgaagcttgccaaagaacaacaatctcctttgtagttgatggcgagcacccccccagacagcacatccaagcaccgtaaactgccatcctatgcccttaaagtggaggaaggcatgaagcctctatggagggagcgcgagatcatgggtccacctagcataagtttgatgttaccaccaacaggagacggatgacgaagcagagaagtgccaatggtcacgcaaccaagagccacaaccattaccggccgcaaggccaagggcaactaaaagaagaacacacataagaaaccatcaagctagtagagacgatagtgcaaaggtaggatacctccccg

SEQ ID NO: 8374 - DNA, 730 bp, Zea Mays
aatcgctaccatgtcaacccccatccaaattgactcagacggtgatagaatttgagccgatagcatttgcttgaatgtaagtgtggaaataagggggatagtgtttcccgctaatctcatagtaatgggtactcagggaatagatgtcatcctagggatgaattggctagataagtaccaagcaattatcagctgtgataagaggacaatcaagttgatgtccccacttggagaggaagtggtgaccgagttagtctcgcctgagccaaggaagggaagttgttatcagatgattgttgatagcaaggagccagattcactcgagattatcaaggttgtgtcagaatttccatatgtgttctcggaagatttaccaggcatgccacctgagcggaaagttgagtttgccatagagcttcttcctggcaccgcccccatttctaaaagatcctacagagtgtctggaccagagttggttgagcttaagaagcagatcgatgagctatcagagaaaggttatataaggccaagcacctcgccttgggccacccctgtcctgttcgtggagaagaaagatggcactaggaggatgtgcatcgattatcgagctctgaatgaggtcacgatcaagaacaagtaccccttgcccagaatagaagatctgttcgaccagttgagaggagccagcgtgttctcaaagatagatctgaggtcaggttatcatcagctc

SEQ ID NO: 8375 - DNA, 422 bp, Zea Mays
tcccgaaaacctcctccacatcagcgccccccgccatgcccctgtatctcgcctagcacacgccgcgcccacgcaggcagccgtggatctcgcccccaccgtcgagcttccatggtaggcatcctcttccatactaggcggccatggcatgaacccatcccctatccgcgcccccatcgcacgggccctaatcctagaatggtgccttcctccttctctgtcgcctctgccctactcagaccttcgagacttccactggcgatacacacccactaggtacgtgcaccccttctcctctattcctactatgcaaaaccaagcactcaaactctagttacgtattcaaatatgaagttgttgttccaatcgatgatcaaggagcagacacaactgatcgagctcttattggaattccaaacacc

SEQ ID NO: 8376 - DNA, 433 bp, Zea Mays
gacataccatacaatggctaggtctaggatgatctatttctagccgacgtgttaggtgtgtttggctccatattagttcgtgcgagggaaaactaggggcagtagatttttcatacgaacacacccatcatttaacagattagtctatatattgttttaactgatcccccgctgttctatgaaagccttaaaaggttgaaacgaaatgcttatagtgggagtttgaggcgaaggtaggagagatgttatatcgatctcccattgacggatgatcttctggtagcgagccaccgtgaagtgtgatagatactttttcctttgccttctcgcgctgtttagcgagttgtcgcagcacttcttcatcttctcgtctcatgaggccctcaaaatgctgttgtccataagccaagagtgccttcatggtcgacttgat

SEQ ID NO: 8377 - DNA, 785 bp, Zea Mays
tgccgacttaagccgattgctccgttagtagggcatagtggtcaccccgagttaagtaagggtgagcacgtctcaccgccttaagtcattgccgacttaagccgattgctccattagtagggtatagtggtcaccctgagttaagtaagtatgccaattgatagcgaacaatttgagtgcctttgaagtctttttattgatgatatatttctcaatttacagaatacatcatcgccccaatagcttctaggatgtagctaggggtaaaacttcctgaggtgttctatgttccatgagttcccaatttccgtgtcgtccatctgagtgagacgatatgatcccggctgagtgacttcagctactatgaatggtccttcccatagaggtgacaatttgtgccgtccctcccccgttagaattcggtggaggacgagatctcccactgcgaaggatcgatgttgtatggccttatcatgatagcgcctaagagtttgctgataccgtgctgattgaatcaccgtgttcagtcgctcttcttcgagtacatcaacatcctccagcctagtagcttcagcttctactatgttttcaaagattaaccttggtgccccgaatttgagatcagcaggtagcactgcttccgaaccatagagcatgaagaaaggtgtgtttccatgcagagctcgactaggttgagttctcaggctccaaacaacatacggcagctctctgatccactttcctgcgaacttttcatttttgtcgaagactttctttctgagcgc

SEQ ID NO: 8378 - DNA, 494 bp, Zea Mays
atgtgatgtatgtcaaagattcaaagctgaacatcagaggccagctggactgctacacccaataaaagtgcccgaatggaagtgggaagaaattggtatggatttcattatcgggttgcctcgcacctagaaaggttatgattccatatgggtgatcatgtatagattaaccaaagtggctcacttcatttcggtcaaagaccacttataagggttcctagttggtagagttatacatggctcgaattgtgtgcctacatggtgtaccgaagaagattgtttctgatcgagggtctcagtttacctcaagattttggaagagtcttcacaagaacatggatacgaagttgaatttcagctcgacttatcatccccaaactaatggccaaactgagagaactaaccaagtacttgaggaaatgttaagagcttgtgctcttaagcatggaggcagttgggacacgagtctaccatacgcagagttctcctacaac

SEQ ID NO: 8379 - DNA, 723 bp, Zea Mays
gggtcacacccattgggttcagctttagtaaaagtcggtactggcacttccccggcagcaggagcagaagggccagcaccctgattcaagcatgacactcgccgaagccgtctctttttcttttccttccccttagcaagagaagttggatgattatttcggcgaggatgcttcgggcgaatactttcagatctttgaatgtccaaagcctttccagactctaggatggatgctacagctagtgtttcagcagggaccgaatcagaggaatcctcagccaacatgtccaacatggcacttatttctgcatcactcggatttaaaggcatttcaaaatgaacctgcctctcatcattgggaatttcacctagcgaagcaaccaaagcctcaacctctttgagagagggtcgcactctaaggcccaaaccgctgtcaccggcaggaggatttgacacaaaactgatgaaagccttggaaggaggcagattccatgctgaatatgcaacacgagcaccgatattcgacaccttgcctctaagaatcatttcaagccggcttaccagatccacagcaggaatccttctgttggtaacccgggtcgaatcaatggtgccacgatacaaataagctggatacgctctgtctttcagtggctgaatgttcttaaaaacaaaatcggcgaccacagcctcggcagccagacccttctccttcaacaatcca

SEQ ID NO: 8380 - DNA, 468 bp, Zea Mays
ttcttagaggttttgttctgtttgaggattcttagtttgggaagattgatagaatcacttatttgacttatcaaccattcctccttctagacacactgtgtcgtgagttgatctatatagcacttgtccatttagacaggtgttttactgatcatgaaatgtctcatattctggaatagcaccctcaataggatcctggatgagactcttattgagaccaagtacattacacttggatctttttcagttgaccttatagatgctgtactgcgccatcttaaggtcatcctaaggtgagcctactgtaggcttagtgggtttcttaaaccacagtgaggaatctatttcattcaccgtagttatcatttcaatcttttccggccataagtgacaataaataccacatagcggtttaatctaccttatctgaccaactagtaggccaatatgtgcacttttgcaaagtaa

SEQ ID NO: 8381 - DNA, 711 bp, Zea Mays
cgacgtggggtgatgcgtgtgcaggggaaacattcagcggggtccacatgttgattttcttccggacgtgagggcgtgaggcaaaggaatcccgcatgcaacatgcaggtgtggcccatgggtggttttcattttctatttgcatgtggccaagagatttgtgcgttttgtctgtgtgcatgtgggtggggtccatgcatggtttcctcttctcggttgcatattcgcatgacgctgagaaaaatggaaaagtgaatcgtgcgtgggtgttgcatgccgcatgcgggtgaagtccacacgacggttctcttccctctccgcaagtctgcatctttctcctaccgcggaacgcctaggtctgcggcgccttcttctacccccggtcctctctctctcctatttctttcctctgctaatccgccacggcagaacgccatgcacacggcagtgagcggtttcgagcttgcaattagagccctaactatcgtatggacagttctgctcctatcccaaacagttaccatcagcaggtagggaaaagctcacacctggtaaagcggtagaccgagcagacctcaaccactgctcgtcgaggaggtccacgacgatactccgatccggccacacccgattccgttgcgcgcggtggactgacgaggcatgagcccggccacactcccgcctccagtggacgcgcgatggtggcacgcg

SEQ ID NO: 8382 - DNA, 614 bp, Zea Mays
aatggaaataattgcctcgcccgagctcagcgtcggccaactgccccagtagacacgcattaaatgccacctactctcccgtgaatctcgcagaagaccatgccaagcactatttcaactactccaactcgacacttttgtgcccatgtacacgctagggatcaagcacatgcccatgcttccgagcctagcgtcggctctctaccccatcaagagaaatggctatagggatcgagtgtccttctcctaaccaaaagacaacacaagaatgagagccatcccgtgcagctatgccgctacatggcttggacacatcttctctgatcacaacaacagcataaccacccctatactcctggacctcctccttgtcactataaaaggaggagcatggggccttctattggggggcgacaggacttcactgctcacaactcacctcactccctatattgccactcacctcaatcatacttagagacttgggactcactccctctcgactcgcttgtatcccctactacgagcacttaggtgtaagataatacaaggcttcctcccccactggaagtagggtcttctcttgctcgaaccaagataaatcttgtgtcttc

SEQ ID NO: 8383 - DNA, 992 bp, Zea Mays
aagtctaggggtcacggtgtaaattgttccaagacacagtttacccacgccgtggaccgcgggttgaatctaataaactctagggactcttttgaaagacgaccaaggccgaaggggtatcgcatgatctcagccgctcgatctgattctatggcctggattagatctagcccaatccaaaccggtacgcaggcacagccgttagatcgaggattgatggcgtagatttaatgtatcgtgcattaaatcggaaccgcacgatctagatcgacgactcagatcaattcacgcgaaggggttaacacattctaatcgtagccatccattaaaagatcgacgatccacatagcttcttcctcctcccgtagccaagaccaaaactagtggcgacgcgaccggaatccgcccccccaccagcgagccattaggcttcccccgcacaaccacaacctcggctcattgtaaatcgatgctacacacttttacggatcagaggggaaatgtgtttaccgcggatgggttagcagcgacgtttatccacttctcctctcgtgacgtccgtgcttggtgaggttctaatctccagatagctttcgcggtgcagccatgcaggcgaggacgacccgcaccgctggattgaagggaggatggcgaggggaagtagtgggtcggcggccggatccatgcggcggtccataccggagagcgccaaacctattgggcgcactgcggcagctggacaaaggagagaagcggattcacagcggcgagttgcggctaccccagttcttcttccatgggcggtggtggagcacgactcttggtttttatggcccagaggcagataaaggcggaaggctagggaccagttggttcatcggatcgcgatggctccgaaatctatggagtctgttcgggaggatggacgtccatgcaggagcggtcggccagatcttaggcggggtaaatcggcattctgttgtgatcccgtg

SEQ ID NO: 8384 - DNA, 501 bp, Zea Mays
tcttggatgattatgatgaggactcagaacaccagccatctaatggagatgtctccactggagagatggattcgtctgatgaggaggacgaggacatggatggggaggacattgcaacaattgagccaggagaataagatctagaggagttcatcgacatcatggggatgggaatgccagagccacatattcctggagtacccgacccagtggctcccgtactagagccccctgcaccagagattcccgagccggaaagcccaacacctgtgtttattccacaaccgctatggatgacttcggttcactgtagtagtggcctaacctttaagtttccttgcatgcctcggaacttgctcagggcttcaggattgaacgaagtcatagtgacctacatcgacgtgcgctgccagcgtgttctcagactctactgtgctgagtggcatgtcacagctgaggtttatggccctgatgtttttggaggtcaagtggtgataggga

SEQ ID NO: 8385 - DNA, 751 bp, Zea Mays
aagtttttgacttgagagttgcgcatgcgaaaaacaaggataaggtcagaaatgactgattcagatagaaagatgattgcacagggagataccaatcgtgtggagtcttccactctacgtatctgcaagaggaattccatgctgactccggcagtaatttgctaggcaccaccacaagctgtaagacatggtatgattgtataggagacctgcatggccaaatggttcttctcaatgtcatgaatgccaagtacatctgctgaatacagccttgaaatcgtacttgctcatgctactatagagggaaaggctccttgtggtgggaacaactgcaacacatgcctgcagtaggtagaaagtgtagaaacttgagggtggcacccaagcacagcacagctacaatccatccttctctctactgcagccatgattccagctttagaagaaaccccctgcattggccctgaagcgttgacctgctgaagccaacatgtcatagccccaccatgaaattccctcaggatgcaggctcacctcattgcagcaggctaaacgacacgccccttgtcggcaattatggccgtccgtcttcctttcccggatcgacaattttcctcgagagcccgtgcgctaggactggtgatgggagtagctgatacaggcgatgaaactgtgctgaaagatgaaaggagtggcctcagcagaaggatctggtgaatgatgcgagggctcacgagaaagtagcggctgg

SEQ ID NO: 8386 - DNA, 452 bp, Zea Mays
ctaccattcatgccagtaagattcgtcagttgtttggattcaacgagtcatcgactcgtctgcacaacatgtgctatggcacctctgaccctcctcgtcgccctcacggtggagttgctcctggtacagctcacatcgccaaagatgtgttacagggaggctgccactcatattcagctttggctccttggtgccctagtttctcactcagagtttgatgtcgtggattttctcatttgtgagatcgaggacaccatactggatggtctccgtgctcgtcaacagctgacttatgctcactatctgtgtcacatctttactcagctgattcgccccccacagttccagggcactcttgaggcctctcacctcatctttgggttgtaccgtctagctccagaggatcctgtgtcggcacctgctccagtgattgatactcagctcgaggatac

SEQ ID NO: 8387 - DNA, 358 bp, Zea Mays
cagggcagggcagagcagggcatatgcatgaaagcccaagcattaagcaagccatgtacgtactatactaatactagccgacaccatgatggggcgaggctgcaagacgccacgaggtcgctctcccgcctgcgcagcgcagggcattaggtcacggatccctcccatcgcccgaagctgacatgagggacggagaggagacacggggattaatacgcacagctgcttaatcgcatcaccaccacccactaatcatgctgtcctcctgtctggcaggcaggacgggcgagctgggaggccctaataatcaagcgcccaccaatcccccccgctcgcgctagctgcctcccgccctcca

SEQ ID NO: 8388 - DNA, 535 bp, Zea Mays
caccgacccgaaattcccacttagtttcgagcgatttggaacctcttgtccaattcggcgaggagcgagtgggtttggttctccagtgctagggtgagatttgtctcagcaggtgaagttggcgacatgtttgtggcaagggatcgaccctctgataccaatttgttagctacatatggaagggaggaagaattctagagaaggagattctggagaaggaggaggtagatgaggaacaacagttccatagaatttcagatagtgttcattacaagcatgccatctgaagacagacatcatctcctacatatactcgatacacacgaggtcccactaggcagactcacagatagatagacctaccatatagagactgcatcaagcccactccggaccactcgtacggacattaggacgacgcttgcgaactcctcggtgagaggtttcctgtgtgtgcatcggcaacggaggtgtaacattgcgaccctttttctttcccttggaattggatgccatggatgcaaatggtagggtg

SEQ ID NO: 8389 - DNA, 582 bp, Zea Mays
ctagggattcagatatttctagatccactggtctatatatgagaagacaaacggtgctaactgtagaaccgtggcatggcatcctaccaaacgcacgctgcgtgcgcgaggtaggaggtttagcgaatacacgagagaagccaaatgagaacagaaagacggaacaagagatcggggaaagtgtgaaagatttgctgcatcgatcctgagctgcagggctacagcctgcaggcagagacgtatgcgtgccgatcgatcgatcgggacaagccactcacatgccgtacgaagaggggtggcaccgtggcagcctgccagggtctcatgcaatgcagttcgagcgcatgcaaccctagccccggcccagagacacagtggcagtccccatctgcttccccttcccatgcattttttctcaatcgatcacctgcgtgatggcactggcaggctgcgcatgctgccgcgctaagccggatctcagtctcacactgcctcatcactatcactcggcacttcatacttcacatggaaaaatcacgcgggccccaatgtacgccttcgtcaacttccgccagctccaac

SEQ ID NO: 8390 - DNA, 294 bp, Zea Mays
cccaggtccacgcgtgcaaccgcgtccttggcgcgctggctgctgcgggccacgttgaggacgcgctcaagctgttcgatgaaatgtcggagggtggtgtgcagcccatcccagtaacgtttgccatcatggttcgtgcactagcacacgcgggaatggttgataggcttctggagatgattgggaggatgcagaacgaggtgtgtcggctcatgctacaacaccatgatgaaggaaaattggataccaagtatgtcagcctactgtgttcttgtgaaagggctttgcaagatg

SEQ ID NO: 8391 - DNA, 572 bp, Zea Mays
tgagcagctccacgaactgcacgccaagctcaaagaagaacaacaacgactgcaatagcttcgacaagttttgaagcgggaagcggcaggtagggctcctaacgagggagcacgcgccaaggcacgcgacgtccatcgtcgtatcatggaggatggcgaggcataagccccttcggccttttatagggctagtcaaaaccttgttgcatcaacgatattgcttcgaaccatgccagagtcatccaccactgaaggacaccgaatccacgacgagatcaggggacttctggagtgtgctacggttcagcaggccaacgagatctgcctctcgtcttcggtagcctgcctcaaagcaacgggcaaggccctctcacctagagaggaaggtctcagtccaccccgagcccaccatggagcaagcactcgcagttgaagaccgcctcctcgacaactgctagaatcacggtgttcacgaccgcctcggcggacggctacaccacaacaaccgacgacacgccacacatggctaccacccttagagggtggtcgctacgacagtggggaagatcgaa

SEQ ID NO: 8392 - DNA, 1222 bp, Zea Mays
atgtcgtgcacccgcaagacagcctcaccctccaccaccatggagaaaaagatccccgacttccttgaccggcgatctggaagcaattgcgccagcaaggataacgtgaactttggggaacttcccaagaataccacctccttacccgacgacgcctgcaataacactgtcttccaaaaacaggatataactgcgcgatactgagataaccaatccatacccaagataacatcgaatgccccaaggaaatcaccaccagattggtcgaaaagacctcatcagcaagaataacggaacacccctgacaaactgaacagctactaatggagccattagcagaactaaccaaaattgggtgacccaacctctgcaccgaaagaccagcctgtgacacaaaatcctccgagacaaacgaatagctagcaccagagtcaaaaagagcatgggccgcaaacgaatcaactgaaatcgtacctgtcacacgtctccttgctctctgccatccgcagcgggtagcacataagctccaaaaatacccgcagaagaggaagctcccagagtgaaattaacagaagaaccccactgagccgccaggtgaggcagacgcggagctccaaactgagacgacataggagtagacggtgcaggagtaggcgcggccaaatactgaggaaaaccctgcatcggcacgaactgagaagtcctaggcacataaagctactgcggaggaagaggaactgaaaactgctgcttagcacttgacatcatgttgatagtgccctaagaagaggaggaagtcaccggctcccatctgagcttcccattaggattcctcctacacaccacatccttgtggtcctgactgcagatagaacacctgccactccagtggcactctgcacggcgatgcgcatcaccacagcggaaacacaccagccctagcccgggcttaggaacagcccgaaacctctgagtacttcctcctgaagtacccgagtcataggatttgccacggaaaggatagtggcactgatgctgagacttgcccctcttgtgggctagacctcccgtgttgcccctcctcgcgtcctggccacgaggctgatcaacacccgaagacttctgcgactccatggtatactggtgttgcatctccacacccagtgcctgctccaccgtagtacggaagtccaccaacggaaaggctcccagtgcatgcctg

SEQ ID NO: 8393 - DNA, 1244 bp, Zea Mays
ctcgacttcacgcacaaatgcggctgcgtcgcgaccgcgtagatccactacgaaggatggacttcgcaccatctggccgcccagggtaggcatccggcagggggtcacttcgcccaacgcccaaccatgtgccaagggccacaccccaaaggcaataaactcctccactaggtcgctcccgctactaaggcgggcagcatatcaggggggcccttcatcttcgtcttcttccgccaccttgaatcgaggaaatgccacataacaatgtgagcacaggatggccggaggcagactcgacaagccttcatcatccttgggcgccacatagaaccaaaagtcccaccagttaccccacttgttcctagcacaggggactatctccacaacctcagccgaagtcttcccaatcatcgacgtgaaggtgcacgatccaaattgtgctatcttatcccctatcttcctcttctgccaatacaggcaataatttctagcgaagacctccacagacggctgcccgtcgtaggaagagactgcccagacgtacttcgcaagcgccaccactgcgttcggcgtcaactggtggacttgcacctcaaaccttcaacacctccaccacgaatcgatgtgtcgggaggcaaagaccagcagcaaaaaaggcctcaaaaactatcaactcgccctcaggctcggggacctcttctgcacccaaggctcgcccgacactgttaccaaagtaaccaagccgctgcatctccagcatgtggcccaagaaaatccttgaggtcctaaactccacggtgtggccgggctgcaactcaaccaccgccaagtcactcaaggtctccttggacgacggcgcggccggcgatgcgctcgcatcagacgaggaagaagacattggaacgtaccgtcggcggcggcacgcagtctgcttgatacgggccagatttccggtgcagaacgagcaaggacggcaggcgaacaactgtaaaagctagggtttccacagcgcaaatgcaagcaagcggcggtctcagtgaggtcggctttttataggcacgacgtgacgcctcgggtaccccgcagtccaacagtatcgcgtccatcaacagtcacatttcaaaaaaaactcgcgagaccactttgagcgagggcagcgtcttcaccatctcacggtggtcttcgacaccagctgacttggtcgaactggcccctcggaaaacaaaattgcgactaaaatccgc

SEQ ID NO: 8394 - DNA, 726 bp, Zea Mays
ctgaggcgaccctagaacaggctctaattggattaatccggccctggatttgcctgcccacgataacggcgatcaccgagaccaaatccaggcgttcccgacgagtggatgccgtcaagctcagttagttgagtcaacaagaatcacaagtatgcgagggtgctaaaacacaaacacggagggtggggcggacctaggagcagctggccgcgatgaggtgctacacgacagcgcagtcaaccaatttgggggaaaccccgaattcagcggctgtagtggctaattgaaggtgggaatgggtgctctggctttgtgataacatggtgcagcagaccgggccatcaatttatacgggcttaaagtggtggccagtgaatttggtcttgcacggtggcggccggagaaagaggagatcactggtgcaagcgattggtggcatctactgtggcggctctccgacgatcaccagatatagataacccgagctattgcgatgtggttaagggcctgaggcatggtgcagtcgcggtgaatgacgtagactccagtgacggccgtaaagccatgtcgccggcgcaagtggtcgagggacagcgaggccacagtaacccaaacccatccgcgacgagatcttttcactgctgagcgaaatccacttgcccaaatctcatggtttcttttgtaaatcttcaaataggtgaaccataagacttaaggtaccctaat

SEQ ID NO: 8395 - DNA, 476 bp, Zea Mays
ttaaaagattggacgggggtggatttggtcgcgggccagagcttatcggctgcactcgatggtcgtgcgacgtggccgagcggccaatgtcatcgtggaacgtcgatgtcatcatgggacgccgatgggacgccgacgatctcaatcgtgccatgtcgtggtcctttcaccatgtaaccataaccatggcaagcccagagttactatccttgagttattatgccgacgagcaccacgacgaactcaccagtacaacccttgtcaccgtcgtgatctaaacctcattcaaattcgggataaccgtggccagcctctataaattgagcgcttcccttgctctgcccccttgtcatgaacccagcacaactctaaccatggcctgccatccaccatagcccgagaaattgtgatttccccaaatcagtcctctgcgcctccgcgaacactccctccgtcgactcaccgctctgtccctt

SEQ ID NO: 8396 - DNA, 832 bp, Zea Mays
aaaacttggagaaaaatgtgcccaaagttgggctgtcagtcagcctaaccctgaattttggtattcagggacatccaatgaactttgggagtcttttcgtggatgatccagtaagtgtttggctatggttgctataacaaaattatagttggatcatcgaacaacaactttgctactggccgatcaataggttgccatgtaaaaacttaagctttaagccctgcaaaatgctctatcaggtatctgaatgaagaactgatggtacagaaacctgaacatgatcccaggttcagcccccctcgctgctgatgaatccacaccatgatcgtcgccgccattacgattcgcgctcaccagtgaccggataacactttggggccaaagatcttcgcctggggataactccggtagccggccgccgaacccccatgccttgcggccagtgcagatcagttcaccgaagttggatgtccgtcgatcggctgccacgtgctaaagcgttagaccacgtcgctgtgaatcacgtctcgcatgcacggtgatcgccggtgtactgccatggtgaaagccactcatctcgagcgctagtaccctttttcccctccggccgccacgcgtcttcgtgcaattcatcggccgccgctcatggactctataaattgagcgtgtcgtgagctcagtaggataattacgcatccaaagcaccagttattgcttccaatcgttcaccagagaccgcgaatttcttacttcccccaatcctgtttctgccaccgcagagacaccctcgccgcgaccagcttgttccaggtatgctcataccccttgctcc

SEQ ID NO: 8397 - DNA, 907 bp, Zea Mays
gctcatcccttgagatataaaagggaagctctctctctttttggacacaggcacaccagctgtaacatgcttcagagcaataccacgatcagcactacattggactagggccctgacctgaaccaatataacccctgtgtcttagctcttcagtccgaatccttgcgattcaccattcggagtgagtccacacttgcatcccccatcgaacacaaatctattgtcctcctggtttctgaaaccacgacagttgcacgctaggtaggggattacaagcgttctaaacaacgttttagctctgatggccagttcatcaacacctgctgggggcggaccttcacccctcggagcagcatcacgtttggctccttcaacttcctcgccactgccatcgacgagctccgccttgttggccctagagcaaccggtgccgagcgcaaggaacctgaacgctccgccgggagtgaggtggagaggcaacattgcgaaatggggcccactgcccccgagcaatgctcccgccagcccatgggcaacaccgagcggcaacggcaagtaggagagacaccatggttaggatacactgtcgaagtcagccaccggtgggcgccggacaacaagcgccgacatgaagggcaggaagtgtatctggcgcgacccgccaaccctaacacctccagtggtcagatgtaccaatcaccttcgattagagcgaccacccggtcaaggtcccgcacccctagacctacccccttgtagtcaaaccgatcgtgggcatgaagcgcctctccaaggtcctcatggacggagaaagcggcctcaacgtcctgtacgttgagattctcggccacatgtggatctcacgctccacgctacacccaagcatggagtgtaacgcccaaaactg

SEQ ID NO: 8398 - DNA, 1041 bp, Zea Mays
aagaagagctaaacaatcactagccatttatgttgcctttgagggtcctttagatcagtatttcatgaagttcccacataaactatttggcaggtcgattgagcattgccaagttgattcacataatctaaaggtttatagatatgtgtttattttattaactaattggcaagtataaataccttgagaacctaacccttctcttttatctcaaaaattgaaatttattacaggttttagaacagcaccttccttgtgctgcttatgaacatcccttgtgcgtgcaatacgatgagtgctactttggctctagtctcgatagtgtaatgacaacccttaaagacaaaggttatatcatcaataatcgagctggacctttttcttcaagcatgtggaactatattggacccgaggtttgttcattctttatttgtatcctgtaacgtgtcttattttgtttttgtaagagaagtattgtctttctgcagaaaagcccttcacaggctgtaagcatacgggcaattgagcaggacaggtataaagtgattgacaagttaaatagtcgattacttgaggaaattgaagaaagtaaagccttttttcaggtatatgttctttcactacatatcatctctgtaggcctcttacaatacttttccactgctagcacaactgacagattagttgatggatttttgaattagcattaaaaaatcatgtatgtaagtatggactcatatgtatgtactgttgatctgctactatgtcttgtgtcatcagtaccttactgtatcaactatcaagtgtcattttcttcaatttcaggtttatgaaggtgctgtttacatgcatcagggtgccaattacttggttgaggaacttgacttggcatcaaggacagccttctgtaggaaagctgatttgaaatattacacgaaaacacgagactacactgacatcaatgttctcggaggagaatttgtatgttctcaaggctattactactctagcttcctttacattttcttcattattgactca

SEQ ID NO: 8399 - DNA, 479 bp, Zea Mays
cactgccttagctgaagtcagagaagcaatgggtttgtactctatccatttagtgaatttgtcaatagcaaccagtacatgagtgtatcctccttgagctttcttgaagggcccaatcatatctagtccccagcacgcaaatggccatgttacaggtatggtttgtagttgctgtgctggtaaatgctgctattttgacaagtattggcaagcttcacatctttggactaattcggctgcgtcattctttgctgttggccagtagaaaccagacctgaagaccttcccaaccagagtcctagatgctgcatgtatcccgcattgcccagtgtggatctcatctagcagttgcttcccagtagccgaaagaatgcacttcatgtggactcctattgcgcccattctgtataatgtttccccaatgagagtatagtgagctgactgccttgcgatgcgttctgctgcatttttgtcatccg

SEQ ID NO: 8400 - DNA, 323 bp, Zea Mays
ccctttgcaaccccttcacataccctcttggaaatgggacgacatttgcatggactttatcgtgggattgcccaatacctccaggcaccatgattctatttgggtcattgtggacagattgaccaagtcagctcatttcttgccagtacacaccacccacaggacggagaagtatgcggaaatctacattgaccagatagttcgtttgcatgggatacccaggactatagtatcagacagaggagcaccatttgtggcacgattttgggaacaattgcaggaatcgcttgggacccatgtaatacgaagctcagcgtaccatc

SEQ ID NO: 8401 - DNA, 1237 bp, Zea Mays
gccaaatgttgagttttggacttaaatgcaaaatggacctcaagtaggttcaattctaagtctgaaattcagtgttgagggctcaactttggggccttgcaactttcaaattataggatctttgcccttggtcaccacatcaatattatagcccaattataggagaacaagtttgcttaagagtgcaagccatgttcttgtgaaaaattgaaagataatcatgcccaaagatggactgtcaggctaatactgtctgaatttcagactaacagtggcctagacccaagtttgagagccagtttgaccttgatccagtgctcaaataagtgtaatccctatagtcgatttgtatctggtaagtagcactacaactttgatgcagagacttgggtgagtcgccaagtaaaatttggagaaaatcgaccctcaactccggctgtcaggtgctctgaatggggatcgccatggtacagtaactgtgcggatcaggacgccagcgcagcaaagaaatcttcaccgtcggcgaccctcgccgtgattcacgccaccgctgtaggattcgcgtcgccgatgacccgataaggccgccaggtaaaagccatcccctggggataactccggtgactcaccgtgactgcccttctgctttgcggctgtagccgataagctcaccgtcgaccgccgcctcccggtcgtgcgccgcgtggctcaacccttccactgtgtcgttgtaactcgctgctgctgtcaaatcaacgccggtgaggttgccacggcgtaggacactaattcgcgtgcgccagtgttcttctccacctccgaccgccgcgcgtcttgctcaaaattcacggtcgccgcctctgtgatctataaattgagccctccacccgttccgcaaagtcatcagctagccagcccccgctaatcgttagcaatcatccaccagtgagctcgaattcgagttttcccccaaatctctttccgccaccgtagaaccaagctcgccgcggtctgtcctttccaggttaattcatcgctttctctcccttgtttaagcactctgattactctgtgatgcttgccgagccatcaatttgaactagggtgccccctatcgtcgggaacacgacgatctagccgccatgttctcggtcaccgtggccggagctcctcagttggttttagatgcaattgggttggggaaaaatctcagggtaggtccgatgtgatgtccgcc

SEQ ID NO: 8402 - DNA, 657 bp, Zea Mays
gggagccgtcgacgcgcccatggagagctcttccagaaggagttcggagcgaacctcgacgaatgacgggaaggggcgctgccgcttcaggtacgagcgtaggtgagtgaacctgtcgttgaggccgcgtaggaggttgatggtgagcagccgatcggagattggctcaccaagttcgaccaacgagtcggcaagggtcttcatctttctgcagtagttcgagacggagagagcaccttggcatagggtgcggaactcggtgtcgacgaggacgatgcgggtctcccggttgcccacgaactgctcctcgagggcgagtcaggttccgcgcacggtgggttcgacgatggtgacgatgtcgaaaagttcgggcgagatggatccgtagagccaggagagaacatgaagttccatctggacacagtgggcgacgtcagggaaggtggcgtcacacaggacgtgatcggcgagtgcatacttgctgaggacgaggaggatgaggcgatgccacttggagaaggacggcgtcgcgaggtcgaggacgaccggaacgaggctgcggatgtggaggatgccgagggcctgagtgtggagagcagccatagggtcgtcacgggttctgcctgctggtgtgtcaacgtcgacggtgtcctcaat

SEQ ID NO: 8403 - DNA, 331 bp, Zea Mays
ctaaatctgatcttgatgagttacatgcctctgttggactttgctatgccttagtgtgcaaaaatgctttctattccattgatgatacgtctattgctttgccaccgactgttgctaaccttttgcaagagtatatggatgtgtttccctctcagataccccctggattaccaccagtgcgatgcaatgagcaccagattgatttaattccaggggtgagcttgcccaaccgtgctgcctacaggaccaaccccgaggagactaaggagattcagcgctaggtctaggaccttctggaccgcaggtacattcgtgagagccttagtccttg

SEQ ID NO: 8404 - DNA, 468 bp, Zea Mays
gacatggttggggctataaatggccaaatgggtttcacgttcaagcatggccccatgatgctcatgcaacacgtccctatcagctcttcatgtcatgacatgctagcccaagggttatgccaacaacataggcatgtccctactaggggcgggttatgttgtgtcagacatgccatgttcctacaccatagggttgcactcactcttgctggccaaagccattgtctccccataggtggagcaaaggagaacttgtattgaatctattgaagccaaagtgtgttgtgatagctcgtagggccattaccacccaccgcgcatgtttgtgcctagtggtgccttctgataaatgatgagagggaaaagacatggaaggccactagtggcattggtgttaggtacatcagagcttagtaacgaaggtgcatcgggaaggagtcaatcaagaaagagagcatgaggtggtgg

SEQ ID NO: 8405 - DNA, 433 bp, Zea Mays
gcgagcacttacgctggccgattggggctatgactggcgctctccgtcgactaacacctaattcataccttaatcaatgtttcccctaacctaatttcaccaatcgcgcactaaaactctctggccacggcggccgtgatcatggcggctatactgccatgttcccggcgaccagaggacccctagtccaattggacggtctagtaagcatcacagacatgtgagagagcttaaacgaggaaaagggagggttggactgaccggaaaaaggctagcgacggtgaagctcgtttcacggtggcggagaatgattttgggggaaattggaaattcgcacgtgctggttgacgattgagggtgggagcgggtgctacagcttcacaactacatggcgcagctacgggcgaggtcaatttatagtgctagcgggcgg

SEQ ID NO: 8406 - DNA, 502 bp, Zea Mays
agaagtcttcccgaggtgttggacgagccatcctttgacgtgtgccacagtcggcggagtgcccgcccacgggattcacgtcggagtaggtggccgagaccgagcttgggtgaggcggatatttcatccgaggccgaactcagcgtcgagcgaggcagagaaatcgctcgagggccagactcggcgtcaggcgaggcggagattgagcccgtagactggactcggcgtcgagcgaggtagagatttgtgcccgagggtcggtctgctctgcttgtcgtattagatgtcacatcaggggatgtcaggcggcttgcacgtactatagcggagaagtaatcatgctgttgcgcccagatgtgattgttgtcttgttagccactgtgcttctgctgccacgacgtggggtaggtatgcgcattaaatgcgagtgttcccttcatgtcttcaggcgcttttgttttatctaccgggaatcagctcgggcgagacggatggagtggtg

SEQ ID NO: 8407 - DNA, 505 bp, Zea Mays
ggagaccgattggttattcctaagaaccccgagctcagaaagaagatattggatgaagctcacctttccaaattttccatgcaccccagcagtaacaagatgtatcatgaccttagatccttgtactggtggactagaatgaagagggaaattgctaagtatatagctaaatgcgacacttgccaaagagtcaaggccaatcatttgaaggtggcaggcaccttacagccccttcccataccatcttggaaatgggaggatatttgcatggattttattgtggggttgcccaatacctcccggcaccacgattccatttgggtcattgtggatatattgaccaagacagctcatttcttgccagtgcataccacccataagactgagaaatatgcagaaatctatattgatcaaatagtgtgtttgcatggaattccgaagactattgtatctgacagaggagcactgtttgtggcacgcttttgggagcagctccaaaagtcac

SEQ ID NO: 8408 - DNA, 540 bp, Zea Mays
gggaatcctccatcttcgcaacaacctctggtgtgttgatcttaacccacaccaagcgtcgcctacgggggacagcacacgccgaggttgctgacgaggccccgcgctgcaccgagaggcgctgccacacagacccccttgcttgttgtttttccaatctctgccacactgtcttcttgctctgcacttctcgacggcctggacacctgacagcctgatgtccagtcttgaaacacttgaaacagcgcgtgggtcgacggcagacagcagcaaagtggtcggaggagaagcagttgaaacaccgaccccgaagatccacaggggactctcgacgaggccgatgatcacctcgacacctcctcttactctggaccacttgccaaccgtcgtcgtcacaccgaggggcagcccgccgactttgcacctccggttggatatcagtcaccaccttcacgcttggcgccaggggaggagccgcaggacgcgaggggcaggctaacagagcctccctatatgacggaggcgcccaccaagaatcac

SEQ ID NO: 8409 - DNA, 787 bp, Zea Mays
ccgcgctcaagatggtcgccctcgccgccgccgccgacctcgacgacgacggcgacgccgccgtcgtccatcagcagcagcagctagtcgtctcgtcgtagccgagaccgatcgccggagactgatgctgatgatgatgcatatatacatgagagaaatcgtcgagtagactagccgattgcaaaagcaaccccagctgccgaaacctggcatatcgatcccattctctgctgcgcacatgtatgcatgcatgcgcttcgtccgttcgactcgtgtgtgcttgcttgcttgcgcgtgcagcagaactaattccgttccgcagctagctgctctgctctgctctgctggaatgtaattaagtagtagtatatggtagtagagaaaagattagctaggcgatcgatatagatgacgggccggggaagaagacgaattaattaagatcgatcgacgacgacgagctgtgcgtggctggctgtgttcttctctagcctagttacagaggccggctgctgctgcttccaatcgggctgcttgtcgctactgacgatcgttagtggatccattaactaatctggaattctggattaatgcatgtggtttggcatctggctggcgtaaagatgggggaggccaggccggggtcccctagccagtagccaggctggtcaatgataggtctataacctgatcccgtactgttgtttctctctcggtctgcgctgcggagaaaataataattgatcgatccgccgcccggcctggcgtactctgaactgaacgaaac

SEQ ID NO: 8410 - DNA, 666 bp, Zea Mays
gttagtttctaattgattttaatatcaatttttttcatatcacaaattatcaggtgattagaaaagcatgggtatacatgggtatagccacattattatgtaggataaaagataggaaggttagggtaaggatagcctggggtaagacagtttatggtgagaagaacttcgtgttggatgcatctaaagatcaagtttgacttctctccttacttgacgaggttgttcttgtccttttctggtcttggtctcattgatttcggggttagtgtatattatcgggattggggaatatggttaagatagatatggatgagatagtctacatgatgtaggtcaaaatcttgtttgatgttaggtgagggtagacagattatgcaatcccttaagattccatggttgggttagctcttatgctcacggttgagttgttctaatgcactaatttaggtttaagtgcatgaggggagaaccaggtttataggagtaggatccagtttatctcactagtgttaacttgttaagtgactgtccataggttagctcaacttaaggttagactttgttagattaacctattaggctggatcagatctagaataaattgatatgactattttagattagataagatctacataaattttggattatctcttggtcgtt

SEQ ID NO: 8411 - DNA, 726 bp, Zea Mays
tcgtagcaaacccgaccggatccctccccagtcgccgatgcctgcctcactgcacgtgcacggagagaagtcgtcggttcacgccgcccatgtacgaggatttttagtgtggaatagttggtcggagtacgggagatctctcatcggagctccttcatcgctaccgagtcgcccttctcgtggtctacacggccacgaccttaatcgctggtgagataatggccccgatgttcgttgtcttccttacttcgagtagcgtcggttagatttggactttgatgaccgggtcacagagttcatgttctccggcgaggtgcccgtcactcctgcttgggcgctgccacggagggccagtcgggttgcagagaggaggaataaggaatggcagcagctatcgatcagtagatgcacggtcatgattaaaagtagcatacccctttcgcgttttaaatctcaacggttgatcggcaataggagggtcaggattgatcgaggtcgtggtggtttttgatccattgatttcctatcctacggccaacatgggtataccggttcacaatctcgtggatctaatccgagccattcggattagattgggcggctcagggtgtctgataccccttcggaccaagataatgcaaaataaccctcggtgaagtataaaataaagtcgtcatccccctcttgtggtaatctcttacacttggtccctggtttctataaaac

SEQ ID NO: 8412 - DNA, 1627 bp, Zea Mays
gctggtatagtgcaccacagttctagccagttctcttctcctgtgttgatggtgaagaagaaagacaactcatggaggttttgtgtggattttcatcacttgaatgctctaacagtgaagtccatttttccagtaccagttattgaagagcttttggatgaattgggacaggcgtcgtggttcaccagtttggatttgacagcaggatgccatcagatacgtctccttcctgcggatgctcacaaaacagcattccaaactcattcgggtcattatgaatttcgtgtgatggctttcgggttgactggtgctccggctacctttcaacgggcaatgaatactactttgtcaccgttgcttcgtcgttgtgtgctggttttcttcgacgacatcttgatatacagtgccagctttgaggagcatttgcagcatgtgcgccaagtcttggagctattggttcgggacaaatggcaagttaagtggtcgaagtgttcgtttgctcaatcacagttgacatatctgggtcatgttatttctgcggctggtgtggctacagatcctgcgaaaattgaagttgtggctcagtgggttactcctaagaatgtgaaggaactgcgaagttttttaggcctggccggttattacagacgattcgttcgacattttggactgttagccaagcctttgacgaccttacttaagaaaggaaatttgtttatctggacaccatctcatgaagcatcatttgtggctctcaaggaggctttgatttcagcgcctgtgttggcacttccgaatttttcattgcctttctcgttggaaactgatgccagtcagttgggtgtgggggcagttttgatgcaagctggacatcctattgcatatcttagcaaggcattgggacccagatcgcagggactttctacctatgaaaaggagttcttggctcttttgattgcagtagatcattggcgccactacttgcaactcaaagaatttcacatacatacggatcaccgtagtttggcacaattggatgagcaatgtttgcacactccttggcaaaagaagatgttcacacgtctgttgggtttgaagtaccgcatcatatataaaaaaggagtggacaacgacgctgcagacgccttgtctcgtcacccaagtctgtcttcatcatgtttagcaatttcatcatgtactcctaaatggattacagaagtggctgactcatataatcaggattcacagactttggctatcatcgcaaagctggccgtcgatacctcggttgtacctcatttttcttggaaagatggtttgttacgttataagaacagaatttggatcggtcagtctgatattctacaatacaaactgatctctgcattccatgcttctgctgtgggtggtcattccggatttccagtcacatatgcaaggatgaaacaaatttttgcttggaaggggatgaaaagttcagtgcatacatttgttgctcattgtataatttgtcaacaagccaaagcagaccgcactcgtttacccggcctccttcaaccattgcccgttccatcttcgctttggcaaattatttctatggatttcatcgaagccttacctcgctctc

SEQ ID NO: 8413 - DNA, 378 bp, Zea Mays
tgcaatcatacttccagtgaccatagatacaacaattatgacatcttcccttccacctcgacattccctttgacattagcttgatggcaggatacttcttatcgctacgcccaactcccttcgatttggcctggttggagtcgccctgtctctggcatccacttgtcgaggttgacttaggggtgagttgatggtggtactttgacaaccactcctcctctgataccatgagtcaccccatcttctcagtgatggagtcgatctcaaatcaatctttagcggcctttaggcatcgactaagtcttccatcgttagtgtctttagatcgagtagcatctcaattaagaccatgagctaggagtagttcttccggagcac

SEQ ID NO: 8414 - DNA, 361 bp, Zea Mays
gtatgtgtaaaggcttgtaaaatggagttgtgtgccctcgcgtgcctgtgcctgcgagggctgtgtactttgtctggtgtgattggttatgctgtgccagcatgattatgataggtcttggtgtcgtttctgcttttgttgtactgggtcggctgcgcctttaggcggctcttgcgcgaagtctctgcgataggcttcgagtttgcgtgcttgcgtttagtccggctgcacctttcggcgacttctgcgcggatagtcttctgatttttgcgcacttgttgtgcttagtccggctgcacccttaggcgacttctgcgcggatagtcttcgcgatagacttcggatttttgcgcacttgttg

SEQ ID NO: 8415 - DNA, 421 bp, Zea Mays
taacggagcaatcggcttaagtcggcaatgacctaagatggtagaacatgctcgcgcttactcgacttagggtgaccactataccctactaatggaggaatcgacttaagtcggcaatgacctaagacggtgcaatatgctcgcgcttactcgacttagggtggccactataccctactaacggagcaatcggcttaagtcggcaatgacttaagacggtgcgacatgctcgcgcttactcgacttagggtgaccactataccctactaatggagtaatcgacttaagttggcaatgacttaagatggtgcgacatgctcgcgcttactcgacttagggtgaccactataccctactaacggagcaatcgacttaagtcggcaatgacttaagacggtgcaacatgctcgcgcttactcga

SEQ ID NO: 8416 - DNA, 1218 bp, Zea Mays
aaaatggtcttcgatatccattgtaattaatcaatccttaaactagggaacccaactgtcaaactaagctcctcaaatctcctctcgcgctcgataggggattcccttcataacccccacctacactgtgtgtgcgcacgttaggaaagactaaaccgccccactctcgttcacgcagaaaaaaaacctactctccttctcacccttcgctttgcacggttatccctagatgtcgctctcctttgtctttgtagcaacataagaagagcgctcgtcgatcttcctcgccatccctacccggagctctgttgtcttcagcgacctcgtcaccaacgaacgcttccccgaccaaacatttattcctcaatgagaaatccctacccatcttcccctctcagatcacaagaacaacaccataattttattgtgacaagacctcactgtaccctggcttcccctttctttcttcccctccccttccctctcttctccctctctctccttggcctcccctgtgctcggccgttgatgccccaaagcccctggctgtttctctcccctagcgaccacgccactgacgaacgcctccccgaccaccccttttcctggtgagaaattcctacccgtctccccctctcggatcataagaacgacgccataatttcatcgtgatcagacctcaccataccacgactttcctctcctttcttcccctccccttccctctcttctccctctctccccagcctccccccatgcgccatcgccgatgccccgaagcccccgactgtttccctctccccacatgtgacttggcatcgaagccccccacgtcaccgtcgaagccctctgcccctgtgatgcatgtgttgcctctgcgatgcccccacgcacgtgtgcatgcagttgaaacgaaggaagaaaccacctctcccctgcgcgtgtgcacgtctggaaagaaggcagccacatgggatcccatagatagggtcaattgcaccaatggactcggtgaccctctgtgtggcctcgttttcggccaatagaatcatgccacgacatattaaattggagaattaataaatgtgcattatatattacgttataaatctgttttgacctgttccaattatgttaatttagtaataatatcgccaacgtgttaataacattatgttgtcacatcacatgttttaattcattaattattattaaaat

SEQ ID NO: 8417 - DNA, 1435 bp, Zea Mays
tcggggcacagaagacactgcaaggcccaaaaaggggaggcaaaagccttacaaccccgccgaggcactagattccgcatcatcatcatcaaagagagggtccaccgcctggttttcagaagatccgggctcatcatccttgctgctgggaggagcaactggcctctgaatggcaataccagtggacttggatctactcaggtcatcaagattaagcttggatgggtccaccttacaaaattcagttcccagtttcttgatgatatcatgctgaagggagggaggagtgcattgagcgcagcatgaacaattctttttaccaatcccagtgcagtttttaaaacccttggcctttgccctaagcctggcactccttctaactgccgtgtcgaccaagataggttgccttttcctgagagctgcctttgttgggggtggggactgtggctcaacatgggtgtcttgactgggagggagcagacacttggagggaatcttgattgaaatggtgtccatgctgggcttgacgaaggcagatatagctcctgacaacaaaaatttcctggcccagtcaaaagaatccggcctgattagaaggcccatgaagaaagcagcccaaacttttggaacagagactgagccaacattgtcagggaataaatcagcccaagaagaggaacactttctggccatgtagtcttcaaaagcaggatcagggttggactgttccaaatgcaacatgaggcccacattgatgttctcttcaatttgcatgtcatcttctccctggtcgttatttccctccaaaatcatgttttcgggagggaaagctggcaaggcgagaactgcttcagccggcaccgaggcttcttcctgctggaactggactccctgagggataatgatatcgttaaagtagcccaccaaatcgtcagaaggaaggtcttcaagacccaataactgataactgaactgctcttctgcattgatcgcaatgtttgcattgtttgcgttggccactggctcagggggttgtgtgtgctgaactggccaagggtcccaaccttcatcatcattgatggcaacatcttcctcaacattgttcccttccatgggaggaatgttgagatcgaactgaaaattggccactggctgacccattccaaaaaactcaactggaagctggtgcccatcatgtgggtagggtggcacgggatcctcatcttgaggttgagcaccaagcataaattgttgcacaatgtcacattggacagtccatgaaactccctggaaaccttcagccatcgagagcacgatgaactgtggcacttcctgtaaagatgccactcgtgcccggaccaacaacctagttgcattatttgggtcagggtcccacatgagaaccctcccaaacgctccgaccgcattttgaatg

SEQ ID NO: 8418 - DNA, 496 bp, Zea Mays
aacccttgcacatcagaagtggggcgctggtgggggtcgggaccaacaccggtgcactctgcgtgtggtggtgatcctcctgggcaagctcaatggtcggagccaaccgaattgctcgtcagagctttccaacactgccgccctcccctcgtcgtggttgtggcccttactagaccaccatcggtatgcttgcgccctcataatctatattgtttagcaatccgaatagttgccatcgtgaaggctctcgtgtccttgtcacgaaaatcgagtgcctcgccggagttctccgcggtgcttggaattgtgccgctgtcgcctggccagggggaggaagatgagagatagtccctgttagatgctccatggacggcggtgattgaatcgggtgaatcgatttggccggggttgggttgtaaccgtggatcgtagatcggaggggcgagagcactcggggattcgggatcgatcagaccgttggatcgggatcagacgt

SEQ ID NO: 8419 - DNA, 571 bp, Zea Mays
attgcagccgtcggtgtgtggatcgacggacacggttcatccctcccatcggtggcgtcctcacggcggtgcgccccggaccacgatggcaactcgccggcgagagtcgcgcccgtaccccggcgctctattcccaaatcccgctatcctaaatgcacaggaagacaaggcgagccgaatggggggttctaaccggtaatggagtggccgaatgtcttggccacgacgtggatggcttcacggcggcgacgaagtcgtcgacgagaaattacggtgcccctgagtatcctccgcgcccaccagacgcaaggacagctccaccgtcggtaggacacatcggtgttgacaaggggatcacagacggcttgtgaatcgcggaattgacctccaatgcccacggcggcgcgctcccctcctcactcggtgctacaatggcgcaaggcttaacttggggtggcttggtcgggaacggagattaggtggtgcggctcgtcttttatgggcgcgagacggtgcccaggtttatgcaacggagcccgagtctgtgccccggaattccgcggtgtctggt

SEQ ID NO: 8420 - DNA, 793 bp, Zea Mays
cgcctacctcgcgcggggagctctccggggacctcagagttgcgcaacggccacgctcctacgcgtcttaaagaccgcatttccgtcgcccgacaccttgaccacgtcccgttctctagaacacaaaagcaccgccgccattgttgagtccgcggaagtgagaagcccgccgcattcgattggtgaccacaccatttccggggttggacgagtgtgcagaggggttcgccagctgccactgaatccgccattgactcaccggaggaaatacaagccacgggtgtgcgccaatttctcaccggcgctacatccaatccgcctgcccgtgcgtcaccgtggtcggccccctatactgcgcatccttggtaagaaacccatccaatcgactcgcctcatcctcctcgtcgtgtagtatcaatcgatttcagtgttggggacgcttgggcggagaatcgtgagcacgtcggtgaacttccgccgtagctctggggcgtgccgccgtgactcggtgcagtgataggagaaggcctcctggccgttggatcggaatggaacacctaggattagatctggagagtaatcatcgtgcaccgttgattggcatatccacggttgtgagcgaatatgtcgcgtaccgtttcgatgtgggatctgggccgtctgttctagatcggacggtcccggtttcatcccgaatcattataagtcccaatctaatctgagccttcggtccacgatcggacggatctggttcatccataccccttcgtcgatcccaattcgcatctgagcc

SEQ ID NO: 8421 - DNA, 457 bp, Zea Mays
ctcacgatgaggttgtacctgatggatcgcgcagagcatgctcacgatgaggttgaggtatggcgtgttctgtacgacttcatcctctgtcaatgctcttgcgtcaccttccatcatgcgtgggcatgcaccaggtatggcgtgttgtcatgtactttctggtacattggttgttactatggaggctttgttgctgtggtctcccttggtactgcatacatggcctaaacacggttgggtgatgttgtgtcttgtcgcggaagtcgtggatcgatggtgtctgtctgggttccctccttgcgggttcgcgtggcggggactcgatcgtccgtcctgcctcgtaggcttgcctgacgaggacttggtcgttcgtcctgcctcgcaggcttgctcggcgaggacttggtcgttcctcccacctcgcggacttgctcggcaaatgggtcgtggagagtat

SEQ ID NO: 8422 - DNA, 804 bp, Zea Mays
gttgagctagcaccagatgtccacattaggttcttaatagagtactatagataaatatgtattgatatatttattcaaatataattgtgtgggtttgagtgctcgttttgcactatttttgttatatatatagtttatctattaagagacctgggctttatataactgtggagagtcccgaccatcaacactgcaaatccatttaagcccacgttcgatcactttttatgcaagcgaactgatttagcgtaaacggaaaaccactttagcgtaaacagagtaaaagtcgcgagccctcgttccagaaaaagcggttttaggcccatttatcacgtggtcaaccatatcttccttagtcaacacatgtttacactactccattctcctgtttatacacaatagcgatttagcgtaactacttcatccgacccaagttacagaaatacaggattaggcccactaccccacttcccacgcggtcaaacatttctataccctaacccccgcgcggtcaaccttcctggccgactcgccgcgattcttcaggcgtcgccagggcgattcgtcttcatcctctcccgacagcgcgattcaccgtcctccgccgccgcacgccctcaactttaatcgtcgccgctgttgacagtatcgtcgagccgctgctgctgtcaatcctctgcgcctcgcgtcacattggtacacgtccgcggacggtctgtcgtccggattccaaggtgctcgagttcctctattaaatttatgccttacaatgcaacttcctaatatccttcctcccctccggca

SEQ ID NO: 8423 - DNA, 683 bp, Zea Mays
cggggaggcttctttagctgctgaatcaagagaacctattcctcccacgcagaaggctgaagagccgactataaagccgaaggcacctttggttgagctagttgaaacaaaggttgacaaagataaggttgaaaggtcaaaaactgaagaagtaacaaagatgccaaggattttaagtccttcaacagaagcaatagcgctgaaggcagaaaagagttctgccacaaccccttagaggaggatggtaaatgtattagatattttggaaacaaccgactccataagtcctgctcccacagggaaggttgccgaagctgacaaaacgcaacccaaagctgatactaagcaaatagaagttgagactacaataacccaggctgaaaccgaagcagagcccacagtgcctactgagacgaaggttgccaccaccgagcagaaggccgaaggaataactccagatattaatatagcttttgagaagagtgcggccaaagaggccgaatcccttgcccctgaagcactctttgaagattttgattacatcattcgacatgcttcgggaaagagattatccgaagaagaaatttttgaagctaaacactatgcccgagaactgaagtatccgaagttggccttagtgtttaacggtacggatgaagatgatttcttgtactgcctcccgg

SEQ ID NO: 8424 - DNA, 353 bp, Zea Mays
ctcaaatcaagctctgtgacttgaactgtttcaccatatataagttcaaatcatggcttcaagtcaccttactgatgcatcaacacaatataactcttcatagctgattagttcatcgacttagtgcaagtactctcttcttcaccttattcgtggactcgtggtacctcggtccaagccatcgcttggccttcaccttcgcttagttcctcgactccctttccttgctatcttcaccctatcaagccattcttgtctcacatcatattgagcatccattgggataatcatttctccaatattgtgaaccttgcttgaatgtcttctagatataaatgctaagattaatcaag

SEQ ID NO: 8425 - DNA, 830 bp, Zea Mays
agggaagttatcaactcataatgagttgatttgtaagtatgaaaactcccttaatgaagaacagtttcgtcccttctgtgcggattttgagttcttaatcaactaaattgtcgattatgaacaacgccgagtttttgagtccttcctccgcctgctttatttacgaagttaactcctttgtcgattatgaaccatgccgacgttttgtgatggccgagctgttgttgtcaccatttgcgcttttaaaatagcgtccgagtgattatgaaactgtgtcagcgatggaatgaccgaaaactgcgtcggcgttttagaggtaactgccgagtgaccgaagacgttgttgacgccttagagatagctgccaagcgaatgaagacatcgtcgacgctttagaggcaaatgccgagccattgatgataacgtcagcgtcttagaaatgatagccgagttagaacgggtcgcgtcggccacttttgaggataatagccgagtgatgatgtggcacatcggggttttagaggtaaccgccgagtgatgatgtggcacaccggtgttttagaagtaaccgccgggtgctgactgggcgcttttggaaacggcatccagctcaggaatatcccgcttatacagtgctttcagccgcctctgctttccgtgccctagttcttgtttttctgcctccaaatcctctctgcaattcagctctcgctctattcgctagtagattcgagatggcgcccaagagaaaggcctcgagttcatctgctgcggtaattccccctatcgaccccaacagccaattgcctttcgcgggtaatcacatgtct

SEQ ID NO: 8426 - DNA, 472 bp, Zea Mays
attccactgcagcacattacttgagtctttacccccgcttgagacgtaagacgtaggcaggtcaaaggtaatgttccttgaaaccatgtacacacataggcagcaaagtcctttttccagttcataaattggccagatgtcgatggaatagaggagggcgtcgcaacatgaggcagtagggttttgtggtgccgtctcctggcaggagagcagcgcgaggctggtgaagtcaagtctgcaactcagcaatgagcaagcaggtgacggcggcggcagcagcagcatgatggtgacgagcagtgaaatggaggaggccatcagctactctagtatgtacgagtgggtagggtagtggcgattgggaccaggtcgtccctatcgattgaggtggtggtccattttatagcccatgcaaacagccgggcgctgctgcgtcggcgtgggccatccctctctcatttgatcggggaca

SEQ ID NO: 8427 - DNA, 293 bp, Zea Mays
gcttcgtgaatccaaggagagatgctttgagaaatcctcggattgcgtaagaaaactgaaaaccagctttgccaaggtgggtgtgtattcttccgaagaaaagttcattcgaggtgaccccgagggagtcattgattggataggtgaagaagtcgaagcctttgaagagatccttagtgatcgtggtgatatttgtgccttcgccggcgctcggggggttgcaacaattctggagaaggttggttgtgaccatgttaaagctgtagcccagaccgaagccgccttctccacag

SEQ ID NO: 8428 - DNA, 504 bp, Zea Mays
ggagacgctgaaggcgacggcgggtagaatctctagggttcggtcgccgcggtggagaagaacaagcagacgtctgcgttaatggtagggttcggccgccgcgtgcgttacgggtgaggtgagctgaataactgcgtgctcgtgggtggattcgtgggcccgatacacgtactctgttgggcgaaatctacgcgaaggcccatgaaccgacacgtggattactgtttcgtaaacagaaacataagacatcgtaataccaatatttgtgtggggactagtacgactgcctagattgcgggaacataatcttctcgtgggcccggatgcccgaaacatgcgcataccagaagtgtataaactgatacacaaaatagcataacacgtaataatatttgacgtaagcaggtgggtatagtaagccaaaaagtgtacagtgcggtctgtgcacctggtcagtgggtggtcggggcttccaatagttatacagagcctagggctctaaat

SEQ ID NO: 8429 - DNA, 482 bp, Zea Mays
cagctgccgacccccaccccgttggctgagtccctggccttcgcagctgggtcatcgacgtcagcatcgtcggcaccagcctttcaagcacctgcacctggaggcgacgaccccgacgactccggagacggcgatgacgaggacgacgatgaagacgatggagaagacggacacatcaacgaggaagctgactacgcccagcaggaccacttcatggggattggtccagttgtcgaacattatacatcaatgttcgagacaggacacttccccaacctgctgcaagcagtgctgcacgagctaggagcctacgcccgccccctgtacgagacgaggcgagtgagcgagcctccccgggcttgctattacatcactcgcatccatgtcagggtaatggatgcaggtgacaggggactcaggactctgtctgctcacgagtccctgataccgctgtccacctacgctgcctcggtcagcgacgc

SEQ ID NO: 8430 - DNA, 774 bp, Zea Mays
acaagaacgcactgagaacggcctgtccacgtgcacggcggaaaccgcggtgtcaatcccgtgttctcaattatccacgctcggattggtaaaacggccactacgaggagcttcatgaacacatagagctgctaaaacaaggcttgaatcggacagggacttaccagagagggctggccacggagcgcagggctttacgttcgccggagacagagaaagggggaaatcggtgtcacgacggctctggttgaaattggggttggggattgaggctacagggccgtaagaagctgtgttttcattgtgtgcaatcaatttgggcgaagatggagagggcagtgcgaatttgacttcgactgagcttcactggtggagatgaaagcacctcgtcgtggcaccctactcaatttataggcacggtggcccaacagatgacccccacagatagtagcgcaagcgcatgcctaccacgtcggaaagagatacagtgagggagatggaggcatgggcgacaccgcggcaaaattcaatggtcacggtggccgccggtgaagactccggctgggctagggtagtggcgccacgtatgggttatccctccccgacgttatccattccctaccacccacgaacccggacggcggcggcacgaattttggcacaaagaggtcgccggcggtgagtttgccgcatgggcggtcagatccacttagttactgtaccatggcgtttgttcttcagtcatctgacagccaggatttagggcagattttc

SEQ ID NO: 8431 - DNA, 676 bp, Zea Mays
gtccgacgatgtctagcccccatcgctgaagcggccaggtgtgggcgatgagcttggtaagttgcgaaggggcggctgatcaatgagagaatttctggcaagcttcacatgatctggtgactcagttggctatacatattattgcgggccaatagaatccataacgaattaccttggttgcgagggcccgtggtcctgagtgtgatctgtaagttccgtcatggacttcgaggaggatctctaggccttcgatttcagttatgcatttcagcataggctggctgattccctttttgtaaagctggccctcgactattgcaaagtctctgctcctgtgttgaagccttttggccttgttgcgatcagatggatggtaatggccctagaggtatagtgttattagggctcgccagtcttcggccattataaggttgacgatccggtggccgtcggtgtcttgcgttatttgcaagcctttgggattgcggacggctggtgtgccgatgacatggtagaacacgtcggagggcagggcctcgcctttggctactactttggccaatgtatcggcctcatcgtttttgtttctctcaacgtgttgtagagtgaaacccttgaactgcttttcgaggctacagacagcggtgaggtactgcatcagtacgggctctttggc

SEQ ID NO: 8432 - DNA, 767 bp, Zea Mays
tgtaccccaccgtgccagcgtcctcctcgtcatcgccctcggtgctgtgctcaagaaatttcctggaccgagggagggctggtgcatccgttggcgctggagttggccgccattacgaccggaatttctcaccagaactcctggacccgccgcggatcccaggcttccgtgggcagcgctctacacaactttagctttggtatgcaatcctccccagtatttgtactgctctacacaacgtattgcgcgacctaattcggggaatggcactcggctggtgtgctcgacggcgcggtcgtcgccgttgtgcggtcagcgccgccgcagttcatcggaggttgacgacggatcgagcgccgttggatctagatgtagggccaggattagatcgggggtgggtgagcaactggccgttagatcaggatcttgtggacctgggtgtatatcggttggatgaagtggacttcagatctggaccgtagatcgtggattgcgcggctgagactgcataccggttcgctgtttaaatctgggccctagatccttgaatggatggcccaggtgcacctaagttcaatcagtcgtggcactttcgtaaaagagctcctcggttttcaccaaatcaacccgcaatccaccctgtgcagtccactgagtcttaggaatttttacgcgccagcccctgcacttttcggtaattgaggcccgatccagagctgtttgaaattaagtaaataaattggaaaaaggatttttattaggaaaat

SEQ ID NO: 8433 - DNA, 559 bp, Zea Mays
gttcaaccaactctggtccggatattctgtaagctctcttaaagatgggggcggtgccaggaagaagctctatagcaaactcaactttccgctctggtgacatacctggtaagtcctttggaaacacatcttggaactcggacacaaccttaataccctcaatcgggtctgcttcactgctttcgacagccatctgataacaacttcctttcttcggctcaggcgggactaactcggtcaccacttcctctcctagtggggacaccaacttgattgtcctcttatcacaactgataactgcctgatacttatctagccaattcatccctaggatgacatctattccctgagtaccattactatgaggttagcgggaaacgctatcccccttatttccacacttacattcaaacaaatgccatcagtttgaattctaccaccggctgagtcaatttgaatgggggttgacatggtagttattgaaagattatgtgcttttacccatgatgcagtaatgaatgaatgtgttgctccagtatcaaataacacttctgcaata

SEQ ID NO: 8434 - DNA, 905 bp, Zea Mays
tcaacgtcaccttcaccatttcctgcgccacatcctgcatcgcctggcttctctccggtgaatgcaggagagcgtgcagcagaagcagaggagtccgcagcggaggcgcctgtgtcgcccagaacacccacactagttccagcaagtcctcaggtagagcgtgtgacccccttggaggatgatgatgaaagggtggattcctaccatgacggtgaagaactccgttatcgaaagattcatgacattattggtgatcatgcaacccctctgccggcgcaacggctgtttgcagaactgaatctcacccattctggtgagcctacaagctatgaagaagccaaggatgatccagattggcaaacagcaatgaaggaagagctgagatcaatagagcggaatgggacttgggaacttgtttctccccgtcccggtcaccgcccaatctcactgaaatgggtgtttaagctgaagaaggatgaacatggagctgtgattaggcacaaggcaagacttgtggcccgtggttttgttcaacaggagggaattgattatgaagatgcctttgcaccagtcgcaaggatggagtcagtacgtgttttgcttgctttagcaacacaagaaggatgggagtacatcacatggatgtgaagtctgcgttcttgaatggagaactgaaggaggaggtttatgttactcagccaccaggttttgtagtatcaggggaggagaagaaagtgtacatgctacacaaggctttgtatggcctaagacaggcccctcgggcatggaatgccaaacttgatctgaccctcaagcagatgggttttgagcagaatgtgtatgaagctgctatgtacaggaagggatcaggtgactccctactggtaattggagtttatgttgat

SEQ ID NO: 8435 - DNA, 522 bp, Zea Mays
tccccatggatatagatttggaagaaatctttcccccattgggaacgcgggtatgggtctgggagggcaacatccaaactcgattacccatgaagaatatagacccagaaccagtgcacaacagcccaacataagtggcccagcccatcatcgcaaagcacaaaatggcccaacctgcatagcgggaaacctaaagatgtgtctcctaatctcttatgcatggacaatggtagctttactttcccggcttcccagttccccgtatccgcgctttaatgtccctaatggcttggttccttaagtctgccgctcaactccacgctccaccacgagggatccaattcttcacatgtcaacgaccacccacaactcatccgctcccatctctgccctagactccaacagggcacgtgtgtgagcgtccattagtctgtgtgccatgtgcttgcagctagagtgcctaacgcactgagcccctgacttcgtgaacctaagtaggtctttgcttgccagtcatgtgct

SEQ ID NO: 8436 - DNA, 316 bp, Zea Mays
gtaaagaagaacttaaggattgggaggaatgtttgccacacgtggagtttgcttataacagggcagtacattctacaactaatttatgccccttcgaaattgtatatgggttcaaacctattgctccgatagatttgttgcctcttccattgcaggaaagaactaatatggaagcttccaagcgtgttgcatacataaaaaagatacatgagaagactaaggaagcaattgagctcaaagcagtgcgcaaggcagcaagcatgaacaagcataggaagaaagtgttatttgaaccgggtgacttggtttggattca

SEQ ID NO: 8437 - DNA, 449 bp, Zea Mays
aaccgacagaaaaaacaccgcacgcgattacggcacaccgccgcacggtgctcagtcgagaaacaattgaagcatcttccgcacaaatccaccgggacaggtctggggagggacttcaaggtgctcgaacgccgacgaaccaccgtcacccaaccaccaacgtccctggacgcagcaggcttgggagaaaacagagcctccctataggatttcctccccacgtcaccctgaactagtgacgcagcagaggaggcacaagctccaccgtcctccatccagcgctgctccttcgatcttccgccgtgcacaacaccaaggggataatcctccgacgtcggggagggaagttgagtggtcgccggtcttggagtaagagccggcgagaggccagaggaaggaggacacggcgcgtagcgcagctcctccggacgtccgccgcgctgaacacc

SEQ ID NO: 8438 - DNA, 599 bp, Zea Mays
ttctccatctcgccatttcgtgagtcttgccttagctccattctttactatgttctttgttagtatcacccttacccttgacccttctatatatcacattgatgttcatctcatacctgccctttaaaatcgcccctcttccatctcataccttctttctcttggtcgtatccccttctttggcttgcgagtttgtaacctcatcctttgttgtgcttttgtttcttagtgcctttacccttctcatcactcaatctcaccttggtgattacgatatgtttgttatctaaaacctccaatctcccaccttagttcaagcgtggtcttttacttatctcacccgtggttatatcctatactttaccacttgcaagacttatcttatctctattcatgagtgtacctagattcctggttttttatgcacatctacctcttcctttatatcctttcctattatcacctttgacccttgacctctctccatatttaccatgatgtttacctatttttcttagcctcacttattccatttcaatccgagagtgttgttttccctatcccgctcttgtttgtttcctttacctttgtcgctttgc

SEQ ID NO: 8439 - DNA, 307 bp, Zea Mays
ctcttctttattgaccaactcaggaggaagattatatggcacaatgaagataggccaacacgagtaagggcttgcactgctattgaaatgtgtgaatccgtccgtcaatagaccaagtcgtacactcctagggtcgtttgcaaattcgggatcaaactcgtcaaataccttccacgcatcactgtccaacagatggaccaatatgtctggatcagtgaagagacgtacaccattctttggccacgtcatatgcagaacaaccttgaaatctgaggaatgatgggcaactgacgaagttgcttagctg

SEQ ID NO: 8440 - DNA, 445 bp, Zea Mays
tggatgtacggacgttctgcccgaactagtataaattttgcgcccaccgcgcacaccgtttggagcccggaacgcgcacacaaaaatttacttgtcggagcgaggttcgaaacatcgacagttggcacactaggtaggggacttgcgagttcctaacgaagttcttcaagctctggttggctaggcgcaacgccaatcgatcccccgaagcggcgatccaattcaggagcctcgacttctcccccgacgacgaaggcgaagaagaggtcatggccacggaagctcgaccccctccgtcgaggagtctcagcacgttgcaagggccagcagcggcccccgcatcgactacacccctagagcagccatccgcttcggaaacctcggtttcgtcatcaaccaggagggcgatttggtcagggcgatggtcgcctgacctccttacccg

SEQ ID NO: 8441 - DNA, 492 bp, Zea Mays
atttgtgttggcataccaagcagacatgaatgaatgtgtagcaccagaatcaaataatatggttgcaggaatggcattaatgtacatactgagtacgatgtcagcaccatcaggagtagcatcaacgctgacttgattaaatctggctatagaatatcccttgtcgggagtctgttgcttgttcttagctggtgtaccagaattccccatcagacaagcattagcatagtgcccaatctgactgcacttgaagcatgtagggccggtcttctgtcctgtaggcctcgtcggggtgcaagtgggagtagcctgacgagtaggaggtgtccatggagacccctgtggagcgtactgagctgggcgtggtcctcctcttagacgagtaggtgtaccctgtggtgaaacgtagcagggacgaacactgctgctaccctacccctgtgagatagccttcctcgtcaagtctcctagttgaacacgcttgtgttcaat

SEQ ID NO: 8442 - DNA, 634 bp, Zea Mays
aatcaggcgttgggtcgtcgaatctgggagccatggcgtgcataactgggactgcgcaccgaagaaagaacaccgccgcgaatccacgtgacgccgtgggggaccctgttgctgcctccattaccggtgagaaactatttaatcaattcggatgaccctcctcggtatgttgcgcccaaccgtgaccaattttgcgccacggctttgattcggccgttcaccggcgtacctcgtcgcgcggcagcaccaccatctctaggaggtgcctggctgccggggtgtagttgggggcgatgcggtggcccttggttcagcgatgaacgccccagattaagccacacgtaccggttcgaccgtgagctttgagaccgttggatcttaatgggtggttcggattggatctgggcgataaaactcgggccatttgatctccatccaacggtggaaatcgagtaccggttcacgggactttgatctgatctgggccactgatcgtggacggacgagcgagatcgtttctgggttgttttaaatctgggacgtcaatcgctcgttgggtggctcggattgcatacaggttcggtatgagtaacttctaatctgtgccgttgaatctgatcggacggcagatatt

SEQ ID NO: 8443 - DNA, 357 bp, Zea Mays
gttgttgagatcgggttctaggataaaactcaagagtggggctcctctcaacctcccgtcacggcttgttaggcctccaccaaacaccgccacaccgacctagaatccagagaggaagagtgggccgccgcggcggaatgcgaggcttggtgcgttctagtcggcggcagggactcgaagggcacgctgcgaggtaaacaagccatgggtgctgtcaatttcgcaaataaaccacgggggcgtgaggaatttctcaccgatgtgaactctccgccaccaaaacttcacccgtgtgggcagcacgcgcaaatctccgattacgggtactgatcttccttcccaattcattcttatccc

SEQ ID NO: 8444 - DNA, 742 bp, Zea Mays
gggacgtagatgtgttttagtgtattgggggttgtcgatcgtgggcaggcgttttcgacctggattttgctgcagctgagtagcgcgtgctagtattgggtccaggtatcaaatgtgtgcgttaggatctgcagtaaaattcgccaaagtagagcgacccgttgtgcatggttgctgattcagtaacttagagctttccttcgattagggtgttagatttctcctgtttaactggcaaacagtagaatagggacttgacacgttagtttacacagtgggattggatgagtcgattccatttttcttgttcactttactaggattttgtattatgtttctcttgcaaggagttgattatgagtttcatggtgtacttctgctgagtggtcttgaaaaaaatcagatgtacccagcttcaaaatattgattgccttgttaataagtaggtgtcttgtgtcttctcttctgtggagtcttgagtgtagctttgcttacctggaatataggtgccagttgtaatttagctgcttgatgttttgatccttttcgtgttatcattttaatttcttccaatgctgtcccaatggtcactacttctgcctgaaataattctgcatgcctattgggcaaaattcactgatgcatgcatatgtggcagaatttccatgaaaagctgcccgtgttctaacaagaaacatttcatctactcactgtagtatttgtttccacacaactctgaaac

SEQ ID NO: 8445 - DNA, 826 bp, Zea Mays
gggacccactcggccatcatcccttcttccccacgcgatgctcgggttctgttgcaacagacttccgcggaatacgcgtcatccgtggctcatcgcgataaccttgctacctgaacgaggttcgtggcttgcctatcctcgtggacttgacactcctataaatgttgtgccatgtaccgtcgtagtgccagggaggagagatggagcgactgggagccgggtctgccattgctatggtcgtcgggcgtgggctgcgggatggccatgcctcggtgaggcgattgggcgcgtatgctacggcacggcggcagtagggtgtttctccgggtagacgagcgcgggatctccaacctaaaccccggggattgcttgtcgacgaggggcgcgccgctgtttctgtccacgtcgtggatcggcaccttcatcgccttatcgccggtatgtaacccatgtctgcgttcactgttatcaccacgtcgtgtatccctagtcagatcatagttcatggctaggaattgggggatggcgtggactggccatggcgtccgccgcatcggatgcgcgccgccgtgttctggggatcagttggggaagagaggtcgtgaaccgttgatgcgtaatgagcggtccagattaattggatcataccgcttcggttagtgcaatccaagccgttggattggccgtggaggggtaggattagatctaggttccgacccttggatttagatctggcggcccatatcacgtattagttcacttaagggcggatttaatctgagccttccatctcagatctggcggccagtgatcaaccataaccctt

SEQ ID NO: 8446 - DNA, 503 bp, Zea Mays
ctcttatcaaagtgggagtttttatatgggccatgaggagtcagggactggagctggatgctaggtgcttctgcaacattcacaagttatcttaccagacgaaggcgaccgaaaaagaacaataccataacaactttggctgttatagctttgtgccccgctctgagacaaattaccctatgcctacatttcggaagaagtggccgggctcttggatgaagcattggttttacgtgaagaatgatctgaatcagagggaggatgtgaggggcatcattcaacgtcccatatggtcacgttttggcattaggaggccatcaatcgcaattgggaatgaagtgcaagcgtgcctaatgaccttcaacaccatatgtacctacattggtaccagagatttagttcaacagcacatcgctttcaaagtatggcctcttgcaaatgaatgggaaatgccgaaggaaattaccgctggctccagtcaggatggcttggtttatctcaag

SEQ ID NO: 8447 - DNA, 904 bp, Zea Mays
ctagtgaagaaatagtcatggcggagtaaagatcttagcaccggataggctcggacccgatcactagtgcgttcaccgtacccacttggcctgcggccgaccgagatgatcctcgccgacgttggctgcttactgaccgtgcgccatgtacctaggggctttaacacattgcagtaaaccatggaagcaagtccgtccatcgccggaggccttgccacggtgaaagccacgatcacccgcgctagtgcatttctcctctcttcggcgccagtgcatttctcctctcttcggcgccagtgcatttctcctctcttcggcgcgccttctcaaaattagacgccaacgccgtaggactctataaattgatgccccagtgagttccgctaggtaattacacatccaaagcaccagctctcgcctccgatcgttcaccatagcctctcaatttctcttttcccccaaatctgttttccgcgtcaccgtgaacacctcgtcgtggccacctctctgcaggttagttcaagcttcttggcttgatgtcttgcctcccttaagtctcctaatactcgtagacccatttaattgaactagactgccttgaatcgccaagaacacctcggactattctcggttttcgccgtcgtcgtgaacaggcatgctccggtccggattagtgcaattagttgagggattagggtcgctaagggtggaattgggtgtcagccaagttagggctctggtcattgagcatatcggccggtacgggttcgccggagggcgtggtcaccggcgatcaccatcggggacttgacgttgtaaagaaatcaaactccgagggcctaactgcgaatgtcagagacacaagtaaatagtgaaaagggttcttaaccaattattcaaatag

SEQ ID NO: 8448 - DNA, 307 bp, Zea Mays
gcggaaagacccgcaccggcaaggaaactccatggtctgaggctgcccacgtcgaatttgggtttcacaaagcctccacgcacggccttgcatcacccctggaaagtcttctaggcgattcccaaggatcaagcactggtgtaggcatgccgtggtgcgtcgcccgccactggtaatggtttcctcacggaaagaggcaagcgatccatcaggctagcaccatcggcattggcgagagggtggatgacgcattttatgcccccgcaggcggactctgccccgaggaaacacggctgaggggatagag

SEQ ID NO: 8449 - DNA, 894 bp, Zea Mays
tccccagttttagtgagttcaacttagcacaaccagcctcacatgttatatattcagaaaacagacaactgagggaaaatgtatcttatgcataagggatcgttgtttaaagggatccgaactgacaagagtatgatgaaccaagaagcacatattaactgtgaattacctgcgaaggatatgagcgccgaactgatctaagtgcgtcactgttaatattaaaccctccatcagaggcagcctcaaagactccgtaaagcttacgcagtgtatagtcaaagagaaacaagggcatcccttttctgatgtggctgacaaaggatcgatactccaagggtagaccgaaaatgcttgcttggaagcattggtcccttgtgacgctgttggacatgaagatagctcctgccatggagcccgcagcatcatgcctaattgacagcccgggcccctcgtgcctcattccaacggaccttgcacagccacaggtgaaatgagtgagaaccgactgtcaccgacatttaagggatcctatcagctgcatatgagggctggcctaaaatcctggctttaaaatcagatctaacagtgcacaattgttttagaaaaactcttcccactcttagccttttcgttttattatagaaaaactccagatatagtccatcgtgagatctaattttgaagggcagaattctataggtgcagatgtgcgctagccttctatatacacctgatatcatccctacatttaattagctacatactggctatacagtatttcaaacagtgatggcaggatgtcaaaattaattttaataacgttagaaggaagcgagtcagaataaaacaaaaataagtcaagtgttcaaccaaaggaagaaataaccattacaa

SEQ ID NO: 8450 - DNA, 293 bp, Zea Mays
gcggtggcagccgggctcgactgcatcctccaccgagctggcctcctcgtcgacctccaccgagctcctctcctcgccggccatggaggccgtcgtcccagctcctccctcacctccccttggtgctcggcctccaccaggtcgtggccttcaccacctcctcatcctggcccctcttgcccatgccatcttctcccagtttcctctacaacagccgatgctcttcctctctctgcttcctctccggccgtctggctccctgctcggcgggcacaagccctcggaccccccgc

SEQ ID NO: 8451 - DNA, 486 bp, Zea Mays
ttggggttggtaatttctcgccgccgtgcggccgccaccgcggggccgctccgtgccgtaggtgagctccacgtgcacccatgacaccagaaaaatgtccttagatgattcgctaggtcctctgttccatgtatcttgcactaggagtacgaatcagggctccggtctataattggtatttccccggcaatgctccgccgtggggaggagattacaccgccgtcgggtgaaccgtggagagcgatgacctttcagccgtggatctccgtgtagacggttgtgatggggcgcgggagcgttccccttcgcacttagaatctgatccgttggcagttcatccgagggcttgtgagcggtgaaaacgtggttggatccggggcgtagatcttagatcctggggttagggttgcataccggttcggtataagttaaaactaatctgagcgctccgtttgagatcggacggtctggggcgcacgatacccc

SEQ ID NO: 8452 - DNA, 1141 bp, Zea Mays
cggcgagcttaacttgaccagaaaacgcaatgtctaggctccttctttgctcgaccccctaattctaaccccggcgacgagaatccctcaactaattgcacaattccaggttgagaactctctgtccacggtgatggcgcataccaaggataacccgaggcgttcccggtgatctaacgcggtctaattcaaatggttgggccgataagtatcaagagcacataagagagctgaaacaagagcgaggagggcatgatcggacctgtggagggctggccacgacgagctcagtcacggtggagttttgactgatttgggggaacttcaaaattggagcgctctagtggacaatctgaggcacgggcgggtgcattgggtgtgtgattacttagcggagctgatggcatgcttaatttatatggcccgagggcggtggctcctaattttagcatggcgtgctgcggccgaagagaaggaatgttactggcgctaaaccctaattttggcatggcgcaagggattcgtggctttcaccatggcctgaccaccggcgattaccagacatgctaaggcaagttactatgacgtggtagagcacctaggcacatgacgcatggtcggtaagcggccaacgccggtgaggaccattttgcccgaccgcaacccaagtgggtacgacgagctcaccgtcgaccgggttcgagcccatccagtgctaagatttttaccctatcgttattatctcctcgccagagagcacgaatcatggtgacgacgcggatcatggtgcgagggtcaccggcggcgaagtgcagtgtacctaggatcttcttcagttactgtacaatcgaagctctattcagtctgtctaacagagccatttgtagggcattaatctctgatttttatgtggcaacttgttaatccctctgtaacaaagttcgtggcctacaatacagctttaatcttgctatagtaatcaccctcaaatacttactggatcatgctcaaaatagccctcaaacttggtcctagttcactgtcagtccagtttcagagctgcactcgactgacagaccaacttcaggtctatttttctcccactttcatgtagcactagggcttacttacttaataaaat

SEQ ID NO: 8453 - DNA, 417 bp, Zea Mays
cgtcatcgacgccctgtccagacgagacaccgaggagcacgagctgctggcgtaacaacacctcgtttcgacttcatcgagcgtctatgagaggcccaagccaccgacccggccctcgtcgccatctacgatgagatccgcgtaggcacgcacaaggcaccctggtccattgtgggcggcatggtcgccatggagggtcgcctctacataccagccgactcaccccttctgcaggagatcgtggccatggtacacaatgatggccacgagggcgtccaccgcaccctgcatcgacatcagcgtgacttccatttttcggccatgcgtcgtattgtgtaggagttcgtccaggcctgcagcacgtgctagagatacaagtcagaccacctacgtccagccggcctcctctagcctctc

SEQ ID NO: 8454 - DNA, 1138 bp, Zea Mays
actttgggtagttggtctgtccatttgccctttttgtcgtcgaggagccttttcttgatagcgcagaagatcttgcccttggcgcgttcgacgacaccgttggactattggtggtagacagaggcgaacactgccttggtgccgatggagctgcagaattctcggaagtcctggtcgtcaaactgcttgccgttgttgactgttagctcggatgggactccaaaccggcagacgatgttctgccagaagaatttctgcgcggtcttcactattattgtggagaatgctccgccctcgatccatttggtaaaatattcgacgatgacgaaggtgaattttaggtttccttgtgtcgtaggcagtggtccgacaatgtccagcccccattgctgaagtggccaggtgtgggcgatgagtttggtaaattgcgaaggggcacctgagcgaggagagaatttttggcatgcttcacataatctggtgactcggttggccgtgcatattattacgggccaatagaatccttgatgaattaccttggctgcgagggcccttggtcctgagtgtgactcgcaggcttcgctgtggacttcgcgaaggatctctaggccttcggtttgagttatgcatttcagcattggctgactgataccctttttgtaaagctggccctcgactattgcgaagtcactgctcctacgtttcagccttttggcctcgttgcaatcgtatgggtggtaatggccctagaggtacagtgttattgggtccgccagtctttggccattataaggttgacgatccggtggccatcgacgtcttgcgttatttgcaagcctttgggattacggacgactggtgtgccaatgacatggtagaacacgtcggagggcagggcctcgcctttggctgctgctttggccaatgcatcagcctcttcatttttgtttcgctcaacttgttgtagggtgaagcccttgaactgcttttcgaggccacaaacagcggtgaggtattgcatcagcacgggatctttggccgagtattccttttcgatctgaccgacgacgaccttggaatctattcaaatgatacatgtggtgacaccaagggcccgcagtttgcgaagaccgaggat

SEQ ID NO: 8455 - DNA, 403 bp, Zea Mays
gccttgtgaccgagttgagcccgcgaggtatacgagggggaaggagagggtgcaacttatgtcgaaggagaaggtcggccagggtcccttaacggccacagagattcacggcacgcccccgccacgtacggtgaggtcgttgggagggagaggactgacaatacaggcccactggatagagggattgagggtaaggtggagggaacggctcatgcgtggggtccccaaagtagtgactcgagtgtattgaggcgccaggccactggtcccacacatcagtgcagcgtggacgtggactcacgcggtgaggctggcgagttggacccttatgtcggtgccagctactgcttgggtcgagcacgggtgggttgggccggccagtggtaagtcggcctagtgcgag

SEQ ID NO: 8456 - DNA, 399 bp, Zea Mays
gattaaggtgtgctctttatagaggatgctgatgagactgtactttttaaagaagatgatgatgacgaagaaggatacctattcgctgggcaaggtacttacgtaatgtttttaatataggatatatgatttaaaagtttctaaagttgtatgtcttatcccttgttctttcaaaacaaatttagatggtgaatcaggtgaggatattgagattgatgaaacccaagatgcctttactgtcaaccctgacgtacctgacttgtacgacaaggtgtatagtaacataactgaagaaacacatttgttgagcactgttgctgactgcgattactgcaaagcgaagaagtttcagtatgaaccacctggattttgttgttgtaatggacagattaatctagc

SEQ ID NO: 8457 - DNA, 706 bp, Zea Mays
gcaatgggggccacggccccaccttgatttttataaactcttatacatagacttagatatataatgaaataaataaacttttatatagtaggttggactaaatttaatgaagacgagactttgatctaactttttcttggtgcttcactactcagcccactccccacccgagtcgtggtgctcgtcgccacacgtcgggatcctgcaccaatacagctactttgccttctaattcgcaccgacggatgggtaggctattagtgggattctaccttggcatcacagcaccatccgcccttgctatctcacaagggtcccgtcgcgccgtcgcaatgcgacaatggctgttgcttgctgccaccgccttttgccttgtcgtcgccatctaccgtcgcatcgtcgcctgccctcgctatcccatgcctattgtcgcctcactgtcgtcattttgcggtggagtcactgactctccacactaacatgttgatgcgcccgcttcgccctaacgtccagtctccgccagtccacccctttgttctctccaactctcctttatggtggcaaaaaagaagtttcggtattgatgttatttagaacactactcatattatcaattaatctccatgttattatcatggaactatttttatcaaatggtctagtatattgatttgtctcctacgttatcgccccacctgaaattttg

SEQ ID NO: 8458 - DNA, 441 bp, Zea Mays
ggagacatctgctggaggaaatccatgtgaggcagtgtggaatacacgcaacatcaaagaccttggtaggaaaggctttcaggtcaggtttctgttggtcgacaccaaagaaagatgcagcggacttagtccagaagtgcgaggcatgctagttcctatcaaagcaacaacacttaccgcttaacatctgcaaactatccctgtaacctggccttttgcatgctgggggctggatatgatcaggccattcaagaaagctcagggaggatacactcatgtactcgtcgccatcgacaaatttacaaagtggatagagtacaaaccaattgcctctttgacctcagcaaaagcagtggagttcattcaagaaataatgttcagattcaggatacccaacaacatcatcactgacctgtgatctaacttcactagcttagagtt

SEQ ID NO: 8459 - DNA, 607 bp, Zea Mays
gcactggcaagaaatgagctgtcttggtcaacctatccacgatgacccaaatagaatcatggtgtcgggaggtattgggcaatcccacgataaaatccatgcaaatatcctcccatttccaagatggtatgggaaggggctgtaaggtgcctgctaccttcaaatggctggccttgactctctggcaagtgtcgcattcagatacatacttagcaattcccctcttcattctggtccaccagtacaaagatccgaggtcatgatacatcttgttactaccggggtgcatggagaattttgaaaggtgatcttcatccaatattttctttctgagctcggggttcttgggaacaaccaatcggtctccaaaccatagaatccctttgctgtcctaacggaagcatttgtatttttccaccttctgttcgatcatttccaataacttgaacatccttgtcaccaatctgtgccatgactatttgctcatgtaaggtgggctctactgaaatataacctaaagcaccggaggaaacgacttctatgttcagcttgcacaactcatcacatagggtggtgattcttgcatccatattcatacaattgcact

SEQ ID NO: 8460 - DNA, 1331 bp, Zea Mays
cttttcccccggtcagcctgcttctctcctctagtttcactaacggctgggtcccacccgccagaagcttcttcaccaaaccaacggtggcgtactctgaagtctgaacacgcgcgacaggcgcttgggcgatgaatgtcgcgcgcccgtgatgcacagaaatcgctaccgcgacttccttcggtgcgaaaataggacagcggcatcaccggataacaaacctttcctctttccccgtgatccgatccggtatccttcatccccgtaccaatcgggatttcagttcctgacagcgggcggaacatggtcgccattatcgggtccccgtgaaccgcgccatggctaatgcggagagagataagctggagagggtccaccttgtgctcatcggattgcagagagattgagagagagaacgtcgtggttcgtgcggctggcgcatggacccgccttgactgcggcaccttctccgcgaattcgttgcaacagcgcgcgcaatcgtgggggtctgttgggattcaccctcctcgcatccggatcgtgagttcgttcatcaaccaaccccctgcccctatataaccatcaggccatgattccttgcctcccagctccgtctccatcatcttctaggcagagcgagccaagaagggataaaggagttctgtcccgttgtgtgtaaagggggtcaccggcgtggaaccagggccctgctgccccatagccttcgggacgcaacctgggatgatctccggtgcttgtggcgtctgttcgcggtattggaggaatctccagagttttggtaattgcttgatagtgagctcctccgctgtttcgtcatggtgtgccatgggtggggtcctccgcgctgcacccttcggtaaggacctcccttctgtgcattagcgttgactctagctttgcgtggatttatcgatggggcagggtagggcgtgtgcttgtggtcttggcaccgtgggcgagtttccggcgattgcctgtgccgtggttgcgtctgccggttcggcgcgcgattggtccctggtctgggcggcgcaaggaagaagaacatgcccttgccgtcggatcgagatggatggtcgagattgaaacagccataccctttcgcttcaagaaaccgtgttcgtggatgacgaaatcgacggtgtagattaggtctggatttaccccttcgcgcgatctgatctggaccttcagaatctgatcgggcggctcacgagtagccatacccctttgggcaagatattttgctaaagagtccctagtgttttgtggaatcaacccgccgtccgctatagatctaagaacattac

SEQ ID NO: 8461 - DNA, 450 bp, Zea Mays
ctggaggaggggcccaagtgccgagcgcaacagtggggcgtagtgtaccgtgtggtacgggccgggccggggccaggcgaggagcaggcaggccaggggggacaaaacggggggcagggcgtgtgggagagagcctgatgagaatgacgacggagttattgcctactcctctactctctcgcctgcctcagtgcctgctaacgctgcatcgtcgtcgtcctcctcgcgccccaggcggccaggcaccccccaccagctgactgatcatcgcactcccccccttgcattgggagtggagatcagaatgaatgcgcggcatgtagaggcgagccgtcccatcgccttgctcggctccatctccatccccgtcggacggagacggacccatgccgagcggagcggagcgcagtgcaagcatgtggcgtccccggcccgtactttcagttcccg

SEQ ID NO: 8462 - DNA, 357 bp, Zea Mays
gcatcgatgagtcttcgcaaagtggaagaagacatcgccaaatgggtatggagaggacccatcttcgaagtcggccacgactggatcgaggtactcagcgtgagctactttcatcgacgtctaggtcattcatcggagaaggggacctatgggacctgtttgagggggaagagttgaggttgatgttgttcaattttcgggaggcaggtcttattcggaaggaggagcctatgtgacaatttgttgcccttgctgttctgttgcgatattgagtgaaaacactgccctccccctcttcgcaatagaactgcgatggccatgtttgtggggtaaatgttgtatagtgtatgctattgt

SEQ ID NO: 8463 - DNA, 493 bp, Zea Mays
tggacctcgtccgttggatactagccaacggtcgcgattagatagtaggtataccgcttcgggcgggggaaatcgtagccattgatctctgcatcaacggattagattagatcttcaaataactcttcgacccttttaaatccgcttcgttgatctgtgatcctgcggtcctggtgccataccggttcatcacctgcggaattaaatctgtgccatccgtgtgtaatcaaacggacaagattagtcaataccccttcgtcgtgtacattccttaaagagccccttaggtcttagggatttaaactgcagtctagttcaatagttctctgtgtcttaggcaatttgcgcagagacccctgcactttccagaaaatgaggcccagtccagtgctgttttaaaatgaatatatgacttagaaaatagatttttaatacaaaaacaaatgctagagcttgtttattccatagaaaattcatatgaactccaaatcac

SEQ ID NO: 8464 - DNA, 455 bp, Zea Mays
gcgtccgccaagcgccgtggccagcgtcgtccgcgctgcaattgccggtaatactaccacccgtgaattcgccttaatctacgcattgggtcaacactgttagaacatagggattaccaccgtggggacgggcgcggtgttcatcggcgtttgcgccgacgtgcgagcgtggcgccgccgttagaaaccacaggggaagacgatacccgagcaccgtccgatctccaacgagcggctcggattggagaatcagacaccgtttcggtcgctggatcatcacagtcaatgtgaaatcgggcggtcggatggcgtttgggcgttcattgaatcgaaacctttagatcgtgatccgagggctctcgttgatggccgtgtgattgttggatagatctaatcgtcacccttcgattctaatccaacggtccagaactcactataccccttcggccgagaat

SEQ ID NO: 8465 - DNA, 393 bp, Zea Mays
aagaacgaggtgagggaggagtaggaggtgagattgggtgccaattatttttaccattgtcttactaatcaaatttggttcggtagcattctactccaaacagcctagttattatgttcagtagtgttattataggaaacaaaagagcgcaatggtcttttagatccttgagtgttatggcttattggtccaggatagatctgtttagccatctaggatatctggctattagctggtagtcaacttacagtttactaacattggctggctgtaaaagtttgggctggattgttttctagtttagaattttgtggatccagttgagaagtggggaacacgttcatgtcttgtggatatcaagttcagtcacttagtcatctgtgttgtgtcatc

SEQ ID NO: 8466 - DNA, 349 bp, Zea Mays
gcgaagcggcagaggtcctaccgtcggtgctgcgcccttccactaagggcgcgaagctcaatgtgggggacgtgcgtgtgccggatggtatgccagacagacaagctgaggagttgctgccagataaagaagctgaagagctgttccccgacagacaagctgacgagtcgctgggacgggcccttgacgggctagtctcgccccgttgtctgtcctctttggctggaactgctgaagaaaaaggccagtgcaaggctgaagagctgttccccgacagacaagctgacgagtcgctgggacgggcccttgacgggctagtctcgccccgttgtctgtcctctttggctgg

SEQ ID NO: 8467 - DNA, 506 bp, Zea Mays
aaataatggtggatttgtctgaagattctgacgatagcgatgactatgatgtggaaagtggggatgaagattctgaagaccggccctgcggctaagccataccatcttcggaaagtcgaccattaaacaaagtcaaattgacgccatgaagggaagatactttcgtgacttgtctattgtgagtgttggaggggacaacaccgcccctgctcctgaagaaaatgaggttgttgtctacagaagctttatgaaggcgggtcttcggttcccattgagcaaatttttggttgaagtgttgaagatatttcagatctttcttcatcaaattactctgaagctataatcagaatgggtttgtttgtttgggctgtgagaagccaagggctggaactgagcgcgaagtgtttttgcaatatgcacaaactgttgtacgagacgaaggccactagcaaagagcagtatcacaacaacttcagttgttatggattcattgctcgttctaatgc

SEQ ID NO: 8468 - DNA, 359 bp, Zea Mays
tgtaacactattgtagcactatgttagtaatgaactttttttgtaatgttcttgctcgccaggtgcctagactcataaaggaatacgttgaggaagtatctactcaactgaaaatggtctgtgattctgattcagacgagttgcctcttgaagagaaactcgcatttatgcatgagacaagacatgcctttggtagaacagccttgctgctaagtggaggtgcttcattatgatcctttaatgtgggtgttgttaaaacattggtagaacataaacttttgccaaggataatttcaggatcaagtgttagctaaataatgtgttctatagtagcaacaagatcatggcctgagctggag

SEQ ID NO: 8469 - DNA, 370 bp, Zea Mays
ctccggcgaaatctccgcgctcgcgcagtcaacctgaatctgttgaactcggattcagcccagggtataaatcgtgccgctccttccccctatcgtcccaagtcgcgagcctggctagtcgccatgggcggtagtagatggaggacggtgccgccaccgccgaattgatccgcgccgcggcgagttcggcgccgtatcgccactccgccttcctatccgcgctttggtctccgtcgtcccagttcccatctccggccaccactatttctgactcggtcagcactgatcgggatttctcatcacgggaactcaagccgccgcatccacttcgcacgagcaccgtagttcaaccatccctgggtggtctggc

SEQ ID NO: 8470 - DNA, 1039 bp, Zea Mays
gaaaaagagtccaagactcaggctatcactgaactggaccgcgggttgattcgctaaaagctgaggggcgcttatgtaaaacgagccagcgaaggggtatcgctcgcccaggaccgtccgatcaggactcgacgacccagattagacccacattacattgaactggtatgcgatctgggcagttggatccgtgatccacgatccacattcaccgagttcgcgatctaatcgccaccctttgatctaacgccaacgacacggatcgcgctggcgaagaggtatctgatctcgaccgtctattttctaatccatggacgccctggcgtcttcaacctcacgctgcccatgcacagacgccatgccctcccagaactctctctcccgttggtcaaccgacatgcacaccgctcggacctgtacacgccaccgccgttctccggcagcgcaccaatcttggtctgtatctaaacttcgctcagggctactgctcctccacagactgtgcaaaatccatagaatggagaaaggatgaaattcctaggtagttactcaccgacaatcccgtggcgcggacacccaacaccggacgcgcttgattccgcggcgtaaccccggcaccgacgagcaatccggtccccgcacagcactgcagtctagtagtgccccgcacgtagatcaccacccccgttgagcacttggtcctgcgcccgagtctcagatctccactccagatgcgaagtcgcagcaggccccctctgtttcccctctctcgtctggcggatgcattgagcagttatgggattagcgcatgagcttccgggttagttaaataggtgcacagatggtggccaggtggttgggaaagctgttgcgtcccgcggtcgacgctcggcccgatcacgcacgtctgttaggtgcggggggggggggaagaaacagagtagcagcgcgagacacagacgagtgggtcccagttgtcaacgggtgagcgttgtggtgcgtggtgtacgcgacgtggttgacctcaacagccctacat

SEQ ID NO: 8471 - DNA, 369 bp, Zea Mays
gctgccgcgatttgggagccatctgtcatcggcggcggcgtgggaagggggtgagttccggggacgttgatccttgcggcaacggcccagatcaaccggagagtagtggcctcggccgctggatttggatccaacgggggtgagcagatcacgggatgggtaatggaggaccttggatcaccgatccaaccgctcagatagtgtgccggttcaaccaacagttcattaaatcatgtacgttgacattagatccaacggccagtttctggccctacctcttcggcacggcatattgcataagagaccccgagttatactgaaataaacccgccgtcctatctgtagcgctctgagtcacagggatttttg

SEQ ID NO: 8472 - DNA, 769 bp, Zea Mays
aattaagagaaaattgggctctaaacttgattgtcaggctgtctgaataccactctccatggtacagtgctatcaggggggatcagaacgccagctcagtcatctcaccgccgatgaagcctcgtcgtgattcgtgtcaccggcgccaggattcgcgctcggggtggattgataacgtcgcggggataaggatcctcgccgacggtgagctggaggtcactctggtgactcaccgtggctccccttctgctttacggctggaggcagttagctcgccggtgaaccgccattgctcggttgtgcgccacgtatccgagcacttctgtcgcgtcactgtgcctctttacagccgttaaatcaacgccggtgagctcgccacgactgtggacacgcacccacggcaccagagttctttcccctctccggccgccagcacccctcggccgaattcgtcaccgaccctcgatgcgcctataaattgcgtgtgtcactagctccgtagggtagtaagctgtccagccaccacgaatcagcctcggtcattcactagaatccacgaatttggaattctccccaaaactgtttccgccaccgtagaaccaagctcgccgtggccagccacttccaggttcatccatgccctctgctaccttgtttcagcattagtatgcttccctgatgctcatccatccacccaattaagctaaaccgccaccaatcgccgggaacgcgattgattacccatggtgcccgctgtcaccatggacag

SEQ ID NO: 8473 - DNA, 516 bp, Zea Mays
gtaagaggtaacttgatatcgctgatccactgaccattaataagggattgggccaccattctagaggaggtcaacttcttgtccacctttgagaatactattggaactaaatccttgatggaattcccgctcaaccacctatctatccaaaagagagtatcattaccgtttcccacatgggcgattactgaaatggcaaccaacgccttgacttgtggctgcacagggatatcaagaccaatccaggacctgttagggtcggatttctgtagccacaaccacctggcttgcagcctccaacttttgtaaagcagatttgggagaccaagaccacctagatgcagcggcctagtaaccttctcccaagccacaaggcagctaccaccatttatctcctttctactcttccagaggaaagcccgtctaattttatcaatagctttgatcacccacttgggaacgctcatagcaatgaggagatagactggaatggctgagaggacgaaacgaaccaag

SEQ ID NO: 8474 - DNA, 667 bp, Zea Mays
cggcggcgatgaataccggagacaaatcgtggtgttctaggcgatttaatgtggtctagttcaatcaaacaggtctgcgagcaacaggagacttgagggaggctagaacatcacacagaagggcatgaactaacccgtagacgactagccacggcgagatgtcttacggtggcgttccgaccgatttgggggaagtaagaaattgggaggctctagtgaatgatcggaggcaagagctggtgctttggatgcgtaataacctagcgaagctcactggggcatcaatttatagagttcctcagtggtggcgcccaattttgagaagatgcgctggcagccggagagaggggaggttcactgccgcgggttaccgtggcattcactagcgcgtcgactcagaggacaggctggctacctattgcgactaacgacgacgtggtaacaaggcaatagcatggcaggctcgggttaacggcgatcatcaccgcgacggccgcgcggccacgtcgcggcgcaagtggatggggcgacagagcggccatagtgctccgacttcatccacgacgagatcttttcaccaagggtcgttatccgcgctttactgggcgcgaatcacagcgccgacgcaaatccgagcgcgaggtcaccggcggcgaggttcagtgca

SEQ ID NO: 8475 - DNA, 643 bp, Zea Mays
tcggaggatgagcgatgggtagaaggtgattagctccctgagtaagcagccgccggtagccttccgtgtctagggttcgcgggaggtcgtcagctatctgggccagtacccctccgacttcacttggcgtgttcattgcacgagcaaagtcaaggtacaggttccaagcgaatagagggttctctctatgcagccttgcaccttgctcagcttgctctcgttctcggtcctgagcttgtcggtgatcgcgacggcgagagttttgcctttctcagtgtactcgctcgtcaggagtttctcctacttctgaagcttcgtcacgggacatgggctgcgccggatcctgttccccagcttcgtgatgtcaccgtatgttccggcgtcacgcgcttcacgctggggaggttctaccccgtgcatggtagtctcatcgtcggagatgggtgatgactccaatctccccctaatgaagtggacattggggtagacaggagtcggcgcgatggcgctcttctttctgtcttcctttgaaggcgaaggcgtcgaaaagatggctctgtgcgttctcgtcccctgactcgggacgtttggttccttcttttgagtgatccatgtctactcctttgtgggcgaggtggacagt

SEQ ID NO: 8476 - DNA, 899 bp, Zea Mays
atgaggccgaaggagtataaacctaacggttaccaaaactatccagtatgtcaatgtcaatatgtgacagacaaaactatcttatatgtagatttatattaaaggaacacgagatcaaaggagtataaacggaaatgtgcacaatacatgacaataaattctcgccgtcagcttccctcgtctatttgccacagccggtgcggggctccgggctcgactgggctggtgggtgagggccgaggggctttccctgctgccgcacgcacgtgagagccggatagggagggagaacgggatggggggcaataattgtggcgggcgcgtacgcatggaaccgtggggcttccccccgttacactttgaatgcaaccatgatgatgatgattgatgatggcgagacccgatccacgctctcgtgtactcgtcgtgtgtgtgtgtgaccaccggctcccggactggagttgtggcttggattgggttggttggatttggatggatgtgccctccccaccacctgcctccgttacggttccgctttttcgggcagcgaatcacgcatcgcggtttccggccatgattacgcctcgctcgctgaccttaacctacatcgttatttgttgattattactaggcactagcgtgcactgcgtgggccgtggaaggatgggtgggcttgtgggctgctatctgcggcctgggactccgccttttgtattttttttggcacaaatgggctttacctagcggacgctggccgcggatcttgcttgttccaggatttttttttttgtaatttggattttcagcatgggacaagcaatttgattgttttgacccgcctaactcaacacctgattcaaattcggctggtgccgaccctgatggacgacgcacacgca

SEQ ID NO: 8477 - DNA, 431 bp, Zea Mays
ccaagtcagaattcttttaagtggtgtagtattcctggcagacttagtcgtactaccatcccacggaattgatgaaatcctaggaatggattggttgtcccggcataatggcatcataggctgtgcagataagacagtccttctcaccgaccaccagggaaagtcagtttcatttagagctcaaccaccaacccaagattcgatgatattcagtctagcaacagagggcatatctatggtagaagaattcatggatgtctttccaaaagaattgccaagaatgcctctggaaggagaagtagaattctacatcgacctcctccctggcaccgcaccggttgcaaagagaccgtaccgcatggcacccacagaattggcagaattgaaacttcatatcgtagaacttcaacagaaagggttcattcgtccca

SEQ ID NO: 8478 - DNA, 435 bp, Zea Mays
catgaacgttgtcgtcctgtctcgtccgcctgtctccttcgcctatctatgtagcgggaacaatatgagtcatgatgagatttgctcatgcgcgatgtgaggagtcaattgtcacgcctcggtaacgcgtgggttactagcgcggcccatgccctacggaatgcacatgcctcctactcgcatttaatgcaagcagcccccacgctagaggcacgtgtcaggctacgcctgcctggtggcttctgtcatgggccacaggccacgtggcagcaccgtatctctacctgagcggagatcaggagcttggaatgtatgtaggcgtggcagcccaaacctcccctagctagggtttggagggcacttgtggaggtccgggtcctagccgtaatggcgcagacacgcagcaacaccaaacctcccctggctggatgtcca

SEQ ID NO: 8479 - DNA, 894 bp, Zea Mays
gcgccaggtccacgacggtggacggcgacgagcatgcctccggcgagcctataccgaccaagacactcaatgaccagcgccctagcttggctgacacctaattccacccttggcgacactaattcctcaactaatttcactaatctggcccggaattcgtctgcccatgacgagggcaaggtccaaggagaaactatggtgttcagggcaattcagcgcggtctagttcaatcaaccaagcctacaagcaacatgagacctaaaagatgctagaacatctaacaaagaggcatgaaccaacctgaggagggctggccacggtgaaggactctcacggcggggttctgactaatttgggggaaatggcgaattgggaggctctggtggacgatcagaggcgagagctggtccttttgatgcgtaataacctagtgaagctcactggggcagcaatttatagactccatcggtggtgacgtccaatttgaagaaagcgcgctagcggccggagggagggactaagtcactgcggcgttctaccgtggcattcactggctgaggagctacgacggtcactggtgaactattacggctggcaacgacatggtgaaagggtcacgtcgtggtgcaatcacggcgaacgacgtacacctcgacgacggccgctcggccacgtcaccggcaagtggatgatgcgacagagcggccacaatgctccaacttcatccacggcaagatcttttcaccaggagtcattatccgtgtgttactgggcacaaatcgcagcgccgacgcaaatctaagggcgcgggtcaccggcggtgaggtgggatgaatctgaagatcttttcgtgcactgtaccatggccatcttctttagtcgttctgacagca

SEQ ID NO: 8480 - DNA, 711 bp, Zea Mays
tggcgcaaactgaggacaacccgaggtgttcccagcgatctaacgtggtctagttcaattggctgggccgataagaatccatagcacacaagggtgctgaaacgagggcaaggagggtatgaactaacctgtagacatctggccacgacgagctctctcatggcggcgttctgaccgatttgggggaaatgagaaattgaggggctctagtggatgatccgaggcaagggctggtgcgttggatgcgtaaatacctagcggaactcacgagggtggcaatttatagagttctacggcggtggcgtccaatttgaagaaatcgcgctggcggccgagagagaggggtgagtcatcgtggcgatctaccgtggcggtcactgggtactgagctacggcggtcactgggcagtctctacgactcgcgacgacgtggtaagatgtcctaaggcgtggtacaatcgcggtgaatggtgtacatcctggtgacgaccgctcggccacgtcgccagcgcaagtggatgagcgatagagcgcaacagtgccccccaagttcatctacggcgagatcttttcaccccgcgaagttatccatgcgctactgggcgcaaatcgcagcgtcggcacgaatccaagcgcagggttgctggcggcgagatgcactgcacctgagatcttattcagttcactgtaccatcagaatcctcatcagag

SEQ ID NO: 8481 - DNA, 504 bp, Zea Mays
gattgtacctagattcctggtttttttatgcacatttacctcttcctttatatccttgcctattatcacctttgacccttgacctctctccatatttaccatgatgtttactatttcttagcctcacttattccatttcaatccgagagtgttattttccctatcccactcttgttcgtttcctttccctttgtcgctttgcaatcttgtctcaccttaacttcatccttggttgagattttgtttgatatcatccttacctttgtaatctgtagatcttgccttgatacttatcttaggtctgcttgttgaaatcccttctttttgatctcaattcgagagctatgttttacttatcccacccttggctatatcctcttctttaccgcgtaagccttgacatacctccattctttgttgtacgtataccactggctcttctgtgctttcgtcttttcccttatgcccttgtctattatcgcctttgacccttgtgatattgag

SEQ ID NO: 8482 - DNA, 478 bp, Zea Mays
actccatcagagtgatgcctgtaaaatatttctctttgacgagtagttgaaataaaagtagtagtacatcaatgctcttctcaaaattaacaagaacatgcattgcacatatttcactgagaaaaaaaggggaacacaacaaaaggtcaaagaatccaaattatagcattaatcatggttgttatggcggtaaggcgatctatgacggtctagaacctttttatcctttaagcacctaaggcgtaaggtgacttcataaacatataagacgaataaaagcatagaaaaacaatataataaatagatgataaaggtcataatgggtagattataggtagatagatcatatagttgatataggaaattggtcctaatgcatagcatagttcacaaaataatagagttttgcaccagtgcactctaatgcatagttcacaaactaacaagtccacaaacacatgacaacattaatttcaaa

SEQ ID NO: 8483 - DNA, 1032 bp, Zea Mays
aaattttgaaacgtcgtactgtcatgagagggaacaatgcttgtgatcaagttttggtgcaatggtcgttcatgccagctgaattggccacttgggaggatgtgcatgaattgaagcaacaatttccaaaggccgctgtttgggggcaatcagcgttttcagcaagggggactgttagcggtactacatcttctgctactgggaccattgtggcgcaacggattagcaggccgaccaagaaatctacaaaggtgtatgggccggattgggtgaatgggctgcagctgtgctcgctttgcgaataagtagaacgagagttgcctcgtgaagggcatgtaagaattattcactacaacttcttctccaagttctactgctcgttcgccgccactcttcttcctccttaccctccgctactcttaatcgtcctctgctactctttattgttgttctcttctactgctaccttgtatccataccgagttgctaacactggtcctcattttatagtccgtcctgacgtgggaagcacgcgggggaaggagtccagcggaggaacgccatcagacagtgtccgatccgaactctagcatgaggaagaggaagaagctgacagcgcgggcccggttgtcagtggaagcaaggcacgacccacttgtcggtggtcgagacagaagagggagtgcgcgctttcagcaaaaacaggctacgcgatactgggcctcaagctgctgggctacggccgcggaccgctagagctgaccacacgcttcaccaggcttagcacggagagaaaagaagagatgggctgcgttttggtgtggagctgggctgtagaaacaacttcactggaagactgcgcgtaaagaggatggggaagcaggccgcggctttgggcttccaggtaagctttagttttcctttcatttttattttctgttttcaaatccatttcctaaattcaaattcaaatctaatttgaattcaaatttcctcgcaacaaatcaatacaaaaataatgctccaacatga

SEQ ID NO: 8484 - DNA, 381 bp, Zea Mays
ctgaaggatgttttcactggggactctgactccggtgacgacaacgaccgccgcaagaagctgtacgtcatgtacggcggaagctgggatctcacctcccacaggaacgtcaagtccctgcgccaagaggtcctttcggcggtcctgggggtcccgaaggctgctccacatcagcggtggaggagcaccaccatctccttcggggcatccgactgcccagcaacacggcaggggccagtatactaccgctcatcaccgcccctgtcatcgctaacatgtggctgcaccatgtgctgattgacggtggggctgggcttaacgtcatcagccatgctgcattcaagcagctgcagatcctagggtcctgactgagaccctctc

SEQ ID NO: 8485 - DNA, 311 bp, Zea Mays
gccagggacagttcttgcagaccaatgaggacagacaaagcaggagaaggaactccactactttcaccgctagcaatgaactgccgactgtttttccgagtcaaaggaacttcatcttcttcctcctcgtcgtccacattagcaacacaagcagcacccccattgggatcaacaacagatggagcacccacattgggatcagcagcggattgggtacacccattgggatcagcatcagtaaattcagtcacaggcatttcttcagcagcaggaaccgaagtaccagcgtcccgatccaaactggatactcg

SEQ ID NO: 8486 - DNA, 398 bp, Zea Mays
cgaagtagtaaccatagtacctttgtcatcattcttaccctttgtagtaagtatcaagctggtcaggttcgaccccagaagacgtaaagcgataacagagagaggctttgtcattacctctagtatctaggtggcccaagtgttgaagctgaagcactccctatatctttcatactatgtcccacttatgtcaccttcgtaggcctctcctctaccctgctggtagtaacttcagatttcttcctttttgaggaaggtggggtccttgtgtctgattgagaagacccttcaatgtcacttggtcctatcttcagtttcttggccacttcctattgtttcccctttttccctcaatttgcctagtgacttccctctccataatgctaacggttatcttc

SEQ ID NO: 8487 - DNA, 869 bp, Zea Mays
gggtgcatccggactagcacaataagtgcgaaaaatcgaagtctttttccaaaagactctccgtgcaaaagtcgcctaagggtgcaactggactagcacaataagtgcgaaaaatcgaagtcttttccaaaagaccctccgtgcaaaagtcacccaagggtgcagccggactatcacaataagtgcgaaaaatcgaagtcttttccaaaagaccctccgtgcaaaagtcgcccaagggtgcagccggactatctcaataagtgcgaaaaatcgaagtcttttccaaaagaccctccgcgcaaaagttgcctacgagtgcagccggaatattagtacgataaaaatcaaagcctacgggagcggcgtgatcaacgaaagcgcgcagcttcatcacacaagagtatggttacatacatacagcgagggcatcacacattacattggctcaacctttgggatgatacccatctccttatagttgaacaacattatcctcaattcttcacccgcaaacagacttcgcagctccccctcacccaaactcgccccagccggcgatgacaacaattcccgcttgccagccccgtccacacgaaggcgaccaccttccacctcaccacgatgacgcccactcatcctccgtttcgccaccgcccttcgccgcctatgcccaacactcgcacccggaaggtcctcatcacccattacacgcggcgaagcctccgccgcagccacatccaatgctacaaagtaatccaaatcctcatccgaagattcctctgtccacacaatcgaactcccagaatcatcagactcaaaacacttagacacagaatcatcagaatcgtcttcagcaaccacggtcgaag

SEQ ID NO: 8488 - DNA, 694 bp, Zea Mays
tgggttgtttggacacggagagatctgcgtggtattcaatcgctctgggcgtcacctccatactataaagccttggcacctccctcgacgcctcgtccacctcattcaagttcgccgtgcaccaagcagggagagagaaaaagaaattgggtgagataggagtgtagcgcctaggcatgctgctgctcgaggattcactgaagcgttgaagaacatcaaagccttggcggattttcctcttggttccgagattcatcgctgggtcgcggcgagctgtggtcggcgtcgttgcaagcttgtcatcggtgagtgcttttccgcctgtgttcgcactgtctctgtttcctgggtgtacgaccgtggttaggctagtgctcgggccgtcacagcaattgggttccatgcaccagtggtcatcggggcatcggtggccaggtgctcggtcaggggccaccgcggttggggcaagtcgtcacccagctcggactgaggaagaagaatagagcttggccgttggatttggaatctgtgaccacaattagttttgcggcttgaatagttctgagccgtggggataggaatcaactgtcacaattagatctagatgagtcatgggttccggccttcggatcgaatctcggtggccaagatctgtttgcgcgcatcgcttcggtgtgtgtgtggtgcgccatcc

SEQ ID NO: 8489 - DNA, 510 bp, Zea Mays
cctagagaaagcttgtctgaaagttggctcctttcagctgatcaaatagatcaccaatctgaggtagagggtatttgttcttgatggtaactgtattgagttctcgataatccacacacaatctcatgcttctacatttcttctacacaaaaagaattggtgctcctcaagggatgcggtaggcctgatgtactctttctgttgaagttcttccaactgcttcttcaactcagctagcttgctaaacagtagacattcttgacaggcttggtccccgaaataaggtctatggcaaactccacatctctatctggtggattacccagtaacttgtctggaaacacatctatatagtcttggactagtggcacctcttcgggtgactcgacctttatgtgatttactatggcttctaacagacttggtcaaacacagctctgaactgtctggccctgatgattggttactatcattgtcctctcaacacatgctatgtttcctcggtgtttg

SEQ ID NO: 8490 - DNA, 638 bp, Zea Mays
caggatgagacaccccagcagcagttgccaccaccacccccaatgaaaatagagcagatgtttctgatgtagacctaggcagttcaagcaattggtcagaccataacagccatgcacccggtgcagtagcagcagcctcaacctcaacttcaaccgcaagtgctgatgccacagatgccaagagaaaaacgtgcggagttcatgagaggtcatcccaatgtgattgcccactcagcggaccccatggatgtcgaagactggttgcgcacggtgcagcaagagctgcgtaccgctcaatgcagtgaccgagagaaggttctttatggtccccgtctgctaaggagagcagcccagtccttgtgggattcctacgtcaccacccatgtcggtaccacgttcctgaaggattgatgatagtgaggaaggaagaatttctggcactgaagcaaggccccctatctgttggtaagtacagggacaaatttcttccactatctcgctacgcacccgaggatgtcaacactgatgccaagatgcagtacaggtctatgagaggtttggttgacccccgacactatcagctcatgaaccataccttccctatctttcatcatctaatcgatagagctatcatgact

SEQ ID NO: 8491 - DNA, 284 bp, Zea Mays
ctgttgttcccattacagcaccaagcgaaaagacggatggagaggacaaggaccacatagtccacctactcccctacgcaagacgacgagcctgtctacgccacatcctacgctagagccttcacccacacgctgacaagacggggcgaagacgagtccggccagaggagtcctcatggcgaccaagagaggatacctgcccgccgcaggggaagaccttgttccaccaactctatccatctctccatgcttcatatttttagtattcctaggcccacctgtca

SEQ ID NO: 8492 - DNA, 533 bp, Zea Mays
tcaccgtgccctggacgccgttcgagagttcctgagcctcccctcatggtaaccatcctaactccgcccttattttctcctgtcttgcatttactcgcccgcgattgctcgccagagtgctccctggtccgccgaggactttctctctgccgtccggccgcctcaccccacttcctactgacctgaccccaccatagtgttcgcccagtcttccccatcctttctagccacccagactgacacctagcgccctaggagccctagtatacttcgccaccggtagctacaccgccgcgggcgcgtatggcgccgcccctggtcggccagagaggataaagcccctagcgccttacccaaaccgtccagtctagatcagatggcctggatgcacggataacaatttgcgtggtctgtggagccagaaccgttgatcggtaatcttgcggccagcgtgtctcacgctctcagcacatcgctagtccgtgggccccgcgcgtcagtgcctcaacccttccctaccccacctgttagcc

SEQ ID NO: 8493 - DNA, 603 bp, Zea Mays
cacgattactcgtccgacttggtgttgaattaccaaattagacatgtatttttagatgagcttttggagctgctattttggacttgtgggctgccatttagcgatgcatctatgggttgcacttattgccttgtagggttgggtagtagccaccagccaggcacaaccgcaaaatccatccatggctccatgctaccgcagtgccccccacgtcgtcgccaccgccacacaagttcacaatattgccccgctcgcaaggacacaagatcaaggtggatgcccaccctctcagtgtcgccccctgcccacaagatccagctccaacctttcgggcaaccgctcgagctccactgctggcgcccacaagattcattggtatctgccatcttctaggttcaagcatcatcgtctaggcctagctgttgtgtgttcacctgcatcaagtaatgatagatagaatcccaaaaccctaaagatgagctcatccttagatggtgagtatgtttcttgatgctctacttttcttgcttgttgccctgtttctacttgctatagctcgtggcatgtttctcttcttattgttactaagatcgattagtcaat

SEQ ID NO: 8494 - DNA, 305 bp, Zea Mays
gagctcgtcgccttcctgtgttcaaaaaccaaaattcgtcaagaacacaatctgcttcagcgttgtcagcctcacgcatcatgattggaaactactattctaagtgtatgtttggttcagctgtgctgaaaatctgactctagctctgcgagctagcgagctaatggataggagaaaattaaaatttgtttggttaaagtaactatcagcactaaaatttgattggttaaaataactgttagctgtaaattctgtgatcggtagcatgatagctcggtaacatggaaaggggaattaaaaaattt

SEQ ID NO: 8495 - DNA, 395 bp, Zea Mays
ccccaatgtgatgcatgcctacaccaaaacaggcgccgcaatgtacgacgtcaccatgaagccagggaatgagatctagctcatcccgtctctcgagacgaggcctctgaagtaggggaaacccttgatgaaagaacgctttgagaacaccgcaactcccgtcgctatgatcgtcgtcatgcccaagaactcgagtgggaacaagacaagcaggacgcctggctccgacgcgagaacccgcttctcactcagaacctattcccggactttgctcgagcactgaatacggcgagcgaggttggggggtcttggctcagattgccaatggcctaccgcgcacccccgatgcggagggctatcgacaggtgctcacccaagcgatgaaccaccttctc

SEQ ID NO: 8496 - DNA, 958 bp, Zea Mays
gccacgactccctcaccccgcaggcccgcacttcccccagtctactctcttttcagtttctctctccccactttccccatttttaccgcacatctctccttcctcggcgtctcgcacaccccagcaccttcgtctcccctcccctcccccaacaatcggaaccggataggaagttcggcttcctcccggacgactcggcgcaaggtcgcagcttttctctcgatttttcgcgcttccccgttttgacgcttgcttcgcatggggattctggagatctttggggcggttcgctgctgagatggttcgcctcatcacgcgctgctgtgactcccaacaggtaggctccgctagacctctttctagccttctcttggtgcacggaacagctggggagtggggagtacgagtcactagccttctcttggcggctgagagcgtgagctcggtggagttctgatctagcggaagatgggatttttgcggggctgacttgtgttgggtttcttttgttgcgcgatttggtggtgtgggcttcattccttccatatatgtagcatctgttttgtatgttgcttccgatttggtgggattccatatctcgcactagtgaattagtgatgacttgcttgactagtttcttgactggtttcctgttctatttctcattgttgcttcagttcttccgatccgaggagcccctgttatgaacggcatgccgatctctgcgtcctctgcggcaagcgtcgacagtggcgcggtggcggccggcacgcccatgaagaatgcaacggcggcggacgctctcgccgagatggcgagacatcttaccgtcgacacggaagacaccttcgcgggcctgctggagctcgccgctgacgacgacgcagaggggctgcgcctcgcgctggagcgcgcgccacctgccgccgcggacgaggctggcctctggtacggccgc

SEQ ID NO: 8497 - DNA, 449 bp, Zea Mays
ggaggtcaagcgacgttccaaagaaagaggaaggggaagcgtcgtgttttatatgcgagggagggggagctgtgcggccgttgatgaatgtcgtcgtgaagagctttgaagaccattaatggaggaggaaatgacgtgaacacaaaatggtcgctgcaactcaacgcagcataatggggaggaggcgagcagctagctgtgcagtggagagatgaacagacgagacatggtggcaggacgctgcttgctccattatggacgaagcgaccagttgacagtgcgacgtccatgaaacggaagtggcggctgcgatcctgagcgagtgcacaaccgtgagagaagaaaggagatagaagaagaaccatagagaaaatgatatgtgggctcgggatccaccgatcagcattaaaaaaacgaggaaggcaaggttgtatgtgggttgggctggg

SEQ ID NO: 8498 - DNA, 748 bp, Zea Mays
ctgttataagaggacaattagtgtcttcacttcagattctgagacaattttttggtcttctttcaccacctccagcaactgtgcacttggcaaatgctgcagctagaaaagcagcagttgttctgtctaacctgaaaactgggagtgagaacatgtacagttctttcaaagacagttcctctattaaagcaggttacctatgaactgatatatatttttaacatttagtatcctttggttttcttgttccttttgcaattatgaattctctaaatgatagttacgcttcaaaactgtagttggaaatatgctacatcttatcgtggaagcctgtatcgcaaggaacttaatagatgcatctgcttatttctggcctggctatgtggttccacttaaagaatcctctccagttcaggcatctccatggtcatctttagtagaagggtctccacttatagaacttaaggatgcccttatggtcacacctgcttcgaggtgataaatcataggaatatactaattttagagtttttttggttgtatgtctgttgactagcctgattcataatctcattcttattttggtttcttaattcttagtgtagaagagttggagaaattgtactcttttgcagtaagtgggtcaccggaggaaaagttggcagcttcgaagattttgtgtggtgcatcacttcttcgtggttggaacattcaggtatcattcagtttaaaagaaccatattgtagt

SEQ ID NO: 8499 - DNA, 437 bp, Zea Mays
gaggaaggggagagggtagcgctcaccgctgcgcgaggaagggggagactgtagcccctaaacgatgaacagttttagcgtaggggaggtgaagaggcatgtgttgcagtcagtctcaccgctgcgcgaggaagggggagactgtagcccctaaacgatgaacagttttagtgtaggagaggtgaagaggcatgcgttgcagttagtcttacgataacacatatacacccaaacaatcacatagtgcacacatgcaccttatgtgcaactaaccttagaatatatataattattgtaagtaatcaaaacataagtcaggatggccgaggggtctaaggcgtcagactcaagttctgatcctcttacgagggcgtgggttcaaatcccacttctgacatttttttgtctcgtttttattctttcttttccaaaggcaa

SEQ ID NO: 8500 - DNA, 348 bp, Zea Mays
atgtagtgttagttagtagagtggtgtagtgtaagtagtaaggtaatgtaatgtaatgtagtgacaagggtagaagaagttgactcataatgagtcggctttgagtttgtgttactccctctattatgaatcaaggatgtagtagctccaaataatcactgtcgttttgcttttcacttgcactcttgaaagtttgtccatgcgcttgacagtgctcgcattttagaggtaatgtccgagtgacgactgaggcttttacttttccgagtggtgatctagcactttagaggtaatgcctgacccaaggagcccatttatactcgtgccgacgtgcatttttgatttccg

SEQ ID NO: 8501 - DNA, 547 bp, Zea Mays
ggtgctggccttgttacctctggtctaggtccttcagggattgctgctcgtgctggccttgttacctctggtatgggtcctgtcagcagtggacaagtcaatgtctccgtctttatttgggacccagcggtcatgcgaagaacagtttggggacaaactgtatttcaacgattggggaatgtcaaccctgctacacaagaggcggctgtgctaatcacggacgacaaggatggagatagtcgggggtctgccgaggcaagcaactgagcacgtccaaggcgtgagaagcgtggcaacgtctgtattactgggtcgagttggtcgtgttagggttagctgggccgagctgccgagaaagtataaggatacaactcaggcaattgtaaggacatcgaaaaacagagaacaaaatatcaacgcgttgccatcccgagaccttcttccccacgtctccaatctctgctgcttccctctttcctgctctatagacttctagaaggtgctaacatttggtaccagaggtcagcatcctggatccgcttgcaac

SEQ ID NO: 8502 - DNA, 695 bp, Zea Mays
gcttggggaggatgaaccattgcagcgcaaaattgtatcagccctacattgctcggcgattggtggtcattccggcgtcccagctacatacagccgtgtcaagagtctcttttcatggacacggatgaagcaatatgtgaagacattcgtgcagcaatgccaagtgtgtttacaggcaaagccggaccggtcagcctacccaggcaaagtacagccacttgaagttccgctttcggcctgacacacggtgtccttggattttgtcgaaggccttcctcgttcgggcaccgcggattgcattttagtggtggttgataaattcactaagtatgctcatttcatcccattgcctcacccttataccgcactgaccgtggctcaactttttatctctcaagtctatcgcctgcatggctttccagtggctgtgatttctgaccgggaccctgttttcaccagtcagttttggcagcactttttcaagttagcgggtgccgagttgcgcatgagttcctcctaccacccccaatccgatggtcagacggagcgagttaatcaatgcctcgaaacattcctccgctgttttgttaatgcatgcccaaagaagtggtccttttggcttccaacggcataattctggtataacaccagtttccattcagctttggggtgttctcccttcgaagctctctacg

SEQ ID NO: 8503 - DNA, 1284 bp, Zea Mays
ctacgatcgagggatatcacatgtatactaagcgaatatgaattataatatttaattcggcttaatcatattaacagacaataatcacatgccgagtaaaattactacttagtcccgattagtgtgttgttcgaataaccgttgcttaaatatatatttacttagcgcgagctattctaggtgagatgaatcattagcgtgcgtaaaacgcacgacgacacgtgtgaacagcacgcacaacgcgcgcgaacagcacgcgacgatgagcccaacacgcacgaacaacacgcagacaacacctacgacacacgagaattactaataatcatcgcgtttatactaaataaatattacttcacaaaacatttgaggtggcattaatcatgttaatcggtattttcaaagcgccaattaaaattgtaggataggcttaactagatttctattttaataattatcaactaactaaataattaacgaaagcatgtgtcgcgacaaaataatgctactaacacgcaggatagatgaacgggttcgggggtagacgggcgtcgtctacggatagacgaacgcgaacagcaagccgtcacgcgagaatcgccaaatagatgtaatgtttatactaaacaagtattaattcaaaatcatctacgttaacattattaacgcgtcggcaatgttatcccgaagctaacgcaatttgaacaggtcgaaattgatttataacgtgaaagatttcgcttatttaacgaactaggagcttatacgtaatgaaccatatgcttcgtggactagcaattagtttttgcatgacttaggagaatagtaaattaattctagaataaaagcaggatcttttctttaaaaggcagctgagcgatgtgtcgcaaatttattggctggaaggctggccacgtggagggctacaaagagcacaaccacaacaactcctgagaggatctagtgtggagcggtttctagatattttcctgcatgcaccaaggaacgtggatgtatggcatcattggcatgcatggagcccacaaggttgtttctaaatattgcgtgacggattgctttttcttccacctctcacgaacatgcatggtttcttttccactaaaatcgaacgggtgattacaggcgcgggcggctccagctgagcagactcacaaggagccagggtgtagtcgacggccaccgaggcatggaacgcaggttggcagcggcgctagcaactaccgcggtaggggcagactggcggcgcacgcaggggagcacgac

SEQ ID NO: 8504 - DNA, 1223 bp, Zea Mays
cacacaacctagggtcttcccctacaccgcgcttggccggccgcggcatttccgaccgcacccaccggagtttgggccaccccagcatgcgccttccccacctccatagctctcaatgttggcacgcccgctggtgacctacaggcagtgccccccatccctgcccacgcgtcggacctcattcctgctcccgacgcgacgaactctgctgctactacgaccatgtgggctccaccatccttgagctcccctgctccaccgtggcccaccacaccgttaccaaccgtccccttcatccggcaacatggggcttccctgcgcctgcccccgtgacgcatgtccttcgctctgtcccaatccatgtgcctccctaccatatttgtgtctcccatcacgacaaccagcttcttcggggcatgcttgtggcctttgatcgggccatgaaccatgttcttcgtgaatgtgtcgagctctaccaccctctggcccctgtccacactaaggagagccgccacgccattggaccgtttgtgtttcgcagtgccgagattgtctccatgatggtcggggccttgacgtatccatcgcccatactcgtcgtcagcattgctcgccattggtggccctagcgcctctgccagtggctctgtaggggtgcctccctaagctctctctccttgtaccacaatgtcatcgcaacccactcctactcccaccggttgggttgctgaccccgacgcctcgtaccacaccactcctaaccccagtatagtttctttaccccatcccggcaaccttaccaatgttcaaaaaagcgcgattaagcgcccgcctaatcacgattagacgctaagcggcatgttagcgctgcgcttaggccctgggcggtggtttccgcggtgggcgcgtgtaggcggcgcgtgatttgcgctatgcgcgctgaggcggaaaggaggcgtgtggaagcggggttcggcgcgcggggaaaaggtgagcacggaagctgctgcgcgggaatagaaaaaagctgctgcgcgggaatagaaagtgaataggagggaaagaggtgggagctgctgttgcccgggagagagtgaaacaggttgggagctgcagctgctgttgcatggaagaggaggaaaacagggccgctgtcagactggtcctcttccccagccgtccagggccgccaccatcggtgtcctcttccccttctggtcaag

SEQ ID NO: 8505 - DNA, 762 bp, Zea Mays
tggggtgcttaatatttttaaacagtgcctaagttgggtttggacttctacaaattttcttaaatccagcatagaagcataactatttttcttcattttaataaggtttgggcagttacgttatttaattccaaactctaaaatttaatacagaaagcatagggttcaacatttttatttgatagctcataatattctaaatccagtaaaattggtttgactaaatttggttaaacatttctcaagatatgaatttcttaagttctctgcctatttaaaaagaataaacagaaatggtttaaaggaaaaaggttttgcatctgggtccctggcgaaagtttctaagtttcattgcagacaggtcctcgggtcactattcatatgagtctctgacgacgcagaaaaccccctaggtttctgctaaatcaaacccgcggtccttctcctaatgaaacagtaaccgcggcggaagaaagggcagaggggcttaccggcggcgagattgctccagtgaagtggtcgagggtgtaggggaattcttgtcggtcgcgccgatgtgcggatcgtctccggcgatggtcggagtgggtcggtccacgctcgcaggtgggtgagctcatcagcggcgagggctctggcctaaccagggcggtagagttcaattgaagtggtcaaagagcttcactagaggtcagggaagacatatgtgtgaggaattggaaaatggctcaccagattgctcgattcacgtgcggtggcggg

SEQ ID NO: 8506 - DNA, 849 bp, Zea Mays
ctcggtgtaagacatcgcagacacagagcacaacagaacgggacggtgggttgattttctaatttcataaggtctcttatgtaaaaatggcagggcgaaggggtaagatctaatcgtgaccgtccaatcgacaatgaatggcgcagatgagatataacttaaactgaagcggtgcacgatactagccactggatccgagatccacaaccacggtttaatgaaaccagatctaatctgagccaccgagagagcgatcaacggctcaggttgtttcttctccaatcctacaccggcgcggcagctttcccccacctctctgccgcacggcggcgccattcttgctccaccactctctcaccccctacgcctacgtacacttcctaagggcgctatatacttgctggtacaccatgggtcggatcggggtctcctaatcgggagaaacaccataccccgctgcacccacggtgaggcgcaaatccaccaccgtgtgcaacatcgacaagcaattcccgaccccagtgtctgtcgacttacatgaatcggtactacgcggtattaattcgaaggtgaagataggggtaggtcataccagggttgaggcgacactggggcaccagtccgcggcaccgggcggcgataacccttcttccatgtgattcttgcgttgtggttggttctggcttcctataagggacgggcgaatgcgtgtaggaggccgcaagcattatattggcgccaggtggtcaaggatgcaacgaccgaggcctaattcgtgggagaatcccggtcaccgcggcggggagtttggaccgagcacgacagccatgacgaagaaggtggtgacac

SEQ ID NO: 8507 - DNA, 373 bp, Zea Mays
cgagtatttgttagaggacatcagttcagcattcgaatgatataattactctcttattgtttcggaatttatcagttcgtgaatttgcagtaatgaaatgacgcgcgatgattatgaaatttgtttgcggggtatagaagtcatccctgtatgagtaatcataattacgtcagatcgccttaagtcgctgctgacttaagtcgactattttcgttaatagggggtagtggtcaccctgaattgcataggcatgagcatgttgcaccggcttaagtcgctgctgactttagccgattgctccattagtagggcatagtcgtcaccccgaattgagtaagcgtgagcatgttgcctcgccttaagtcgttgccga

SEQ ID NO: 8508 - DNA, 760 bp, Zea Mays
gtttaggcttagctcataagagccggctcgcctcggctgcataacgagccaaagaaactgggtgtgcctgactgcctgacgatctacgtaacacgtgaggctggggtgcctgcgtgcggtcaagggtcatccgcgctgggtggaacgttcgcttttcactcccgcggtcgccaaggaaaacgagcgagagctgacgaaaccgagtgtgtgatgacgggacggagaggagcccggaccggcgaccaccgtgtccgtccaccgcagggaaaacacgaggacctcgcgacgcgactccacccacacgcacagctccatgcctgcccacgcggacgcctgagcatcagaccagaggagagctatatctactccgctcgccaccaccaccaccccagtccagcccagcccaccacacccagctctctcccttctccaccagacacagccaggccttgtcttcttcttcctcccgattcgtgtttttttcctttctttttcgctgctgcaaaatatcgccgtttcctatctcttatcccccacgcatctcccgcctcgcctccgccacacgttccgcgcctccacacctctctcgatctcgcgcgtctggatttttccgacccgatcttttccccccgcatcagctgtcttctccttgcgccgggccaggccgcctctccctcctcccttcgcttgcgtctcactactcatcactgctactgctacttcgttcgagagggatacggataccccattgccggcccac

SEQ ID NO: 8509 - DNA, 672 bp, Zea Mays
caaagtgggatgtcgactctctcatcgtagacctcctcggacttttgggagagccaagccgccaccaacactgcgctcgaggttgccgatggctagggggccagtctttgtgtttcctgaagtggacagatcatcgcgtcgcaggtaggtggtgactgggtgaactctattttagtttttttattcctctctctctctatctctttgattgttttgtgtcgttttagagttagagctagaggtctataaccttcatgtgggtgtggacaaggtggttgcattcattcgtgcccagggtactgatcgaggagagcgcctcgagagtgccttccccctttaaatgagctcgaaaccagaacacggtcgaccatttgaatattgttggttaacaatgatatgattcgtggggcgttcgacacgctttgaccatggtgagcctccctcgtgcttggctttacaggccttcaccggaagcgtcgcatctagcgacctttctgatttcaatcatgggctctcgacaccgctcacgcgggttgaggttgagggcgttaagggcctcgatgtagtgttggggccttcaaacaaagttagttggcagggcaccaccctgaccatgccactttctaggctgatgttgatgcaggggtcaccaccggcctttgctctcctaag

SEQ ID NO: 8510 - DNA, 679 bp, Zea Mays
tggacggaggccgaacatgacctcgatcacgaagccaaggctccaccttttgtgttcaactgaccggtacataggaccgcaagcgaagggggcctttgacgctgcgaccaactgtaacaagtgatagcgtcgagcggaggccctttaatgatcaacaccgactacagagtttgctacgacgtcacaccagagcccgcgacaccaaccatctgtctgaggagagcgaagggcaccaaggcgtgaagaccccagaggcggtgacaaaggctgcactgtgtgatctgtacgccgttggtccagcaggggacgcttccgggggcccacatgtcagtgtaactcacgggcgtattaattggtatgcgccgcatgtggagagcacggtgttgtaattactccgttacacggaatattcctcggatgtagttagtggccggggtaggaccatactttggattacctaccctcaaacagtcctataaatactcacgtcctgtagctggatgggacacgcacaacgagacactatagttctcacctaatgtcttgtcgcactccagtgctctttgtctctgtctttgagtgtttggctccacctgaccatgtgtctgtacccaacattaggtctaatacatacattttgacatatatagaccattgggttgagtacctagaggtggct

SEQ ID NO: 8511 - DNA, 287 bp, Zea Mays
gtgaaaagaaagaaaaagagacaaatataggaacaaccttcaatgatccaagcacagcaactgaatagagatctgcattacagcttcaagcaagatgagctacttccataattatgccaagtgataatattggcataatgggcgatcaagttaatcaaactgattttgcaaaacaaaaccacctataactaggaaaaaacacacatcacttttcagtcaagatgcattagcacaatgagaaacatgtacacgggcatatagtaactcgaagctcataagtgagcaac

SEQ ID NO: 8512 - DNA, 475 bp, Zea Mays
gcacacaacgtccaagtcatgcaaagtgctggcaaacaatttgttgggagccacaaatgtatcacatgattacaacacatcaacaacttgaacaacttatgatgaacaatgtcattgtattttccattgggcaccacacacatcattgtattttatagtggacataaagtctagtcttaagtgtcacaggaccaccagatgacaagttacattgtttacaccaatggttgggcatagataaaaccacaaatgtactattgtcaaagtaggtttcatttgggagtaacatattctatggtatcgatttctatggggaatgtgagtgtacttgactaaaaacaagattattcaatgataacaacgatgtaggtgatggatctggtaatgacgatctatatggtcatgtcagaagatagggcaagcatacactttacgtgtttacatcaagacaatgatcttggtagcaacgaacaag

SEQ ID NO: 8513 - DNA, 634 bp, Zea Mays
atttcatgccgaagcaaaatttttgtttgctaccgcatttatgctagttagtcacgatctaaaataaacaaatacattcatatgaatataaatatatatctatactaaataaaaggggtaaatagaaaaggaaaagaaggaaacagacccactccccattcccatgctcgttcggcaactgccccacggcggagtgccatttgaaccccccacgtccccttgcctcactaccctctctctcattcttgcacagccaccaagcgccctcattgtgctcacctccccacggaactgccgccaccgtgccgcgtgttcgccgctcgcagtgtcgcgccctggcctcactggagcagtccccgaagcctcgccgcgtccgtgctccgccctcgctatccaaggtgagttccttccctcatctactctctccctctcgacatacgccgtctacccctgcacggtgagccacctactcgcgctcctagctccttggcacggcgagctctcccatccccggtgcctagaccaaagtagacctcgtcggccctgtgttgcgttgtgcaccagcaacctagccatgtgtcacgtcctcctctccctgcgcactcatgctccacgcgcgacaacctcctacgtg

SEQ ID NO: 8514 - DNA, 643 bp, Zea Mays
gggtggttggcagccgccaccctattgctggttgcgtcggccgctgccgtgctactggttgcgccgagcaccaccgtccctgctgccaccgcgccctttgcccttgccactgccccaattgctggaggaagaggtggaatggcaggcaggcgacgtgcaggacagggcggtggaaacagcgagtgccgatgccaaagcttccttgttctcgatgccgaagcgaagttccttgacacggagcatgttggtggcggacttgaagtcgggcagcggtgacgtgttggcgatgatgtcggcggtgttggcgaagcgagggttgaggccgcgcataagattaagaacgagctgcgcaggggagacagtgtggccgacctctcagagcgcatcagcggtgcgcttcagctgctgggcatagtcgtcgatggagaggtcgccctgggacaggttgtggaactcctgctcgaggacgacggcgcgagactccttgttcgcctggaacagggcctcgatggagacgtacagggcgcgggcgtcctgatcaggctccatggcgagatcgaggacgacgtcatcggtggagttgtacatccacccgcgaacacacgcgtcgggctgagaccacaggggatcagccgggcgcgca

SEQ ID NO: 8515 - DNA, 338 bp, Zea Mays
atcactcagctgctattcctaaaaaagccggcgtgccatgtcatcactcggtcgttatttccaaaacggccgatgcggcccattctaactcggctgttacctctaaaacgccgacgtcaccatcagtcactcggcagttacctctaaaacgccgacgtcaccatcagtcactcgaccgttacctctaaaacaccgacgttgccatcagtcactcggctgttacctctaaaacaccgacgtcacaatcagtcattcggttgttacctctaaaacgctgacgttgctatcagtcactcggtggtcacctctataacgctgatatcaccagtaaccactcg

SEQ ID NO: 8516 - DNA, 784 bp, Zea Mays
ctctggacagcgcaccaatatctgggaagcacgggggttgttctacaaatatttctgaaactcagtccgaccccgcagtggaccgcgagttgattactggattctacatgagttcttttacaaaatcaatcggcgaaggggtatcgcgaatccacaaccgtcagatctaactcaacgcgttagattagatcttaagcgcagtgaaccggtacgccatccggccccttggatccggaatcgatggtagcgatttaaaatagcgaagactcgatttggatcgtggattcgaagatcaacgacacagattaaatgacgtgaagcggtatgggagtcctgatccggttcgtccatcctcgcatcaacggcggacaactctcttccactcgcccatcccccaaacgttggtcagcggcggcgcgtcactatctgcggcggcgccatggacggcagagccaaaagctctgattcccgatcgagcactcgaacggacagcgcagcaagcaacggagacgataacgaaactgaggggaggagtctcaccatagattgacgcgcaggtgacgcagaccacggtgagcggcggacccatggtgaaggactgctccgatgagcaattcccacgccgtcttggccaaatgcgcctgcaaatgacgacccccgcatccgatattcatcagcgaacatcctcacccgagcaccgagaccccatgccgcggcctcaccagagttcatggcggcaatgcactccgctgtactctaccggtcgctctctcgtcgccaggca

SEQ ID NO: 8517 - DNA, 308 bp, Zea Mays
cgcacgcacgcccgcgctgacgactttgcgcagaggaccctggttgttcaaataattagtaaagaatccctagccactattcactgtctctctgacattctcacttaggcccctgcacttctgtttcttcgcagccccaggtccccgacggcgaacgacagtgagcacgccctccggtgagcctgtaccggccgggatacgcaacgattgatgccctaactcggtcgacacctatttctacccctggcgactctaatccgaccatcaattgcacaatcccggcccggatcctttctacccacgacgac

SEQ ID NO: 8518 - DNA, 419 bp, Zea Mays
gagaaattagtgccagattgtttgtgatttaaatgccgttgaagcgtcttgatttcgtgggagaacggtagctttcattgccattcacggtggctgtggaaacgacgactcagtaggcgcgattgtggctaacgcggcggaggctgggcatgggcaggtgcaggcacgaactggccaagcggtaacgcgcgtacgagcgatttagtttccactggtaacggcaagcatcaattccattaatggcagtccgaccacgactgtagtgaagacacgccgcgcggcgtggagcgcgagatggcagccggggcgacggcaacgggtgggcgcggaggctggagagtcagacgagcgactgggcagtcagctcggcgcacgacgagctggcctgcagcggcggcgagctgggctgcagcggcgac

SEQ ID NO: 8519 - DNA, 335 bp, Zea Mays
tttgacccctctggtttttctgtgaaggatctggccaccaggacccctctcgcccgctgtgacagctcggaaccgctctacacgctccagccctccaccgccggcgtgtctccacctcacgtcctggtctccacacctcctccaccacttggcatcgtcgtctcggccatcctggacccgacatcatggccaagattaccagtagtctagatctttcatgtagtaggggacattttgagggtctctgtcatgcttgtcagttaggccgacatactcgtctcccatttactacttcttctcggactgagcaagcttttgacctggttcactgtgat

SEQ ID NO: 8520 - DNA, 366 bp, Zea Mays
agtcgatagtcagccctcacgtgcctaggttggtcggtcacttacatgtggggtcggggcgtcagaatcgtccctatccacgggatatcaatcctaccgaactgttgcggtgcgaaagtcgtctgaaccacatttgcgcggattttgttggtcgtgaggtataaaaccgggggccctgcgtccctcatccatcttgtccaagcgccacggaactgtgaggggaggggattatagcggcgacgaaagagagcaatcgtggaccgccaacgtgattctctgccctcgacagggtttggagcacgagatcgtgcccatgtgttctccgagacatgcaggacctgtgcgaggaggagtcccagcatcccg

SEQ ID NO: 8521 - DNA, 472 bp, Zea Mays
gcatgttagcgtcttagttggctactgtctgtgcccgagtagtggatggagcacgacaggagcctgacatgtggggtcctctggccacgccggcaggaattggagcaggggcatacacgcggtgacgtgggtgtgggtggtgggtctcctctcctgatatggggtctggaaggcgttatccgactgcggtttctacatttttatgctgcaacagctacagcctacaggacaggacttgggggagtctgccgtgcgttccttctcatgcttgtgtagtctgtactctgtagtagtagcaagtggaatgtggaagagacgatacttgtactaccagggcagattctcgcactttgcttaacgcgaaacccatcattagttgacctccctgtcgccgtcatgaccagcagacgggaaatctcaccctttttttttcttggtttggatctctctttgtgcagcaacagaagcaccg

SEQ ID NO: 8522 - DNA, 597 bp, Zea Mays
ctagattccagaatgacgagaaaatgttcaaaactttggtttattggaatcctggtcctatagatagtttttgttgaatcagacagagatagtttttttgggcatgtactcgtataccagcaggttgcagtccacactggagtagcagtagtagatctagagcttcacgatgttcttgtgccggatgctgaccagcgtatccacctccatgtggacctcacgatcgtcgagccaccgccaccgatgtcactgtctctgctgctgctactgttggtggtggtggtcaccgcggcagccgccgtctagtcaatctgcctgttgctcgtcccacacagcagccacttcgacgacgacacccacaacttcttcaccgctaccagctcgccgctgctagctcgatcttgaacatggtcccagagccgccgggccccatggttttcttgtcgatcagcgcatccaggatctcgtgttgctctgcctagaagctcatcttgtggaagctcgtcacgtcgtatgacgcactggatgccgacgacgacgccagtgtaccctcctgctcagccaccattaggaactttagcattcgataaatccgat

SEQ ID NO: 8523 - DNA, 487 bp, Zea Mays
catgtaggcgcacgccttcctcctccctagcgccgcccgcgctcgtttctgcgttcatcctcgcctcccttcgccccgtgccccacccacagcaaaccaacaaccacgccgccgcatacatgactctgtatacctcagggcctctgtgtgcctcccgctgcatcttcttcgcatgagcttagctccactccctcatctgcattggccacgtggcctccaacgctcatgtctccgccagcctcgtcctacactgcacatgggaacatgtcgatacgcgcaacgtgttccacgagatggttgtcagggaattatgatcgtcgggtatgtgaaggctggggacttggttcatgcacggtaactgttcgatgctatgtcagaccgaaatgtggtgtcatggatgggcacacgatggtggtcgtggggtacctgcacatgaggcatccagataccagaggaggcagtcgaggtgttttgaagcatgcaggtg

SEQ ID NO: 8524 - DNA, 918 bp, Zea Mays
gtcgttgaacttgcatccccagaaagtgatgtagatcacccaaatctttcatagcaaactccagctgtaaggcctgaatgatgtgttggaggagaatagtagaggatgctgtgagtataatgtcgtcgacatagagtaacaaataagctgtgtcagttcctctatggtagacaaacagagatgtgtcactcttggccttgatgaatcccagggagagcagatgagtggcaaaccgactatgccaggcacgtggtgcttgtttcagtccgtagagggacttattgagtctgcaaacatgttgtgggctgcctgaatcctcaaaacctgagggttggctgcaataaacagtctcagaaagagtcccgtgaaggaaagcattcttgacatcaagttgatgaattggccagttgctggagacagccaaagataagatagtccgcacagtagcaggcttcacgacggggctgaaagtctcatcaaaatcaatgccgggtcgttgcgtaaatccacggagaacccaacgagccttgtacctttcaagagagccatcaacattaaatttgtgcttgaaaatccacttgccggtcacaatgtttgcaccatggggtcgaggtaccagatcccatgtgtgattctgcaatagtgccgcatactcatcttccatggcagctcgccaattaggattagcaagagcgccacgaaaggtcttcggaattggagataggggggcggcgtggaacagtgctggcacccggaagctagccttagcacgcgtgaccatgcgatggtggttaagtactggggagacagccaccgtgccgggtgggggacgacgatgcgatgcgtccgtaggaggtggagatgaagcagcgacactgccagtcgagatggcagagccgtccagaccagccggggtgg

SEQ ID NO: 8525 - DNA, 651 bp, Zea Mays
tgtagccggagctggagagcatggcactggagtcggtggagacttgggggctggggtagacctactcagagaagaagagttgcctactcccccagctccctcaaagtggacgtagtcgatggtgaagtcgtcatacatcggagtcgtgccgtcgttcaatgccttgtcccatgcccatcctcgcccttcgtcaaacactacgtcatgcgccgtgtgcacacgatgtgttcctgaatcaaggatgtggtaggccttcgagccctccgtgtagccaatgaacaccctcagggtgcttctgtcgtcgagcttgccgatgtggccaagctcattcatgaacgcgagacagccgaagaccagtagacgagagaccgtcggcttgcgctcatgccaagcctcgtacagtgtcatcccgttgagtgccttggtgggcgagcggttgaggatgtagaccgttgtcaccaccgtctctccccagaagacaaccgacattctcctctgcttgagtagagcccgagccatccccacaatcgtctggttgcgccgctcgacgacgccgttctgttgccggttgtacgacgcggagtagtggcgttgaacgccctcatccgcgcagtacgacgcaaactcagccgccgtgaattcgttgtcgtt

SEQ ID NO: 8526 - DNA, 477 bp, Zea Mays
aaaaggccgaagttgacatgggaagagatactaaacgaagacttaaaaggatgatgagcatcaacaagagcatccaccagagacacaagggtgattagcaagtacctgggcacgaagaggctcaaagtcatcacgtggacgagtcaagaagtcatttgtgcgacgaaactcaaggttagtcttctgagtgggatagaactcacatgtgctaggagacatatgtggaccaaagtatcaagttgacgcctgacaatagacatccgactgtagaactcatcaactatagaatcaccctaacataaggactactgacgaataccatcaagataagtagagtgactcaagataagtagagtgaccagtacgctcctagcgattttaagaagggtccacatttgatgagaactgtcacactgaataacctctgcagcaaagcggtcctccatactagcagtgagaatagaaccagctcgagca

SEQ ID NO: 8527 - DNA, 982 bp, Zea Mays
gacgtggtgtcgccgtgaggacaaggaatggccgaggtggccgagagtcgagagagtccgtcgtggccagggtggccaagacggcggtgccaagtggaggtaggaacaatggaggcaagggcgtagggtgtggtaacatgggcggaggaaggtgggacgaggaggcaaatggaatataatgggccggagctatcgcatcgagcaaccacaacacgagtggtggaagatcccaaatggtgagcccccagggatcgaacttcatagaacaacggtcgtcggtggtgaagcgacgaaccgagagaaggttctggatgatgttggaggcaacaagaattgttgaggtacaaggaccaggaaagaccgtgtcacctactgaggtgacaggtagagtcgacccattaccgacaatgatggaggaagggaatgtggggctaggaggatgaggtaaagagacaactctggggtcagaagtggtatggaacgagtcgttggagtcggaaatccagtcggtgggtggaggcggtggcgatgatatagggaaggatgagagagcctgcgggggcacccccacagagccaccgtgaggagtgttggggtcggcagttgtgagcatgctgacatcaatcatggatggggaagaagacaaaggcctcgatcgtcatggagacaatcatgccgctaggaaacacacacaacttggtagtgtggtggctcgcctgagggtggagctcaacgcagtcacggagaacagggtttgtgacacgatcaaaggccacaaatgttccccagagaagatggccgatgtgaaggaagacacgcacacactagggaggcacgagaaccgaggtcgcgagatggggagttgctcgcaatcgcgggcggtgggaaggcaacagtgatcagctgtggctcactagaggcgcaggagcaggggttgcacctaaggggaggagagctggccgccgacaagggcaccagtggc

SEQ ID NO: 8528 - DNA, 314 bp, Zea Mays
gttttatgagtctatggcaaaaacaaatacagagaagattaccaaggagataatggaggatttgtctgaagattctgatgacagtgatgattataatgtggaaagtggagatgaagattctgaggaccgtccttggcgaccaagccataacatattcagaaaatcgactatcaagcaaagtcatattgacactatgaaagggagatactttcgcgatatgtctattgtgagggttggaggagacaacactgctcctgctcctgaggaaaatgaagttgttgtttaccgaagctttttgaaggcaggccttcggt

SEQ ID NO: 8529 - DNA, 333 bp, Zea Mays
gcctagtgtaaagttgggggaaaaagtcgggctgatggctaggatttgtaatttgtttaattgctgtatcgtgttaatgttgctataattggctatgtgtgctgtgctcgtaatccatggcctaccaaccctacttgttaagtgcgtcaggtaccaatttttgtgctagttgttttgtagcgaagacaccacacagcgtacattgttttcttctgtgccactgccacattcgtgtgccaaggtcggatgtgattcatatctactatctgggcttactgtttttgcagtacaccgtcaactttgtcaatgtccatacctcctgagcttgctgga

SEQ ID NO: 8530 - DNA, 406 bp, Zea Mays
tatagacttgaaaaagatgcaattacaagagagtctttactgcttacaacaaagcaaagctatggtgacaccgcaaaattgctgcttgaatctcaagagaaaaaccaagagttagtgcacaaagtagaggactcagatagcaaaattgttctgcttgaagattcagtaaaaaggtttaaccacttttcttacaggtactgttaaattcaaaccaactttacactaagtttaatacctgttgtttacacatagactcgaagaaagtactgcagataaagattctttattggctatagaaagacatgaaaacagtgaaaccaagaaagaattagttggttctcagaaaaagattgcggaattgctaactgaagtgcaagatactcgtgcaaatgttgcagaacttgag

SEQ ID NO: 8531 - DNA, 323 bp, Zea Mays
tgctaggaagaggtctcttgcaaccaaggaccatcgactatcaggaggagggaggaaatgtttacccttgaagcacccactccaaacgaaccctgaggcactgatccagggttcgggcatggcgaagctatacaaggggccaggcaaactaaagggaaaccactcgagtggatccctcactcggtccgagattcacccaccgtaagtgcctagtcgcattaactacgcctggcaccgagccacggtagaagcatcgggccaccacccacccatgacctacaagcccctcgagctacagagcactcatgaactacgaacccctc

SEQ ID NO: 8532 - DNA, 627 bp, Zea Mays
cctgatgtcgaagcacttgccaactgtgtaaacgcgctccttgtttcatcctccacgagcaaggaccgagagcaggtgctctacggatttaccaacatggtgaccgagctacataggaacccactgctaccatccatgctggcgctctagggaactacccatgatgcgcccatcatgacgagtatgggaaggcccgcataccccatggccaccagaaccaaggtggataagcgatgcctcaagtggcgaaccgccaccttcagtgtgacaccttagggagcacaccctcgccaataggcatagggtagaaggggtcatgccctcgacactcatggacatggtggccaccaaccaacctccatccttgaccttctcgaggacgatttgagttatggctcaacattagagcccaacgacaatgacaccaaggtggtcgggcatattatttcgtggcaacaccaccacaagatggggccctagctagggacgaagacactcccatccaagacgaggagtaccattgccaacaataggcgtgaatcctcgcccgcaaggagtctccaacagcagcaagagaagctcggtgctcttgtgcgcaaactcaacaaagtacgagacgacatgaag

SEQ ID NO: 8533 - DNA, 432 bp, Zea Mays
agctacgccggagatgagagcatggatgcgctgggggacttggggcactgggaagggctcagggaggttcggggaagtgtggctaacacggccatgggcacaacattaacataggggcactgaagggtggaggtccacgacgaggtggtttggcagcagcgcagctctactccggcgagcaattgtgcacaaccgagggtagacaagaggaaaataggtgtgggtaggttggttacctcgagagaaggctcagggaccctcgaacggtggccgaggcacgacggggtctcggttcgatggcgacggagctgctgtggcaaggaggaatgaccggtgagcgtggaccgagagaaatagaggagagggagcgaaccgggggtgtcctgggttgctggtgatgaggcgaagctcaccgaggcaacagacactgcg

SEQ ID NO: 8534 - DNA, 710 bp, Zea Mays
gccctttttccatccttgctttcgcaacgcttttggtctaatttgcgctctgtaatttgcgccctttttcttctaatttgcgctctgtaattaatcgaagccaatcccaagaaccccaaaagtgcgctctgtctgcaagacctactgcagtctctaccaggctagtactacactaccagcgctcaactctcctcgacctcgagcgagtagaacctgattccaagccaaccaaccaggcagctcatcttcaggctagacagacggcaggaaccggcacaactgacgacgccccatgacacgagctcgtgctgcttccaggttccagccagcagtacaagtgccattgcggcagcgtcacactcacacacacacccccttatcgccagctagcggcgccaccgacacccttcgcagggcccatttacccccgtcccgtccgcccccaccgggagtccgggactaccactgacggccccagccgactctatcccatcctctgctttttactgtcaggcgcccgatcgtccatgtcgacacgttttaccgtcgccttccgcgcgccaatcatgctgcacttgttcttcttcttcctcctcctcctcctttccacggcccttcttctctgcatcggccttggatcccagatcacctcctcgcttatacataatacacttatactttcatttcacaggtcaaacagtgcagcagag

SEQ ID NO: 8535 - DNA, 601 bp, Zea Mays
caaattactctgtgaatggttaatcgaggagtgattataattgttgcgcttactttacatatcatctcctgtatgcctcgataaccatgactgtaggaaggtcttcatcaaaactctgatctattatgtgtgttatatcttcaggttgaaatatcctgcacacacatagggggagcctttcttacattctgagttttaattgggatttatctatctctcggacagaacttcaaatcaagataagtcctacgaaactcatctccaaaatccttcttatacctaaggtatgagggagatttggaaaaataaaacttctcttaaatatattatgtagtgttgtcatcaattaccaaaaggggggaggttgtgaatcatctaggccccttagtgatgttttggtaattaatgacaactgcttgtggactaacggttcttggagaaataagaatgcagggttggacgacatagaacaggaaatcttggagattcataagcattggttgtggatcaagtgaaggcaaaggtataacataggttttgttttttgccagtcttgaggagtttagagaagatacttgaccgaattagtaggttagatagc

SEQ ID NO: 8536 - DNA, 633 bp, Zea Mays
gtttacaagaatctagcaaaatttctcacaagcaaaaaaaataaataaaaaaatgaaatcgtcctctagatcgaagggcacacacgagatctcgggcttgaaaacattcccatcacggggcgaggaacaagattcttatatatcaccacagcatctcgtttcttttatcagccatgcctctagctagcttttcactttgaagatgcaggaataatttccttttctccatggctgtttgcttgcttagttacgagaaaagaagggggaaaaaagacctacctttcgccaaaaatgttctcgggacgtttacaatcatcggactgcgctccccggtccagcgcattgagtttcatcatgatatgggaccaaggaaacagagcgttagagcagtcccaacccatgaagcccataagtagagtctatgctatcacatcatcaagaaatgagttgtagaaactacatcttccaacccaaacggcgaaactcacacatgccgaggggtcgcaagctgcgtgcatggtatccgaggctttactacggtcccataaaacatgtggtagaagtggtgtcttgctctccaacgcatttggggcggtgtcctagcttattggagattgagccgacatggtttcc

SEQ ID NO: 8537 - DNA, 502 bp, Zea Mays
aagcttattaatcatacctgtcagtattacccgtggtccttcaggccccatgcacgttttgaatgcattgaaaacccactcgaatgtgtctacagtttcgtcttcgtctcccaacaacgtgaaaccaaatacggtgcactgcagatggtggttacaaccaacaaacattcccaggggtttatcataaagatttgtcttatgagttgtatcaaaggtaactgcatcaccaaagtcaatgtaatccgcttgctggctatcatgggaccaaaaaatgctcaaaatctttccttctttgtccagctggaagtcagataaaaattgtgggttatcttttttacacaatgcaaaaagaaagaggagcttagacacatcattggcatttctttctctttgtcgcgctttcttcctgtcaacattaaacaatatatcatacgtcaatagttcaaagcgtcattatgtaattatattagtgtaaataacaatttgacttacaggttcctca

SEQ ID NO: 8538 - DNA, 482 bp, Zea Mays
aagggagatagcatcacgaacgatagtgcatttatccggatcacctaacccacggatgttccacgatagcacattacaacttttacaaactggactcatgactgaacaaacagaacaccaaaggagcacacgaccacaatggcagaggggcacacacaacaccgacctaaggagcacaaagacaggcacgacctgacagcagacttagagagacaacaggttgacattacagaccatagaccgacaacagatcgactacagttgtgacggtagagagccccgccactgacagccaaggggagagaagtgatcattccgccataggaggcaccactccaatggagtttgcggcgttgcagcccagccccgcagccctaacaagcttgcgaagggttggcatcgggatggggaacatcgtcctggacaggatgcggtgcttttttgtctccaacttcacggcagcagagcaggtctcgagggat

SEQ ID NO: 8539 - DNA, 1039 bp, Zea Mays
gtttggtaccagtactccatgcatgacttaccggcgtatgggctattctgcgcctggtgtgttcatggtaagttcccatgcccagtttgcaaggaagctctcaggttcatttggttgaaaaagggtggcaaatatttgtcctttgataaacatcgacaatgtttccctcctgaccatccattccgcctagacatcaagaactttacgaaaggtgtcgtagtgatagaccgtccacctgcaacgatgactagtgccgaaattcgtcaatagatagatgggctcgtggccaatacagaaggtggttttgtgggatatggtgagcaacatatgtggacacataagtctggcttgactcgactcacctattatgacgatctgctccttccacacaacattgacgtgatgcacaatgaaaagaatgttgccgaggcactgtgggcaacaattatggacattcctgataagtcaaaggataacataaaggcaagagtggatctggcagcgttatgtgatagaccaaacctagagatgaagccgccaagtggcggaaagacgtggagaaggcctaaggccgatttcgtcctaagcagggcccagaggaaggaagtactttagtggatcaagatgttgatgttccctgatgggtatgcagctaacctgagtagggggtgaacttatctactacacgagtcttagggatgaagagtcatgacttccacatatggattgaacggattcttcctgtgatggtttgaggctatgtccctgagcatgtctggctagcgctttcagagttgagctatttctttcgtcagctttgtgcaaaagagttatctcggaccgtggttgcagacatggaaagattggcacctgtgttactgtgtaagcttgagaagatatttccacccggcttcttcaatccaatgcaacatttgattcttcatctcccctatgaggcacgaatggggggcccatgcagggacgttggtgctatccaatcgagagatgtctaaagactattcgaaagaaatgtagaaat

SEQ ID NO: 8540 - DNA, 376 bp, Zea Mays
gtaaacgcccacgtgttcgatgcccaccacaagctagagcgtggactggccagcgcccctgcgcgccgcgcgctggcgacctgaccaagtactcattcaccctgcctcagtgaagctcacacatccattcctgagctcgctactgcaccacaatcgtgtgccactgctcgctagagcacccggtccgccggtgaatgtggacccatgcctgcagtccaccgccgtccaattcatctagcccacaataccaccgccctccaatgaagttacctgacccctcaacggaagctttgttgtcgtcaactagccgaatttcacgtcattgttcttctacgccgccggtgcacgtggccagatcgattctgacaaccttcga

SEQ ID NO: 8541 - DNA, 938 bp, Zea Mays
ctcggatcagtaacagctcacgcgtgatccatggcggggagcgcgcaccgattgtgcaaagctcgggccacgtccaaccacccaagccctcggtccaatcccggtcgaccacataaagcacctcctcctacccgtacgcgcaactcgtcgcgcataccgtgagccaccattaccgtgagcagagaggaaaggaagaagagaggcggctgcacgatcatctgggcgtctgggccgtgggtgagctgaagtttgggtcggtgatcgtcgctggttcaccgtggagctgtccgcgggcgagccaagtagagtcggacggggaagcggccctaatttcttgctggaccttgcgtgaacctggagatccaccgtcgccgcggattggccttcctcactgtgacaactcgggtaacttcccctccttaggtttcgatttccggttggcatcacgtagacacgttcggatcaagctttgggtgtcgggggggctggaattggatgtcaccagcggggtccgtcgcgttgaggggcggcgccgccgtgtccagtgtggttttggggaagaagtcgctcggccgttggatggacagcggatagccgagattaggtcaaggataccccttcgtgcgattatatcacaaccgttggatcgctggcaaatgactcggatcagacctagaagcccatttatgtgatcgaatccgatccttaggttttggatccgatgaccgggatttcataccgattcgcgcggatgttgttttaatctggtgcgtgcatctcagatcgggggcccatattaagcgataccccttcggccgtgtcaaattctaagagtccctgagttctaacaaaaccaacccgctgtccagcgcctggcgctctgtgtctagggtttacttgcgccaaggcccctgacttttctggttattgaggcgcca

SEQ ID NO: 8542 - DNA, 928 bp, Zea Mays
gacgccaatttccagtacgcctgtgttatgcaatgacgataaataaaagtcaagggcaaacgttatcaagagttggaatttacctcaagagacctgtctttacacatggccagctttatgtggctgtctcccgttcaatgtctagaaatggacttataatcctgattgaaaatgaagatggttcgtgtggctcacagactcggaatgttgtttacaaggaagtccttgctaccgctgatgcggctgccacttagccctttttctacttggttgttgtagcgccccgtgtggcgtttgtaaataaataatgtcatcaagtacctacgcgtttgtttctttatacttttgttgctacgtttacagctgctgatgtgtgctatgtataggttggtacgagagccgtagttttttttggtcatactttgcatatgctgtttcatgcatgggttccgatgtccttggtcttatgttttttcttcctgttttaccttgtagatgggagacgtgttgatcccggagctctagcgtgggaacacttatgtgaccatatgcgcacgtgtttctcgtttatgggatttctgtgatcctcaggatgaaacaaagttgctccattgtgatatggtgctgcttgacgaagaggtacaacatctgcacgattatctatttggtaaagggaagctggcattggtatgagattaattgttattatgttgttgtttcctccatcgctgctttgtgcagggaaccggtatccatgctgcaatattcccaccagtcatacaaaagttcaagcctctgataaaaggagtcgtctacaacatcacatacttctgggttagagcctcgaacaatttgtacaagcctgttttcaatgagaacatgattacctttacaaactggacaaaattggaggaggttgttgaggttc

SEQ ID NO: 8543 - DNA, 1066 bp, Zea Mays
cggcaacctgtcgtccgccaatctctccctgctctacttggacgacaacgagatcaccggtgccatccctcgcgccatcggaaaccttgcctcgctgacggatttagagctgcaggacaacatgctggaggggccaatccccagcgagctgttccatccacgtgggcttacaaagatagtcctctcgaataaccagatcaatgccgaaatacccaaatccatcggcttattagctcagcagctagccaccatcagcatatcgaatagcggtctccgaggcgagataccagagaccttgtcgaacctcaccaacttggactacgttcttcttgaccacaaccagctctcgggtgccataccacctggtggtcttagctgccagatgatcctggacctttcgtacaacaagcttacaggccagatccctagtggcatgcctgggctccttggtagcttcaacatgtaccttaatctctctaacaacctcctagaggggcccgtgtcgtcactggagttcggcagcatggagatgatccaagctcttgacttgtcgggaaacaagctctccggcggccttccgtcttccatgggcgccttgaaaaacctccgtttccttgacgtttcttccaacggccttaccggtgtgattcctcggtctctgcaagggttgccgctccagtttgccaacttctcacacaacaacttcaccggcgaggtgtgcggcggagggtcattcgcgaacctcacgggcgactcgtttctcggcaatcctggcctgtgcgggtctgtccccggcatggcgccatgcggcggaaggaaacgtggccgcttcctgtacatagccatcggcgtcgtcgtcgccgttgctgtcggcttgttggccatggtgtgcgctgttgttgatcactacctgatgaggtcgtccaggtcgaggttggcaatggcagccccatctagtctactaccacgtttctccacgacaggattggtcaaggccaccggcgacggcgagaaggagagcggcgagcacccaaggatctcgtactgggagcttgccgacgcgacc

SEQ ID NO: 8544 - DNA, 400 bp, Zea Mays
cacgagtgtgggtatggctacaacgtagaggccccagaaggtagcttcccacggcgggatggctcgacgatggcgcagccatgctccggcgagcaatagagcacacccgagggcaggaaaggggaaattgggggcaggggaaggttggttacctcgagagaggactccaggaccttgaaaggcggcagggacacggcaaggcctcgggtcgatggcgacggcactccggttgcatggtgaaggtccggttagcgtggacagagagaactagaggggagaggataagtttaggtgcgtctcgagttgcggatgtcaaggcagaactcactgaggcaacaggcacgatcagacctcgacggtggcagcagaacagtcgcgtgaacacagcggacgacatcgg

SEQ ID NO: 8545 - DNA, 308 bp, Zea Mays
atgggcgacaagtgttctctataaatttgaagctattttattaatcgcttgcatgtctgctcaaaacattcctcattatgattcatgaacctattgcgccttctgttctcctttgcactatccaattaccatgttgtttcctgaggtttggaattgcgctacgatagcccactcttccacaaccgacaaactattctctttcaatggaaatagtcttagccttgaattgaactaattgagctagcggttcttaatatttccagcacctctgcattaaaaccaagttacaagaagcgtacactgacaga

SEQ ID NO: 8546 - DNA, 357 bp, Zea Mays
ccctgttcttcgcgctgccgtgaaggactcctccgtggccagcactcatcgggttagtacctaccaaattgcttcctgttctagcttgtcttcaaccttctgttgctctcggagccggccaattaaactttaccgaagcctacactccggaacaccaaatcgtctagtagaacgccgccgcgacgccctctcggtcgacccacttttctactcttgcctagtccaaattcaagcgtgtacataacctctggtgaacccgtgaagcttccccaagcttcaattttgtcagccatgccatcggttgttcggaacgcgtttacccatccgatcatccgcactgtttccgtggaccggttg

SEQ ID NO: 8547 - DNA, 523 bp, Zea Mays
attttatggtaagctccatggcaaagttgaagattaactataggactataattttggtacagagagctagtcgggtcaccacacaaaatcaggagtaaatcgagctccaagatgctctgtcaggtcgactgactgaagaaacaccatggtacagtgcttggatgtggatcagactgccagcaccggatgttcaccgtcggcgacctcttcgccgagattcgtgctacgggcgtatgggttttgttcattaggtaaagatctccttgcggatatgtatgagctaccgtaaactcgtcactccctgtcctttttcaccggcgacgtggcctcctggccgtcaccggagttgccatgtgttactgcggctgcgccacgctccaagctttccaccacgtcgtctctagccgcaccagctcaccggtaaccgccgtagcttcttaaccggtgatcaccggaggaagcgccacggtgaaagccacctgtttcacacaccgagcgctttgtttcctctggccgccagcgc

SEQ ID NO: 8548 - DNA, 618 bp, Zea Mays
tttcgcccattcgcgaacccgtacgcatttagattcatcggatccaaatctgacggtctacaatccccaaactttgaatccatccggtcacccgattacgatcctacggtcgagatgggtctcgcgaaggggtacgctaagttctaattatagccgcccactgagatcggattgccgggattcactggcaacggggcgattccccccaaacacaccactgcccggccgcgcgcggcggagaaacgcagacatggcggcgccatgaccgggaatggcccaaaccgtgctcctgcgaccaaactctcccccgaacccagctttacatagaataggcaacatggaatacgctctgcgctcccacatcgggtttcccggcaagtagcgggatgcccccagcccgcagcggactccattgcacggcgtactccagcgagaaatccccatgcaaccagcccaccattcgaccaagaactaggcgctatacaacgtacagaggaggatgaaaacatggcggatgtctcaccttgattggcgcggtaaaaggccaagcccacgacggcgtgcggaaactgaggcggcgacaccttcttccccaaattccccctctcacactctgct

SEQ ID NO: 8549 - DNA, 481 bp, Zea Mays
caatacatcaaacctgtagagctaaaataggagtacaactttgtttaagtgattaaaccttggtgtcatacaaaatttggataaaaatagacctaaagtctggctgtccgtcaactcagagtctgaaattttactgatagtgacttgggatgaactttgggagctcttttgagaatgatccagtgagtatctgagtgtggttactatagcaagatcaaagttgaattatagatcaacaactttatcacaggaggataaacaagttatcacataaaaaattgagatctgggccctgaaacttgctctgtcaggcgctctaatgagggtcttgatggtacagtgtctgcagaaatatcccagattcaaccccccctcgccgccggtgaccttgcgctcggattcgcgtcagcgccacgattaacgcccagttaaacgcagataacgatcctcgggtgaaaagatcttgtcgtggatgaacttg

SEQ ID NO: 8550 - DNA, 594 bp, Zea Mays
tgaatacttgcaactcatgctggatattttgtttatggtaaattttatcaaaagtgtaaaacctagaataaaaaaaattggagattggaatttaaagctgaaatgggaaaatggaaaaaagaaataaaaaagggggaatcagtgtcttgggtcaaattcacctgaaccggcccactaccgaattccctttctcggcccacactagccagcccactcccgccctttttttcccagttgcgcgatgtctgaccgacatggaggacccatgggtcagccctaatcaccgcatgccaatctcccagctcccgcctttgttctctcatgttcgctgccatgtgggtcgttctcgtcagtggtattccgacctgtcgggcgcgcacatctgctcctcttccaccgccatgtgggcccaggttgacaggtccatcttctaccccaacatcggtcgaccgttgcaacgacccgcacgacgaatccgcgatttctccggccagctgacggatgagtcggccacgaacctggcaggattctcgggatcggactttgcctgtcctcgtgccacgtactatataaacccagcgcttgccccagctc

SEQ ID NO: 8551 - DNA, 494 bp, Zea Mays
gggtgcaccacatcaccatctctggtaagacctactaactgaatcatagtagacttctcatggtttttcacccaagcgtatagagggtagaggtgtggggagagttcgtgtgttcggtagccatgtcgccgccgcatggatgtgtgtgccgccgtgggagtccgtcgggaggaggaagaggcatccgtggccctcgatctggtagcaggcgggtgagatcgggtcaccagataccccttcggtagatcaaatcttgtccgttcgatcttgatcgaagaggctacatcgggtcactgatcatttaatggatggccgagaatgctaggtagcatagtgatccatctggccgtaaacctagaatctaacagtcactgcttgatcctggatattttgaggtgggatctaatccgagccctccattgatgatccgacggctcaagatcttgcatacccctttggccgtgcaaattttcaaacgggaccctagctttaat

SEQ ID NO: 8552 - DNA, 419 bp, Zea Mays
ccgaacaccactatacatcggcattgtactatgctgaaatgttccagaacatggaacatatttctgttgctccatttatgtagtagtacatcttttttttcttcctggtggctatggttggttgctagtgacctcattggtcctatccaccctggccactttatttggcgcgttgcagacgttgcctgtcgattgtgaaaaacgttggcgtggtaatttgttggtatcgtcgtccatttgtattattttattttcttgatgtgaatacgcactcatataaatcgcactgcttgtgttttctgttctggtgacctttctaacgcatcaatggtcgccgcccctgcatgtttctgtacttccttttcagttgaggccgtctcggttgtttcgctcaaattatccaatggttagggttgcag

SEQ ID NO: 8553 - DNA, 922 bp, Zea Mays
aaaacctaagatctaagccctgcaaagtggtctgtcagtcgcactgaatagagactccatggtacagtaactgaacaagaccccaagttcatcccccttcgccgccggtgaccgtcgcaccgtgattcatgccggccgctgtgattcgtgcactgtgacttgcggataaccgtgggtgagtaaagatcttggcgcctggatcgactcgggctcggtcacagctaagctcgccgtacccacttgctcgtcgatcggtcggatagacctcgccgccgtttgtcgattaccgtcgtgcgccacgtgctaaagcgcttgaccacgtcgcagtgaatcacatcgtgcatgcccggtgatcgccggggagcttgccatggtgaaagccactaatcccgagcgccagtaaccttcttcctctccggccgccagcacatcttcgcgaaattggacgccaccgccgtgggagcctataaattgccgaccccgcctgctccgctaagtaattgtgcaaccagtgaggcaactcgtgcctcgaatcatccactagaactccccaatttgggatttcccccaaatcaatcaagaacaccgagcggtgtgacctcgccgtggtcagcttgtctcaggtccgctcatgccctctgccctttcgttttagtgttcttgtgtgcccctgatactcctcgaccaactcgattgagctaagctaccttagaacaccgagaacacattagaatgtccgttgatgatacggtcactgtggacagagtgagttagaggtccaatggtgaaattagttgaggggaaacgatcgttaggcctcgaatttggtttcagctgaagtagagcatccgtcatcaagtaatccggtcggtacaagctcaccgaagctcggccccgcgccgttcaccgtcgtggacttaag

SEQ ID NO: 8554 - DNA, 726 bp, Zea Mays
attcatctcatcttaaaagattctatcctacactcatagatctatcttatctcaaaaggtcttaacttatcctaatgtatatagatccatcttatcttaagaggttttctcttatcttaataaattcatcttatcttgaaggattcatcttatcctaaccactttacttatctcatcttgatagatctaactaatctcaaaagattctatttcatcttatcttaataagcatacttatccaccctagtttaacaaccatgatctaatgcaaattaattagatcatatctagtcaaactagtcataccaatctaatctagatcccatctaacctaatatgatctaatctaaagtgagttacttaacggactagttgatactagtgaaatagattagaccctgctggccatgttttaacttaaattagtacatcataccaaaccacccatgaacaaataacttaccagcatatttatggtgaccatccctcctagatgttgccataatacacttatcttatgccaccagcctgttaaccatttgtccttacccacaagttatcctaactacatgaacctaattcggataaaaacttcaagaatgaagatcgaagatgttcgacctcatcaaatcaaggaaggataagattcaagatagatcttcaaaggaattaggattcacaatcttggatagaacctttcctcaccctaccctttcttaaccaaac

SEQ ID NO: 8555 - DNA, 631 bp, Zea Mays
gagaatccctgcactcgctccttgcagcttcagcgagccatcaaagtacattctccatacttcagcaacttctgggctttttgggacctggtgctcagtccattcttatatgaattcaaccagtgcctgagtctttatcgccgtgcggggtcggaactctatgtcgtgagctccaagctcgcatgcccacttggctatccttctaatagcttctttgttgtgaagaatatcacctatcggaaatcctgtgactactatgactttgtggtcgtcaaagtagtgccggaggttgcgagcggttagaagtaccgcgtacaataacttttggacttgaggataccttatctttgaggacccgaggacttcgctgatgaaataaactagatgctgcaccgggtatcgtgcccctcctctgcccgtttgactactaacgcggtgctcaccacatgagtcgtgcatgagatatacaggagcagatcttctgccggctgaccaggcgtagctcaacatggtggcttgagtactggcggggtggtcaagaacttcttcagtgcctctagagccttctgtgcttctgtggtccactgaaacttgtccaccttcttgagtaatttatagaatagcattcctt

SEQ ID NO: 8556 - DNA, 272 bp, Zea Mays
cgggctcttatgtaaaactccgcgtcaaagaggtatcgctcactctatgccatgccatctgagatggacgcacgggattagatccaacccccacgaatcgatacgcaatggtagccgcggaatcggagatcgacggtccgtatttaacgaaggccagtccattcctacccatccgatcccgatcggacggatcaccacaaccccggttgaaccgttaccctttatctaatcgtcaccgttcattagagaatcgatagccagaggctttcgcc

SEQ ID NO: 8557 - DNA, 717 bp, Zea Mays
gtctcgaacggtgacatcttttagactggtctggtaaccattattatatgagaactcagcataaggtagactcttgtcccaactactaccatgctgaagtgctcttaagcatatcttccagtacttggttagtcctctcagtctgcccatcagtctgtggatggtaagccgaactaaaattcaatctcgtatccaatgactcgtgcaacttcttccaatatcgagaggtaaactgtggtccccggtctgacacaatcttctttggcacaccatgtaggcagacaatccgtgccatgtacaactctgctaacttggctcctgaatacgtggtctttactggaataaagtgggctaccttggttagcctgtccacaatcacccatatagaatcataaccagcagacgtgcggggtaatccaacaatgaagtccatgccaatctcttcccacttccactcgggtatcttaagtgggtgcagtagtccagctggtctctcgtgttcagccctaactctttgacacacatcgcacatagccacatgtgcagccacatctctcttcaatttctaccaccaggacttatacttcaaatcctgatacatcttcgtactaccaggatgaatagaataatccaagtcatgggcttccttcagtatagtctcacgaaggctatcaatttcagggacacatatccgatccttgaaccatactgtgcctt

SEQ ID NO: 8558 - DNA, 338 bp, Zea Mays
tgtctttcgacatgttaatttgatgtactgagttgactataggttggatcaggatagtggatagctggctgcattcaccagtaccatatttcagaaggctcattatcacttgattacatggatgtgaaccatgattaattgtcagggtttttgtaataggctttcttgtaatcaactgtagtgttcattatcccaaattcaatgacatggatttagttggggcatgatggaatatagtaggattaggaagaataagctcatcctctgaggctttgattgttttttggggttcctacttggttacaactaatgatatgtccatgtttatagccttcaag

SEQ ID NO: 8559 - DNA, 518 bp, Zea Mays
cttgcagctcagaaagcattgaagcacttgtgccaaatgtttgaatgtcacttgggatccacccccgtgaagtacttccctccactagatcgtaaccgtcctatttgggcgacaaggatccataacttggggagtaccatgaccgagaaagaccccactattgtcgctatgtctagctatctgtttagcctcgacaatttgtgaaaccaactgcaccagcgtgtgaaggacctcatccaacatgctgagaaagcagagacccactggcataaggctaagcttgccttagctcaagtagaagcccgagcggtcgtggtagaaagtcaccttgctgtggccaaagaggaccttagggagcaggcggactgccatagtcaacttctcagaggtgtatacctagtggatcatgcctaatgcaaggagcaccagcccatgaccgctactgagtcaccacccatggagggaatccctttgtaccctttgtcccacccccacaagaggatttgtgaatcggtgcc

SEQ ID NO: 8560 - DNA, 402 bp, Zea Mays
attccccttcattcgccgcggaggcagggaggaagacgggctctgtgccgttggatgagtggcggagggctgagatgtgagtcctggcgcagtgttccagcgggatgttctaaggccgtagatcgttaatccaaaggctgggaagtcgtatgcaagggagagatttcggaccgtggatctcggatcctacggtggcggttgcgtattgatccgtgtcgtgtgcgatctaatctgagcgcttggctgttgatccaagggctcagagccgcccataccccttcgaccgcgtcaacttacaaaagagcccttacactttctagaaaccaacccgccatcctctggcactatgcactgggtctgcggattattaccccgtggcccctgcgttttccattaattgag

SEQ ID NO: 8561 - DNA, 451 bp, Zea Mays
tgaccatggtcatcaacttctccctgtttttctcatcagccttcatataaaaccattcattttccagccagttggccactttgtgcggtagctgaggactggtgccttcgtatcctttcgatacgcaaaattataacaaccaaaattttcgtgaagaccatctgccctggcctttgtctgatagtgcaactcatgcacgtggcagaaagcttcggcatctgggctcatcccttggcttcgaagggcccagataaagatgctgagcctaacaatagcgttaggagtcaactaatgaagatatatttcgaagttctttaggacttcccctatcatctcattcaggggaaatcgcagccccgctctgaagaagctcttgaaaaccacaacttcatccttcttcggctctggggtagtcttttctccagcaaatcgaataagtttgctttcagcc

SEQ ID NO: 8562 - DNA, 599 bp, Zea Mays
cagaaaacacaatttagttcatcaaacatacagcacaactaaaacagcgcgtgcagcccaaaacagaaattaataaatttcagctcctatacaattcaagaatcgccgcgttctagagacttgaattatcctaacacttcaccatttgttagagttaaatcaataaaggaggactaacaagtagactcactaatttttatataagttaattcacacgcgagaactaacatacacatttaattaacgcattcaccacacgaacacagtttctcgccgcacactagtttctaacatgcttttcacataactcgtaattcaactattcactaacaataaatcatccacgacaacttccacagcaaccgatttatttatttggaacaccgcctgcctagcgtaccactagttcccacattttgatttaagctaaaaaatatagcctttattcgattatacaacagcgacctaagcgtcacgttacccaaggcatacatccttcctcgttgcgagtataaccatatcacggcatataccgacacatacgtgccccaggttacacacaaggcatcaacaacatagtgactctaaccagattaatc

SEQ ID NO: 8563 - DNA, 285 bp, Zea Mays
actcggcagctacctctaaaagcgtcgatatgatgcctaagttatttacttactattccaagagaatcaacttcacaaataaggcgggcggaggaatgattcaagaactctaagttatgctacaaacataacggatagagaacatcatgggcaatgaatatcacggcagaaattaaccgattacgaagcaaaacaatcggcacagagaaggcaacgtcattcttcattaaagggaagtaacagtacttacaaatcaactcattatgagttgatacttctgatagt

SEQ ID NO: 8564 - DNA, 814 bp, Zea Mays
tgacaagcccgtactggtcaagctcgcagtcacggacctccatctccaccaggcaaaacttgtcgtcgtccctgtacatcgcgtcatccactatactaaatagagaaagcaacacacagatcgaagaaccaggggggcgggagaacctcggttttgtgccttggccggtgctgtctgcgcagacggtctcaaggggacgcgagtctggggcagcgacatgcagcagagctcctgcgcggcggcggcggctgcagagacgccgagctccagcactgatcgttctaggtagtggtttaatcttgtttggaggcgcctgggggcaacagcgaagccgcatgctgccgagctccatgcttgcagcgatgacgttgtttgtaccctgtgctacccgtctcttttattaggcagagcggctaacactgaacgaatgccggtttagattaggctcagccaaacaacttagctggcatgcagagcatgtgcgctctgtcaatttgggcacacgcagacatctcgcgtgcatcgttcgacatctcgccggttggagagcgcaccataccgccgtctctcgcatcccatccgtcgtcgtcgtcgacgaccaatagttaatgatgcttatgagttccatcggtttaacccatagccacccaacccatgatctattctaatttttacgggctggttagagttagaatgggtggattgcaaaatccatacacatccttagtttggattcgggtactctagtaataaataggatcgaagtggattaatatggagatttgatctatcagatatttaaacactctccaat

SEQ ID NO: 8565 - DNA, 307 bp, Zea Mays
gagagtgctcaaacgaggaagcaggggacagggactgacctgtggatggctggccacgacgaggtgcttacacgatggcggagaactgatttggggcgaattcaaaattcgcgagctctggcgaacgattgctagcgattcgcggtggctgggtgggtgatgaccctgcggggctggtgggggcttcaatttatagggctcaacggcggtggccgggaattttaacagggacgcgcggcggtcggaaagggcagggagttattggcgcgcatgaaccagtggttatcgtcgtggcgacctcaccggc

SEQ ID NO: 8566 - DNA, 726 bp, Zea Mays
ttggccgggtccatggctacccctgcggccgagatgatgtggccgaggtaggcgacagatggtgctccgaaagaacacttcgaacgcttgatgaacagctgatggcgttgtagctcctcgaggacggcccgtagatggcggaggtgatcggcccacgtgctgctgtaaatgaggatgtcatcaaaaaataccaggacgaaccgtcggaggaatggccggagcacgtcattcatcagtgcctggaacgtggcaggggcgttgcaaagcccgaacgccatcacgaggaactcgtataagccatcgtgtgtgcggaacgcggtcttgtgcacgtcttctggccgcatccggacctggtgatagcccgaccgtagatccagtttggtgaagaatttggcgccgtggagctcgtcgagaagctcctccacgaccgggatggggaacgcgtctttgatggtgagggcgttgagggccttgtagtcgacgcagaaacgccacgagccatcgggcttcttgaccaggagtacgggcgatgagaatggggagtcgctgcgacgcacgatcccctggtcaatcatggcgttgcactgccgctccagctcgtccttgtgtgcagccgggtagcggtacggccggacagccaccggtgacgcatcgggcttgaggagaatgcgatggtcgtgggcgcgcttggggggcaaacccatcggagctgcgaagagccccccg

SEQ ID NO: 8567 - DNA, 458 bp, Zea Mays
gattgagcatcagaaacagttggcacgtcatcgatagcacgatcaaagtcttcagggggacggtctactacaaccggacgcaccacaacctccatgagttgcaaatgggtcttcatagccgaagtaacataattatcccaatccagttgacaatcaattgggatgactcgtcttatgacatttggtggatgaccaatgttaagcactctgtcaaccgcaatgtcatcatcttcatggtaacctagttttgtttagcctttgtaaacacatcactcaaggagggtctaccatcgaatagtaccggcacgtgtcgcatgtcaatgaacttggcatttccatatggatcttgttccacattgcctccatgatataagctcaaaaaattgtccatctatttgaaacaccaattaaacattcaatataaactgtggatggttattgtaaagccctaaaattca

SEQ ID NO: 8568 - DNA, 299 bp, Zea Mays
agcttggtccctctggggacatcgcaatagatgtgtgttcgatggagcttcgcctaacctttcaggccttgtgatccaggtctcagaggaactagatcgttggagtttagcgggggcaaagggtgtctctcacctagctgcctggactctggagttgagtacttgatgtattggtcgttccttttggttggatttttgtcacaggcgcgtatgtctttgtactggagaggatgtgtgtttggggtttttgggttttctttgtacccgctgtaatcaacgagattcttactctcatcgag

SEQ ID NO: 8569 - DNA, 476 bp, Zea Mays
taaaccaaacgaccagagagtatgaaccgacctgagatgcgctgaccacagcgaggtctctttcgcggtggcggaaacacagattaggggaaatgagcgattcgcggtctctggtggacaattgaagacaagcgttggtgctatggatgggtgattaccctatggagctcacggcatgctcaatttatagcaggcatgagcggtggccgtggaattggacgaagacgtgaggcggtcggaggaataggaggtaactggcatgtgtgattggtgtctattaccgtggcaagctttctggcgatcaccgtatacgcttaacacgactaactacgacgtggtgagatgctcgggcacgtggcgcaaggccgcgaagagtctatctccggcgaacctatccaaggcggccgcgacacgctcgggtacggcggccggagtaaaatagcggctggagttcatcccctggcgatatttcttac

SEQ ID NO: 8570 - DNA, 733 bp, Zea Mays
ctctggttttacattggcagttaaattactggcatgacctaggccacaaggggaagcgtgtaaagaaatgcatgcattgaagtgagactgggtgcatggatgggcagagtgtgttgtggcatgtttggaggaggcgctgacgtgataagagtgctaaggtgggaagaatggatggcaagaaaattatgctaggaggtgggcaggggatggaggggaggggatgttgcttttggtatgaatatttttgggctggaatgtgtatgacctgccttaaccataagctgcgacacacctgtgccaaggtcttcctctcttatgtgtaaggcctcatatggatcttaaggtgcaatccatgtatttcatgaatgaaatccccaatctcttctcctgccatcctcatccgcacatggtcaaccaaccgtgcaccagcggcagaccttcccaacagccactgctcgtagcctgcatgagagtgctgccaatgcgatatccaccagtctgaaacccgatgctgttggagcccttgtcccgagactccaggtgttagatcgcatgagaggcactgcacgccgctgctggcatgagtacctgccaccccagctatttgtcggcactcaagctcccttcggtgttagagccggcacaagtcaatgctttcacttccccacccggacccctgcccacaaaggagcagctggagttggtgaagatgggcactggccggtccttcatg

SEQ ID NO: 8571 - DNA, 582 bp, Zea Mays
aaggagctatctgaccataagagaaaattccaaggtcagtccagcaggaacactcgtccgaataatgctcaaggttcgtagttccgctctggaaatcagggtggaaataattatcaagtgcaacgctctggacagcaaggccagagaaataatcagaatcagaatcaacaaaggagcaacccccagaccaatcagaggtctggtggaaattcacagaaccgtcaaggtggcaccaacaacacgcaggccaggaacaatgcatctgtccaacccaatggatgcttcaagtgcggtgagctaggccactatgccaacaattgcccaaggcgtaaccagcaaacaccccaaagaagtaatactcagaggaatgaccagaacacccccgctcgtggatctgctcagatcaagactccacagaatcagagccgaggaagggtcaatcacgtcactgcagaatcagtgactgaggatgccgacatagtgtatggtatgttccttgttaactccatacctgcatcagttttatttgactctggagcatcgcattcatttataactgagtcatttgtggaaaagcataac

SEQ ID NO: 8572 - DNA, 553 bp, Zea Mays
gcgggatgtggggcaggccgccgaacgccgcggcgacggccgtgttgttgggcgccagcacggtggccctgtcgcggctgttgatggcgagcgcgacgctggtctcggtcagcatggcgctgaagacgctgaactccgggaagccggcgagggtcttggtgatgttgatggtgcccgcgcccccctccccgtagccggctccgaggctgggcggcgccgcggggaggaggacggcgagcagggcgaggaggaagggcgccatgcggtggcagagcgcgcggatgcggacgaacgtggtggcggtgaggagggggctaaggctggtgaatgagagctcggcgtatatatagccgtggatgggaagtgaagcctgttgaggtggcgggaagggagtgagaagaggcgtttggatggttgggtgtctgaccggtgaccagttcatgcggcggacacggatcagctgagctgagggcccggagatcgtaatctgcggctgatgtctttgtgtgggctgggctgtcacatgagtgcatgtcacaaacaggcccataat

SEQ ID NO: 8573 - DNA, 727 bp, Zea Mays
ttcggagtcccgtccgagctcacagttgacaacggcaaacaatttgatagccaagccttcaaagatttatgcttctcgattggcaccaagcttgccttcgcctcagtatatcacccacaatctaacggtgtcgtggagcgcgccaacggcaaaattttcacggccatcaagaaaatgcttctcgacgacaagaagggcaaatgggctgacctgctacctgaggcagtctgggcgctgaacacgaccgagtgccgggcgactaggttcactcccttccgcatgctatatggatctgaggccatgaccccacaggaaataaaacatgggtcaccgcggacaagcacttcagccgtccccgacgtagacgaaccaacttccaatgacctcatcgacggagaccgtgtcttctccctgtaggccctcaacaagtaccaagctcaaacaaaagcatggcgcgaccacacagtcgtcccaagagaattcaacgaaggggacctcgtactcgtccggacaactcggacagagtcacggggcaagctggagccaaagtgggagggtcccttcatcgtcaagacgaaggcgtcccccagcgcgtacaggctaacaacgccatcaggcgaagacttagagcatttctggaatattgataatctccgtaaattttttgtttgaatcctcagggctaacacgcccttgtaattcaccaaacattattatttcggcccgc

SEQ ID NO: 8574 - DNA, 555 bp, Zea Mays
gacaagctcatacttcttcccctcttctctcttcttcggcattccccagtagccagaagctgggaatgtccggtttgccagatattcttgtaccaaatctctcgtgttgatatgctcagccacgacactaaattccacttcggctagctggcaaggagaccccaacttcatgttgcacagcccagtcatgccgaagtttaatcgcagtggactcatcaccatgctcataatcttttctcttttcttctcgtctgccttaacgtaaaaccgttcactcatccaaccagtgggccacttggtctggtagcctatcaagggggcattcatattctttctgtatgcaaagttatagcatctaaaatttttgtgcagaccgtcagcccttgcctttgtctggtaatgaagctcatgaacccggcagaacccttcggcgttagcactctttccttggcttcgcagagcccagatgtaaacgttgagcctgacaatagtgtttgaggtcaactgatggagatagatctcaaacttctttaaaacttcacctatcatctcgta

SEQ ID NO: 8575 - DNA, 709 bp, Zea Mays
ctcaacaaaaatccaagaggccttcggccccatcttttccctctctatacctttcacactatcttcctctatcgagttgttgcgaccacaacttttcctttcgaggtgccctcttcagaccgggtcttcacttgtttccctctgtcatcatcggcttcagcagagtcccccttcgggtaaggaccataccgcaagctattcaattcaaagacccggttcaacctgacgttggaaccatggatatcttagctccttaacatctccgtcttcggcacatatttaccaacaatcttaatatcctccgactccacctcccgaatgcaggcggcgacatcccgccctcgcagatcgatggcgaacgtaggattccgctccatctggtcacccaaaaacggcatcaggtgaagcttgacttcggctagaccccacccgtgagccagcggccacacactgcaggcaacgaactcttcaaccaaatcacgatcactgctcaaccgggctacgttctgaagggcctcctcgtttttaacccctttcttcactttaaattgtggaaaggccacataacaatgcgagcacaagatggacgtgggcaaaccaggcacccctttgacatcctccggcgccacataaaaccaaaaattccaccagtcaccccacttattcttggcacacggaacaatttcaactacttcggtcgacatcttcc

SEQ ID NO: 8576 - DNA, 578 bp, Zea Mays
attaccttgctggcggtgtggcataccttctgtgttttgatgaagacgacaacgtaggcgcaaatctctggtggccgcttcatcataattaccttcttcatcaaacaccgcatcatcgggaaggcgtggacgaggaggtggtggtggcggtgcttgttgttgcgtttccaacacaacaagtctatcgatgatctcggacaatcgtcgatccagcctctcataagtcttgccaaggttcatgtcaatgaaggcatcatgcactgacttgtggaccgtctccttcatttgctccttcaggagcttgttgtttgcctcaagatcttggcggctaacatattcatcgaagtctgtagggatccttgcttcttctttgtcgcctgccatcgaaacacaaaaataggaaacaaacgatgaaggttatcctaataatttcactacactctcctctcaggtggaacacaggaacacgctctattgtatcttaccaagctcttacaagtgtctgacgaaatacaaagcaaaggatggtacaatcggaggctggttcgtgatacttaccaagaggtagtgaaaccgcg

SEQ ID NO: 8577 - DNA, 645 bp, Zea Mays
ggtaatgaccacgacattcgtatggataagactatgtattatgcatttatattgagacttgtttgtggatgtaaatgaacaattttgtgtggttaaaactcattcagtgtgagtttttctgatttaagttatcattttccgatcaattccgagatattttgtctagatttatatgttttcggtataccagaatttaccgatcataatccgtttccgactttctcgttttctgatttcgaccgaacaaaaattatacgggtgaaatggcgagagggtttttccgactgttaccaacctttttcacccttagtacgggtcaagttgtttgcgcttattgtttaattcgagtatttcattgtatatgcattgtgctcatatttgctatgccacttgtaacacaagtggttctggaccaatatatatcaaagatcctagttcttcctccaattcgatgtctgtgcttttttcacaactctctcacctctcaactgggcttgagctatgcttggagaactggcccgaggcacagcccatctaatagtgttgtggctcggctcggctcggcatttaaaatcgggtccatgtcgagcctcctggccacaacaggaattcaggtaattcctgtcggctcaaaaccgataggaa

SEQ ID NO: 8578 - DNA, 760 bp, Zea Mays
tgcgccggcctctaaggtgacttcctgactcaaagctcacgctgctgccatgcaaccagaatgtggaggagaagacccgacatgaacatccatggaagtatgagagggggaacccgctcggagaccctcgggggctgggccatagcttgcgctgcccacctgagccggatcatcaccagcaacaccctcgagggctgggtaaacgcaagcgccatccttggggaccgagttatctgtatcagccacctctaaggctaaaggattttcatccacctccatgggaacagagcaacccagatcagccgcttgactctcaaaaccgcgctccaaggtcgatgaggcacgagatgctgcttgggataactctaacccggcagcaggcacatcagcacaaacttccatcgttccaccatctgccggctctgacaacagaccttcagggaccatatcttcgagagtctgatcagaatttgctagagacaattcttgcagaccaacaagagcagacaaagctggagaaggaataccactactctctccactggctatatagcgccgactgttcttccgaattaaggggatttcctcctcctcctcctcatcttcatcaatattacagacagtacacccattagggtcaacatcatcaaggttacagccattgggttcagcatcatcaaggtcacacccattggggtcagcatcagtcgagtcacacccattgggttcagcctcagtaaaagtcggtactggcacttcc

SEQ ID NO: 8579 - DNA, 722 bp, Zea Mays
cgaagttgtgcgcttcgcatgggaatccgcaagaagccggaatacgtctggaaggagtatcttgaaggcggaatggagaaatgctctatggcagtctacctgggagaaagtcgaaactatccaaaccacccttccttccaagtcacttttaccagataccgctttccagatacttgccagaatgttgcccgaacagccctccgacaactatgccagaactacaacaaggtgatctttgaaacccccctttgctactttccacccaacaacaagaatacccccacctggaggaaaagacttcaggccctagcaggaggagatcctattgaggatgatcccaccatcgtctacatggctggataccttcacacccttgataaccaatatgatgacctcaccctccactgcacctacctaacttcccgggtggagagcctggagcaaaaagtcagggaactttcaggggaaaaggcgtcccttcaagagagccttgcaatagctgaaggcgaggaaaccaatacccgtgaggcttaccgcaccctgaagatggactatgacaagaaactgaagaagctcgcccccgcaagaagaatacgcaagaagaccaaaaaccaaggatgtcagactgagcagaaggaagaaacccctccaaccctaccccctgtcgggttaaggaactcgtccgacaccgaggagatgtccctagccagccttgatgatct

SEQ ID NO: 8580 - DNA, 728 bp, Zea Mays
cgaccatctcggcaacttatggtggtacatatggatgtagctggtcatataacacatgcacttcttcgtgcaggatgttattatgcacttatagattttccagggctagactcagctcttccacctgggctttggcagttgcctcacaatcctaggctatggatcacgaattcaccacccaatcgatagcctcatcatgctccacccactcccgttgcaggcgttctacttctccttacaactcaacaatgcagtgactagcatgcggacactccctgcctccatgtcgcagctttatagtcaaatgctcgactctagcctccaagcctcctatgggatcattgctcccactactgctcccctcatggcgatgagccaactgatgatagggcacaccctaaggtccaattgctttccatagtgtggtctttgttggttccatttttctataaggggaaagaaagacttagtattgtttgaacatgatgcatgcatgatcctacgatcacggaatcaactgcgtactgatcccatacttcctgcatatagccttgtaatatgcactcttttacccaacttcctaaaaggcaagttgctacaagaatggatcaaagtaagaatgaaagaatattcagagataagttgtttgaaaaccttttgaaacactaattaatgtccttagaaatgggtactgctccaataccagctatgatggaacctctcaagat

SEQ ID NO: 8581 - DNA, 789 bp, Zea Mays
attttctacaaattaaacaactttctacaattaatttaatactaaaaatctattcctaaattcatttctctggtttttctgttctctggactgggcacctatttctggaaaacatagggaccgcggagtaattcttcctatgactcagagtgctgtacagggtgaactgcgggttggttctctaaacttataaggggttttctgcaaagtgtcatggtgaaggggtatgctcacatgagggccgttcagatcaaatccgagggccacgattagatcctgctctttacgaatcggtacgaaactatgcccatccgatcccgatttaacggtaagcctttaatgaatcctaaagttgttttccaccataggatcacacatccatgaccaccatttggccggtcaacgcgacacaaggcaactaatcccagccgcacacccaacgatcaatggctcatgcatcccctacctcctcagctatcgacgcgacgcagcggacgtggtcggggtggcgccctcgccggagttcggcaattccggccatctaccggcacaatcctaatcgtgagtgcactaatgcgaggcgaagcacaaggcgggattagttggggggtaatttaccgaggatgaagacccagcagaccggtactcgacgtggtgcggattcacggtggcgcgacagcaatggcaagaaattggcgtcgctccgcagcctcaccacccaattgcttggcacagatggcttctccaggcgaagacgatactccacgatccgactctgagagcggagac

SEQ ID NO: 8582 - DNA, 548 bp, Zea Mays
tttattgttatgttgtaatgccctacggtctgaagaacgccttgccaacatttgtacgggcgatgagtaagaccttcggggacctgattagggacaggatagagatatacgtcgatgacatcatggtcaagactaagagagggtcgactctagtggaagacttgaccctggtctttgacaagctgcgggcaacgcgcacgaagctgaactcggacaagtgcgtctttggtgtctctgctgagaagttgttgggattcctggtttcgcactggggcattgaaacaaacccggagaagatcaaggcaattgaggcaatgaggcctccggcccggatcaaggacgtccagaagcttatggggtccctagccgcccttagccgcttaatctcacagttggctgagagggcgctacccatcttcaagctcttacagaagtctggcccattctcttggaccgaggaggcagagcgagccttccaagagttgaagcagcaccttgtgtccctaccaatactggtagctccggagccaggggagccactgtacttg

SEQ ID NO: 8583 - DNA, 616 bp, Zea Mays
aagatacaggagtcattctttcgggcacagatgtcagcctagatagctctgcgagcgcaccggttattgcatctccctgctttcctactagcagccggtgtggactctaaggtgcacctatcatatttgcctggatttctcactcttctgacaaccagcggcagatatgttgaggagtgggtccgagtgttctatgcgttagtatggatcgaccccgatcaccagtggatgagattctgctttgagcgagaggatgttactattcatgctagccagattcgccaactggttggattcaccgagtcatcgactcgcctccacagcttgtgttatggtacttctgatcctcctcggcgccctcacggtggagttgctccagctacagctcgcgtcgtgcccctgctccgactacctttcacagatgggtcgcgacgctctccgacagatttcactccagcggccaagtacttatatcagctcatgagacgggcgctactgccccggatgggttatagagaggctaccactcatatccagctctggctacttggtgccctaatctctcattcagaatttgatgttgttgacttccttatatgtgagatcgaggacacgg

SEQ ID NO: 8584 - DNA, 290 bp, Zea Mays
gtaatccccccaccaggagttccagctcgtcctaggacagatcggtacccgacccccgctggatcctacagatgtcgttcgggccggtaaaccagcaggacaggcgtggcctcctctgcagcggcgcgatccggcgcttcaggagattgccaaccacgtgcattgatgtcaggccgcccgtggccaagaccttgatcctgtccaatacgggcaggaactctggcgagagggatggcttggtcctccattgcttgcggtcgagtgctggcccattgctcggcaggatgagg

SEQ ID NO: 8585 - DNA, 526 bp, Zea Mays
taaaaatggaagctggagtggtggaggtggtgggtacaacagaaataatggatggctttggagcgacaggagctggtgaagtgggaggtggagtagagacagtggtggaaggtgtagagggagcagtggagcgaggccgtgatgcaaggcgacgaactcgataggctatctaatctgaggagatctgcagctgtcctccttgctcagcctgctctgcagctgctgccgctgcaaatgctgcacgagcggctctatccgtacgacgcttcttcctgccctcctgctgctcaaggtaaactgtcttccctttgacctgcctgaaggggtgaggagggtcctcgtcatctcctccccctgacgatgagacattcttcgtccgcaccatcctgacctgactgctgcacgagtgagtgaaaagataagtagaagtagagaggagccgataggatctcaaatgaagtgatagctacctgaaaatctcacaagagagaagatccaagcaggataggagacgggcacacgggca

SEQ ID NO: 8586 - DNA, 878 bp, Zea Mays
gcgacatcgaggttaggtcgatgtgttgcatcatgctctccttctcccctctgtcgcgcctttcttgagcctccccacaacccgcatgtgagccatgcagcctgcggcagcggtgaaatggcggagctagactgcatcttcttcaggtcagaacccaccctgacctctcgcccctttcttacagttccttgcaggagtgagatttatcattatttagttcttcatgacttgcacgagctggacatggaggagctctatgtcgaggaagtcgatgacgctgaacatggaggaggctaggagagatcgggacaggacgacggcgtcagaggatctcgtggtcgccactaagtttaggcgaacggtacatctgcccttgccaatatattgtctcctctccgttagtgttctgtgattaggaggtcactgtgttggggatctaggggagtaattactgtgcccctagcctttgattctgttttggtgttctcaatttctctggcagtaccaaataataccaccagcgctagcatactgctaattgattttgtcgaccttgatgcatgttttgtagtagtttgaaatgtcattgtttcctggccaacttgattagaacgctctaatgtgtgttggcgaaagccattgcaatttcatagagtgaacttctgtactaaattcatggctaaaggtctatttaccggcatgtagttttcatacatgaggtagattacttgtgctatcctgaccaccaaaatttcatactcggtgtattttcaaatgtgtgttggggatctgggggagtaattactgtgcccctggcctttgattctgttttggtgttctcaatttctctggcagtaccaaacactaccaccagcgct

SEQ ID NO: 8587 - DNA, 277 bp, Zea Mays
atcggattcagaaacaacagacatgtggttacctgcaaaaggcaactggctgttgggatcgatgggaggaatgattgtgacagacgaactttgagtcttccgcttgggcgccatctcaatcttgccggcgagcggagcgggagcaatatcgcaagagagcagggaaggtctggatgcagaaaagcaggactagggctcagaatgcagaggcatgcgacagtgcagtacatatggggttttcccgggccagacgccatttctaaaaagtgtccagtca

SEQ ID NO: 8588 - DNA, 599 bp, Zea Mays
gctggtgacccttgcgcccggattcacgtcggcgctgtgatttgtgcccggtgatgcgcggataacgacttagggtgaaaagatcttcgccgtggctgaggtcgaggcacagtggccgccctgttgccgtaccaacttgggtcacaacgtggccgcgcagccatcgcggtgatgatcaccgttaacccgagcatgccacgctcctaccttgttaccacgtcgcaataggtcgctatagatggcctgtctatcggctgagtcgttgctccagtgaatgccacggtaactcgcgccagtgacctccatatctctctggtcgcccgtgtgtcttccccaaattggatgccaccgctattgatctctattaattgatgccccagtgagctccgttaggttattatgcgcttagtgcaccagcttcgcctctgattatccaccctagcgtcccaattttatttttcccccaattccgttttccgcgccgtcgtgaacatctcgctatggccagccatctacatgttagttcaagcttctctgcttgatgttctagcctcccttaagtctcatgttgctcgtagacccgtttgattgaactagac

SEQ ID NO: 8589 - DNA, 492 bp, Zea Mays
ggcgatatgatcccggccgagtgacttctgctactatgaatggtccttcccatagaggtgacaatttatgccgtccctcccccgttagaattcggcggaggacgagatctcccactgcaaaggatcgatgccgtatggccttatcatgatagcgcctcagagtttgctgataccgcgctgattgaatcaccatattcaatcgcacttcttcgagtacatcaacatcctccagcctagtagcttcagcttctgctatgttttcaaagattaacctcggtgccccgaacttgagatcagcaggtagcactgcctccgaaccataaaccataaagaggggagtatttccatgcagagctcggctaggttgagttctcaagctccaaaccacatacgacagctctctgatccacttttctgcaaacttctcgtttttgtcgaagactttctttctgagtgcttctaatgtcatcccgttggccctttctacttgcc

SEQ ID NO: 8590 - DNA, 532 bp, Zea Mays
ggaagctgcgctgggcaagtctgaaggatggcagttatgctcttgttggcggagacgagagcgccaacaacctctgtgaagcgcgaacgagcacgaacaggcgcgaacgagtagctctggcgtctggcgatcacggcaacggaaaagaaaaaacacggtgaacatgcagtgtttgtccaccaaataaggcctacgtggggaggcaagagcgtgcatgagcttgggcacgtggccgtgaaaccagggcaccacgcaggcccaagttacagagaagcactgggaacttcgtggtgtgctgatagcaaaacatcagcaaccaagtcactagtttggataggtgtccagctcactcgatccaaacatttcggcggtgaaacctccttgagttatcccctcccctggtacacctttgcactcgaccgtatccccaaaatccgagctggaacactgagtatagaggtagtgcgtggatatccattttcagaattctgaaccaacttggaatccacacaaccaggaccctcttcactcg

SEQ ID NO: 8591 - DNA, 442 bp, Zea Mays
gctaagcctgagtgcgcaggccgcctgcagggcacaacgagacaagccacgtcgaaacccatactagataggccagggatcagcgtagctcgaataagggcgcccgggccccatgctgcatgcgtcttccgctatgaagaatacaagacgactcggtgaccccaaggctcatggacgcacgtggcttcaccggggtagaacgcttagttttagcttcacccgatgactccttctcgaggaagccaggaggtcggccaccaaacaaaatagagacgcacagacgactgacggacggaccgacgaaaggaggagggggacatcgacgaagacccggagaccagaggtccatcgccaagccaagacttagttaggactctagctctgtagcccttagctccacctcctccatataagagacttgtgagcctctcctccctctctc

SEQ ID NO: 8592 - DNA, 457 bp, Zea Mays
tgggggcttgggtcggccggaattgcgcgtgctccagtgaaccaccgccggggagcagcgtcgggttcatgcgggttgagctagattggggcaatggtgcgctggccgtcgatcctgcgcttaacgactcagattagatgccctcgataacccttcgcgtgtttggatcgtgaccgtctgacggtagatcaatgaccagcgatggttctggatctctttaaatcgggagcgtcgatctcggatcggtcggtgcaagttgcgtaccggttcaaataatggagatcaaatctggaccgttcgtttctaatcggacggttgtagactagagataccccttcgcgtatccactttgcagaaaacccctcatagtgtttaagaatcaacccgccgccccatagggactgtagactgtgtcttggattaatttcgcagagacccctgcgctttacagattttg

SEQ ID NO: 8593 - DNA, 880 bp, Zea Mays
gtgcccgcgcgtgcgcccgcgtcgacttttgcaagaacaatcctggcttcttgaataacctaaagtggggtcgcggcactattaactcatttactgacattttcataatagcccctatacttctaattctttacattccgaggacctcgacggtggacggcgacgcgcagagctccgacgagctcgcataccggccaattcgctcaatgactggcattctactttggccgaagccaaattcaagacctaccaatggtttcccccaacttaatttcacaaatggctacctggtttgctctggccacggtgaccgcatgggcaacggaagaacacgggcgttcacggcaacccagggcggtcaagttcaatcaaaggagtcgtgaagcttgaggaggacctaaggacactagaacaatcgaccagagtgcttgaacgaacctggaataagctggccgcggtgagggtgtctctgtggtggcggaaaccggattgggggatgtaagaaatttgtggtctctggtgaacgatttgaggcaatacttggtggcttggtgcgtgatcatcctacggacctgaccgcgcgctcaatttatagaagacaagagcggtggccggtgaatttgggagggacgcgcggcggccggaggaacaagaagttactggcgcgcgcgattagtgtccgactaccgtggcaagctctccggtgatagacggagggttacagcaagtcacagcgacgcgggggatgtgccaaggcacgtggcgttcggtcgacgggcagccaactccggtgacttatccggaccggccgcaaagcaaaaaggagcacggcggctagccggattagtgcccatagtccaacagtggtgacgatcttttt

SEQ ID NO: 8594 - DNA, 535 bp, Zea Mays
ccgggccgggccgggactggtcgtaacgtgcatggagccccccggcgggggggcggggtcacatgcgtatgcgtgcgagaggggagtgcgggttctcaactttctgattaggagggtctgcgtctgcctgtggggctgtggagtcagtgttgagttgaaagcacatcatttttctctgacaacccgttactgccagtatttgacccatacataacgatggggctgggagaaggggagtatcagcctcagaccatgtgcgttccatgttgcaccacggtatcaggaacagaaaggatgattgaccagttggccttgtggttgtggatgctcgcccccgttttatgaggcgccttcggagcctttaatggccgccccagccccaggtcaaatgctcgccttggccggcgtaaactaggtgaaagcatggcgctccacaagctctgctcggcatgcgccgctccaaagagcctaccgataggctgcacgcacgcctgctccctcgcttcctaacaatggtttgcatcgtcctccgccg

SEQ ID NO: 8595 - DNA, 468 bp, Zea Mays
gatgttaaggaggttattatgcgtcccatatggtcccgcttcggccttcgaaagccgaaggttgaaatcgatgaagccgccaaagcatgccaaaagtcctttggtactgtatgcttattcattggtacaagagacttgattcaagaacatatagcattcagagtatggccgcttgtagagaactaggaaatgtcgaaggagactgtctccgagtctagcgaaggtgacctggttcgattgaaatatacattcagatatggagataaatttgatgaaccaaatgacgactggcagaaatgtatcgaagctacaagtgatgaactgcttggatcatattccaaagcagaagataatgcattatccacatccttcggggtccagggaaaaaagagattgaacagagtttttgatgccattggttttgtttaccccgactactgctacccgctgcaaggatggggaaagaag

SEQ ID NO: 8596 - DNA, 429 bp, Zea Mays
atcatttataagaagatcagggtctgtcttgcaagaatccgtgagcccgtatacatatgactggagtgcgggttgttttcaaatattcataaggactcttttgaaatattgccacgcgaaggggtatcatcgcaagagaaccacacaatctgcaacccacggatcaacttaactcgccaccctcattgattcgacatggagcgatggtcgttagatccgaaatccgtggaccaaagatcgcccacatcgcaagttagcttcagcctttcgatccccgattgacgacccagaattgacgagcccgaagagttatctacttctaatcttgaccgcccattgccggatcaacgacgccaagcacgcgtcggtacactctaatccacatcacatgccccagatccgacgccccctacgtatcttcctccttgc

SEQ ID NO: 8597 - DNA, 511 bp, Zea Mays
tgcggccaagcttcggtaaacacaaattagctaaggtagggcataattaaggtaatcggagcacgggagcgggtttctcacctcaggatgatgctcgagaaggcttggcgtggcgtatgtcgctctggatggccgacatggtgggtgctttactccggcgagcactgacggcggcggtagagcgtgtgagagggtgagcatgggcaaaataagacaggagagagagagagcgggtgcgggcgaggctcaaaagggagctagggcgcgtgggtaggcgacgtggtcggggtactcggcgtgcgcgctagtcagcagcatttacaagaaggtggagctgacaggggggcccatggcgtagagagagagggagggtacggagtcaatggttcatggtgttgatgggcgaggcccgctgcgtagagagaggacagggcgcgcgcgcgagaggaagcggcactgacaggtcggccccatcgagcagagggagagaggagtggggactcgtgagcac

SEQ ID NO: 8598 - DNA, 1508 bp, Zea Mays
cccaagcgatgtttgaacgcattccagagcaggttggctttgagttcatgctcagaaaaggctgaaccactttcatctgagagcagcgcaattgtgttgcgaccatgccttaccgttgcatgagcatgaaagaatctggagcagatatctccatccgtaacccatttgatggaggcccgttgtttccaataaattttttgaagctgaagcagctccgcagccttgtgctgcaatagctcgcggaaattccattcttcaatcaaaagatcacgatgctcttcaataagatcaatgaattcaataatcaacttaatttgtctcacagttttgtcaatttttggcagagaccgctgccactcttttagaatctttctggtgaacttgaactttgctgttaaattcttcgctttgtccacaaggcttggcatacccgtccacgaattttgaaaaattgtcatgaactcgtcaaactgcaaccagaaattttcaaatctaaagatcttgggcttaggaatctttgacttaaaggaaatcaagcagggtacatgatctgaaatatcccttggcagcgttgtagcgagagtatcagggtagcggaccgaccattcttgcgacgtgaaaaaccaatcgagtctctaaagaaggggttccctttgtttattcgaccaagtaaaggagaggctatggagagggatttccaccaggtctagctggctgattgcctcgttaaagctcagcatcaggttaatgtctcccccagcagtgtttctattttcagtcctacgcatcaggttaaagtccccaacaatcaaccagcgcttatcgtggggcatgttaatattggagaaccagtgaaggaaatcaatcttcccagatggggaacagggcgcatagacgttggtgataatccaagattcctccgacgaaatagcaacaaattcaaccgaaagagcatactcattttggaaaataacattgccaaccagcttcgaactattccaaacagtaatgaacccccccccccccgagttacctatcgaagggacaaaagcgaactcatcaaaagaactggggcagaaccttcttaagtctgccctaacaaaagattccttcttcgtctcctgcaagcagataatgtcgcaattggactcccgaatcacacaatgaattccattccccttagccacggcattaatacctcggacattaaaacttaaaacagaccagtcagagcaattaatagcgttgtgactattcatcatagagattaagttcgtcaacggaaaggagcccaaacccaacaactgggaggacaaaagagtatctgttaagacagaacagagcacagccagaaaccaccaagttcgtggacacagaagtcagataaaaacgccagggccgagacagccaaaaagcctggcggggttgagacctgcaaaagacacccacccaaggcagaattaacatatcagttgtcatcatctgaagagtcttgcttcttgtccccc

SEQ ID NO: 8599 - DNA, 520 bp, Zea Mays
gggaaatggcggataggccgacacgttggagaagaagataccaaaattgcctcgcgaggacacaagaaacaattaagtgatgaatagactctccttcctggtcacataaggggcaagaactaggatggggaagacccctcttagcgagccggtcagccgtccaacatttattatgtaggaccaaccagaggaaaaactgacacttaggcggcgcccaggtgctccacactctttcaaagctcgacagggaggtagaaccgcagaacattatctcataagcagatttggccgaatagataccattggaagagaacctccaataatgtttatctagaactcccggatgaagatcaacgtcagccacaacatctgccagcaaaatgaagtcagtaatgacctcccatgttaccactccccttaaatccccaatccatgaagagctacacagagcatcaaccactgtccttcgcttcaccagccttttaggaaccaaactaaaaacatgaggggccaagtctgc

SEQ ID NO: 8600 - DNA, 812 bp, Zea Mays
atcagtagtacttcagtaaccgacacatgtaattagggattaaattagtcactggggtctcccctgcctttatttgaaaaccatcaaatttattgcatgttttttatctgaaacgaccccggggaaaatttaggagaaattaccaaaaccatcagctagaatccttagactatatttatgagtagtataggagaaagtcatgagcagtgtaggagagaggaatagacacgatggatgagatggtgaggagctgcgaagtcgcgaagagttgtgactcgatggaggagattgtggaatagtttgctgatgcctttcctagctgcaggccaagggaggacatgtcgacatgcgattggctagattctctacttagattaagcatcgaatcagagaaaagagtaaacctctacttacattaagagggttcttccttcgcaatccctttgtttcgcctttgccttgatgtcctcgtgtgtctccttcctccatggcaatgccaccgcatccacctcgtgcgcaccatcaagcagatcgacgatgccttcacctctagctctatagatgatgccacgaggagaagcagacaccctcttccatcctctgccatccacattcaccacggctctgattggagacccaatgagtgggaatacgatgtagatcgcgcacccaccggatgatagcgtcgatggcgaggagcttccacctccactagacaacggcgatgatagcgtgtctgatggttgtgacgggggtggaaggtgtggccgggtaggaagggaaagagggcgagggtgtacagggagtcatcg

SEQ ID NO: 8601 - DNA, 400 bp, Zea Mays
acacaacacatacaatacaaggatgaaggatgaagattgaagaacagaactacacaaaagaatacctccagaagatgaactcatgccgacgaaaaattctggatttctagatccgcgcgtgtctggattggaaccgcgagtgtctggactctgggcgagaaaactgggtcggtgaagttcggaacttggaactggatttgcgcgtgtctggattgtaaccgcgagtgtactggtgaggtgaagtctagattctagaacaagaagtctaggagccggtagggaaatagagaagaagagaagaaaaggaaagagattgataagccaggaaagtagagatgtgaactgtcgatttagtagagagtagagacggctggcgttccatctccctgtagccgggcca

SEQ ID NO: 8602 - DNA, 782 bp, Zea Mays
agcgcggactcactccgaatggtgaatcactaggattcgaacgaagaacttgggacacggggttatactggttcaggctggagccctagtccgctgtagtattaattgtagtattgcagtagcgtgttacagttggtatgcttgtgtggtaatgtgtccctcctatcgaaggaggagggggccttgcccttttatatctcaagggtaggaccttacagtgggacttgtattctactggatatatatataaaaagagagatctactccccgggttggcatggtggttcctttgtagggtcgtccgtagtcgtactcctgccatgacgtcgtcctttcccgctactccggttcttgtagtgagtccatctctgatgtcttcgaaatgggttccatggatcagtctcaaagtgcggtctttcatggtgtggcttctcttgtcatcatgagcccttcgtcactcatcagcatgcgtaggcgtacacttgttatggagcgttgtcctgtccttttggtgtacgaatcattgtagataccccggtgcccattcgacatactgtgcgtatgtacggacgtggcttgatggtggcgcgacccgttgtagctgacgtggatcagtagcgctagacttagatctctgcctcgccagttgctcgatggtggattggtcgactagagttgattggcggatagttggtcgtcattggagtgttgatcatcatccgagagttgatagtccactccgccttgtagacttgctcgcgtgggggacttggtcgtccgct

SEQ ID NO: 8603 - DNA, 287 bp, Zea Mays
agcggaggtgctggatgactttgtcttgaacgatcaatggctgggcaatccacgactagaggtgatacatgtcgagatcgcggaaggagcatagagaatacactaccctagagtggtttgagtcgtttggtggtttaggtctcaaaatttgattggagtttccacgggaacggagtggcacgtgccatcattgtgaagcttgtgttgagaggaagcgaagtcatagaaagctcgtggcctcatacgctcagatcttaagttacaccatttcgcccctagtcttaagt

SEQ ID NO: 8604 - DNA, 432 bp, Zea Mays
cgtcgattgattgatcggtggctcagatgagaggtagaaaatgttttggggtgagccattctgagccgtagatctaagatccaaggggtgcgcgtcgcgctcgattatgtggagcacggtccgttgatcgcggatcgtgaggctagcatcgcgtaccggttcaaagatttcagagatctaatctgggccgtgtagctgtggtcggacggctcggatttgcccatacctctttaaccgagatcctttttcacatgaacccttatgttattacagaataaaacccgcagtccacgtggactgtgcgctgggtcttggtcatcttaccccgaggcccctgagttccctgtaaatagtgcgcccagtccatagccctgtaatttcagttatttgattttagaaattactttttaacacaaaaataagagctaggac

SEQ ID NO: 8605 - DNA, 705 bp, Zea Mays
ggaagcagcccagtgtgttggtcagaccgtacataacttcgtttattgaaactgatcatgcatgccaataaaatcatacttaccctgtaaaccactccaaaggatcctcggccgagctctcgactctcagagaaaccatctgtaatttcttctaatagttggaatgacacattctctagctcgtcgcggtattttttgctgtagaagtcgtcgccgtcatctggcttgtacaagtcgcctagcatgttatccattcagctggtacaaataaaacccgacccctttcagcgtgagcaacaaataaaaaaaaacatgtacactttgcattacaaggtgtatgatacaccagattagaaaacaggatacatacatacaagcaaaatgagcaaattataggacgcctagctccctttaattcattcagcacctcgtcataaggtagcaatcagagagcttatgatgggaggaggttttcatccagaaggtaagcccagtgcaagcaacgtacgcggcgatgatacggagcagcagcaagatccaaatgtagcagcaccgaccgtacctggagcaggagccggagccggagcaggagatccgatcgaggaacgccctcagttaaccagaagtgagatcgaagtagatctgacaatgcgattgttaaaacggcggacgcggaaagcgatggtagtgtgagtgccttttaac

SEQ ID NO: 8606 - DNA, 417 bp, Zea Mays
cgcttctaaaaatgggatcggccgccgctggcccggatggtccgcgctcacgtgcggacagtccagacatgcgcagattggcaaatttatcgctgatgtgcgtgggaggctgttgttgcccaaggtacatgtttatcggcttcccataaaggggttgtgactggtcgtgacaacctgtagtcgatgaattacgtgtgtattccctcagttcaaccttgtccaaaggaagatttgcaatagtagacttatcaagcacacgcactagccttttatgatcatttgtatatcccctacgatacattgcatctactcttgctgttcgtctatgtaagctttaagagattagagttcattggtgctacttacattggcggtattcgtagtagatcggtgtgaagccagatctgtcgcccgttg

SEQ ID NO: 8607 - DNA, 328 bp, Zea Mays
ctccgaagttgctaatttcatcaaaggatcagaacgttgtaccggaccaccagtactgatgcttttcatcacagcctgtaacaacttgtctaaaatcttcgcagtaatttttatatgcttagataggtcttgctgtctgggcagtgtggtactggactactggtattagtagcgactgtggtggagtgatactatgtcatcagcttagccgcatgggctcagttgtgtttctgcccataataagccttttgtggaacgtttcatgggccatgtgtttcatttggcgggctaagttgaagcaacgagtccacaaaagcatcagttcaac

SEQ ID NO: 8608 - DNA, 564 bp, Zea Mays
gcttccgtagggcgccacgccacgcatctatcgtgctgacagcaccagagcaatgcgaagggacaggccgatccagcagcctgaagccatctgcagctctcaacgacccttccgctcactcggttgccttgccgcaatcaggaacgcatttactggcgtgctctccggcaaaacttcttccctggacctgctgaatgccaggaaccaaacaggccacaatgaagaaaaaaaaaagatggtcagctcataacaaaaacttgctggacgacctgtactggatatagaggtttatccatagttctagtaatgcgtcctctcggattcagtttcttcagggtggaaaaaactgagaaatgctacaagaggggaccaatttatcccggcccctgtgattattatgtgtgctcgagcaggcctggttctttcaagtgtcaagcccaccgctcatcccttaattagaacatcatgaaatgtctaggagggcaacagagaaatggaattgccacccctaatggtttgttttgggaggaggagattgaaggggctaaaacccactttctattc

SEQ ID NO: 8609 - DNA, 437 bp, Zea Mays
gtgaggcagtcctctttttgctagtcggtctgctgtccagcagcgatcgtgggccacgagccacatgaagaacttgcatttactaggagcccatgatttccaaatcctttcccaaggtttaaattaaaagttgttgctccaagaaagaaatcggtatatgccgatttggccgaatataaacctgagcttgaaagcctccaactatgcttatcctcctgatctggtgttaagacccagtctgtagtgaggtcccaaaccttgaggaagtcagacaaaacatttacagtgataactcctctaatatcatgaacccggctccttgaaatgagggcatcgtggacattcctcattttagccctagaagagaccatctggaccaaatgaggggccagctgacatagactttggccatcgatccaattatctgtccaaaacaa

SEQ ID NO: 8610 - DNA, 761 bp, Zea Mays
gactgtttacagcatccctatagaaagaacgacagatgggctcccgcggtcccgcctcccagaccccagtatatccctgaacctgggggaaacactgtgtatatatgcaaatgcaacagaagagatgcaaatgcaacagaggagagaagagtatatgcgcgcgtaaacagtctcctggatccctctgacaacaaagaaacaaacaagcaggagtaacgacgagtagacagcgacggcacgagcgaacgacgcctgcgcactggtcaagcgtagagcttgaattcttggtgtggctgaaactggaaagcgtagagtatactgccctgaactgaagcgcctttgttactgaagatctactccccgagaaacggtgacaggaaggtgaaatcgctcgctcagccggaatgatgcatgaccaaaaatctgtgcgcgtgctctccttggctcctccctgtgatggctactcctgctaaattgctcgaagctagtagacggtagtagtagtgtagtgtgcgtgcgtgtgaggagcagggatcgacgttggtcccaggaataggaccaggtatggctccgtccccgatggaacaggacgccaaccaactgcactgcatcggaggtctacagcactaccgcttttgtcttggctgtgcttttcgtctgcgctctctcctctcctctcctctgttgtggagcacgtcgatccatcttccgctctttgcctctttgggtttttttttttgcttgcttgtggtcaagtccgg

SEQ ID NO: 8611 - DNA, 331 bp, Zea Mays
gaggaacgggaacgtggtacgctactaaacaaggattttaacactgtagggattagggacgagatttttcccgcgttcccagaatggaacaaacgttcacaggacgaggaacgtggcatagttccatgtttccagttactaaggaccgccaaaccaaccttattctgcacaaacaagggaaaatgtgtattgccagctccccacaacttttatatcatgcgttttcttgtttgcttttttctatctgcatcttctcttgttttgaaaagtcccaattccatccttatgtagatggggaaatttgaacattaagaaaccaatctctagaatc

SEQ ID NO: 8612 - DNA, 336 bp, Zea Mays
gtcgtttgtcctccttcagctagcgaagtggtactatgttagagcattgtattgcgtatggcttcctatcatgttaggcttggatggtttctcatggtctatctatggtgtaattgtctatctatggtgtaacctattggtaggtgagaagtgggggagaggaacagacctacacggttcaaacgtgacacacgacacacaaatatgatgctttaaatgaatagagactactacaatcctcatgcattgtgatgacacatcaattatatttgatggtatagtgcaacgtctattcgatacgcgaggacctagtggcaagctagtgtgatggaccat

SEQ ID NO: 8613 - DNA, 401 bp, Zea Mays
atggtttaatttttagggtgttacagtaagaattcaagatttcttgaagccataatggtttgacttaagatatcaatgccactgtcatagttgccccaccctcgacaaagcatcagccaccacattatccttacccttcttgtatactattctaaaatgaagacccatgagtttggccatagcctttctttgcagttcagactgtagttgttgttctcccaaaaaagacagagactgatggtttgtcctgatagtgaaagatgacctttgcaaatatggtctccatcaatccactgccattatcaaggccaaaaactccttctcataaatggacggatgtctattcctcaggcctagtgctctactgaggaaggccactagtttgtcttcatgcatcagaa

SEQ ID NO: 8614 - DNA, 439 bp, Zea Mays
aaggaagtcagaactgaaaagagtgtgtcctccactggcgggggtgggtgaattcatctgcggaagggtatcaaaggtaaagattatggtggaaggaaaaaaataaaagagcctggatggtttttaaaggaagtgggttagctcaagttttaattcccttttgtgtttataatgcatgcatgctggaagtaacgtctcctctccaaataatagggtgctcttagggcatccttaaaagtctaagtactggcccacggggcctacttaattagccacctatttctccctctatgcctaaggcctttcgtcctaggtctagcggtctagtcctgacgattcatagcagtttctaggcaagttttagattttgaaaatggtattcatggtttattgtccttctctgtggtggaatttgctccgataccagctgtggcagaac

SEQ ID NO: 8615 - DNA, 483 bp, Zea Mays
taagcctggaatctcggattggcgtgaaatttggcaagtaggttactgaaagtgttgtgaaggtgcctgaaaaaattgggttcagtttgagcaagtttggctggtttgggcatttcaccgagcatgtggcgtgcggagaattagggtttcggtgaaatggctatttgaggagtgaaaaccctcccgaaggagccaagaacctgcagggatacacactagggacaattgaacacattccaccaactggattcgcaagatttgacaagaaattgagagatggacaatggggggtgaattgagtgccacactgcctttcaaaaccgagagcagggatgagagagggaaggagaggggaaaggactgctcaccggagttgaaaggatcacggagagcaccaggtcgccggagagacgccggtgatcggagaacgccggtgggagagagggagtcaccgggaacagagagcagcgggtgctggctggg

SEQ ID NO: 8616 - DNA, 950 bp, Zea Mays
taaaaatcatgcactatagtattatgccatcctcaacctattgatttatgatgattatcctttgcgaacatataaagcttactgttaattgcagaattttcctttttgaacatatcatattttagtgtacatgctatttcttatcatggtcccaaagtttctgggtcggggttgaggtacgggtcatgaaacgttgtatactacttgtaaaatatttttacactacgggtcaaaaataaacccacgaatctgggttggggtgaacaaacgtaggtcgagggtcgatgacttccaacccattgtatgtgattatggctctgatattgtagccatttcagttccaaatctgcaaatgcttctccttgatatctgctaatatgaagatgaagagtgcagctagtgattcatcttgctagggtgatctcattgtctgtatagcttcactttcttcaacgaaccttctgtcaccttcattgtaaattgcaccttctgggttgtaactgatggtgttatatacatgttctcctttgcggtggtatggtgatagttttccctagaacctgtcagtgattacgctagctaaggtggggctaggtgggacggtgttgcctagtggctagtgcctagttaagctaggtggtcattaggtaccttggcaacactattttaaatgcaagggtaccacacctttttacacatattttttgtattgtttgtcagagaaaaaacagcatcgtagcattgcagaagtaccacctaaaaaatcactcatcaatttttctgtttgcaaacactaaaggaaatcaccattttgcttcagtcctggttgtgctcaatttctttctagctaaacatctgttatgttgtgtatcttgataattcagatgcactgttggctaactaaacataccccggttgttatccttggtagttggtacatgtcaataagt

SEQ ID NO: 8617 - DNA, 692 bp, Zea Mays
ccgcgcgcgcagccgactgacgtgtgggacccgttgtcatccggtcagccacgatccctgttcatctcctcacatgcgccgatatcctcacgcggtagttgcaatcttccgacgcgctcgcccagctggccgaggcttcacctcaaatagctagcgccggggtctccgccactcctccgtgcctctaactactcagtacccgtgagctttggctgtgagatcggaagtcgttcacagagggtgtgcgccgtcgtcgtgcgcagttagcagagagagttggagagctcaccgccccccaccatcgccaggccttgtggaatcaccatcgggttcgccagggcaccaccggcaagcgaaggcaattggagggacgggtggaattctacgttgacctcacccgccgccatgtaattccgtcgctgccggggcatcacttcggtcgccccgattcaaggtatggaagagaacctcaccaattcgcctaattaacctgtaagtaaaaacaccttctcgcgttaagccgccaccacggaaatgccggtaatcgttgccagaatttgggaagcccccatcgggccccactcttccgtagaccatagttttcactgaccctacacatgaattgattcgttggatcgattcgccgtgactcgagctcggtgtgggaagttttaatcgggctatagttatcc

SEQ ID NO: 8618 - DNA, 713 bp, Zea Mays
tagtctcttatagagagacttatgtactccatctttatgcatggggccggccggctggtccaggtcggcaaaattcccatcttcttcgtgaatgaatgaaagaaaagaagcctgaaaagaggagaggacagaagagagaaagaatgcaggtagtaggtaagctagcagcagcagggcatggggctgggcctagggatgcgtgagatatataaaagccaggaccttcacgagggtgcaggcaggcgtgcaggagagagagatggactttgttgagacttgagagagaaagagagagagagggggtatgaaagccacgcggggcagcagccatcaatccatggatggaaacctagctcagctgcttctccttcgttgctttctctctcactcccgctgatcgatcagttcctctgatagcatggccatggcaacaagtactagctagtactcgcacccacatcagccttgcagttgcatatgcatgcgtcgcctgctcctgctgcggttgctgtagtttgttgctgcacccccgatcgccattattctattcctctctcatgcatgcatgctgcatcaccatatattaccctatttagtaaccaccttatccatcatatatcatatgggcagaccccacctcgctcgcgccctagcagttattagtttataccatgccaaggccctttgaatctttgtcctcgtcgagcctccag

SEQ ID NO: 8619 - DNA, 429 bp, Zea Mays
gctatcttcacgccacaatatcttctcacccaggccatatcttcactcgggactcacacacgacatgaagaccttggcacagtgaagagatgccacatatgatccttggcaagatatgcacgtttaggtcggccaacaggcatttgaactcgggcagaatcacactttcacgtgtttgatctcgtgctcaagcgctcggccgcgcactagctgccctctgcgcgcgtgccgcgcacggtcggctcctgtcccccgcgcctgcgcccaactatgcccaagggagcctataagtaccttaggtgcacaacggtctactcttcattccgcctcatgccccgagcaaaaactccaactccggcgagctctccaccgcccgccatctctacccgagcacgaccaccgtggccagcccttcccgacaaccccaag

SEQ ID NO: 8620 - DNA, 357 bp, Zea Mays
aattgagtgccatccacattcggtgagtgagtgctacaagccaaattcaggagataaaaagaaagaagagggagaacatctagttatgctagccacaaaatctgagctgagagaagtgaggaacaacccttatcaagtgctatttgtacttgtgagcaaagatgttttgatttctcctaacgacataacatctcttcctagtgttgtgggtgatcttttgtatgactttgaagacgtgtttccacaagaaacaccggctggactacctccaattcatgggattgagcatcaaattgatctcattccaggggctacacttcctaaccgtccaccatatcgaaccaatcctaaagaaac

SEQ ID NO: 8621 - DNA, 879 bp, Zea Mays
gatttctatccaatttggattacacgtgaaagtgacaaaaaaatcaggaggtccatataatttacaaatagctaagccatcatgataattttgaagcatatatcgtcgtcctccgacatgtgaagctagaagaattactctttttcccatttcttcaccgtttatacagccacgactaacagcatcagatattccttgaatactttccattctaagttttgtttgattttgaacaatatattgaaggcgagattcatcgatagctgcgcgcgcatcaacctttgcttggcttgatagcaatccatagcataaaaaggggtttggctgatttcttctatagtgaaattggtagcaataatattcttgcatagtcatgtggcaacgttttggtttgttagccagatttactccattatatagaacaccaacttgaaaccctcgttcaccaaaagggaataaaaggggatattgcaatgccatatatgccgggtgcaaagaggaaatacgttttaattctcggctatgtgtttcaatgatgatatctcgcttaaatgtatccaaagagaaatccccaacaactaacaatgcaagttcatcagttgttggtagattgtattgaaccgagtcaccttcttttgcacctattattctaataatgaaattttcgtcaccatattcagccatacgatccctggccattctaaacgttttagcaaatggattgcattcatctagcattttcatgagttcctctataatcgaaggatcaagaacttcagcggtcatattgtttgaattgagacattttaatctgttttgcacttcatttgcagtatcatatatgtaaagttgtaaatattttggagatgagccatcact

SEQ ID NO: 8622 - DNA, 303 bp, Zea Mays
ggccggtacaagattgtttttgcgaattacaagggcgaaatcagccctgaggagtcaaacaaaaaaatttgcggaggttgtcgatgttccaggagtgctccaggtcctcgtcgtttggcgttgtgagcctgtaggcgctgggggaagcttttgtcttgactataaaggggccctcccacttgggctccaacttgcccttggactccgtccgagctgttcggacgagtacgaggtccccctcgctgaactccctcgggatgacactgtggtcgcgccatgctttggtctgggcttggtatttgt

SEQ ID NO: 8623 - DNA, 562 bp, Zea Mays
gaagaactcggtaaaacagatgtgtccggtagtgattgtttatacaagcgaggactacagtcgctgaatgacatcacctcgtcgctgcgaagaggatgtagcccttggagtcctttttttatttgtgcagtgcagcctagaacactctagaggcaaaagagcgatggcttatgttgagaccagaccaatgccgttggatgagaatctcgcatgagaatctcgcggttgatgtgaggtagggtgacatggatgaaccggagggaggatttgcccccactgtgaatataacacatgattggttgtaggtagggatggcagtgggtacggttatgggtaacccgtcgggtacagatatggtggattttcgtatccgcgggtacggatatggatactatatagtatccagggttattaatttcgcgggtatggatatatgctatccatatccgtcacccattgggtatgacatgtggacccactcctagtcccatgcgcatgcgccagccgccagccccgtgggccgtgagtccttgagaccttgacccaatcacccaacgtccca

SEQ ID NO: 8624 - DNA, 576 bp, Zea Mays
tacgaaactggatgccttaatcaagatgtcatcaacatagaagaggtagatggtgtcatcaccgtgccgaaagatgaacagggacatgtctgacttggccttgacaaagtcgaaggtgttagagttacgacgcaggggaaaggtccacatgtagtgagaggagtcatccaagatgactatatagtattgttaacgggacatgctcggtatcagggatgtccaaaggacacaatggacgagatcaaaggagtgagcagttcggggcatggaagaggggaagggtaagcgggtgtggcgcccaagctgacaagcatggcaaggtgagttagggttgccacggggacaacggatggccgaggtgcctgagagtctggagaggacctcggggttgccaagacgatagtgccaagtggaggtagaggcagtgacgacgagggcgtagggtgtgccaacatgggcggtggggcgcggaagtgaataggatatagggggttggagttgtcgcatctggcgaccaggacaagattggtaagatcccgtatgttcaaccccagggatcgaactctatagaacaat

SEQ ID NO: 8625 - DNA, 389 bp, Zea Mays
gaaaggcttgacgaagaagccgggggatagaagagaaaaagggttgtgagtcgagcagtcccagtctttgtttatctggcttatgatcactagcgagtcaccatataccatcagtttcttgatgtcgagtgatacgacgatgcttagcccgtgaatcagtgcttcatactctgccgcattatttgacgatggaaatagtagctggagtgcgtacttgagttgctcacctccaggagtaataaagagaatccttgcacccactcctagcagcttcaacgagccatcaaagtacattctccacacctcagtaacttctaggctgtccaggacctggtgctcagtccactctgatacgaagtcaaccagcgcctaagtctttgttgccgtgc

SEQ ID NO: 8626 - DNA, 1649 bp, Zea Mays
catcagctacgatgctgaaagctctgcctatgcggttcctcgcctcgccggagcccggtgggtggagccggcgactaccacgacgatcgctgcggtcggtttcggcagcgctcatgaccaaccccgcttacttcgaggtgggaagattcttgggtggctatggcttcatgaacatcacaaggtcaacttttttcctgaaaaagtcttgaacacttttccattttgattttatcagagaaatagttgcgggcgatgccgttacattctaataattttgttcacaaattggagtcgtctcttatggtaattagattatttccgattgaaatccgtccaagatgagcagcgtgtgggtgagaggggaccttggagtgacgaagtcagcccaatcccgagaaatgtttgggacatggctattgattaacagtatcccctccatttttataaggcaaattaggatatgggggtctttggaagatcattaccttctcttagaatatatattccgattgttacgaaactaaatcttataagacatttgaaatacaaatatatttataatatttttgtatgctgcataatttgattaattattggtcagtgataattttttactcttaagatcctaagtgcatcctatattgggatggagtatggcttgagcatccatcggagctggattctcttaatcaaagagaggatcattccacatattttactatcatgatgtagtggtagtgatagtgatattgcatctaatgctacaattgcaatttttgaagagcttttaaaagagccatcagatgttttgtggcctagttcacatcattgtggattgccatttttttgaagtaaattgtggattgccattatactatatagtataaacaaagggccctgctcccttacttcgcatttaaaaaaatacaaaccgtttcttcaatattcacagaccttttccttttctttgtgtagtacagcgtttcttgaataatcaccttttctgacttcctgtcatgtgaatcagttactcatcatctcaatttggagagccttcaaatgttgccggtattcaagaccttggtcttggatattcaccagaagagatcgaacggttgagggtccaagatattggagaaggagaagtgacaattaggttattttctgactgatactgactttttactatagtgaagtaaaggagtacccatcattcattgatcatcctgttttccagactttatgagggaagagttgttcaaggtccattcaggggcacacgggctgtatttaaggtatgtgtagatttgttactttgctaagtttagttgcatagtgtcctttagtaatcagcagaatgccatgccttgaaatttggttctacagtgccttgaaaagattatttgtagtaggatatacacttttgacctttcaatttgtcttcattttattatggtacctttctctgccataggtacatgaatatattaacagtcttaatatgctaagacataggatttgaaacaaaggtataccctggagcccgtgctgatgcttctgaagctgatttgatggcactgaatgagttaaggactcatgcgtttcttcaggttacgtaaaccataaactgctaatagaaactgcaagcc

SEQ ID NO: 8627 - DNA, 373 bp, Zea Mays
agcggaggcagcgagcagaatggtggcgtggtggtggtgaaggggagccaatgaaagggcgtgctggtggcagaggaggtggtggtgccctacggaggcagaggggagggggtccacgaggcagagacggtggccggatggaggagagacggagacaccaagacgcgaggaatagaggagagagtacagaaggcagtgatcgcttagaggtggattagaaaatgattttaggtccgaattccacgcatcggcacacctgcgttccgtcgtacaccatacaccggaaacgctgggagggtcccaaatggggtcaggttttaatagaacagatgaactcggtccaaccgcgcgagcggggtctgtgttatatttc

SEQ ID NO: 8628 - DNA, 542 bp, Zea Mays
atttgatggtgaccgtcggtggagagtaccgctactgccgagcaagaagtgtaagggagaaacaaaatgagagaacaccattttttttccttctactttctctcacacaatgtacaaaaattatgtttaataaaaagtcggttttcataaaatagtcgttttgaacatgcaagttgttcacttgactttaatccaaacggtttctattgtttgtacagtttttgtctttatatattacagctgcagcagtccgaacatctggttttaatctaaacatctggttttaatctaaagtagttgcacaaatcaagaagcgtataattaacacgagggagtagtggacgcaaaattaacacggttttattatagtacctaactaatatcggagttagcggtattgtgtagagaattatgcttttcacgaatgccccgttctttagcaactttttacaccccagtaccacatgtgacctcaccccactccagctcaccaccaaattcaattgacgttgaacctggtgaggccgggccaaccaaagcag

SEQ ID NO: 8629 - DNA, 403 bp, Zea Mays
attacctaaaagtgcaggggcttcgggggaataatccgcagacataggacacagcgcaagaggatggcgggtttatttcctagtttgtcgggggctcttatgcaaatgatgcggacaaaggggtacggatcgagattagccgtcagatctaaattccgcggccaggattagacttcattaaaaatgaaccggtacgccacggggaccaccggattaaagatcgtcggtccaaattaagaatgactatgatcaaaacctgatcgcttgatctcacatctactgcccaaattctatcgagcgaaggggtatgcggggttagatcggggtcgtccgtgtatgatccaagaacccaagcccttcatctttctccccccaatcctctctctctcaccacggcgcccga

SEQ ID NO: 8630 - DNA, 332 bp, Zea Mays
ccgcgaaacaaaccagtcgccgacctccctccatccttccctctcaggcacgcagctcgcgtggcattgcgttgcgcggcctgcttctctccggtctccaccgcgccgcgatcgacagcccggccagcgagctcctctcctccgccttctcctcttctaccgctcccgatcacgcggccgcgacatggaggacgacgaggggaagaagcagcaccaacggatcatccccaacgccaacggccacgtcatgatcgtggtccccgacgacgcgcacgcgcacgcgctgcccgcctccgcctccgctcctcctcgtgacgccgacggcccagacg

SEQ ID NO: 8631 - DNA, 610 bp, Zea Mays
tcaacaggaagtagggtgttacaagttctagcggcccaaacctgtataaaccctcatgtgatctaatgtgctcctgcacgtaccatcgattcacagtcaacgacgttgtcctactcaaaagcatcatgtggggaaccccgtggtgggcggtcaggtatgggtgcgacgttgatccacgatgactccactgctatcatcttcaacactctggtctccttcaatgctggggagatgttctgctttggatccctctactgcattgcagaacaagaaggtgtcctgcaccgcatcacggatccatcggagaaaagatcttcttcggtggcaccaatttgcggggggtgggttcgtctcacctgactccagcaagaactatgccgacgaactccaaggcgcggaaacctcaaccaacttctgcctcgcgcaagattgcgcccgcgttggacggacctagggccataacagcacttgtgggtcaaccgactaaggttgcaaccctgtcgcggtggacccctctatccacgtcacccactcgggtgtggacccggatcactcggcgaaaataagcagatagccccggcaccggtttggccgcgggaataagaccaac

SEQ ID NO: 8632 - DNA, 668 bp, Zea Mays
gtaaactgaataagatcttaggttcagtccgcctcgctgccggtgatctcgcgcccggattcgcgcccagttaaacgcagataaccatcctcggatgaaaaatctggtgctggggatgagctcgggacactgtttcgccctgggcgccgtacccccctgccttatggccggtctagataacctcgccagagttggtcgcatgccgctcgggtgccatgtgccttggtgctctaccacgtcgcagtgaatcgccttagcaagtccgctcatcgctggtggtcatgctaaggtgaaagccacacatctcttgcaccagtgatctcccctccctccggccaccagcgcgccatctcaaaattagccaccaccaccgatggaacctataaattgccgccccagtgagcttcgctaagtaatcacacacccaacgcatcagcccgtgcctcggattgtcaaccatagagctctaatttagagtttcccccaaatcagtcaagaataccgccgtgtgtgagctcgccgtggccagctctctactggtctgttcacaccctccttgctctcgtttcaatacccttgtgtgctgtagatgctcatcagcccaaccaattgagctagaacatgtaggatcactgggaacactttgaattgtcctcgttttgcgccat

SEQ ID NO: 8633 - DNA, 793 bp, Zea Mays
ggaaagtgtagatggagatgcggagagaccaatggttattaccaagttgaaactagcaagtgctaggaaggagcttgaggacatgagggaggacataaaaaaggccaaggatgatgccaggatattttggaatgatgctgctacattacgagttgaaatagagagggaggaggcagatctactagcattgaaacacaaagagcacctcgcttcgctttctgtgtcatctctccaagaagagcaaagcaacatgacatatgagctcaacattgtccatgaaagaaagaaagctgctaagatgccaacagagctacaacaagcaactgaagcaatggaacaagcacaaactaaggctcagatggcacgttatgaggttgcaaaagctagggaagaggtggatcaagtgaagtcccaatttaatgttgtcaaactgaggctagaagcagcgtcaagggagatacttgcagtgaacgcatctaaagaaattgcaaatgcctcagcaaatgcattgcaagaatacaacgatgatggacaaatagagccccaagatgaacgaataagcaataactatatgatgttatcacttgaggagtacaatgccttaagtaagaaagcccaagatgctgaaggcctcgctaagaagcaggtcatcaaggccgttgaaaaaataaaagaagctaaggatgcagaggtgagaagcttgaatcagctggagcagtcgatcaagaagaccaatgagaggaagttggagctgagggctgcacaggagaaagccaattcagcgcaatatgga

SEQ ID NO: 8634 - DNA, 605 bp, Zea Mays
tgcattagagcgggcaatgaacccgtaacaaccgaagttgttgtggtattgttctttgccgatagcgttcgtctcgtataataactcgtgcatattgcagaagcacttcgcgctcggctctagcccctggctccttacagcccagacaaatatccccatcctgattatagctttgagagtaatctgatgaagaaagatttgaaatatctttaaaacctcgaccacaaatttactcagtgggaatcgaaggcctgccttcaaaaagctttggtaaataacaactttgttttcctcaagagcaggggcagtactgtctcctccaactctgacaatagacatatcgtgaaaatatctccccctcatggtatcgatatcactctgtttgatggttgattttccgaagatagtatggcttggccgccagggccggtcctcagagtcttcatccccactttccacatcataactatcactgtcattagagtcttcggacaaaccctccatgatctccttagtaatttttttgtattcgtttttgccatagactcataaaacccagcaatgaaaggatccgcaactttcttctcttcatacaacttcttctc

SEQ ID NO: 8635 - DNA, 436 bp, Zea Mays
taaatgtagatagacaataatggcttctcgagaacttcggcctcacttacccatccccttggggcctttaatatttagatccctcctttctgtccctctactataggtcttgccatgggaacttgggttgactagtagatacttggtcataaggaggtggtcctaggacaaaggaggcagatggtgaccatgcactcattgctgggttacttgaggcatttgaggccaaaggcagaattggccttggttcatgcaactgaggctggacatattctggcgggtaggatgaacattatgaggatgtactgaacacctcttttgattgtgaaggttgcgtggctgacgaagcaagctctttctgcttgttgatggtgtgatgacatgttcttgtggtgtaacctttgtcctcgccacaaaacaagtagaatgatttttt

SEQ ID NO: 8636 - DNA, 473 bp, Zea Mays
ccgacacgttgactaaggcagcggccagaggcgagaccttgcccgccgacgtgttctaccacgtcattggcacaccagccttccacaacctagagggattacaagtaaccaacgacaccgaaggccatcgcatcgtcaacctcattatgactgaagattggcgggccccaataacactgtttctgcaaggatactaccaccagagtgacgtcaatgaggccaagcgcctcaagcaccgatgccgggactttgtactagtcggggaccagctatacaagaaggggatcagtcaacccatcctaaaattcgtcaccgaaaccaaaggcattcagatcttacgcgaagtccacagcggaacttgcagctcccactcagggcccagggccctcgctgccaaggtgatccatcaaggattttactggcccgctataatctgcgccgcgaatcgagtcacgaggtcgtgcgaagcttgc

SEQ ID NO: 8637 - DNA, 430 bp, Zea Mays
tatatctcaacttggcgctggtttccaactacactccaaaatgagttgaggatcatcaactgggcctgggaaaatgattgtgttttcaactggtctgcattccgaattcacggtgctgttcatagcagtccagacaacgccactgatgtgagaccgaagtggcatggagccgttcaattgttcctagaaaagtttggtgatggaatctttgctgacagtaatgagtcatcctcattcctcattatatgccaggacgttgtagaccctttccagctcagacgagcagaggctttacagagaatgggaattgaagcgctttgtccagttcaagaagcagcttggctggaaacaattggtcttggcacctttgagaggaatatctgtattaacttcccaactggagcgggcaaaactctagcttacgtgttac

SEQ ID NO: 8638 - DNA, 1053 bp, Zea Mays
cgcctaagggtgcagccgaacaaaagcacaataagtgcgcgacatcacccacagggtgcaaagtcttcacggaaagacacgtctgagcaaaagtcgcctaagggtgcagccgaacaaaagcacaataagtgtgcgacatcacccacagggtgcgaagtcttcacggaaagacacgtccaagcaaaagccatcaaagggtgcagccggacaaaagcataagtgcgcgtcaccatcgacagggtgcgaagtcacctacaaaagcaactcccaaaacagatatcgcctaggggcgcaaccgataattaaagtgtcgcgcagtcatccttacgacacaaacgcgattacaaatcgaagccaactcgcaataagcacaacatacaacgtgcaatcacaaataaacaacaaacgaagggctcaacggcaccatcgcacaataatatgaatcacggttgttaccctcacaactctgttacaaatcgaagccaactcgcaataagcacaacatacaacgtgcaatcacaaataaacaacaaacgaagggctcaacggcaccatcacgcaataatatgaatcacggttgttaccctcacaactctattgcgaagaggaggagggcagcgctttcactcactatcgcaacaagagcagtgagggcaacaaaaatgtcacataggctccgccttcggaataagacccacctcccagaaattaaacaacatcatccttaactcttccccctcaaacaggtcccgcaagtccccctctccaatgcacgttccaaacatcgaggaaagtagctcgcgctgaccaccctgatccagtcaaagatgagacctttccatacccattcggcgacgtcttccacttcgtgatgtctcaccggtgctctgtttcgacacaaccacccttcgcctccgtgagtcttcagcctttgcctcggccgaggtagccagcgcttcgcgaggagtagatcatagcagagactccgacgcggccaaatccaacgcaacaaaataatctgagtcctcctcagaagattcctcaacccacgag

SEQ ID NO: 8639 - DNA, 728 bp, Zea Mays
aaatgaagattcccaacagaccgaacggcaaggaatctggaatctccgtttggcaggcacgcatacctggtacctgtgcttgctagctactcatccgtcccctgattgtgatcagtctcttcatcacaaccgacgatcaacatccgtgctgattgtaatcaccacagtatcgaaatgccggaagctgccatctgtagcaagaacaatcatatatgcatatgcatagcctcctcctcgtactttaattagtcaattgattaatcagaacatggccttctctactctatcggagatttgctttattttaatttgcgtgcgttgtatatatatagtagtaatcagtgggcggaatattcgtagtgagctagtagggtcgtccttgcactgcatccatccatccatccatccttgggtctgtgcaagcctgtaaaattaaagcgccctgcctaccaagtagaaggtgtttttcatcgattaactatggttgttaatgctttggaatcaatcaagggcacgcttgttagttagtagccttttgcattggttagctagtgttagaggtgtagtgctagctaggattgtgcatatatatgctaactttgcattacttaaccagttaagctttgctttgccatctctctctgtgtgtcacacacacacactctctagctattgctggttgttgcctgcaaagtgcagagattaaaatatgctaccgagcgcacgcc

SEQ ID NO: 8640 - DNA, 1545 bp, Zea Mays
tgcacacaggcatagagttacccaaggactccgaatgaggaaggcaaaccatctctgtaatgttggcctcctcgacttgtatcacctatccctcctgaatctgggcatgtttgcttttgaatctgcttctcgagtatactcttaggggggcctcatcagcagatggatcgtcaggttggggcgaactcgcgccagcctgttccagcggcccagcaacagacatgtgtcactagggcgaaacagggaggacaaaatccggtgatcccgcagtagtcggcccatacggcccagctaagccaggacgacccaacgaggataaaacttgaggattgtttatcttctccacagatggcacaactggcaccgcctcgggtgcctgcacgccgtcaatgctttctgttggtatagcctcaccaggcacgttaaaccctagattatcctgaactgacaaaacagcaatgggaacaactggatcatgatcatggcagcggggagataaatcttccaaaatgttcttcgaagttgtcatgcttggaacttgagtggcaaaacggggtgagctcaacctagccttctccagcggctcagccaaacttctgcgctgaggtgaagaaggtctaggggaggtcagcagcccatcaccaacacagaaagcagctaaatcggcacctcagtcatatccccatgcacatctgcagttcgttctctgcccgctctctgatgggaaccgaggcgaaggtggacagactgatgctgcaaaggacccagttgtcggttccgggggttggactgaccccggacatcctcgtcctcctcatcatggagctcatcctcatccgaaggagatagactgctctccgagagaaactgaaggggagccggaagaacggaaatgctaatcttgtaggtcagacatctcgcctcctgattaaatggcccctgctcaatgatgtggaggtccatatccctgtgaagcttcatcagatccaaacaccatgcccgaagcttgagtgaggagagatcagacttgctcgcagaggcgggatgcaactccaaaatgtgataggagtcgtggagaagctccttggctgtggtcagaccccacgcgtgcgctgagatcccacggatctcaatatccatcaaatgaggcagtgacgtagccgaagcgtgtgtaaatcttgtccactgcttgaacacgagcgagaacatagggcctctgaatggccttccttcgttaagcactcttatcgccacttcttcatccggcaaaaacagaaggaagtcttccggcatggtttgatgaatagacatgtcatcaatattgaggcaatagcgacgcgccacttcttccagcacatccgagccgagaacaacaggtctggttccaataacagtaacaaataaggatcgacggagtgctacttcttctcttgccatgtccgtcgataattccagaacgcaagagggtatggccgacatgttaggaacaatgtcagcaggggtagactggctgcttttgtactaaaatgattgagaattaaggcc

SEQ ID NO: 8641 - DNA, 505 bp, Zea Mays
gggatctagcggttgacgaattctccgcctcggccgagggcgtgaggcggggctcagacggctaacggactctccgccttgacggagggcgtgaggctcgagcggccgacagattctttgccttggccgagggcgtgggactcaggcagctaacagattctccgcctcggccaagggcacagggctcaagggcaaaggcgtgagcgctagcgcaggtgtgggttgttggatgaggaatcgagggtcctggtctaatgggtcgatgcgaacgggtatctaggccattaaatcagggatgggcgactgagatcaggcactcagggtggttatctgctccaaacggtttgggtagtgctactcatgcccgcgacggagtagtcgtcgtaggcgaggcaacttcgggttctagggggtccggggtcgtttgggtaggccataggcatcgggggtgacccaagggaccttatggtggcgctccgatcatgagagagagaccgaaggtggg

SEQ ID NO: 8642 - DNA, 543 bp, Zea Mays
tcttgatgttatgtgcaacgtcatgagaacttctctcccctggggctgagtttcttcaatgaaatggaccttatgttggttgtagtgcaaactttttttccctggcctctgagattccatcaccatctttattccaaatgaaccaacttgtgatagccacttataaattgactgattaacaagcatgacaagatcgaaaggcagagctccactttgttaaaaaaaggcatgacaaacatggtaaccaaggaatccacagtttttttacaaaatgaactacatgaatgtatgtgactcctaaccatgttcttttggagagattcttaaaatgtgtacatagacacgagctgttatttcttagacctttttttgttgctagagcattttacacatgcatgtaggcatgtacagataaaacttgggggatgtaactacattttattttttgttgcagagagtataatgatattacatagtgaattaaagcgccagaggaagctcgtgaaaaatctgaagaagaaatccttgtggtctaggaccttg

SEQ ID NO: 8643 - DNA, 904 bp, Zea Mays
cctccgaaccatagaccatgaagaagggagtgtttccatgcaaagctcgactaggttgagttcttaggctccaaaccacatacgacaactctctgatccactttcccacgaacttttcatttttgtcgaagactttcttcctgagtgcttccaatatcattccattagccctttccacctgatcgttggctattgggtgtgctactgacgcatatttgatctggatgcttctttgttcgcagaaatcaaagaattcagagctagtgaaattggatcccaagtcagttataatgctattcggtattccaaacctgaatattatatcttatatgaattccactgccttagctgaagtcagagaagcaatgggtttgtactctatccatttagtgaatttgtcaatggcaaccaacacgtgagtatagcctccctgagctttcttgaagggtccaatcatgtccagtccccagcacgcaaatggccatgttacgggtatggtctgcagttgctgtgctggtaaatgctgctgctttgataagaattggcaagcttcacacctctggactaactcggctgtgtcactctttgctatcgactagtagaaaccagatcggaagacctttccaaccagagtcttggatgctgtgtgtatcccgcactgtccgacgtggatctcatctagcagttgcctcccagtagccgagagaatgcacttcatgaggactcctgttgcgccccttctgtacagtacctccccaatgagggtgtagtgagctgactgccttgcgacgcgttctactgtagctttgtcatccggttcctcttcattctttatatatctgatgatgggctccctccagtcattagagtctgactctggctggctcaaaacgttacactcttc

SEQ ID NO: 8644 - DNA, 348 bp, Zea Mays
gtatcctgtgcacatgaagccttggtgcacatggtgcacatataacatctcagcctctaatcttcgatcaaacgtctgcctctcccacctcggcattttatcagaaaacaccctccacctcccctgaagctccctgaatctttaacgaaacccccctcaagctccctgtacgccagaaacaactctgatccttatttctggccgccgccccatcgtattcagactgccgcacccatgtattctggctgccgcttccacttcattccctggccaccgcttccacctcgttcctagccaccgcttccaccgctcgtcccccctgcatcgtcgtttcctgcttgtggcctg

SEQ ID NO: 8645 - DNA, 787 bp, Zea Mays
gaggactacatcattctaaacccgacaaagcctagtcatcttgaatttgaaaaatctattgtaacagaagatgacatgactatgatgaaaaaactaggctatttcggggagtctgagagcaaacttgttcgatttactggggaagacgaagttatcgtctttaagagcttcttcagagtaggacttcagttctcgctaaatgagatgataggggaggttctgaagaattttggaatatccttcatcaactgactcccaatgctattgttagacttagtgtctacatatgggctctctctagccagggaatggatgcgaatgccgaagctttctgtcgggtgcacgaacttcattaccagacgaaggctagatcatatggccttcacagaaactttggctgctacaattttgtgtatcggaaggatacgaaggcccctgttattggctaccgtaccaagtggccgactggatggactaatgagtggttttacatgaaagcagatgagaaaaagagggagaagctaatgagcatggttatgagtccgttagagttgaacttcggtatgactcgacccttatgcaatatgcaattggggttaccctgccagctggttgaagtagaatttagagtggtagccgagcacattagtactagagacttagtgcaagagtatttgtcaaacagaacatatctgacttctagtggttggggaatgccgaagagaaaagaagtggggaagaagcacgagcttgtatggctcccttatcgctttaagttcgagaaaca

SEQ ID NO: 8646 - DNA, 702 bp, Zea Mays
cattgccgagtaaccaaccgtccgtggcagccagctaggagaacgggggaacctaattaacagcagtcgcgtcggcagcccgcggcgacatgaaaatgaaaaaaaaaaacacatccatctgtagctacgcgtaaaaactgatctactggacgctttgactaatgctagtgtagtgtaggtgtagtagccgtgtaggaaaagaaatgcagtccatcttgcatctggtgtgtacgtagaatactagtacgcgacaggctgtgcgtgtagattacgcacgcgagcatgcaccgcgatccggacgcccaggaggccaggacccgggtgtgtgtctgactctgactcccggggcccgcattgtgatgagctgagctgtaagccgctgggcctgggattcgtgtatgccaatcagccgatgtggcgagccaatgaacggcaaacgagtcaacgactcggatttgccagcctgaggagcagattttgctatgcaaaaaaatttgcgtttgtcttgtgctgcaatatttcgtatttcctcttccggtcggctgtatgtagaaggcgtacgtagagctgtatacctgtatagtatggcttggtttggggtggccggcttggggaagcaacgtgcacaattgggtacgaggacaaggatgggggcctgcctgcctggctggctggacaccctcgtcgtttgttggccactgg

SEQ ID NO: 8647 - DNA, 326 bp, Zea Mays
ccgacacttggacgcggcgcgcgcgtgttttgaccaggccagcgatgtggacagtctagagtttagtacgggaccggtgtagagactagagagtgcggtacgaccatgataaataatatagcgtgcctgaattctctggaagctaagggtgcggttgtacagcgttgtcagacacccccgacggtgcgccccagcagcagatgatggccgccctgatcggaggcaaacgggcgcgccccacagttgctacagcagttgccaaaccctgctgtgatgtcatggtcctgtcgtctcgtctgtggcacattctcgccgctcgtaaaccg

SEQ ID NO: 8648 - DNA, 499 bp, Zea Mays
gggattgattaagccgaaagtaggccaccagatctaatcctagccgctattcacggatccatcggttctaaacacccttcccccatcaacgcaccagggccgtccattaagagatctacggtcctggcacgtcatcaaccttgagctcccttgctacggcagtgcgcccagccatccgcgccaatctagcttcgcccgccattaccggccaccacaaattttacgtgacagcggaaccaatacctaatcgagagatgctacacgtagctagggatctagtgagttcggccaggacttcttaccccggatcgcgcggcgcagaggtccaatgccgacgtcttgcggcacagcggtgatttctccggcccggcgagcaatcccgcaggcgcagacctcacgtagccaccaggtctctcccccgcgatgtccgccgtgtcaactcggtcgcccagggcacttcgcacgaacagataagggaaggggacaatgttctactggc

SEQ ID NO: 8649 - DNA, 470 bp, Zea Mays
cacgggaacgctatagcacaacaccaaatcagcatcagacaactgtcgctataaataaaggattgtcattgaaatgttagtggatatatattgccaccgattgtgagtcagcatttatctatatatcgactaacaatcagtcatatttatatgtgaatagttttgttccatcagtcggtaattcatactgattgcgtctgtcggcacaatataattgcctctcctcacacgcgataccctaagttattggcgcgcaaaaattagtcggtgccaatatatactcgactaacagttcgatggcaatcctttatttatagcgacagttgttcgaagatattttgtcgttgtggtatagtggcagcttctatccaaataggtctagctctatgagctctagctttaaaaaatttaaaactggaggacagttttatgaaatttttgaagctcatcaaagggtgtttccaagacaa

SEQ ID NO: 8650 - DNA, 586 bp, Zea Mays
cgataggtggtctgccaactggtggtggcggcgggcagcagcaggggagggaaggggaggggagcagggacctaagacagtcgacgtgactacttgaggccgacgttgacgcttgggctggcacaacatggccctagaaggacgacagttcaaccaaaagaccaaaaacatttagaagcagtggggatttatttgggccatgcaccaactggcccagggcctggttctgtccttcggctgagcacgtgcagcgacgcgatcattctctccagcaaacgaacaccgccgcttggaccctaccttgtcagtgtagacgttactcgaatctgcacacgcctctgtagtcgactgcatgtccagttgctcacgccagcctcgacgattccatcaggtggcaattcattgtggtgcaaagttaggacttccaccataaccatcccggcacgacgcagccctctgagccgcacgtcgccggtacagcgaccgtgaggatctctcccctctaccatcgagctcgtcccctactcgtgagtatctctccgctccgcaggatatgggaacaaagagccaagaacagaagcgtcgt

SEQ ID NO: 8651 - DNA, 538 bp, Zea Mays
ccgaggccaggaaacacaacgtcgagagcgtgctcgcgcctataaaggtcgctccaccctctgtctttccttcccaactgttgcccagccagccttcaccaaaatttcaccgagatcgagtacactgtcgcccgccattgttgcctaagcccggtcacggtgatccaccacctccggtcacgtgccacctccaccagcgccaccgccaagatcccctgagttccctagggctctccaaggccccaaccgaaactctacctcaccgaaaccgcacaatcaccttcgccggagcatgatttttgccggtgatcgtggacccgcttccacggccaaccccagtccaatttcttcgaggaatcatctccccgacgccccgtgaagcctccccgccggtggaatcgaaccctgccatcgccgactagacggaacaccaccaccgacgaactctgaccgcttggagacgtgagccagacaactctgaccaccatcggccgccatccgaccactgacgtgttcgtcgaagcctcctcgaccccac

SEQ ID NO: 8652 - DNA, 596 bp, Zea Mays
ccaaattgcgtggcgacaaaggagaagaagtgggcaatggtgggaaacgtgtcggatttgaggcgtagggggaatgtccacaagtagtgggagcagtcatcaagaatgacgagatagtatttataaccggaaacactaggaattggtgaggtccaaagatcgcagtgcacaaggtcaaaattgtgtagagcacgagactaggaagtagagaaaggaaggcacacatgacgaccgagttgacatgcgtgacaaatggcatgcgtgtcattattacaagtaatgtaagacaaactagctaagtgatgaagagcgtcgcggccgatgtgaccgaggcggcgatgccatagctgggagagggcactggcgaggaggacacttggggtagcagtggaagacaatggagcggagagcgggtacaggtcgcctgagctattgcacctggtgattacgctctgtgtcctgagatccttcacagaaatgccagcggggtcaaattcgacagagcaattattgtcgatggtgaattgacgaacagacacaagattttttatgatagagggggaaacaagaacattatttaggtggagaggtccgac

SEQ ID NO: 8653 - DNA, 705 bp, Zea Mays
gcaaggggtacttgttcttgattgtgacctcattcagagctcgataatcgatacacattcttccggtgccatctttcttctccatgaataagacaggggcggcccaaggcgaggtgcttggtcggatgtaacctttctctgatagctcatcgatctgcttcttaagctcaaccaactctggtctagatactctgtaagctctcttaaagatgggggcggtgccaggaagaagctctatggcaaactcaacttttcgctcaggtggcatgcctggtaattcctttagaaacacatctgggaactcggacacaaccttgataatctcaagtggatctaccttactgctattggtagccatctgataacaacttcctttcttcggctcaggcgggactaactcggtcaccacttcctctcctagtggggacatcaacttgattgtcctcttatcacaactgataactgcctgatacttatctagccaattcatccctaggatgacatctattccttgagtacccattactatgaggttagcgggaaacactatccccctcatttccacacttacattcaagcaaatgctatcggctcgaattctacgactggctgagtcaatttgaatgggggttgacatggtagtaattggaagattatgtgcttctacccatgatgcagtaatgaatgaatgtgttgctccagtat

SEQ ID NO: 8654 - DNA, 299 bp, Zea Mays
atggggagaaggtggtaacaaaggttgcacataaacagcttcggtacatgcctctcactcctagagtgaagtgtttgtttctcccgaggaagaccgctatgcacatgaggtggcataaagattgtacgaacaggcaagatgggttaatggtgcacccgtcagatggtgatgcatggaaggctcttgacaactttgatccagagtttgccagcgatgcaaaaacgttcgtatcagcttggcaactgatggtttcacgcctttcaatatgaccgatgcgttgtattcatgtgagcctgtca

SEQ ID NO: 8655 - DNA, 288 bp, Zea Mays
actttaatctctgttatatactgcatgcactaaaagctggcgtaggaaacaggagtatgctacaactcactccgtctatctgatccccaatcacaacaactcgcaccttgttcctgctagtgtaaattgtaatgaggaaacaactatcatgacttcatgagccctttgtgttgttttctcttccaaaaaaggaagaagcaacggcggtgagcgaaaatgtcgtggagacgagaaagcaggagcagtgaaaaccgagagcagaaaagctaaaccctaacgcgggcaaca

SEQ ID NO: 8656 - DNA, 537 bp, Zea Mays
ttccattagtaacatatctaaaaaataccttagatgagtatgagcagtcctttgtgctccactgctttaagtcttttctgtgaccaattgaagggttatgtccccaccctgcaattggtcggtaccactgattttcaaatacttcatcaataacactggtggagcttgccaatctagtatttaacatagagttatcaagcatgtttacaggacatatagacacttcaagttttatgtcagcatcattggcaataactgcaagacctctcaaggttgcatgtttctttccattcctcatagtgacctcaaatgcaaaacggttattattaagcgattttggaaggacggtcactggcaaagctgcagtaaaactttcccatggaccatctgggctaagtcctatacagaagtcgctctccacattgtttatactgtctttcaacctctggaaatatgaatgagtagaacgttccacataacagcttgagagtactaaaacaccaccttttttcctgtcctcaaaattaggtatctgac

SEQ ID NO: 8657 - DNA, 665 bp, Zea Mays
gttctacggagcagaggagtgttccggtgatgggactctggcaaacttcaactggtcggctccaagagaaataggaagctagaacatgaagcaatcggggagttactgacccgaggagtgctagccacagaggagttcttcacggcagcgcgaagagcagggcaaaatggttttgtggactatgtgagttcttctggtgaaattgagtcgattgctcaagtgcttgtgtgcgtgatgtggtgaagaagcaggatccgagctcaatttatagatcgatggccagaattggatgagaatcgtggagctgtaaccgcgctggcgagctgacccgcgcgggcagagccatggcgatggttcagtgaccgcggattaaccgggcagtgccaccgcaacattttaacgccacgtcgcggatgatctttaccgtggccgcaaacccatccccaaccgtggtggcgttcttatcgccggtgagatctttctgaagttcgatgaacagtgcccaatttcagttaaaaatcgcctgacagcccatctttggatcatattatctccaaattcctcatggcaccaagacttaatacctgtagtaaagttgttcttctacaatggctctacaactttgttgcattgacccagggcaaattctttgaatttctcgatct

SEQ ID NO: 8658 - DNA, 303 bp, Zea Mays
ttctactcggagcaccgtcgactgtctcggttctgcatcaccgggacaccttcctctgcttcctccctcgccggccgaactccttcgcccgctgccatagtgccctgcccctgcgatggccgtgcgtatccttctgttccacatcgctgcgccatccttcacctcgcccggttgtgctttgttgcgccgtcgggtgctcctggtcctgcgccgtcaacctgccatgcgagctagctccacctcgcctgctcgtgtttctctctgtcgtgcgctattgctgcgtcgggcatccatggccgcagg

SEQ ID NO: 8659 - DNA, 443 bp, Zea Mays
cggctcggaaacgatcgctcaaaacggggaattgagtgaaattgaagcctggtatatcggattggcgtgaaatttggcgaatatgttactgaaggtgttgtgaaggtgcctgaaaaatttgggttcaatcggagcatttttggctggtttggacatttcaccgaacacgtggcgtgcggtgaattaggtttttggagatatgaccatttgaggattgaaaccctcccaaagggagctagaaacctgcagggatattaagggacacataggaacacattccaccacatgattcacagagctttgacaagattttgaatttggcagtcaaggggtggaaagaggttcactgcacaccagaagaacagagaggggagaggcagagggaggaggctgctcaccgagaggaggagacagagatgcccacgctggagaagtcacaggag

SEQ ID NO: 8660 - DNA, 473 bp, Zea Mays
ccgcgaggtcatccttcgtcatggcgcagagaccagcttcgagcttcggaaatcccatacttttggccatctcccggcagacggataactctttgttgtccgggaggcagtacaggaaatcatctttgtctgtgtcgttaaacactaaggcccctttcgggtacttcagctcccgggcatagtgtttggcttcaaaaacttcttcggataatctttttcccgaagcatgtcgaataatatagtcaagatcttcggacggtgcttcgggagcaggggatttggcttctttggccacatttttctccagagctacgctaatatctggagattcttcttcggccttctgctcagttgcggcaagcttcgtctcagcaggcactgagggcccagcttcggtttccgtatgagctataacagcttcggcaactttcttcacagaagcaggagtcagcgctcttgttgtctccacaaca

SEQ ID NO: 8661 - DNA, 819 bp, Zea Mays
attttaagagggtaggttttaacaccctaattttttaaattataaaaaataattaatttgatttaattagcttagtcgtatatatttcaaggggggagctaaaagttctatacaaaaaataaaagaatatataagatagggaccttgcttgatgcgttcatgttgtagcaattttatttgtttgctattgagtgctttagcgttcaaagttagtttgcacaaaaactcttctcaaatccctttagaaaaatatgaaagctttacttatccatttcctttcttcctccatcttttggccaagccacacacgacaacccagcccacacccgacctccctctctttcacgcacgccaacaggtcatgccccagccatgccctccccttcccattcacgcatgccaacactgtacattcactatttgattagtggagtttaaaatataaagtggggtagagagtagggtaggaagtgtgcccggagatagtctcgtgctaatgcccatgtgatagctcctgtcccgtgcgctcaccatgggtgatagcgccatgcaatgcccctcactaagctcgcgggtgaggataatggtgtgccgccatgtacagtgccgccctagggacctcactccaccggtggccccacctgatccaatctcgaggcttgagattagattggtctagggatacaaacctcgggtccacggtggacccatggatgttgcacatggccttagtccaccatgggtccatggatccatccaaccacactctgccacatgacgtgatcggctgatgccaatgcataagagcctccacctttc

SEQ ID NO: 8662 - DNA, 625 bp, Zea Mays
ctcagggtagtatggctctggaggaggagatagttcagctacaccaaaatataagcttttgtcaggcacgagttaacattcttacgaagctaaaatatgacaaacgtacctatacgtctttcacgcttagtggcctcttcagcttttcttgcttcttcttgaggctagatgagcctcttcttcattttgcctgatggcttcgtctgccatctctcgactgccattcatccacccttcggaataaaatttcccactgaggatgatagcttcgactgatggctccttgatgtcaatcgctgaaactgagaagtctagctgaattacagccttagcatgttcacagccagctttttctagtagtgatacagccccccgatcccctacgcattcacaaaaatctcccctgccagttaggacttcatcaaatgcttccacttcgccctcaatccacttgatgacaccctcgggatcaccatgaatgaaactttgctcagccgagaatgcaccaacactaacaaaagcatttttcaagttgtttgagcatttcatagcaatgttatagcactcctccttcgcctgacgaagctcctcaacattcttttaaaccatcaaccattcggtttcg

SEQ ID NO: 8663 - DNA, 450 bp, Zea Mays
ctaagagttactagtacctgacggctcttgatggctgggagttactagtaattggtcatttgattgctacatttactgttaaggcctagaagctcaggggtcccctggtgcctataagagagacactctctctcatcttcttgtttataactagaaccactagagctacctacactgttgtgttgtccttttgtctcctgttcccgtggtctatgtgcacggaaccgtcggaagagtagaccttcaaaactatgtcttcaccagagactctgcacccgaggagtagagggcgattaagtttttaggaagtacattggcgcgactgctcactgcatatgcctacttcccgaatgcgtacctgcactacgaacatcttcactgcatcaacgtgtgatggaccacatcgaatatgatcgactaatgatgttgggtaatgacacctctagttcc

SEQ ID NO: 8664 - DNA, 795 bp, Zea Mays
cccttgagaggctagactaacagagcaattgccttcctaagcaaaaaccttgtttgcattattgtcattcccccgttggatcatcctgctcgggagagcaagttccaacagaccacatgagcaacaaccctatactcggcctccgcactagaccgtgacacggtggtttgccgtttggaggaccaggaaatcaaattgtcgccgaggaagacacagaagcctgatgtggagcgatgggagtctgggcacccaacccagtcagcatcggagtatgcaatcagcttgtcgacgggtccagtgcctatgtggagaccgaccgatagagtgtcattcacgtaccgaaggatgcgcttgatcagcgcgaggtgaggctcgcgcgggtcatgcatgaacagacacacttgctgcacaacatatgccaggtcggggcgggtgagcgtcaagtactgaagagagcctgataattcgtctagtggtgaggtcaagacaacggtaacccttatgggaaggggggtattcgagaaatacacaagctgtggaacgtggtgccagcttgtgtttggaggtggctgtgaggttgggatagcaaaggcaaccgaaaacacgaagaatggtgtagtcagggagttgctcaaagggaactttatggccaatggctgagcagggacgtctgtttaggagataggtggctgtagctagcgcctctgcccagtattggggcggcatgtgagcatggatgagcagtgtgttggcagatatcgttcagagaacgaatgatgcgttcagctttgccat

SEQ ID NO: 8665 - DNA, 451 bp, Zea Mays
tcatggagggcgacaaggtcaccacatctcaccctcgtcaacgacacacaaagggtaatgtaaggtcacgatctaccacaccaccatagacatactcgtcgtcgctcacacacaccaactaacaacagtggggcgatgttaatgcaagtgaacttgaaggcggcacgatggtggtacaacgtcgagctaagagaaagacaagaataccgtctaccaccaccgattgtctagcgctcgccacaatcctacgctttgtgacacccaacatgttggttggtcatcgatagaggagaacatcaataacacgggcgatggttaagcagatctgcatcgaggtctagtcggtgagtgaggccaatacacaatagctccatcatgactttagcaccttgttatggaaggaggcagagaatacggaagatttcacaaaccacatcatccagcgacgcaa

SEQ ID NO: 8666 - DNA, 460 bp, Zea Mays
ggaaatcggaatatcttgacatcccactcaaggatagcattaaagggtggcgcttagagtggttcattgtggaaaaccatggcaagtctctccccccttggtcagggagacagccggatgttcgctctccaagttggattgagtctcccacagatttggagatagcagaggccaaagttattcttgctgaaatttgcttgttgaaggagagaggtctgaccgctgaagctgtggttgcagactttgtttttaagaatattcaaccactgaaggatagggcatacccagcttattcatatagtggtgtcactgattcaacccgggttaccaacaagaggattcctgttgtggatttggtgagtcgactggaaatgatccttagaggcaaggtatcgaacattggtgctcctgttgcatattctgcttggaatctgccgccttccaagtcctttttcgattt

SEQ ID NO: 8667 - DNA, 598 bp, Zea Mays
tgcccccgcggacatctcgcaaaggtaggcgaagacgaccgcctgaaggatgaagcaaggcgtgaagtgctgagattggaggtcgagctcctccagcagcagcacgaagaaggacgagatcggtagcgctaacccgctggggaagttggaggcgaagagcacgaactccccggcagcgagatcaccaaggggaggggcgccgacatggatccttctggcaaacgctggcgcaccccatccgagcaggttgcgcaccaagttgagtgccacctcggactggaagcactcgggagggtctagcaaggccatggcagctacgacggcagaagagcgcggagagctcggtggcgaatgggtgcagcaagtgaaaagaatgactgtcgcattggggggaatccctttttaaggaggactctctcgttcacgccccaagacaccgcagaaaatatcgcccgacacgcaccaaggtgaaccagtctctaacacgggggcccgggcccacgagtcatactccttgggcgccagcctctatgtgcaataaaggcgaaccgccatgcgaggagcgaaccaccatgcctcttcatctccaccgaaagca

SEQ ID NO: 8668 - DNA, 300 bp, Zea Mays
ctaaaagttttagaaccatggctaagctaaccattaaccataacaagaaagagagtctacccttcatacaatgttcacccacaaacaagattctaaaaccctaactatttcttaagccttaaaccctaacaatgggattaaagggggaagaatgagtaaatgatcaaaacaacaaaaggaacctttattaaagatgaagagtattagtaaagctacaaaacttagtaagagaaatattacaaaaaggccctacaaaaaccccaaatcaattcactaagtggagagcacactagagccctg

SEQ ID NO: 8669 - DNA, 379 bp, Zea Mays
gcacagcttcttcaccccatcacatacacgagcacttgtgcaattgactcaatcccaccggagaactcacgtagtccacaaatcccctcttccctgttcctagcgccgccgtgagggaccctttcgtggccagcactcctcgggttagtaactacccaattgcttcctgttctagcttgtttatagctttctattgctctcggagccgaccaactgaagtttaccagagtcccatcatcggaacactcctctgctccgtagaacgccgctgcgacaccctctctgtcgacccgcttttctattcttgcttagttcaaattcaagcgtgtgcataacctctagtgaacccgtgaagcttccccgagcttcaattttgtca

SEQ ID NO: 8670 - DNA, 1005 bp, Zea Mays
tggtgaacggcgataagtgcgccctccgacgaacttgtactggccgggatgcacaacgatcggtgccctaactcggtcgacacctaattctactcctggcgatcctaatccgaccctcaattgcacgaattcggcccagagttcatctgttcacgacgacggcgagacctgagggaaaactgaggtgttctaggtgactcaatgtggtctagttcaatcaatcgggtctacgagcaacaagagacttaagggatgctagatcaccaagcagagaggcatgaaccaacctgtagatggctggccacggtgagaagctcacggcggcgcggaaaaccgatttgggggaaatcccgaattaaggcgctatggtggacgattggaggcaaggagcgatgcactgggcgcgtaacaacctagaggagctagctatgcactcaatttatagagactaacaacggtggcacccaatttgaggaagacacgctggcggtcggagagaggggtaagttactggtgcgagctaccgtggcagtcactggctaatgagctatgatggtcactggttactctccatgactaatgacgacgtggtaaaacagtctaaggcatggcgtaaccgagtgaacaacggcagccacgtcgagagccgcacagccacgtcaccgacaagtgggtacggtgaacagtctggtgatagggtccaagatcatcccagcgccaagatcttttaccccgagtcattatccacgcgccaccgggcacgaatcgcagcaccggcgtgaatcctggcgtgaggatcactgacggcgagatacgctgcacctgatcttgttcagtactgtaccatctaaaccattcatcagagcgtctgacagagtgagttagagggcttgattcccaaacttttgtgtagcaactcatcaatccttctgcagcaaagttgtttatctataatctagctacaactttgttacaaaggtcttgcggaaacatccactaaatccc

SEQ ID NO: 8671 - DNA, 689 bp, Zea Mays
ggcaatcttgtgtaccatgttaatgatggcccttccaagtctatgataaaggacttcaccattgcattgccatctcctcccgatgacgccactaccacttgagaaagggtctaagctgccattgtatttgggccgattgcctgattggtagttctgtggctagggtttggagtacaacatgatgaagactagacacctttcatctacgaagttgatattttgaaaagtgctagattgctgggcttgctagttgttatcttcagagtcctattgatggtgaccccttgacaaagattgtagggtgtattcttgcttctgcagttctacagggccatggatctttgttttttctcttatcaggtgctgcacttttgttctagacttggttgtggtgcctttcggtcattagggcctctttatgcttctgcaggtgttcatttctcatgtgaatgatcctcgatagtagttgttttatctaccctgaggtcctcctcctcttggtaacttctgaggtcctctgggtaacttgggggaattgacctctatggcattcttggaccaaagttaggggttgtagaaatgaagacttgaattggtcttccactgggtgtgagttggatgattgacctcttaacagattaggccaaattttggctgtagagatgctctagggattgatcaaagtgttg

SEQ ID NO: 8672 - DNA, 480 bp, Zea Mays
aagtcctgcggccaggattagatcctgccgtcgaggaatctgtatgtgccagggatcgttggatctagatccaaggccccagatttaatacgcgcgagatccgatcccactccttcatctacgatccaacgaccaaacttcgtccccctcgcaccagtaaaatgaactaatcgcgcccgttcgttcacagatcgacggaggatacgccccacgccatcgacggaacaccccgcgcgagaaacagagctcgcccggcggcgtacaaccgcgacaacgcgggtccgtcggagttacccacactcatgcaccaatgactgctccaccactacgaacgactctagacacgacgggaaggaaagcgaagcgatgggagacagccataccagagatgggcagcgacaagagctgaccacgacgcacaatgactccacggcgggaacgaagcccggcgagcgattggcgcagcaccggtcaccaacc

SEQ ID NO: 8673 - DNA, 888 bp, Zea Mays
aaaaataatagtaggagttaccttatattagaattttagtgtacaatttagaagctgaaattcaaaactcgaatgtgaatttagtttgaaaacctgaaaataaaagaaaggaaaatagagaaaagaaaataaaagaaaagagaaactggcctcatgggctgaaacccccacccatcgaccaatccttgcctcgcccacactgcatcattgtcgtgtccctgtagggtggggcccgcctgtcatccttgactctccctcacaacgacttcccgtgcgcctgagcgagcccgcgccggggaactcgataaccactgtggctctctcgccacgatcacgcccacaccgcagtataaagccttcccttccgtgcctacccttcccctcctgctctcgcgttgtagtcttttccctcgcagtcacgtcgcgccgccgacattgagccacttcatccctggctaacgacccatgcttgccccagtatcgagctgctctgtcccctactagtgatcttcgctcgccattactccactcacctcacctcgttgtgtttcgtcgtggcgcgtctcaccaacaagcaaccgagcaccacaccgaagcttcgcgggttgctgtctgtgcttccccctcgccacgcattgtcgtaaaggtgaggtctcctacctacccttctgtcttccacgcgcttgtagcggtcgagtgcctcggccccgccgcatgtgcttagatcgccgtcgagccgcagcctcccctatcgtgctgccatgctgagtcggccagaggtaggcgatgatctggtcaccattgattcctttgtggatagcctgattcatccaatataccaagttagttatgggccattgatcccagcgtgtgcggctaggataagat

SEQ ID NO: 8674 - DNA, 614 bp, Zea Mays
atcgccgtccgattacaattgggccaactgggccaattgtgtctttgccaacgggtaatagtggaggatgtcctcatcatcagggatgcagtgggtgcaaggaattggagaatagctcaccgtgtgacccggtccacgcatggcggtggtcgaccgaagtctggcgatgttgcgctcacttctccgttgaggcaatgtctcggccagtgcgtggccgagcgcttgagcacgcgatcgaacacgtggaggtgtgtttctgccctagttcaaatgcctgttggtcgacctagacgtgcatatcttgccaaggatcttgtgtatcatctcttcaccgtgccaagggctctctatattgtgtgagtcccgagtgaagatatggcctgggtgagaagatatgatggtgtgaagtaagctctgtctgcactattcaaaccgagacaaaacccatgccaaatcgtgtcaaacgattttggtttgatttcaaacttcaccagagtgtgcctagggtattttggcgccactttgatatttggactttgtggattcgagttttggaaaatagggaacacatctgaactttaggaagggtttaaaattcagatttctgaatttct

SEQ ID NO: 8675 - DNA, 831 bp, Zea Mays
gaaaaacagacctgaagttggtctctcagttgagtacagctctgaaactagactgacagtgaactagaaccaagtttgagagctattttgagtgtgatttagtgagaattgaagtatggtggctatagcaagattaaagctggattataggaccacaactttgttaaaggtggattagcaagttatcacatgaaaattggagatctaggcactgcaaaccgctctatcaggtgctctgaatgtcgttctgatggtacagtgcccgcagaaagatctcaggttcaatccccctcgccaccggtgacctctgcataaggattcgcgctgatcacggcgattcgtgctagactcaggcaggatagtaccgggcgggtgaaaagattggagggggagcggatttggtcgcggggtgaagcttatcaacctgtagtcgtgcgacgtggccggaccaccggtgtcgtcgtggaaactccggtgacctcaattatgccacgccatggctatttactgcgcaattgtaactgtggcacacctagacttaccatctcagaaccgctgcaccggtgaacgccacgactgagccaccagtgaccttcttcctctccggccgccagcacgccatgcccaaattaggagacaccgcccttggatactataaattggtgccccagccggctccgctaagtagttgtgcacccagtgaaccaaccctcaccttcaatcgtcccccacagctccccaatttgagatttcctccaaatcaatcaagaattccaccatgtgtgagctcgtcgtggccagctctccacaggtccgatcacgccctcctcg

SEQ ID NO: 8676 - DNA, 1131 bp, Zea Mays
tgacgatctcgaagagactactactggttagccctgaagcggtttgcctcttgcagaagtcgttgtactgccttaagtagggacctctcatgtggcatcagcatttttccacgtacatctgcaagcacggtttctccatggtgaagtcaaacatgtctctatttatgaaatcaaggtgatgtcgcctacctattgctctacatcgatgagatgatgacaatgtactgacaacatcctctcttgctttactatggcgcgtcactaatcatctcatctctgagttcgccatgacaaaccttggcgctctccacccctttcttggcactggtggtatctccacatgctccaccaaaggcttgctcctgtcaaagaggtagtatgttgttggtcagctccagaaagctagcatggctagcacggtgacaccagttgactaagtccaagttgtctgcaactaacagtgaccctgtcgctgatcctttggagtaccagagtttggttggctctctaaagtacctcacgctgaatcggtctgacctcgcctacgttgttcaacaattctgcctctccatgcacgacccatgggagccgcgcatctttccctcgtcaagcacatcctatgctatgtgaagggcaccctccatgtaggtcttcacctaggcaccggtggtgtgtcaaccatcactgcctactctggtactgactaggcaaggttgccctaactcttggcagtctacctcagacttgtgtcttcctcggcagcaacttgatctagtctcctagtcttcaaaacgacagactacaatgtccaattcaagtgcagaagctaagtattgggctattgcacatgtagttgacgaatgtaagttgctccaggagcttcacacctcgattccctcggcgaccattgtctattgtgacaacatcagtgcaatctttatgaccaacaattcgattcatcgtcgtcgcacaaagcatattgagatcggcatccactccgtctatgagacagttgctttgggcaagttcaagtgctacatgtcccttcgacacattagtttgcgaacatcatgactaagggactgcctatacaattgtttagtgactttaggtctagtatttgtgtctagt

SEQ ID NO: 8677 - DNA, 285 bp, Zea Mays
ggcgagcttagctggcagtctgatccatctgaccccatccaaatctacagtgccgctgatcttcaccgttccactgaaccgacctcctttctttccccctttctcttgatttttgttaagaacaggttaatctctattaataagagttatttaccagataagggtcttcaactttactataggatttatggatcaaaactgcctggattctaagatacggtgctcgcaatctggccatatttcactgtgaccatttcgttttggaattcagtttgcagtgacatt

SEQ ID NO: 8678 - DNA, 472 bp, Zea Mays
gtgacatcgatgacagcgaatgaagggcgacagagacgagggaggaggatgggagggggaggctgcggtggcgagaaaagatgagggacaagagatatcaaaataatattatttatttcctatactttaaagcagaaaggaatacggcttccaggtgcctccacgtcggcactttctgttttagccgcatgatccaaatccaacggtcataatcacatctcacgcatcccagtggtctctaacacacgctctttctcctccaagcgaaggaccattctagatgatgcacgaaggagccgttatgcgaccggttccgtacaaccccagctacccctatccggcatctccatttgtcgtgaaggttctagatagtccactccccgccctcaaacgccgttacctaggtgcttcgtcctcccctccaccccgtcaagagctctcccaagtcccaagcgccggcacacaccgccac

SEQ ID NO: 8679 - DNA, 272 bp, Zea Mays
aaaagatccccgacttccttgaccgacgatcaggaagcaattgcgccaacaaggataacgtgaacttcggggaacttcccaagaataccacctccttacccgacggcgcctgcaataacactgtcttccagaaacaggatataaccgcgcgatactgggataaccaatccatacccaagataacatcgaatgccccaaggaaatcaccaccagattggccgaaaagacctcatcagcaagaatgacggaacacccctgacaaactgaacagc

SEQ ID NO: 8680 - DNA, 515 bp, Zea Mays
gctatccctaggatcatcatcaccgatgatgttataatcagcagaaaaactagtaacatttatttccatacctaggtgttcgggggatgccttgtactctaccatctcttcctcgcccacatccttccttgtaagattgttgtcaaacttgtccgtggtgaccagcgtgcccactgagccttcctggttggggtcggacgattagactgagggcgccggatggtgtgcagagtggtcagatggtcgactgggagggttggacagtcctcgatacctacagagacatgttcacgtagtgttttgttttgtatttttatggccgcttgtatttgtgtattatctttagtggccatagatctctaatgtttttgtggatattctagatgtgtttcattaaacacccttcctgcctcttcttctcttttttcttttgctctcaagcgctagagtttgcgcttttgagactgtgttaatcctgatgggcaccatcatggcatagaatattcgggatcatg

SEQ ID NO: 8681 - DNA, 364 bp, Zea Mays
ctggagtggtctggagctgtgtagccgcttagcctggtcccgtaccctaagcctgcacctccaccactctgcaacgggttccctagtatttggagctgtgatcctgtaggtccgggcataaggcttggcttcccaggctaaatcctgcaggtcctgttgcatgaatcaaaggatggcagataccagacgatgggttctatgggtgtgctactaacacttcaaggccgaagttgtgtgcaggtccaggtccccgtccagaggtaggtagtctcaaactgtagagactaccccctatgggccggaccaccaactttttctttggtgtactggcatctagactcgacacgtcgagcctacatcccag

SEQ ID NO: 8682 - DNA, 533 bp, Zea Mays
cggccgctggccgcgcctggcctatgtgctcgcacgaggaagccatggaggaaggggttggggtggcgctcaacaagggaggcaggctgcgccggcaccggggaggcttgctggagcagcaggcgacaggagcacacggttgggagcggcacgcaggtttgggcgcacgacacgagccattcccagagatgcgtggctatgagcagtttgtcggtggccaaggcggcgtgacagttcgccggactagcggtgcgaggtcgcgaggcaggctagcgacgcaacgtcgcaacaatactccagattagtgaggctttgatggtggacgagatgatgtagatagacagactgcgctgagaaagctttcatgcgtaggagcaaatggcgccctgaggcgagtcccactcccactcgatgccgcctagatcgtgggcgctgcagctaccaaccgcatgatgtgcagatagtggctcgtggcccaagtaatggcagccctcgtcgaatgcatatgaggaacgccatgcaaggaaagaaaa

SEQ ID NO: 8683 - DNA, 615 bp, Zea Mays
attttcttttttactgttgtggtggactaactagagcgtgagattgttggtgtaacatgtcgcttatcttgtggtgcacaggtgtgaagtccggtgatggtggtcgacggcaaatgtgaaggtcatgcatgtttttactattcaaggtgtcgcctaggtatcgcggctggccaatctatataaggtgctccatgcaccgatagttggtcatggacgtggttatgggttttagtcaagtaggcatatgggtcgatccacctctagcctcaagccctcattcttctctcttcttccttcagttttttgccttacctgtagtagttagtgtggttgtcgtaacgtacagaaaaaatttaaattcggaaccactaaccttgtcttgagagggtggaatcattggttgcttttccccttgcatgcatgtgtcttgttgctactttacccctttgttcgtaggtccttatggtgttgtccagcagtagctcaaccaccaccgaggcgtatacaatggtcgccaccgtcattctagggggaggactcttacttcaaggaatgagatggtgctgacccatgtcacttatgaatggtgttgtctttcactagttcaagatatat

SEQ ID NO: 8684 - DNA, 307 bp, Zea Mays
aggaaagattttagaaatctcagatttcttaatacagcctttattgctcttttgcctaagcaggatggagctgtttttgctaaggattttagatctattagcctcattcatagttttgccaagctacttaccaaggtgcttgctaacaggctacaaaattacatggagaaactgatatccaaaaaagtgctttcatcaaagggcgcttcatcctagataatttcatgctggttcaacgaacaactagattcctcctttctcagaaacatccaaggattttactcaaattggacatttctaaagcatt

SEQ ID NO: 8685 - DNA, 733 bp, Zea Mays
caattctgggcggatcactcgtcaacatcgaaagacacaacattggggctattcgtgtgcatctttggtcagcatcgtgaactcaatagagtctatttgatcccatggctagacatgaacctcatcagtgtgggtagctagacgaggatgacaatgacatctgaatcaagaagggcatcatgaccatgcgtgaccagcagaggtgctaccggcatgtgcccgacactctaccaataggttgtacaacgtccacctcaatatcacacgtgttatgtgcctcaccatgcggcgggtcgacaaggtgtggtgctggcatgggagatacgaccacatcagcttccccgcgctacggagctggctagcgagacatcaaccatgttgatcaggtttgagaagggtgccttgccagtaagcagtgacgtcatttgttcccgacacaagcacgggagggctgcgacaacacttgaattggtatcggagcttacgttggtccagtgcattcttagatacagctgaatgtgtgaagggagctcacagtgtgtgaggggtagattgttagaaatagatctaccttctgagttgtgggtgggcatacatggtttatatagttgagggtgcaacccctaatgggctagcttttttaccggagttttggttcagtagagctaaaacccgctgttgtgcgttcgggcgcgtgtgatgtgacctgacagactgtggtgtggcaggcgac

SEQ ID NO: 8686 - DNA, 1726 bp, Zea Mays
gtgtccgacggtggtggcggcaatgtttcgtttcagttgaattgcttccttgatgttctgggacagcgtacacaggttgattgccagcagttctatgccagtcgtggcttgccttatgatggtccagttatcccacccgcaccacagcctgcaccttcaccggtaaggaagaagcacaagaatctgaagtacatactgatcggggccattggtggaggcctcctgctgatagccgttgttgcagccattgtgttctgctttgtgtgttctgggagtacagggaggaggaatcatcagagagaaagtggggcatcaccaagtgcaccatcgggagtgtcagctaccggcacagctgcagctactggtggcacgcagccttctgcattgtctgcaaacacggtgaaagtcggcgattcgtttgcttacgaccaacttgtcaatgccacctcgggatttggggaaaataggctcatcaagcacggtcactcaggtgatctataccatggtgtgctccaagacgggactgccgtggtggtgaagaggatcacttcgcgtgtgcctcggaaggatgcttatctggcagagttagatttgtttgcaaaaggagtgcatgaaacgctggttcctttgttggggcactgccttgataaagaagaagaaaaggttcttgtgtataggtttgtccgaaatggtgacttgtcaaatgcactgcacagaaagtcaagggaggaaaatgaaggcttgcaatctttggactggattaagaggttgaagattgcaacaggggtagctgaggctctttgctatctgcatcatgagtgttctccaccaatggttcacaggtactaactcatatagttttgtggatgttatatttgtttgctgtgtatctgttagcaaaaaaaaaaatgtaagacaatagagttttagatttcttgtagaaattcaatctttatcattacatggggtttagtagttgacagtcactgtgggtgctctgataattgaattttttcgttgtggtaatgtaggtttcagcagctactgcaataagctttccccatagactaggaaatacgttgaacattcgataatgtgtgccagcaattgctgactcagaaatttagtatcccgtgcttgatgcgacatgttccatgcattatctgcgtactggaaattcaatgtgaacgctgctgttatttcatttaatatttttgctggcctatatcatttaaatattcacctattttgccatacaaaataacaggaagttctttgtcaccctgatttcactggggagtttttttccttgttttgttatcaattgaggcacgtagtagaatagtagatcacaatcaattctgattgttttgtcgttttgtcatttttttatgtcaacacgaagggttttggctgcatagatgtttccttccatgggcagtaaattagatgcaatgtgaaggtttgctgttgactaaatttgttggttctctactacagggatgtgcaagccagcagcatccttcttgatgataaatttgatgtgcgtcttggtagcttgagcaaggtgtgtcctcaagaaggggaagggcaccaaaatgttatcacaaagctgttaagattttcttcgtaagtttcagataccacctctgcatggtttgcttctcttttccactctgaattcttcctttgtggagtatgcaaatccatacatatattatattca

SEQ ID NO: 8687 - DNA, 486 bp, Zea Mays
aattgctagaggtaagagatcttggcatagagatgagctcgggtcctattattgctcagttcaccgtacccacttgcacagcgacgtggccgggcgaccatcgctgtggtggccgccgtccttcgcggttgcgccaccccatgaccatttcaccacgtagctataaccgtggcaagcaaggagttactgcccttgagccattgtactggcgagcgccacaaggaactcgtccagtggaatatctcgccgccaccgtgatcgccttcgtctcaaactagcgaagcacgtagccggctcctttaaattgatcactaccctcgctctgcctctctgttacgcgctcatgccaccctcagttagtctctctcgtgcatcgtagcccccagtcaccggatttcccccaaatcaggtcactcacgacgtcgtgagacaccctgccgtgatcagccattcccaggtccgttcatacctctctgtgccatgttt

SEQ ID NO: 8688 - DNA, 455 bp, Zea Mays
gggcagggcgatgcggcgtcagccgtggagtctggggaagaagatacacccccccaccgttgatctctctgcgaatgactaggattagatctaggtgtgggtgtgctgccaccgtggatttggtagcgaacgggcaagatcatgccatcggatacctcttcggtatattaaatcaggatccttgatccatcattggacgatcgtgatcgactcggggttgctttagatctaggccgtaggtttgtgattgggcagtcttgcgctgtccacggattcataatgcactagatctaatctgaaccatcgggcgccgatccaacggctccgatcctagcgtaccccttcggcctggctattttgcaaaagaacccttattgtttacagaaaataacctgccgtccgcgttggctgtgttctgagtcttggtgtcttttgcgcagaaccccctgggtttc

SEQ ID NO: 8689 - DNA, 481 bp, Zea Mays
gtgggaaactagatccgggaaggccgattgcgcgaactccaacatagtgcgccgccgcggttctgcgcaatcacggtcgggggaagaagataacgcgcgcgccgtaggattttgaatggacggccggcttaaaaactaggcgttctcatttgggcgatttgatcggggccgcaggggtttgatcggacggttcggggtgaatcgagcttcataaaatcagaactgttgatcccggatccaatgagcgcgattgtataccagttcagtttaagtggcggtagatcccggtgctcgttctctaatcggatggccgagattcacgcgtaccccttcgtgaatacaactttacatatgaacccttgtgctttataggaatcaacctgcaggccgggttagggttaaaaccattacagaagggtccagaatcttgcagggaagcccctgtagaaccacaaattattgtgcgcagtctagaactcga

SEQ ID NO: 8690 - DNA, 517 bp, Zea Mays
gcgaagggcaactgactgttgggatcgatggggggaatgattgcgacggacgaactcgaagctttccgcttgggcgccatctcaaccttgctagcgagcagagcagaagcaatattgcaggagagcagagaaggcctggatgtagaaaagcaaaaactagggcacaaaacgcggaggcgtgcgacagtgcagtacatatgaggttttctcgggccaggcgccacttccaaaacgttggcatgccatgtcatcacccggccgttatttctaaaacgcgggcatgccatgtcatcacccgaccgttatttctaaaacgcgggcgtgccacatcatcactcggccgttatttccaaaacggccgacgcgacccattttaactcagcggttatttctaaaaacgctgacgttaccagacttcacccggccattgtttccagagcggctggcgtggcccgttatcactcggctgttacctctaaaacgccaacgtcgccatcgatcactcggctgttacctc

SEQ ID NO: 8691 - DNA, 1437 bp, Zea Mays
gttggttggaggtgccatcttggagatgcgccggggacggaaaactgagtatcttgaaatccctcttaaagacagcattaagggatggcgcctggaatggtttatagttgataactatggaaattctctccccccccggtcaggaagacagccagatgttcgcactccgagctggaccgagtctcctacagacgaagaggtggctgaggccagtgtgctgctagctgaagttgggctattgaaagagaggggtttaactgctgaagctatagttgctgacttcgttttcaaaaacattcagccactgaaagacagggtccacccggcttatctgtatcaagggctagccgacccaactcgagttaccaatagaaggatcccttctgcagatttggtgagccgactggagatgattctcagaggcaaagtctccaatgttggtgctccggtggcgtattcagcctggaatctgcctcctgccaaggccttcactcgtttcgtgtcaaacccaccttcaactgatggcaatttgggccttagaacgcggccctctgatgaggaggttagtgctttggttgcttcacttgggaaaatccctgatgatgaaagacaaacccatttcgaggtacctttggatcctactgatgctgaaataaatgccgtgcttgacatgttggctgaggattcttctgacgctattcctgctgagacattggcagtggcacctctcccagaggtcggtataatcttggatgctcagagacctgtccgtgctcgctcgaagcgtccccgccgaaccaaccagactgatctttctgttgatgagcagaagaagaagaagagacgtattcggcgagtatctagtttggatcagggtgctggtccctcggttcctgctgatgaggaggttcccgcgcctgaatttgctgatgctgatcccaatgggtgtggtatgactgttgctgatcccaatgggtgtggtatgactgttgctgatcccaatgggtgtggtccatctgttgctgatcccaatgggggtgttgccagtgttgctgatgaagacgacgaagaggaggaagatgaggttcctctgactcggaagaatagtcggcaattcctcgccagtggggaaagtagtggggttccttctccggctttgtctgctcttgttggtctgcaaaacatatccctggccgactttgatcaaactctcgaggacatggtcccagaggatttgttatcagggccagtggatgatgatgtagcggaagcttgtggtgctgtgctggatgctgggttgaggtcgtcccgcgcctcgtcaaccttagagcgcggtttcgagggtcggggtgctgacttggactgtcctgatttcatggaagtaaccgagggtccgtcaaccttagaagtggttactgcagagagtttggaccttaa

SEQ ID NO: 8692 - DNA, 761 bp, Zea Mays
ccttcctcaggcatttccccagtcccaggggcggcataggaggcagcgaggcagagtgtgagatcgaggacgagggtgcggtttaggtagcgagcctcggcgagggcgcagaggaggctgcgcaggtagtgtggcatgggcttgcagcggtcgccgccgccgaggtaagcgaggtacgcgcccttggcgaactgggagcgggagagcgcaggcggtggtggagtagcgatggtggcattggtggcgccgcggcggggcttgcgggcattggggccggaatggtaatcgccgattgagaggacggagtaggcgcatgtgtgggggtcgcggccgatggcgaagcggcggtagtccttggtggtagccttagagggggagtcgaagtctgagcgggagcgccaggccatgtcgcaagaggaggatggggggtcaccggggacggggcggccgaagcgagcaaaatggacggccgggaaggcttcgatggcgctgcgcatcatgagatggaacaagcgcgggtcggcgcagtcgagcggggaggtgggatcgcaggtctgctccttaggcttctggtcggcgatggtggaggcggcgtgcggggaggtggagagggggaggcggaggagcgtgacgaggagaaggatcgagaggagcgcggttgcagcgtggacggaagaggagaggaaggcgcggcgcccaagcggagggcggttcgggtccatcgcggtcacccacgcacggcgacgagcccaacggcggcg

SEQ ID NO: 8693 - DNA, 288 bp, Zea Mays
gctgggtaggccctgtctttcagtggctgaatgttcttgaaaacaaagtcagtgaccacagcttcagcagttagacctctctctttcagcagtccaacttcagctagcaacacacccgcctcagctacctcctcatctgtgggagactcggtccagcttggggtgcgaatgttcggctgtcttcccgaccgggaggggagagaatttccataattatcaactatgaaccactctaggcgccatcccttaatactgtccttgagggggatctcgagatattcagttttc

SEQ ID NO: 8694 - DNA, 699 bp, Zea Mays
attaaatcaagcaccaatcgaaacggtacacaacccgagccgcacaatagaacttcaacgtctcagatttaaatgacccatactaatttactaccggcctattgagatcggacggcgcacgatcctcacccgaagcggtacgcatcaggctcaatcgctaccgtaggtgctcgatccgacggcgagctcgtatctctcccctcccctcggtcagtgcggcggcgccgcccagaatggtggtggttcatggccagcgttcgcccgaatccagtgctagggccactaatcccccaattatgtcgacctacacaatgccacaagtgcgaccaagagggtgaatgacataccagggcaagagacggcctgagggaagctacccacggcgagaagcggattcgcggcggccctcctgctccggtgagcaattgattcccggtgactccgtcaaccgcgctccggagctcaagcaccgtcggtagcttcactcctatgacctagggcaactctccgaggctggcaaggtagaaatggcgaggttcaccgcggcggcgtgacgctcatagcttgcggcggaaacaccctctcccaggaccaggtctctctagcggcgggatggtggagggtttggctcggcgcacgacgcggctacttaagtctaaattcccgaggcaaaattgcaacggcaatcaccgggattga

SEQ ID NO: 8695 - DNA, 332 bp, Zea Mays
tggatgaggtcgaggcactgtggctgcccggttgccataccaacttgcgccacaacgtggccgcgcggccgtcgcggtgaggatcgccgttaacccgagcatggcacgctcctaccttgttaccacatcacaataggtcactatagatggcctgtctatcagctgagtcgttgctccggtaaatgccacggtagcttgcgctagtgaactccctccctccttggctgccagcgcatcttctcaaaattgggtgccaccgctgatgatcactataaattgagtgtccagtgagctccgttagattgttacgtgcctagtgcaccagccctcgc

SEQ ID NO: 8696 - DNA, 721 bp, Zea Mays
tgggtatggaaaagtgtgtcgacgggagcacgctctcagacgtgttctgcggcggtgaggtaaggttcttgatgccctatcgcggtaatattcaatcggttgggtcgacaagctatgttaacattcaaggatgctagaacatggcatggaggggaaggaatgaaccttagaatggttggtcacggccgggtgcctcacggcggcgtaaatgaccacaatgggggaaaactggaatttgtgagctctagtgggtaattggaagcgaggaagggtgcactaggcgcgtaaccagaaggtggatcagggagagcctttaatttatagtagctatgtgagtgcttcgcgaatttggaatgagaagatctcacggccgaaagggaggtgagtcaccggagggcaactgtcgtggcgctcggtgaggtaaggcccctggcggtaaatgggttgtccacaacgacctattgcgacgtggtaacatctccaagcacgtggcatcctcacggcaagtgccgaatgccaacgaggacattccgaccggtcgcgaagcaagtggttacggtggccagctcataaacttatcagtagtcacgatcttttcacttgcccggtaatatccacgttgatccatgaatgaatcttcacggtgagctcgaatcgcagtgcccgatcatcggcggtgaggtacactgcaccaagaatcttcttcagtgtactgtaccat

SEQ ID NO: 8697 - DNA, 481 bp, Zea Mays
ttcatgctccgtggtgcgtggataaccgcttgaggtaaatgatcttggcgtagggatgagctcgggtcctgttcagttcatcgtacccacttgcacgacgacgtggccgggcgatcatcaccgtggtggccaccgtccttcgcggttatgccatgtcgtgaacctttcaccacgtagctatcaccgtagcaagctgggatttactgcccttgagtcgttgtacaggcgggtgccacgacgaactcatccattggaatatcccaccgccgccatgatcgtcttcgacccaaattggtgaagaatgtagtcggttcctttaaattgatcactaccctcgcttcgcctctctattacgcactcataccaccctctgttagcctctttcgtgcaccgtatccccagtcaccggatttccccaaatcgggtcacttacgccgtcatgaggcacccggtcatgatcggccgttcccaagtctgttca

SEQ ID NO: 8698 - DNA, 442 bp, Zea Mays
ccccaacctacccacccaatatggggttggacaaaaaatcttttggtattaaaaccaattagaaatctctactacttcttaagaatagagtgtaggcgtgcaccgttctgcctctgccctctccccccgtcccgccgatccgtcttggatcccttcgtgggcgctcggacgcgtccatgcccccgccatgctttcactgccgtattgatcccaccgtcaagtctcgcacctcgcctccgcctagattccaggaatgcatagaaagctgcccgccaacacctcgcctccaatcccgcccgccagccaacccataccaactctcgagctccaatcccggccaccagccctcgcctctattccttactctccaatcctggcctccaatcccggctgcgatcagcacccgccgccaactcctaccaaaatcgagctccaatcccgt

SEQ ID NO: 8699 - DNA, 3620 bp, Zea Mays
gcttgcttggccccaagcaatggcattcggatagcgctgccgcagaacattgtaatcttcccatgtggtggcatcatctggaagcaaactccaccggatcaacacctgtggcacggcacgattccctttcttgaccaaccggcgatccagaatctccaaaggttggacattgcggctactcaaatcagagtaagcaggcagattagaaaaaacaggagtgtaatctggaatgaatggtttcaactgtgagacatgaaacaccggatgtacttgagccgacgcaggcaactccaaacggtaagccactgctcccacacgctccacgatcttgtaaggtccaaagaacttaaatgcaagcttcggacaaggtctactgaccacggaatgttgcgcatacggctgtagtttgagcaacaccatatcgcccacttgaaactgtcgatcagtgcgaagacgatctgctcgcagtttcatgcgattctgggctgcggccagttgctcccgtaacatggctgtaaactgtgctctctcaactaaaacttgtgccacatcagctgcagtatcggaaggcacagaaggtgctgctgcaaagggaggatcatacccatacagaaccttgaatggagaacaagctaaagatgtgtgataagaggtattgtaccaaaattcagcaagtgagagccaggtcttccacttagttggttgagcatgaactgcgcatctcaaatacatctcaacacattgatttacacgctcactttgaccgtcggtctgtggatggtatgcagtgcttaaattcagcttagtacccaaaatcttgaacaattgagtccaaaaggcactggtaaagatcttgtcccggtcactgacaatagacttgggaaggccatgcaaccggaccacctgatccaaaatgacctgagccacttgggaagcagtaaatgggtgtttcagggcaataaaatgagcatacttcgtgaaacgatccactacaaccaggatagtatcacatccaccagattgtggtaacttctcgataaaatccattgtaatatcctgccaggcaccttgaggaatgggaagggggtgcagcaaaccagcggggtgtactctttcgcctttggcctgctggcagatttggcattgttgcacaaaatcagccacatcagatttcattcccttccacacaaacaacttcttgaggcgatgataagtggcatgcatcccagaatgacccccagccgcgctgtcatgaaccgctgccactaatttagtgcgaagagcagaattctggcccacccaaatcagacctcctttcctgatcaccccttgagataaagaataaccgtgttcatcaggattatggacacatagccgagccaggagagattgagcagcaggatcagtcacataggaatttgtaacttcttggatccaaagtggttgaacctcactgactgctgttaatgccatcactgcccccacccgagaaagtgcatcggcaaccttgttatctttaccttgcttgtaaaccactttaaactgcagacccatcagcttagccatcgcctttcgctgcaactcggaatgtaaatcttgacttcccaagaaactgagagccttgtggtcggtccgaatttcaaactcactccgctgtaaataatggcgccaatgatcgacagccatgatcaaggcaatgaattctttctcatatattgacaatttctgacttttaatgcccaaagccttactcaggaaagctattggtcggcccctctgcattagtaccgcccccactccatcgtcacaagcgtcagtctctaccacaaaaggaatattgaaatctggtaatgcaaggaccggtgtggacaccatggcctgcttcaacctctgaaaagccatctctgcctctgatgtccattggaatgcccctttttgtaacagcctggtgagaggcctagcaatggcaccataaccctgcacaaaccgcctgtagtatcctgtcagaccgagaaagcctctgagatctgtgacattcaacggcttgggccacttgagcatagcatcagttttcttggggtcagtcgctaccccattcccagaaataatatgacccaaatatgacaactccttttgaccaaagacacatttcctttctttgagatagaatttatggtgccgcaaggcagtgaaaaccagcctgaggtgctccaaatgagattgccaattggggctataaaccaggatgtcatcaataaagaccatgacaaacttgcgaagaaaaggagctaacaccaaattcatggcacactgaaaggtggccggagcgttggtaagaccaaaaggcatgactcggaactgatagtggccctgatgagttttgaatgccgttttaaactcctcggatacacccatgcgtatctgatggtaacctgaagtcatgtccagactcgaaaagatttcagtacccgccaattcatccagaatttcctccaccactggcatgggaaaccgattcttaatagtcatatcattcaatttgcgataatcgacacaaaaacgccatgtaccatccttcttttgcactaagaggactggagacgcaaacgggctcacgcttggagtgatcaaaccagatttcaacaaatcagccacctgtctctcaatctcggtcttatggtgaggggaatatttgtagggccgagcattaactggtatggatcccggaagcaaaggaatgtgatgatcaaatggccgagatggaggtaagactgtaggtgcctcaaaaatatccatgaattctcctagcaacccttgcaaatctgtatgaatttcgttgctgctcgctgccgtcacctcttccagcagagcaaacacccagatatcatttccacgcaaccaccgctccacttgtaaagaagatacctcctgcaccacttgttgttttggatgattccccaccaactggacctcgatccctttgtccacaaaactgatcacctgagcgtcccaatcacaatgcatagggctgtgccttctcaaccaatcataacctaaaatagcatcataggcccccagccctagcaccctcatatcattctggtatgtgtgtccgttggcccaccactccaatgatcgcaccattgtgtcactatacataatctctccattggccaccctcactttacatgaagcacaagggtgcacggtcaggccaattcgatcgaccagctgcttgttaataaagctcgtagaactccccgaatccaccaggaccaacatgacttgattctgcagcaaggcgcacacagccatacattcttcatttgtagtaccgctgagagcattcagagacaatcgaaaattctcctcttcccctttttcctccaactcaatctgtgtcaatgtttgctctgagagggtcatacccaactcttcagcagtaagagcactcaactgcatctgcacccttttgggacagcgagcttgatggccgggttcaaatttgtcagcacaggtatagcacaaaccattttgcttccgatactctttcaccaatcgctctttagacaactcgggcaacgaaaccgagcttctactgtcagctttgggcacagtac

SEQ ID NO: 8700 - DNA, 357 bp, Zea Mays
cgcgggatgactgaccatagaaattgagcgtaggatcgtgctcgctgagaactaccggatgggttggaaccgagagaggtcgcccttgcacccgattgccggatttcggcaggcgcactccatgggcggcggtggcatcgccgggaggttttgactggtgacggtgaagactctcgtgtgccattgattggattgttaatgaccaggattgtacgaggggcggtatgtgttctggattggcgtcgtccgtccaatcacaatcgggcgaacccaaggcgatcgcggtagcgttgaatccgagccatgggttgcggatcggaaggtcaggggcgcgtaccgattcagacaatggtggat

SEQ ID NO: 8701 - DNA, 411 bp, Zea Mays
gcagagcagtgacgccaccgcaccgcttcaccatgacaacatcagcgtgcgcaggctagctccccgatggatcaatgatgttggacaggtggctaagaacggctgggtggtcgtcgtcattgccactgccaacaggcagcttctacctcgtctccgcgccgccgcttgcaacgacaaccaacgcaacgagcatcagggccaccgccatggccgggcctaggccgcacctcctcacgtcgcctaccatcccctataagctctggcgagcgatcgatctgatctgatgtgatggtacactggctcctaaccttacacacttacctttgtgcgtgtcttcactagccaacagcggcagcatcccatatatataggcctgccccgccctgcccgatcgagccagccatgtgccca

SEQ ID NO: 8702 - DNA, 513 bp, Zea Mays
gtcgggcgtggtgagaatatccagtgcagggtgaatctggtcgctggccggaccggtcgccgtgtcccgccgtggttaatcgcgctggcatcaccggagttcgccattatccggctaggctacgtgcctcgacgccttaccacgtcgaaataaaccgctctaggtagctcgttcatcgcctcagccactgccccgataaaagccacgaatcaccacgccagtgactcagtccctttctccgaccgccaacgcgccattccaaattcaagagccaccgccctcgagtcctataaattaagtgtgccatcagctccgctaggtagtcatgcatccagcgcacccactcgtgtctcagattgtccaccagggagctctaatttgggattccccccaaatctgtcaagaacaccgcagtgtgtgagctcaccatggctagctctccataggtccgatcatgccctcctcgctcttgttttagcattcctgtgtgctcttgattcttctagacccggc

SEQ ID NO: 8703 - DNA, 479 bp, Zea Mays
aaactttcagccgtccaatgatttattgatggtcacagaagtgtcggacttcttgtgcttttttcccttccatacggctctcgaaacttcatccccatccattgtctctcgcccaccagtccactgcgcaccaccctgccatggacgacatggacagagtccacctcgccgtggacgacatggacagcgccgcccgctctgcagcctgttcgtcccagcgtcctatgtcgccgcgacctacaggtacttctcgtccacgctccctcctctgctgtgcactacacgtagctactgatctagttcaccgtcatttttttgccgcctccttcgttttagggttcctttttttgaccggccgcgcttcgatttaaagtttcttcgctatctctgttttagggtttgagtttttgctaaacaatcagtgacctccctcacaaatcatttacagatttgcgtttatcacatgtacaatttccaaa

SEQ ID NO: 8704 - DNA, 810 bp, Zea Mays
attaggagcacccaaggatactgaaacaaggaatcaggggacatgaacggacctgaaacacgttggccacggcgaggtcaacaccgcgcggtgttcttggttgatttgggggaaatcccaaattgggacttcctggtgagcaattggaggcacagcttggtgggttgggtgcttaactaccttacggacctgacggcacgcgcaatttataggctctaggggcggtggcgcgtgaattggagttggcgcggtggcggccggagaaggaagaggtcactagtggcgcaatcgtggcgttcaccggtgcattggttcagagagggtaagctcaattgtgccacggttactacctcgtagtaaagagtcacgctgtggcataactgaggttgccggagtgtccacgacgacaccggcggttcggccacgtcgcaacggctacaggcacggtgataagcttccccttcgaccctatctacctccccgcgagatctttcacctccccgtgaatatccacagcgtgcccggcacgaatcccggcgaccggcgcaaatccggacgtgcagatcaccagcggcgagggggactgaaccctaggatattctagtggcactgtaccatggaagatctgattcagagcgcctgaccgagcaacttgtgacgccaagttcttggatttttgcgtgagaatgtattaatctcgctacaacaaagttctagccctataatccagctacaatcttgctatggtaaccatgctcaaacacccactggattatctttgaaagggctcccaaagttcatcttatgtca

SEQ ID NO: 8705 - DNA, 573 bp, Zea Mays
actgacaaaccaatttttgtgggtctataactctctaaccagtgcacgattgacctcaagttctgtacaaaatttgtaaattgtagatcaaggaaaatatctcgtacagtgacctagatccgaatccaaacagaaaacgccaaaaatgtccgtccaaagtcacaactgtagcacctgccacctgttggacactagcaggcatgctttgaaacttttgctctataaatggcagctcatccccctttctcttctccccacaccatttccttctccagccaggcctcctacgccagccccacgctgagccctctgctcccatctcatacaccaatgccctactccttcctcatccatggacggcaagcaccctgctccgtctctcaccagcagccttggcgtgcatgcatctagctccctgcatctggccattttttgtgtagcaaagtcctttccccaagccgatctcgccctgcgctcactactcctctctagcatgtgccccagctcttccttgctcttcgtgagtgagcaaggctgtggatggctaaaggttgaagaagcccttccaagtct

SEQ ID NO: 8706 - DNA, 513 bp, Zea Mays
ggttttgtgtgttacaaggcgaagcgcttggctttcgtgctcgtgtgaggaatgttaccaacttagtttgcctgcctccacaacgaggcacccaatccattatatagcggagggagcgagtaatcattgttatatgatgtttttgatggggtacgtcatctctacctttagtcgtgtagttgctctagtgtgtctgctttgtcatccttgagatgacttggctataggggtggttgagtcctaaacgtgttcgaagccatgttgctaggtatgcttttctgagaggcatgtggtgattttcctcatatttctcttgctttcctcacatctggctttattgacttctatacccttggagcgtgactgaccatgacctgtgaggccctattcgtacctttgatggtgaaatagttggttggaggagtcattagtctcatgtatcgtacatgtttctgccctttgcacgcctcagttaggagtccgcgccgagtgatcaaaatatcataaatgcac

SEQ ID NO: 8707 - DNA, 329 bp, Zea Mays
ggcggtgaagacgactccgtcgagaaattccacccgcacggtcccgccttcacccacaatcggtgacgcccgcgttcagggtaccccaggaattactcaacgcgcccaccgggcacatagggtggtacttcacgtcggcaaacgacggtgcctagttgctccacccgcggcgctcggcgtacggacctctgcagtcagccagtctctggttatcgcggtggttgcaacgaggcggtggcacggggtatggcgaagatagtggtgcgcggagatttatgtaagccggctgggcaaactacttgctcgagatcaccgccgatttgagctgg

SEQ ID NO: 8708 - DNA, 358 bp, Zea Mays
ctatcacaatattggtcaatctctgttgtactgagttaaaatttcattgcctgcatgtacgaagcttctgatctgcataaattgcattgaaatactatgtaaataactatcgacatatattagaatgatacaaatttgtgaatgaaattttttaatagtataaaattaacatttctctatattgaatgcggggtatatggttcatggagacccaactacagtagtacaactgcagtggaggaatacacgaagtccaatttttctagagaaatcatgcgctacagcattagtggtagtgacatctgacgatgcagtctgtccatccaaaatattcaatatatgagatgacacgcaaatg

SEQ ID NO: 8709 - DNA, 483 bp, Zea Mays
caaggggtggacaaaggaggccatgaccccacctcaatttttatatgttattatatctagatttagatatacataaaaaaagttttatatagtaggtacaaccaaatctaatgaaacctaattttgatctaactttttctcaacagtccattgctcagcccgctctccatccaagtcgttcgattccttcctctagcgactagctactcgacctactcgtggctcaatcgctccttcaatcatgactattcgtattggatgaccaaactcgtccgctactagtgtcaccttgtcttctcgtcactcgttagttcatcacgttgtctggatcccacatgcagcgccactactttgcctcctagtccgtatcgactggtgggcaagctattggtgggatcctgtcttggcaccatggtgccaccaccatctgccctcactatgtcaccagggtcccaccacgtcgtcgcaatgcaacaattgttg

SEQ ID NO: 8710 - DNA, 539 bp, Zea Mays
gggtgagtcactagcgcgatttactgtggcactcaccggttgaggagctacggcagttatcggtgagctggtgtggctagagacgacgtggtgaaaggctcagagcatggcacaatcgctgtgaagcacgacaactccggtgatggccataaggccacgtcgccggtgcaaagggtaggggacagcgaggccacaatagctcatacaaatccgcgacgagatcttttcatggtgagcgaaatccacacgcccgcagcacgaatcccggcaaccaacacaaatccggtcgtgcggaccgccggcggcgagattctgagctggcggcctaatccagatactgtaccatcgcggagtgtattcagttgacctgacagaccatctttgagctcgattttctcccaaattcatatggcaacataaccaatgctctgcagcaaagttgtagccccacaaaccatcttcatctttgttatagcatccctagatagattctcactggatcatggtcgaaatggctctcaaacttggttctaggccac

SEQ ID NO: 8711 - DNA, 659 bp, Zea Mays
acggtgctaggtgtagcgggggttggcgcgagtccacggggcatggtcttactagtgattaggctctaaggattcctgcccacgacacacggtggtgctcagcgaaattcacgacgtctgtgagcaattgaggcggcgccagtggctaatcccgcaaggcgcgaccccgaagacctacacggacctccggtgaagcgcccccgaccctcaactctccccgagcggcccgacggtggcgattgttcgcggcgctaccctcggcaaccctctttggtgtttgttggcaatgacgaggtggcacgagatgctggccgaggattaaagcggacgcggccctcaacatttgtaccccaaagttcgagtccaccccgaggaacacgacgaccgttggggagggctgttgatccaatctcagcaagagcggagaagtcagccggagtttgaagatgacggagtggatgctaagcagtggccccgacgtgcagtgagggaaaaacggggagaagagaaacaacggacaacactgcaggggaggttgacccccagggtccataggtcagggacacaaaaggagacgagggtgagtgcatccagacgtgcgggcccacatggcggtgactgaaagggaactaacgcgcacagggagaccgacctgcgag

SEQ ID NO: 8712 - DNA, 674 bp, Zea Mays
atccttagtcacctccatgggagtcgggcaatcttgaccaacctcttgacaccgaagaccgccttccaaggtcgacgatgcacgagatgctgcccgggatacctctaatcccacatctggaatgccagagcaaacatccatcatatcaccatcagtcggctctgacagcatatcctcaggaatgacatcctcaagggtttgatcaaaatttgttatagataaatcctgaaggctaacgagagcagacagcgctggagaaggaatatgactatcccctctattacctctataacgccggctattcttgcgaattagtggaatttattcttcctcttcttcatcctcataaaaaatgcggacaaaagatggtgcaggatcacacccattggggtcagcttcatcaggatcacacccattagggttagcttcaacaggaacacacccattggggtcaaccggcgcacggtcacacccattggggtcaacctcaagaggcacaccaccagtgggatcaactccagtaaagacctctaccggtactttttcagcaacaggagcggaagggccagcatcttggtccaagcatgacaatcgccgaagccatctctttttcttcttcttctcttcagcaggcgcagccagacgactgatctggcaaaaacgctttgggagag

SEQ ID NO: 8713 - DNA, 781 bp, Zea Mays
gaggacaaccccaagcccgcccttagccagaggccgcgggaaccacagggacatgagcatttaatgcgtttacctaccaaacgtgacaccgcagtcaagcaggagcgacaagaccacagtcccgtccaccttcaccaactacgatgacgcatgcccgggaataacgactactgcccccatgctgtctaccgagttcgaacaactccagatgggacacacgtacgacagagaacggtctgaccctcggaggaaactctgcctcacctgaagccgccctcatcctcggagcaaactctgccttgttcgagctcggcctcgaccacctgcccaccctcgcaaatcccgcagaaggccactccttcaactgttccctgcacaactgcaaaccctagagaaggctcgaccgtggcatcggggagactttcgcctcacccgagcgtggctttggccttgatagtatcgaaaaaaggacgcccgacgtcaccagaagctacaaagctgacgtcggttactctacgtattcacaagagcgttttgccatacttaccactgctccaactactacgactcggacagctcctccatcggtcaggcttgatacatgcctgagcctagaccttggccttggctctctgctcaatcaaagatgcaaatacaggaaccagacatccccttcccggctcaagtcagcagcaggtacggggcccatatcaatggccatgctggctacaagggctcggacgcgccttctccccccatatgcgacaagccccaacgctcc

SEQ ID NO: 8714 - DNA, 1154 bp, Zea Mays
atttttgcctagtgaatgcattctaggtgtgtcaaacatatgcaatgccaatgcttatgatgccatgctcaagttttagttatagtaacaccaggggtgttacaatacacatcctcatacttccatcctttttggtaatgaaaagaacgggtgctccccagggagacgaactgggacggatgtaccctttttgctgtagttctgaaatctgaagtttcaattctgccaattcagtgggggccatgtggtatggtctctttgcgatgggcgcagtgccaggaatgaggtctatatagaactctactcctctctctggtggcatcccgggcaactcttccggaaatacatcctcgaactccttgattacagacatgctctctgctgttagattaaacattattggatcgtttgcgggcggttgggcttgataggaaactgcctttccttggtgatctgtgaggagaacagtcttgcttgcaaagctgatgatacccttgtgcttagctagccagtccatccctaggattacatcaattccttgggatggcaagatggttaagtctgccaggaacactaccccacttaagagaattctgacttgggagcacctgagtttgcacaggagtctgatcccggggttcgggtgaccaaagggatagccaggggtgtagaggggatgccatgcttttccacaaacttagcggctataaaagaatgggatgctcccgaatcaaaaagcacagtagcgggagtaaattcaacaaggaactcaccgagcactactcccggggcttgctgagcttcttgagcgtcgacgtggttgacccgggctctgccctgatactgagtcctgctctgctggctgtttgaaggaagtgccttaaaggtaggtgccgatggaatcttggggccattcaccgagttggagtaggttggtccgggtgccttcaactgagggcagttgttcttgaagtgactggggtctccgcagtgccaacaggcgtttgctggcggctggttgcttgtaacggagggtgcctgaagggagctctggctctgctgactgtagcgtgatggagtgggtccaggtggtttattgaagcttggtcccctgggtggaagcccaaagggtcgagctctctggtgacgttcct

SEQ ID NO: 8715 - DNA, 456 bp, Zea Mays
taaaaactaacctaacctacacatatagattgcgatatgtttgggggagaggggggagagagagagaaaccaaaggtttcttccgctttccctcctcgccatggggcgtcctagatcgaggaggttcgcgaaagacacctaccccgaccatatatactcatcgaggtttcaccagagaatccacatggtgtcatatgcctgagggcaggggcggaggaccaaatgtggcgataccttagcccgacccattagcagcactagatcgaagacccttggtctttcttcgcgtctgacatctgcctagcttctttgttgcgtcgtcgttcgcagacatacacagttgctcgcttctccgtcacccgtttagcttcttggctgcgtcgatgttcgcacacgcaggtgcaattgctcgcttctttctttatcgtcggctatcgctcgctcgcttcgcctccg

SEQ ID NO: 8716 - DNA, 911 bp, Zea Mays
gaacaagcatgtgcaaacaacggttttcccctatcgtgtatgttttcaaaataatctttaggtttcgtgcgtggtgcgtgtaaacaaaattatatgaatttatgctcgacttcctacttatagttagcgcggatgcagcctcaccgcctcttgaacgatcgtacgtcgagctgcttaaaggtgcttgtgtgccacctggattattttctctacgtacttctaaagttgtccatacaacatttacacatctttgcctatagagacctacaaagatcgctcatactatggtggcccatcagacgagtgcccacattgtggcgccgttttctggtttcaggaacgggtcaagagtctgtctgctgtttcgcagcgcaggcttgtgtacaatctttgttgcagaggaggtaagattgttttggagccttacaaatgtccaccggcacccttatgtgacctactgcgattcgatggtgatagtcgtgcaagaaggttccttaggcaaatccgctcatacaattcccttttcgcgtttacctcactaggtgctgtcgttgatcgatcgataaataacggtactgcaccttatgttttcaaaatcaatggtgtcgtacaccatcgcattggctcgctattgcccagtcatggattgcgcccacaatttgctcagctttacatatatgacactgaacatgaggtgcaaaataggttgggcatgtttgagaatgaagctgatgtccatgatcgtccggattcagaggtggcccgtttattacttaacatgctagatgagcataacaagctggtcgcggcatttcgctttgctaaagaacgtttacacgaagagggcgaccaaaaggtgacgttgcggttgttaggctgtaacacacgtcatgacgcacaatacaacttac

SEQ ID NO: 8717 - DNA, 595 bp, Zea Mays
agacgatcgagaccgtcagatctgacccagatggtctagattagatccccacttcaattaaaccggtatgcattccagtccacgagatcagagatcaacggtgggcacttaatcacgagcgattccatcccgagccgcaggatcacgatccaggggctgcgaattatccgcccaaccggtcatccccccattgatctaacccgctcaaacctaatcaaacggccataaggccatcttccacctggcaacacccaagcagcggcgcccacatccccgcagcggcaagaagcccgccggagatcgcccaccaccgcaccacatgccccaaccaccatttcgatcgtcgataaacgcagaggagaaccacgtgaacacatgagggggtacctttctggcagaaacggcaggaacactgtcattcacggcagggagcggacagcgtcgagggaagaggcccagtgagcgatttggtgagccggtgtacaacttcgtgcaggtgttgccacaacgagcttcaacatgccccggaaacaaaccaggaccacacaaggctctgtaaatagcgatgaaggccaaggatagcggcagcggcgtc

SEQ ID NO: 8718 - DNA, 571 bp, Zea Mays
cttgggaggctggcaaattatattagcggaaaattgaacgtgtcttgttagcggttgggatataagtacccttatcgaaaattaggtaagttttaatttctccaaaataaatggatccaaacggtcccgtaaaatgaaatgtgacgtggtggtaagaaggctatagactgtgattaaaattgagtaagattggagatatgacttccaattaatcactctccttgatatgcggattcatgtaaaaacgactagtatttcaaaacgggagggagtacttaaaatgctgctttgaatactcgccggacctcccagtcaatcaaaccagagacggcccgagtccgggcatgtaaacaggctcggctttgaaagttcaacgcgtgcaacgtctgtccaacccgacgcggacgcatagcaggcggcaggcaagacgcgggacgcgcaggcggcaggctttattttggctgcgagcacacggtggacgctggccggtgcatgctatgaatcccttggccctctgaccccctctctcctcagacgactagccgccgaaggatagtccacggcatcgccg

SEQ ID NO: 8719 - DNA, 560 bp, Zea Mays
caatgcaattaattaggccaggtgaggaaggtcgggcatcaggcctcagggttttaatttgttagctcatcacgggcactgtagtggctgatcaatcgagttagaggaggaataatcagagatgcatgaatgcatgcgcgcacagggacaaggcccattcgaaaggttgctgcggctgtttcttgcacgcaacaagcatacgtgctgctgctagctcctgcatctttcatcagatcatgatcacctcacctcacctggaatgttgcatctggcaacaaggcagctctgctgcttctggcgccaacaaggcgggtgctcggcgggcggcagcggccaaccagcatcagagtggacggacgtcgcgccaaccatgcattatatttccaaacatgcactccagtccagcacatgcatgcagtgacttgaaggattcttctttccagactgttcatctagctctcctccgccgatcccttggcgcgcggtacgtacggtttcatcgagcagcagtcgaccgccggcgcccggccatgccatggcatgcagctagctcggccaca

SEQ ID NO: 8720 - DNA, 642 bp, Zea Mays
gcaatgtctaagcgaaaaacctgcatttttgctatgtatgcactctccaaattaaggttagccgaagtttagcagagtagcatgctgcacaactgatgatggatgagtggtcacaagatgtagaagaaactaaagcaccttaataggttgcacaatggtctcatgcacacgccctttcttgacatggtcccccactcccactcgtcttagtcaaattggatgagcatcttgatcctttcaaactacatgagtccagtatcagccaacctaattcgagattctcttattacatgtagtggtaaaaaagataatgcatagaaataaaatatatacaatttcatcaatggtaaaataacttattgaaatttgtgttgagttacccactggtgattgtatactggtgcacaatgcaacattatattcgagcttgaagacatcttgagaacagccaccaacaaggttgtatatcaaatgttcgtgtgtcaagccctgctcctgaataattactgccgcaagtcataaaagtcaccaattacagctagaattagaataaaaattgtactattgtttcatttcagctattagtccaagcaatataagaccatattatcaatcgtagtgtccaatatcctttgatcatca

SEQ ID NO: 8721 - DNA, 968 bp, Zea Mays
ggggcagtcacatataccttctcatggtggtgctcgttacatgttgactatcattgatgataattcacgcagagtttggccttattttctcaagcaaaaatcagatgcctttgagtctttcaaggtttggaagactatggttgagaagcagacttagaggaagttgaaagttctgagaactgacaatggtatgggttttgttctggtgattttaactctttctgtaggaaggagggcattgtgaggcaccacactataccatatacgcctcagcagaacggtgtggtatagcgtatgaacagaacaataatctccaaggctcggtgtatgttgtccaagtcaagtttgagccgaaagttttgggctgaggccgcttccactgcttgacatttgatcaattgttcaccatccactgttatcgataagaaaactccaattgaggtttggtctggttccccctatgattattctcagttgagagtgtttggttgtactgcatatgcacatgttgataatggtaaacttgagcctagagcaattaagtgtgttttcttgggttatggatctggtgttaaagcatataaattgtggaatcctgatacacagaaggcatttttagtagaaacgttgtgttcaatgaatctgctatgttcccttcggttgtatctaccagtgctactaaccagaattctgagtctatcagtgtgcaggtggagcacgggggggggggggatgttgatgatcatgctccaccatctgttgaacctgttgaaaattcatcacctgttgtggagtgtcatcctcagtctcttgctgaaggccgagctaggaggcagatagttcggccccaaagactgattcaagagtgcaatgttgcttttgctttggctgttgctgaagaagttgataatgttcaggaaccattgaattattcagaagctatattgtctactgatagtgaaaagtgg

SEQ ID NO: 8722 - DNA, 621 bp, Zea Mays
aaaagaggaggcttcgacgagtgtcatgtttgaatcaggatgccggcccttctgctcctgctgctgaggaagtgccagtggaactttttactggagcagatcccaatgggtgtgaccctgctgatgctgatcccaatgggtgcaatccagccagagctgaccccaatgggtgtgttgttcatattgttgacgaggatgaggaagaagaggaggaaatccccttaattcggaaaaacagtcggcgctacctggtcagtggggggagtagtgatattccttctccagccttgtctgcactcgttggtctgcaagagttatccatagcaaattttgatcaggctctcgaggatatggttcctgaagatctgctgtccgagccaatagatggtggtatgatggacgtttgcactgacattccggatgtggggttagagttatctcgagcagcgtctcgagcctcatcgaccttagagtgcggtcttcagtgtcaagaagctggtctaggttgctccattcccatggaggtaactaagaatccttcagccttagaagtggttgttgcaaagaacccagtccccaaggatggcgccagcgatttcccagcccccgagggtgttgccg

SEQ ID NO: 8723 - DNA, 414 bp, Zea Mays
gtttgtcttcgcctgcatggtttgtactagctggagtattattagattacggccagccaatccttgcgccttgccgaataatgaaacaagcttctcgtcgcccgacctgtctgtttctgcgactttttttttttgctgtgcctgcgaacaaagctgggcctgtagctgtagagctacggaacggaaagcaggggatgattgaagcggagccagtcatttgccttaccgaacagccagcaccgccccaagtacgtgagccaggcagatgcagtggttgggcccggccactaaactaatccccctagtttagatgattgacgggagcggatttgtttacttcctcccctcccatctctgcaatcatttgagctcctctcgctcgctgcccgtatccaaaattccaaacaccacggc

SEQ ID NO: 8724 - DNA, 927 bp, Zea Mays
aagaaaacacctcttacccccaagaaacattttctctcctttccccgatattaacagacccttcttttcttctaccagatggaaagctcttgggtcattaggacatcatactgctcagaggaggaaggctttcctcaccttctacggagttgcggactgcgcatggggatcagcaagaagcccaaatatgtctggaaggaataccgcgaaaatggaatagagaaatactctatggcagtctacctaggagaaagccgaagctacccaaaccacccccccttccaagtcaccttcatcgggcaccgcttcccagacacttgccaaagtgttgccggaaaggccctcaaacagctatgccaaaactacagcagagagatctttgaaaccccccttcgttatttcccacccaacaacaaaaatacccccacctggaggaaaagacttcaggctctgtcagggagagaccccaccgaggatgaccccaccattgtctacatggccggatacctccacaccctcgatacccactacgatgatctctcctcccactgcacccacctaaactcccgggtggaaagcctagagcagcaagtcaaagagcttaagaaggagaaggcatctctccaagagtgtctccacatagcggaaggcgaggaggccaacacccgtgaagcctatcgaaccttgaagatggactatgataagaagcttaagaagctcgcccccacaatgaaaatccggaagaaaaccacgagcaaaggatgccagacggaaaggaggaagaaagctcccccagcaccagcttccgccaggatagagaatttgtccgatatcgaggatatgtccctcgctagccttgatgaccttctcaaggaatttggggacactctagaaaaggaattcggtagtacctcagggaacgctcgc

SEQ ID NO: 8725 - DNA, 677 bp, Zea Mays
tgaaatgtcaatgcatatgtaaataataatcaacgcgtgtaacatgctcgaacaacatcttcaacatatgtaaataatagaacatgaatagcttcaagcaacaattcttaaaatggattacgagaatgaacacatttgacatggatgtaatcaagtataggacacataaatcaaccaacggtataaaccatcactatttacttgccttcaccggggaatttagacaaagacctaagtacgatccggaagtccaccacctgtttttgacacacaacttagtgcacaaatccacataacaaacgctcataaacgacaccgcacctacgcacaattccaaacccgttgcgagcgacttatctccccatcacctaccaactgcagcggcgctgcttgacaatttcatatctctaaacttatgacagcagtggtaacaaacaaaaactccagaagcatctacataaaattccccacaagttttgtattcaaatgataattaaattccaacatctaaatacctccaaacagtccataagataccccctgcattctgtttttggacagcaacctagccgggttcaaacagcgatatctcctaaaatacagctccgaatcgagcgcataagtactcattggaaagatatgacaaagctctacatgattctcacactgattaccac

SEQ ID NO: 8726 - DNA, 709 bp, Zea Mays
cggccgccgcgatttgtgccatgtgtgaagtggataaccacgagaggtaaaaagatcgaaaggggggatggatcgagccgacctcaccatacctacttgaccggcaaaaaggtcgtgcgaccaccgccgtcgtgcccgctgtttacttcggtcacgacacgccttaagccgtatcaccacgtcgtcgcaggttgtggaggattacaagtgacggtcgtaaacttttgcccagtgaatgcgacgttaagcgaactccggtgactcacctttgctccggccgccagcttgtcttccccaaattcggagccaccgttgttggccattataaattgatgcccccgcctgctccactaatttgttacgaacccagtgcaccgctcctcgcccccgattaggcaccatagccggagaatttggattttccacaatttgtctgtcgtgtcgccgtgagacatcccaccatggacagccatcctcaggtccgctcatccccttttatgtcgtgtttaagcatccttgactattagtgttgctcatcgacccaaccgcttgaacattactgcactagatcgtcgggaacacctcggttcgtcctcagttttcgccgtcatcgtgggcaagggaactccggatcggattagctcgattaggacatggactagctcgcctgagatcggggatgctagtccgacgtataggtgtacattcg

SEQ ID NO: 8727 - DNA, 490 bp, Zea Mays
gtcaggttgagctagcacgggtgatgttgtcaaatgctgccttagtgtaagaaaagcatcctcacacttctgactccatccatactttactcctttcttcaacaattcagtcattggcttggcaatcctggagaaatccggaataaatcgtcgataataccctgccaatcctagaaaactccgaatctgctgcacagtggtaggaggtttccaattcatcacctcttgtaccttcttaggatcaactgataccccatcctgagaaatggtgtgacccaaaaatttaatttcccttagccagaaatcacatttggacaatttagcatacaactgatgatcacgtaatctctgaagtactgtatgcaaatgcttagcatgctcggcttcattctttgaatagaccagtatgtcatcaataaataccaccacaaacttgtctagttctggcatgaacactgagttcaacaaatacatgaaataagccggggca

SEQ ID NO: 8728 - DNA, 904 bp, Zea Mays
ttacataacactcataaacttcagataaacttctgtcattacacataacaagttcactaccactcataaacttcaaattacatacccaggttcacagttgttcactaccaattcagttacataataaggttatacaaatactaagataaccttacaaaaggtaactattacactgaatgcacatccagtgcccattcaacacaagcaggactgggctacttcatctgacgatccgaaagctcttcagaactaacatcatccagtgcccattccccaccgcccatatgttcatcttcatcaaattggttattgaaatactcagataatggtggcgacggaccagcttcaagatcttctaaacgatgtgcttcctcctcaagtgactgagcaagctcatacacgcgccacattgcaaagttcactgacacctctttggccgtatctggcgaatccataatctcgtttccggccaaatcttccaactacaaacatttttgcaatggcttgtgcgaggtcactacgaaccgtttcaaatcgggttatctgcgaagggaaaccataccgacattatggattaagatagaactaaaaatttatacaaaccacagccctaaaattggtggaagggaaaccttaccgacactgagcgaggtgccgagcactgaatctgctgctggggagtacatcgcatctggctgttgttggattcgggatgttgctggtgagtttgctgggtgtggaacgtgcctgatgtggccacacaggtgacgggcttgctggtggagtgctccttgccgctaccgtcgcctgtaggcttggcgaggattgacactgacaaacgactgaaggcggcagccacttcggtctcactgtccaactcgagatcgacgtcgacgaccagccg

SEQ ID NO: 8729 - DNA, 838 bp, Zea Mays
tagagccactataggagtacaactttgcttaagtgattaagcattgttgttatacaaaaagtggagataattagccctaaagtctggctgtcagactcctctgagactgaacattgactgacagtgagttctaaggaactttgggctcgattcttgtgcaaggagataagcaaatgggcaagattcctatagcaaaattgtagctggtatatagggctacaagtttgttacagatggattggcaagttcttgcacaaaaatccaagatcggcgttgcaaatatgtctgtcaggcgctctgaatctggttttcgatggtacagtgttcggatcagatcgccaggttctgttcatctcgctgccggtgatcccgcgccatgatcttcgtcgccgttgcgattcatgctctgtggggtgcagataactcataagggtaagaaatatcgcatcgtggatgaactcacgccactattccgctccggcctccgtactcgcctgagtcacgaccgcttcggataaactcaccggagttagccacctcgcgaccttgcaccatgttctttggtgctttaaccatgtcgcagtgagtcaccttagccacccgttcatcgccggtgagtttgccatggtgaacgccacgaattgcttgcgctagtaacctcttccctctccggccgccaccgcgccaactccaaatcacaagccaccgtctccgaatcctataagttgagcacaccctcggctccgctatgtaagtatgcacccaacacacccactcgtgccgccaattactcaccagagagcctcaatttgaaactttccccaattcggtctagagc

SEQ ID NO: 8730 - DNA, 442 bp, Zea Mays
gcgggtgagggtcctcgacggcctccggtgagtcaagcgttctcctcgccatgtagtctggttgcgctcgcgggccatgcttgacggggttctcggctgcctctgctacggctggagccactaggctatgctaccgaactgctcgatatctgtctcgcacgcatctgctccctctttgggcgtcgcaatcatatgagcatggtcgtggcattagacggcgttaggtggtggctgtgggactcctcttggccagcagcggcgacgacaacgatgacgaggtgagcacgctccaccaatcccatcctcggctccctcatttgcgtctatggttgcggtttgccaggtgggacagatctggtgcgtcggcccatgcgctcgcgatccggcccttcccattctctcctctccctctgcgaaagcatgtgtggcggaactgcccgaa

SEQ ID NO: 8731 - DNA, 512 bp, Zea Mays
tgacttatgaacgctactcgcctccaataattattgggctgcgataacgctcatacaagatatctaatcgatcaacaagacatttatttatcccatgggcatggaatgtgatgattgacaaagcgaagcatcagattgccatacaacaaaaatcatgacaacaccgatagatactatccactaaccgtttgaaaaaaaaccaaacttacttctcgcttgccactacatcactcctcaatcacacgaccatcatgagcatacttcacacgactatataatagcgatctaagcgtcgtgttacacaatacatacatcctttctcgttgcgagtataaccataatgcggcatatacccgcactcctcaatcaattatcttacgccaccactaataaaatacaccacggcacacacaaatacgtgtccccatattacgcacaagacatcaaccgcacaagtgactccaacatgactaatcataccctcatttgcatcgactatcacaatcaccgat

SEQ ID NO: 8732 - DNA, 489 bp, Zea Mays
tagcgacacaacacactacatgttttgagaaactaatcattgctatttgctagctcggtaatgagcaaaatattttaaataaacacaaactgaccaggtgagcagaaaggcaagtcgaagagaaggtcctattaaggttactgaatcaatgacaatcccactcgctcccataataatcttagattgtattggtttttaataccctgccatcttactagaaatttgtttgacaacaacagttcgttctaaacctaccttaatttagtattttcaacggttcgttctaaatctgccttaactttgtattttcattagctacttacaggaaacaataatactttggtatgcagtcttggcatgacatagaatgtaggctcataaataagatgacgagtgtgatagaccttttaggaaaatgatatcttgagacatgaactggagttcctgcgcacactcgcacgtcaaaacccaaggcagtccactccaatc

SEQ ID NO: 8733 - DNA, 410 bp, Zea Mays
tgagaactcgccgtcgtcgcgtgcggaccgcgtgatggggacgatggggtcctagccatcagatcgtgtctgtgcggttaggattgagtgtagcgtaccagttcaggggatttagatctaggccattgatccgtgggcggacgcgagagattagtccgcgtgtgaaagatcactggaccgttggatttggatccaatagcgtggattagatcgcgggttcggggaaattagaccgtggatctctgatccaaccgctcggggcgcgtaccggttcggtattggccaaatctaatctgagcccttgaatgtgaatcgaacggcccatgttctgcgatacccttcaccgtgccacaattgcataagagaccctggaccttttggaaatagaacccgccgtccagtgaacgctg

SEQ ID NO: 8734 - DNA, 1041 bp, Zea Mays
tcccccttgcttcagacgtatgagctcctctagcttcatctgtagcaccccttccagaacataatgttccctgaatgcctgtttgaactccgcccatgtgacctgatgtcctgcaggctgaatggctgaaaattttgcccaccaagtgctggcaggacctctcaactattgagcggcgaataggggcttctgtgttcagtacatcagatcaacccgaacttttgttccatcacccgtacccattcatctgcttccagaggttcttcagccttaacaaagagcggtggacgggtttcagagaactctaaatatgtggtgtgtcatggtccttgaggttgacctctgcttccatgttgctgaaattgatttcctgccaattcacgcaagaaacgcgtgttatcaacgatagcattgactaaggcagtgatagcctcagccagtgtaggaggtacaggtggcaggttcagagtttcctccccgccgtgggaagttcccgccccgtcatgagcacgagttcttggcatttgaggaagaaaaacatcctaaattattatatgccaaacatacaccatctttattacattgtgctaaaccggtaataattatacatactcatggatacaattcgacttccttatttattttacataaggacactacttgtactatactactctaattatcttcatccttggtcgctccactaccagcttcaggagatcgcttatccgcaaggttcatggaaggaggggctccaaaaagatccaactccccatcaggtcctccattagctgctccacatggtccagctcccattgctgcaatttctggtggcacatttggatgcagccagtcatataacacgtgcacctcttcatgcagggtgttacaatatgcttgcatattttctagggatgcgcttagttccgccacccgggctagagcctttccctcacaatcccaagcgaaagagcgcgaatttacgacctagtcaatagccgtatctcgttccgcaatttcctgctgcaagcgattaacttc

SEQ ID NO: 8735 - DNA, 453 bp, Zea Mays
cccgcggccacccctgcctcgtggagctccacgccgcgcaccatgtctcccactcctccccgtcctgcccctccctctgtctctgcgctcggatctgcgctcggcctcctcccttcatccgtctctgcgctcggcgccctcaccgcctctccctctgcctctgctccacctccccagccgctcacaaccacgcgtcctcgcctccccgaccagcctccaccgtgacatggttgccgcctcctctcacctcctcatctcccactcctcctagcgcaaccgacggtgacagggatgaggttgggtgcggtgtggtgccgctcgatgcgctctgctcctcgcccacgctcgcgcaacgcaggaccttccccaaccgcgacgacagatcctcatccacacactcgcgggcgcctccacctctctgggttcccctctgctcctcgtgccccgcagtag

SEQ ID NO: 8736 - DNA, 362 bp, Zea Mays
gttttaacttgccagcacacgctgtgttcttcggcttcactgacatgtgctgtgggtggggcgtgtaactaccgtttgcagagcgatctctggtaggagcatgtaactagcgtgcgtacgtgacgctgtcatgcctagctgctccttggccagcaaacgtactacacaccggagtatacgccaaatcgacatctactgtatcagtcagtcagtcagtttcatcatgcgagacgccggtcctggtcatcctcatcatcctcatgcaatgcatgcaccgtggacggaccgtccaaacgaaagaccgcagccagcgcggtccagacggatccctgcccccctgccagcagagagacgcgtacgcc

SEQ ID NO: 8737 - DNA, 507 bp, Zea Mays
gaggatgttaaggaggttattatgcgtcccatatggtcccgctttgaccttcgaaagctgaaggttgaaatcgatgaagccgccgaagcatgccagaaggcctttggtactgtatgcttcttcattggtacaagagatctaatccaagagcatatagccttcagagtatggccgcttgtagagaactaggaaatgccgaaggagactgtcaccgattctagcgaaggtgacctggttcgactgaaatatacattcagatatggagataaatttgatttacgaaatgactactagctgaaatgtatcgaagctacaagtgatgaactgcttgggccatattccaaagtagaagataatgcattatccacatccttcgggggccggggaaaaaggagattgaacagagtttttgatgccattggttttgtttatcccgactactgctacccgctgcgaaggacggggaaagaagaggaaaactgctgctttggccaaaactgctgcttc

SEQ ID NO: 8738 - DNA, 448 bp, Zea Mays
caagtcacgagcgcgctagggccgtcatggtgatggtggcacactggaggaagcgccatacatgaagatggtgacacggtcaaggcagacgatgaagaaggtcgatgctgaagtcgacattgtcgaaccatcatggccaaggcgtgcgccaggtttgccaagcccgagaaaacatcggtggtgaaggcatgcaaaggtgttgccaataacggacgtactaggtagagggcagcaaccatgtgtcagtgtgtgaagggactagcagagaaggcctccacgacgttgagatgcacagaagaacaatgaggaaggtgttgatgtagttcacagttatcagagtggattctatttggtttaactatagctatcccatgtactcaagtcatgacttgtgggttctatttggtttaattatatcctaccctaacttgcttgggctaaaaggctt

SEQ ID NO: 8739 - DNA, 1225 bp, Zea Mays
agccactgccaaccctggattccccactatgacagataatgacagctaatagctatggcccaccatatggcctaaaagtagttagtcatccaacacagctgctcccgtgcctttcctcttctctaaatgtttcaccaagacatcaggccttcggagtcgtcacagagggttgatcctttgcatgttagtaaggttgtctttattaaatccaggcgcttatgtttctttggtgcagcgtgagttcgtgtgtggggtgtctctgtaaccatttctctcttcttttaatgaaaagatacacagctctcctctgtgtccgagaaaaaaaaagttttgcagattcctcagattcatacaggacaggagtctaaataaactataatccatgaatttaaaatctgctccataaaaggataaacacaataccttttctagaatccaaccgttttggagaaacaatgtaagataaattggtttccgtatatctgctgaatagataaatacacttccacccgaagggacaataccatgctgcttttcaaccatattacttttagtggaaatctcccatatagcatactcagcttcatagggaagtttattttcaagtctaagaattgaattgaaagaaattctccagtcatagacaggtacattcaaatctgtatgaacaacagaagcatcaattccaacactaaaccagaaatatctttcagtgctaacaggaggatggcaatatgagagcacatcttttttctcgagttcagcaagcttaagaacagaattccttgatgataccactgactgctttacggtgctttgcctagaaagtgaagagtgctgctgtttaggtatactctcagaacctagtgaacaaatctggctccagctatatgattcctctgatttttcagaatatgggcgaacttgcaagcataaatccatatccctaatcatcgatgtccaaggcaacgcagtagatgaatgaggactgacagtagcaagtacttttctaggaatttctgcactttgttcttgcgactgctgtctagaacgtacccaacgccttcttctcacgaagtcgtgtggtgatttagaagatctccaggatgatgatggccaattcaagttttgaaaatctgcagcatatgcccatccatcattatctacaaaattcaacctttcaattttccacggtgaggtccacctccaaccagatggaaggcca

SEQ ID NO: 8740 - DNA, 729 bp, Zea Mays
aaagccaccccacaaagtagggaattacgcctctcaaagcggcctggacctgtagaaaatcgcttctctctctgtctctctctcgtgctctcggcatgaaccatcgagctacgatcaacaacaccgtcttacccaaaagcaccacaagggtatcctcgagtgtgcggtcagacactagacaccgacacacattgcgtggtatccgaagcgttagtgagcgtaacgtcccgaaggagggtacttaggatttcaagctcagacttagcctgatctgagagacgggagacggaggccataggtagagggtgggagaggaccccacaaatattttggttcacatttttagtatgcgacatgagggcatggaattttgtggtaaggtcgtcatccgagcaccagacatcgtgctagaatgaggtattttttccatcgtggatgacataagtggcaataacatggtagagggggagcaaggagcgcaatgaggtccaatgagcgcctgggagatcacttgagaggctggccaaacaggcgcgacggcggacccagtcaccccaccccaagaggaacatgacgaagtgtggaggcggtggatgagtttaaagtggaggcaggtgttgaaccactcgtgatctcggacgcctaggccaccagcatttttgctctcaagcaccatgtcccaagggacaaggcatcgcgacccacatgcaacatccttgcccgactaga

SEQ ID NO: 8741 - DNA, 601 bp, Zea Mays
tgccacgttaaaaagtatttatacgaaaataaaaagtacgatggttatcttcaggacaactacagctttcatagataggttactcgaacacgatctaaagctacatggagccctttctatgctaagctccctagatccaactactctcatagcttagggttcaaaggactaggagccatgggatgaataaggccaatccctaacgtggtgaggcgtcggggatacttcaatagaaagaaacgaagcaaatgaataattgttgaatgaaatatattgtatatatcacaaatatattatagaacgactataaacgtgtggcacaagatacaaaaggaagcttagggctactgcttgtcaccatggtctggcgctcttgcttcatcatagatctaatcatgggccacccgatccgaccaacccgacccgaccaatacaacgataggtacgtgccataatttttgacccgcaataaatcacagggtcgaatacggacaatgatttttgacccaaaactcgacctagcccgaaaaaaccaactcaaagccaaaaaaccaaatcatcacgtcaaataaggaggcacgggccaacccgatccgacacg

SEQ ID NO: 8742 - DNA, 333 bp, Zea Mays
cgtgggggacactacgacagtgaggaggatcggagcccctcgcccgaaccaccaggtccgcaagccttcagtcgggccatatgacaggcgccgttcccgacccggttccgggcctcaactaccatcacaaagtactcgagagaaacaaggccggagttgtggcttgcggactaccggctggcatgccagctgggaggaacggacgacgacaacctcatcatctgcaacctccccatgttcctctccgacgccgcctgggcctggctggagcatctacctcctgcgcagatctccgactgggacgacctggtcaaagccttcgctggaaacttc

SEQ ID NO: 8743 - DNA, 471 bp, Zea Mays
gcgtatgtattcatgcattccgttaatgtttggttcagtggatctgttcgcgccatcatttcaatccgtccccgtgaacggtgttgctgattgaattgagtgtatacttgccttttatttttttgtcagaaatatactaaaccatcataaaagttatgttcataaccaaattgaaactcgccagccttgaacggatcagaattttcatcttcgtggtgaaaacatagcatgtctgtggtttggtatctagctgtgcagccgatcagtttatacttgcctcttagtaatatatttttacagaatatgataatttgggataatggatatgttcctaagtaaattggtgttcattagccatgaatctgttagaaatttcctcttcatgataaaatagtgctcactagccatgaatcgattagaaattccttcttcacaataaaaagctggtttgtctatgctttggtatatggc

SEQ ID NO: 8744 - DNA, 358 bp, Zea Mays
caaaggttaaaactggagctagcatcgctttaactgcaagggaaccggggggaaaggacgtctgtgcggcgtgacgctcgcgcgcgcggatgaacggtggcatgcagtcaagaagctgcgtgctggaacagtagctgtagatggtactcttcgttaaagagggacagagagattaaagaattgtgcagggatgagctggtgtggtgtggccgtgtggtgcaggagactaggcttacaaggtatggcaggcaggcaggcgcaggagatgctactcttcatgaagctagctagctacccatgtttctgtggaggccaatgtgccgtcgaagcagagtcggggagcgcaggcacagcagct

SEQ ID NO: 8745 - DNA, 363 bp, Zea Mays
tgacgatatatgccggccgggtaccatgcacctgcagatcgatcggttgcattggtttggtcgggcgctcgtggagagaggagagagactcgatcgatcgaacaggtccaacggcgattcgctgttaacgacgacgtccaggttcatatcaggagtactcgtactccaaagaacatgcaaacgacagggacgtactacgacgacgacgacgtaccaatcatagtactgttcgaccacgacggggctgcaggaagaaaacacggcactgtgtgtccctgtccaaagcgccagcgcgcacgcgagtgaaatctttgtccagcctctgcctctccgctctccgcgtgtagacttgaggaccccggc

SEQ ID NO: 8746 - DNA, 1036 bp, Zea Mays
cggcgcgctcaccaccgaccacccagctgctcggaccggccaagactgacggcggatgtcaaaattaactacggggtgagtattaccgaccttaaggcgaccctagaacaggttctaattggattaatccgaccctggatttgcctgaccacggtgatggcgaacagcgtacacagaccaagatgttccggttgattaagtggggtcaagctcaatgggtcgagcagatgacgatcgcaagcatgtgtaggtgctaaaacatggactagaagagcgagggcggacctggaggcggctggtcacagcacgacgtctcacggtggcgctgatagatgatttgggggaagaatgaaattctccatctatggtggctaattgaaggtgggaatgggtgctctggcttcgtgataacatggcgcaacagaccgggccatcaattgataagggcactaagcggtggtgtccaattttgaaaggggagaccggcgggcgagaggagaggtgagtcaccggcgtgaactatcatggtgttccccggggtaatgcctccggcgacgaactgacctcctacagacatctactgcgacgtggtagatcttctaagcacgtggtgcggctacgatcgacagctaactccgatgaggacacctctgttcaatgcgcggcaagtgtcacggtgaacagtccggcgataagtctatatccctttcccgagttgagatctttccttgtccacggttatccgcaattcacgacgcacgaatcgtgacgatcgacgtcaatcgtggcgaagggtcaccggccgcgagatgctctgtatcagagatatttctgctactgtaccattggaatctctgtttgaagtgcctgacagagcaaaaggaagcgccaagatctttaatttttatgtgagcacttgctaatcttactgtaagagatttgtagctctataaaccattaacaattctgctattgtgatctggctcatcttctcactcctttgaacaagaatcgagttccaagttgatcaattctc

SEQ ID NO: 8747 - DNA, 643 bp, Zea Mays
gaacgaggggcggcgccaccgcctccgcgattccgggtcccttcccggtgaggaagaataaggcgacggcgtctctgcggcggagaaggcgattccgggtctctgcggtggagaaggtgaatgcgacgacggtggaacgacggggggagaatctctatgtgttccgcggccgcggtagagaagaagctcacgacggcgattaatctagggttcggcgggcgcggtggagaagaagcagacggcggcgattgagctagggttcggccgccgcgagcgttacgggtgaggtgagctgaaaaaatgtgtgctcgattgctggattcgtgggcccgatacacgtaaactgctggcgaaatcaacacgaaggcacatggaccgacacgtggattactgtatcataaacggaagcataaaacatcgtaatatcaatatttatgtggggactagtacggctgcccagattgcggggacacgatcttttcatgggcccggatgccacgaaacatgcgcacaccaaaaaaatgtgtaaaccgtaacaagattgagcataacacgtagttataattgacgtaagtaggtggtacagtgagccaaaaaagcctgctcaactggtcggtacggcgcggtccgcgcacctggtcgg

SEQ ID NO: 8748 - DNA, 446 bp, Zea Mays
gttgtagacacaattgtacgcccctttttcttataataagcataccgcactatctgatgggacaaggcggcttcagtaggaggcgacctcagcaccagagcctccacaatatccagtatgacggaaacaacaggatagggtgccatatcgatggtcgaatacatatgcgtagaaggacaacatggggcccacgatgatgggaagaaaacatgtcgtgcacgtcgagccccagggctgaaccatgtgaccagccgcgcattaccgcagggacatcagccacgaacccgccacatgaacaggagtaacgagtggcaccatattaagaagcactacttcgtacgaccaggagaaggggggccgccacaacagacgaaggactttttctacctttactctatctcactctctctctctctctaaaagagaaagcaatgtaaggtctgtcc

SEQ ID NO: 8749 - DNA, 506 bp, Zea Mays
ttttttcagaccagtactttacttgtaacttgaattgaatttggaatatgaactttaaacttgaattgaaatgagaaattagaaattgagaaagaaaatagaaaaagaaaaggtgagaccataaccgattttgggcccaaaagtctcctaacgtggcctgggaaacaactccacttgcccacctggtctcctgcgcgtgggtcccagctgacagtgttatcttcttccccgtggcgatctccaaccaaatgtgcgacttccgcgggcgcctcaaccaaactccgcccggatttctcgccgtgaaccaacaacattcactcggactttcccctcctcctgtgcataaaagccgatgctatgcggcttcctactcctgcagctcggcgcgctgaatgccatctctagcgcgcgcccccttctctgctctcagactcgacgcccgcgcagcaccgtgacccacacttcgtcgtcgactaaccctgctcgtgcgtcgttactgccttccc

SEQ ID NO: 8750 - DNA, 400 bp, Zea Mays
gttttcctacccactggtttgggttttgtggtgcattaatgcttgccctatgcggatcatatgactggtcattccattctggcattctaggagggaccagaaagtactcactcccacgtgtttgtgatattatattacggtgctagcgcgctataggatgtgacaggaggtttagctgggatggacgtgcatgtggataataaacatcctcatagggttctatgtactctgtgtcggactgtctggttagatatgcggaccttccggctacgtgcgcggactgtccagacatatggccggaccgtccggtaatgtatttggactgtctactttatacgcggatggtctgaatgggtcatttagggcttgcacagtacgtggcgactcaggtgcggatctc

SEQ ID NO: 8751 - DNA, 738 bp, Zea Mays
ggagagtctaagaggtttggtgttgtcaagttgttcctatattctcatgtgctgtcccatttgtaggatcttcaaagtttaggaattcaaatgtgagaagaacaacatgttattgtactgtacccactaaaaacagagaatgaattgagcaacataatttctttcgccacaagtatcactttcgtgtgcatactaattaattttgttttgttaatttgtgagtccaaggacctgtaccattgacccattgttatagtttctgaagtctctgattattgctgtcgtaactgtttgcatgacttcaccatgacgctttgtttggtctggtttcatcagatcacacagatcgttatcttagtttgtaccactgctattgttgatcatctggtaatttgtttgtttatttatggattccattatataactgcaagatactccttaggatcatccgatctatatggctgtatgtgaggagaatattgtacctcaagggagtgctgtcgtggtaccgcttcttccgtcatgagctgtagcttggctaccaaaaagcgccttaatcaacatgcacacaggcccaaagaaataagtgcccccggggcctaccagggatagacaatcaagggccttaatacagtcaaatgagatgcagtgcactggccacagtttaatggaggacaactatgctctgaatttggttaaagaacaatggtaattagagcacatattttgcatatgaac

SEQ ID NO: 8752 - DNA, 471 bp, Zea Mays
aaggtgcacctactgccgaagatgaatatgctgagattgaagatgttgttgacgaagaagaggaagattataatactctcatgccagccaaacccagtcacttggactttggaaaatctaccgtttatgaggctgatatgcctatgatgataaagctaggctacttcagagaagctgagaagaagctgattcgttttggcggagaagaaaccactccgacaccagaaaaagatgaggtggtagttttcaggagcttcttcagagcgggattgaggtttcctttgaacgaaatgattggagaagttttggaaaactacgagatctatcttcatcaggtgactcctaacgctatcgttaggctcagcgtcttcatctgggctctccgaagccaaggtacagacccgaatgccgaagccttctgccgagtgcacgagcttcattatcagacgaaggccagagaagatggtcttc

SEQ ID NO: 8753 - DNA, 404 bp, Zea Mays
gcgggaacgacaagatccagtagtactagcgtatacgtactaatgaaggttggtgcggtcgggacgtcgggttatagatgtcagaaagcacggttatagatgtaagaaagcacgtggtccgttagaccggcactgaagcacgttattttagcacgacacgagcacgatccgacatgggttaaagcgggcttgggctcagcccgacccgaatagcgtgccgagcccgacagacatttgagcatattgggctggctcgagcacgacacggtatctgtcgggccttttaaccggcccgtttattttaaccgcaaggcgcaaggccacaagtccccgagacccaggcagtccaaccccaaccctagcctaaccccggccacagccgtccgcgtataacattaacaccc

SEQ ID NO: 8754 - DNA, 384 bp, Zea Mays
gtctgggtgggttgaggcactgacgcgctgggcccacgggtcagcggtgtggtgagggcgcggaacgcgctggtcgctagatctcagaccaacggttctagttccatggaccacacggatcgttatccgcacacccgggccattcgatcaagactggacggttatgatcgggcactaggggctttgtcttctctgatcagccaggggcgaccctattcgcggtcgtggcggcgtagtcgctggaggtgaggcagaccaaggtttctaggggcgctaggggtagtctgggtagccagggaggttggggaggactaagtgagcactatggcgggatcaggatagcaagaaaggggatgaggtgaccgaacgatggagggggggggg

SEQ ID NO: 8755 - DNA, 698 bp, Zea Mays
ctcgcataccggccaattcgctcaatgactggcgtccaacttttgtcgaagccaaattcaagatctagcgagcgtttcccctcacctaattccaagaatggctacccggtttgctctggccacggtgacagcacggataatcaaaggaacaacgtgttcccggtgatccatggcggtctagttcaatcagaggggtcgaggagcttgaggaggacctaaggatgctagaacaatcgactagagcacttgaacgaacctggaataagctggccgcggtgaagatgtctctgcggtggtggaaactcagtttgggggaaatccaaaattagaggtctcgggtatacgattggaggcaatacttggtggcttggtgcgtgattatcctacggaccaggcgatgtgctcaatttgaagaaggcaagagcggtggccggtgaatttgggagagacgcgcggcagccggagaaacgaaaagttattggcgcagtggattcgtgtcttccgtcgtggcgaactcaccggcgatgagcaaatatcgcaagtcgagtcactgcgacgtggtaaagtgctttagcacgtggcgcacggcggcaatcggccaacggcggtgaggtcttatcccgatcgatcgatgagcaaggggtacggtgagcttagccgcggccggactcaagttgatccaggcgccaagatcttta

SEQ ID NO: 8756 - DNA, 762 bp, Zea Mays
ccgcaccccacgaccctcgtctcacgcgccttgcccgtgcttcaaataaggacaacgaaccccagcgctcccactcctagccttgcctgttttccccacccagcacgcagtagcgtcgtcgccgttgtgaaggtcattccaccgtcaccatcgatctccttccatcgcccttgtcaccatgagcttcgtctcggtgccaatcactcgggacttgcccccaattcccctttcaccctctggtttgctctgctcatgctcacctgtcgttccctggtgcagtcccatcactatcgtcgttgttcgaagctgccaccgtgtcgttgccgccttcgaggggatctggggtctcgccttgaggttaggaacctcccttgccccctccatttctctctcttgatcttgattgcacgcgattgctcaacaaagttcccaacatcaccgtcaagctgacccaccgtgaaccctcaccctttggtgcccctaccctggttcaaccccccgccattgggttccccgcacccttccacatcatcctagtccatcccaatagctctaagacccatggagcgcccacacccctcgtctccgatgagcatcttgtcgcggacacgggtggtgccgcctttggtggcaggagaaaaggactgaagccgaccgctcgatccctactgttaaccccagatccaaaggttggattctaactaactcgagcctaaacctaactatttgcccaagatccaatggtccatgctcgcacccgag

SEQ ID NO: 8757 - DNA, 497 bp, Zea Mays
atcagatcggtcgcaatggccaatcccaaagatcacaacaatgtcgtcctagacattaacacaaggctgactaactcgccgactgatgaggatgagaaattagaagaccacatgaaaaggctggacgaggaattccaacgacaacaggctcagataagcaaggtggcgaaaaagtggtacctctcgcacttcgaggtagatcaacaccagaaggtcgtcaagaagagggaagtaaagtacgattcactgtcagccttgctgcatcagctccccattgtaagtaacaccacaccattagccgatattcaatctgttaaaaattcttttgataatcagattaaaattataatggaggatatagagaatatgacgcatgcattagaaaatactcatacacctgattttttgtcacataaattggacactaaaataactgcgtcaaaagcatcgacgacaaatggggcttctcagtcccaaccatattatggtatgtcgat

SEQ ID NO: 8758 - DNA, 847 bp, Zea Mays
ggcaccaatcaatttgagggaaccgctccaattcttttgtcagtagaacctcattgtaagaaatcgaccagctagctgttgggaaaagcagccggttgaagagaataaaaaaacatctgattgaaagctcatcatcgttgcctagcctcagtctgtcctgtagctttgaaatcacaaattcatccttgctaatactcaaggaggaccgaagggttgccgcagtgttcgcttcatcaatatttagtggcttcccaccacccgaatttggaagacccaatatcagatggacagtctgcttggtgattttgagttctttgtctggaccaatacgaagagtcatgtctctggggtctagcttctgcatgagccaacaaagaaggattgatagcagcgggcggctcgatgacactatcaacggcggtgacgattagagttgagggcgtgcgggggcggaggaaggcaaatcgcactggcgggaggggaggaagacgaatcgccctgacgatgcttgaagaatcgcggcgagtcggccacgaaggttgaccgcgtggggagttagggtatagaattgtttgaccgcgtggaaagtggggtagtgggcctaatcctgtatttctagaacgtgggttcggatgaagtatttatgctaaatcgatattgtgcataaacaggagattgaaatagcgtaaacatgttttgactatggaagaggtggttgaccacgtggaaagtgggcctaagccgctttttctggaacgagggttcgggggtgttactctgtttacgctaaattggttttcggtttacgctaaatcggttcgcttgcataaaaagtgagcggacgtgg

SEQ ID NO: 8759 - DNA, 351 bp, Zea Mays
gaccaacacaagtctaggacctagaagaatccgctggaggtttcctcgaggtgatcaaacaggatggtggcatcctagaagcggaggggcaagggagcgaattctttcacgctcgaagttggagcctaagtgaagcaaggcatcacccctcaaggaaggtaggagaccaacctggagcatggtggcaacagagatgagcacatctcaaaggatggcgagatggtcctagaagccgctttcaacgtaagcaaatagaagtccgcttttcagggtaaggtccctaggagggaccaaagcttcgacgaagtgagtgtggccatcgtagaccacctactcaggactcccgcctac

SEQ ID NO: 8760 - DNA, 613 bp, Zea Mays
cttcaaacaagcccttcttcatgtcaaggtgtccccagatcagtggcatgctcggttcggccatccctcgaaccaagttgttaggtctattttaagactgaataatcttccgtgctctaaggagtcgagtcccaccatatgtaatgcttgtcaattaggcaagagtcaccaacttccatacaacaatgctattcatcgttctacacgtcctctagaacttgttttctctgatgtttggggtcctgcccccacatccgttggtgggtattcttattatatcagctttatcgatgactacagcaaattcacttggctttacttgctgcgcgatagaactgaggtccagcgtatcttcttgcagtttcaagctcatgtagaacgccttcttgatgctaaaatcaaatgtgttcaatccgattggggtggagagtaccaaaaacttcacaatcaattttttcgttcgcttggtatttctcaccatgtgtcttgtcctcacacccaccaacaaaatggctcggccgagcgcaaacatcgtcacattgttgaaaccgggctctccctcttagctcatgcgtccatgcctataaaattttgggatgaagcttttgtcact

SEQ ID NO: 8761 - DNA, 347 bp, Zea Mays
gccagacacattcacgtgaggcttcatacaaggcaataatctctgaatgattagtggatgttgttactagagtttgcttggatgacttccaagaaatagcagttccaccattcagaaatacaaacccagtttgagaccttccattgtgggggtctgaaagataaccagcatctgtgtaccctacgaggctaggatcttgatttcttccgtagaatagaccgagatctgtcgtgccatggaggtatcaaagaatatttttgattccagtccaatggcgtttggtaggggatgcactatatctagcaagtaaatttactgcaaaagcaatatcgggtcttgtattgttt

SEQ ID NO: 8762 - DNA, 556 bp, Zea Mays
tattctccctttccttatctccataggcggaaaagaaagagataggccttggagatccaggagtgatgtggatgattggatggtgagatgacaaatcccagtggcatggacttgcagacttatagctgggccctaaatggattttctcccacaagaccagtaagggagtcctcaacagaaattgctcgttgttaactttttaagctccatgtcaccatgtaggaccaatatgtaaattttttaaaattttcctttctctccaaccgcttctctctcccatcgtatgaacccaggcaccagcaggcatatgtactttgcgtcgctgctgctgccccatcgccactaccgaccaggacaccaggtgggtcggccttgtctcttcttgcaccgccgcccattggccacgtctcctccgtgtcgccgcactttcggacctgcgcgcaatcggccttgtcgcccgctccactctcagccatttgtcagaaatttggattcttagctagggcacgttgacggtagggcacccacaagcacacactggccagtttgcccatgt

SEQ ID NO: 8763 - DNA, 656 bp, Zea Mays
ttcagattcagttgtttgaaatttgggtcagaaaaaatgtgtcttagtagttgatacttgcttttttctagactacttgatcttgttgtaagcctatgttactaatggaaccaaatcaatttggtactgctttgaatatgtccttacgtgctctgttcatctgctaggattattgatgcatctgtcttggtattgtcataaagttctataaaaatttcattgtcgttcacttatattaggagaggatgggagggatggggctgacacttgacaactttcagcagtaagtatgaaatctatgtttctaaaatggagtcatcatttgtagtttggtgtttttatctttgaatcaccctttctgaaatttcaagattgacgtatttattctccatctactctttgacacttacgtgtaaacattctgttctttatttcttgctcgctcactcactaagcaaatgtatcactggcaccaactttgtcagctttggaaaacccaggagttgaaatccatgtaaatgatctcaaaaaatcatcattaaaattaaacaaatcactgaacctggaagggatcagatcaatggtggaaagtgcgacacaaaagaacacagaactgtgtgtaccctcatgcatattgctgtcgcatctgtacaaag

SEQ ID NO: 8764 - DNA, 751 bp, Zea Mays
tgagcagccccacggagaatgcagcatgtccaaacacgccaaaagggcatgcgtaggggttgcgtgcagaggcttcgaacgaccacgcagagcgcacacgcccggatgccgcttggccgggggaacagagggaggacgcacgggacaggagagagggagagaggagtggaatcttacctgcgcatgaggacaggccaccgcaggggctcctaggctcttcgtcgagggacctcacgacacacagcgaggggaagctccgagacgatcgtcgagcggttgcacatagcagtgcgagcaggagcgccgagagaaagcggagcacggtttggagagtagtgggcgttctggaggggtttgctaaggcatcaagggcgagcaacagttgccggagtccacatgttgtgggcgcgagtggaggagcagttatgggaggagaggggaggagccgacgtgcaggccctgcatgcgcgtccgcgagcacgagtgtggctgatgggtcgggcgcgcaataaatggtcctgtgggcgaatggaggtgaggtattcgggcgcaaaggcgaggtacttacggctgcctctgagtgaaactagcacgcgagaaaaggacaacggtttgggaatatgaagctgacacacgagctcggaataacaacgagaggaataagcgagggaaaaatggttgcgcgcacagcacggcgtttgcgacgaaagacatttcaatgatcccgtgaaaatgacacgagatctagaac

SEQ ID NO: 8765 - DNA, 292 bp, Zea Mays
gatcaaaaaccacctcattcctgctaagccatagagcccaaaccattgccgccacccccatcataattagggttttgtcatgtttactgaaacccatcaaccaattcccagcaacgtgctccatatcccgagggatcggcagaccaaaagtggctaacaacgccctccaaatgaaacgagcgtaatgacactcaaagaacaagtgtctaatcgtttcactattagagcaaaacacacaaagcttattccctttccagttcctacgcgtcaagttatctttagtcaggatgac

SEQ ID NO: 8766 - DNA, 806 bp, Zea Mays
tcgacattgatgggtcgatagagattgtatgttgtgtagtagtgagaatgcatcgaaaatgtaatagaatgaaacagattatgaaaaaggaaacaagttagaacaagggaccacaaaagacatacaaaaataaaaagcacaaagatcgaagtgctgacatgcatcatcacaaaagatataaaaaatagctagcaacaaagaagcaaggctggaatggagagctctaagggactccccaagttaagatatttcttagttttttctactttggattggctcaattcatggatcaaaaatcaagaccgaacctaacacgatacacccatatgtatgtttctttcggacaagttagagcagatgacccatgatcaggtctacccatcaccagtcttgcaacacaccttagctagcgtgctaaagtgattcatcatcatgggaaaagttgggtatagtcaaggaaacaatatctttaggaaggagtcatccaactaacattaattcaaaagagcatggactccctatatcaacccaaataaaaatatgggcatgaacaaggtttgaacaaaaacattcaaccctagacagtaggtggacccaagttcacaaactagtagtgtaggccaactagagccaccacttacaacatgcatgaacttgagattgatatatatactcaagtgttgctctacgaatgcaatcaggccctaatgagggttttggtgttgatgaccaccgatttagagaactaatgatatttattgatatgacaagcatggaatcaaataggaaggatgttatacaagttg

SEQ ID NO: 8767 - DNA, 1229 bp, Zea Mays
gagaaaacacccacacacacgcacactagaaaaccccacctagccagagcagggctagagcgcctgtcagctggcagacaccacaacaataacaacataaaaactatcccacacggctttgagcttggaggaaggaaacccccttagctccagccaaggaccacagaagagcttcctccctggccagccgaatggccacatccaggcttggggaggaaccattaaagaccacaccatttctatgcttccatagcatccaagcacccagagcgaccaaagagttaaagcccttcttactcagcccatctagccgagcactattggaacaccacaactccacgagagatcaaaatactcaatatcatgcgcatcattatattaacaagaaacaaaagcccatgtctagaaatggaaatggaccaaatacaacaccctccttacgaaagccaaaaacaggaatacaaaaatagatccatcaaggaggacaaaacagctaagcgacctccccccttttccctgaactatggccacaaggttcgccaagccccaaagtctagcgtcctctttgatatcttcaataacttttgtgatgcttggagatgccccataaaaaacacaggtcttcctatgtttacaaagccaccaagctaaatgaatcgctactgaattaaagtcattcttttggagcttagggacaacaatttcagaaatactccacaaatcttggaattgtcaataattcttatgtaatatgtattcatggtcaaagtgttaaaaaggttcaacaggcaaaaatcctaaaatcacgtgcattgatgcaaagggggtgataactcccagaggacaatgcttaatccctacgaatgatcgattctacaaagaaaagaaacatgccttacattagaacagtcacttgttttatgatgatcctaaaaattttggcataggaagatgccccccaaatttctcttaaaaaggggagtaccaaaccctttagagagacttacactacttcgagcacctctagtttgaaactttgaatatgatttcattagatgatgctactcccacagtatcccaatgtatatactatgaaacatcaatcatgtattgtttatgttgtgttcaacaaatcaaactgcgcaaacctcctgtgccaaaccgctgaaacatcagtcattatatccactttaataatgtcccaacaagatttatagaaacctcctaca

SEQ ID NO: 8768 - DNA, 1111 bp, Zea Mays
ccgcacggaccctgccactaaccggacttgagacagagatctgcccgccgtgagatcgatagccgatttaacggccaggggcctcccttcctcccgaccgacctgggtggctctgccgtgcccacaaattcacagatgaacggtcacagacctctgggacgaagggataaggtaacaactaatctcagccgtccatcacagaatcaaagggcacccgggcgtcttcaacctttcgccgcccaggacgccatcgtgccatacccggctccctctctcctgtcggccaaccagcgctctgcccttgagtctacagcggcaccccgatagcatgccagccccacaggataccggagaccccccagaccccagtcacggcgagttgcaacttgcaatatggtctctggaatacgcgctgaggaaaaaaaatagtaaaactcaccggagatcccgtgcgccagccaccgattgatgtggaagcccgagcttagcgagggagcggcgacgttcgatcaccatcactcacgtccatggaacttgaatcaccaccgacgtgaattcccgacggcgactctcccttactctatctctctcttctgcgcaatccttgctcccacggacgcccgtggtctgccaatggtggtggtcgcgagaggcggaaagagggtagaaaggagattttgggccgtggcttcttaaataggcggtagtcggatcgagcgcagaaaccacccgcgcgactccgccgcgattccgccatgcacggcgctcgttagaagagagctacgcacctggacccacgtgtaagcgtcgatggaggggctgagcagagggcccatgcggtcagccaatccgaggaacaagcgcgcctacagactggaattgctagcactgggccgcgtgaagtaaagccaagtgggccgagcgtgcgccagattcggttggatggtgaagttagatgggcctgcagtgagcattcagcccaagtgacgtggtaaagtcccttttgttttattcttttgtaatttcctgttcacttctttctatttccttttcccaatttcaaatattcaaacaaaatctaaattcatgttttgaacttcagatttcaaac

SEQ ID NO: 8769 - DNA, 535 bp, Zea Mays
attggtatgtaatttagcttttagttccccattagttccaaattaagattccatttttttataataatccttaatgggtgatcatgagagtatagatatttagccacttattatgtaggatctaagagatggataagttagggcaagaatagcctagggtaagcaagtttatgatgggaaagaatttcgtgttaagtgttaatgcatctgtagattgagtttgacttctctccttccttgatttgatgaggtcgatcatcttcgatcttcgttcttgacgtctttatccgaattagggacatgtagttaggataacttgtaggtaaggacagatggttaacaggttggtggcttaagataagtgtattatgacaacatctaggatgggatggatggtcaccatgaatatgttggtaggttatttgttcatgggtggtttggtctgatgtactaatttaagttaaaacatggccagagggtctaatctatttcactagtattaactattcctgttaagtgacttaccttagagtag

SEQ ID NO: 8770 - DNA, 355 bp, Zea Mays
tgacaatcagaaacacagcagggccggaaggcaggtaggctgtggcgctaaggtcaaattcgaacaagtcagtcatctacaggagcagcattgaaggtcatgaggacaccttgtacgtggagaacgggatctagttctacctgcagacctcgatctggggcatcgtggactttgtatttggcaatgcacagccaagttccagagctgcccgctgttggtgcgccgcccaccgaaaggcaagcacaatgtgctgacggcctagggctgcaacaacgcaagccgcgagtctagcttctcgttccacatgtgcaccgtggaagtggcgccgggcgttgaccttgacggcatggagacc

SEQ ID NO: 8771 - DNA, 695 bp, Zea Mays
gctcagaggattcgctatgtgcttggatggccagggtggtgtgttgaatgagcaatggggtaggtgcacggtatttattctaagcaaagggtaatccggagtccgaggatcacgatcgcgattgatttggtgattttattggaatcagttacctcgcccagcgctggaggcggccacaacagccccaagatcggagcaggcgcgaacgggagggtagagcggcgcgcccgactctgtttacctgggagggcgagtgttgcgcagggagaagcggaagatccgatttttttttgttgactgggcaaggacgagcatagccgatccgatccagagctccacgcgaaacacggaggtccagtggagtcacatacgcccaggccgccgccagaagcggagttgatacgaatcgcgacatcgggaaggggacgatccgccatggggcccacgcaccagcgcctagcgagagaaagagagctcgtgccctagccgccgtagcactcgccagggaatcactcggcttcgccgcatccaccgtccaccagacgccaacactgccatggttcggtggaaaggttggggatgacgaccgcgccccatatgtcagtctcttgaagcaaagagaaaatgaaaaagggaaggaggtggagtaggccgcacaggaggaaaccgcaagtgggctgaataggtggtctcgg

SEQ ID NO: 8772 - DNA, 359 bp, Zea Mays
ccaatactgaggataggctatcaatattgatgactgtgacacggagttcgtaccaaccggagagtattggcaccaggggtgttgtgggctcctgatggcgtctgcacattaggcggagcagggataatttatgttcctagcagtaggttgtctccctgatgtggggttgtctgtatgatacactgcaaccaaaagacatgtctagggcttgtttctcagtgtatacaaaaggagaatgaggctttatattatagacaactatttttttccactgagtacaatggtgaaccttagcgctagatgaaactttgtgactcttcggtgttagtgacggctcgcggatgaaggcagcccccttg

SEQ ID NO: 8773 - DNA, 350 bp, Zea Mays
gagggacgagctgggaaggttgacggtgagctacaagcaggaagagctaccgcagggcgcaatccggaggagcttttggccgtgggattcacaaggcgaaagagcgctgggtctggggaggatgaggagaccgcgacgcccgatttataccctagcagcgaagaccgagcacgggtacgaggaacgagattcccggcaagtgacccgaaaccgaatccgagcgggcgagcttcgattttttgttgcgcagatggcggcggcgatttcgttgccgcggacttggggaaggggacgagtccgacaggtcgggcccatgtgccagtgagcgtggaggctggtcgggcgggccc

SEQ ID NO: 8774 - DNA, 321 bp, Zea Mays
gctgccatgccggtgccagggtttggccgactcgctagtcgctcatactcagacggccgtgcatttgtgtgatcgcagggactcggactgcagtgactcagactgcaatgccggggtttggccgactttgtgtgactgcagtgactcgctacttcggtctccaagcctgtgaagaaactatgcgcttggtagatgtggcacagactgacatcctctcgttgcgggtaagaagagcgagggcgagagcgacattgacggtggccaagatcgagaggttggaaaaccctaactaccagtatgcggttttggggaaaaaagaac

SEQ ID NO: 8775 - DNA, 492 bp, Zea Mays
atcgcggcaaccgtgcgtagccacatggcgtggtccgaggtggggtccctggtgccatcggggcacagcggagctcctcctcggtgcgcatgtaccagccggatttcccgcggcagtagtcatcagcgccaacgcgggtaggagtacaggcacgtcatccccattggttcaacccagacggtgcatgcatcgacgactggaacttgggttcccgggatccttcgacgacgaggcttgttcccccacgatgcgcgatatcctctctctcccaacatcacgcatagacctgctcgagctacggaaggaaaggaacgtgggtggactacgtatcaagtctgatacgaagcaacccaggaaggataggatgtgggcgtatatgaaggcctgggatctccgtgaaaattggtcagcgttgagccaggataactgcccagagatgtttagcggacatgggatgaacctgggcgacatcacccgtgacgtcatttccgg

SEQ ID NO: 8776 - DNA, 1042 bp, Zea Mays
ctgtcaaggacgtgttccccattcttgtggtggatgaactgttggacgaactccacattgcccaattcttctccgagttggacctacgatccgggtaccaccaagtccgcatgtgacccggcgatgtccacaagacggcgttccgcacacacgagggcctctacaaattctcggtgatgtcattcaggctatgcaacgccccggcgacatttcaagcactcaagaatgacgtcttgcgacccttcctccatcggtttgtccttgttttctttgactacattctgatatacaacaagtctttggctgaccacctccgcgccatcttctccatgccgcgctagcaccagctcttcatcaagcgaacgaagtgcgccttcggcatcgcctcgatctcgtacctcggccacgtcatctccaagaggagcatcaccatggacctagccaaggaataggccatccataactagttggtgcctcggtcggcacaagcggttgcgaggtttccttggcctaaccgctaaccggtactaccgcaaattcgtccaaacttcggctccgtcgcaacaccactaacagcgctcctcaagaagcactacgacaagctccaccgacatgtcgcgtacgaggtggtcgattgggccctccttcatctccgtcagcgggcaacttcatccatccccccaggtcgtcactgggaagctcaagacgcactacttcggtccataccgcatcgtcgagctcatcaatgacgttgatgtccgactagctctaccacctcacgcccggcgcacgatgtgtttcacatcggagtcctcaagaagttctgcggaccaccaccagatgctccttcgttgttgcccatcatccaccatggtgcatcagtttgggaaccagaccaaaccgtgcagccctggttggcgcgcggggtacgccatatcctcgtccaataaaagggtgagacagctgcctcagctacatgggaagatgtcgagtccttcaccgccaagtacccagacttccaggtcgaggacgagctgctcct

SEQ ID NO: 8777 - DNA, 523 bp, Zea Mays
cacaaatgcctgatcaatatgagagctaattggaaggtcttcacttcaaccataagagggtgtgagcacccgcactgttacctatttgacaatagacccggtacaagttacaacccatgtgccaaggagaacttggtgggtgattcataagcctagcacttacaacaaagaggaggaatggattcacggctgagcagcacctgtcaacgctcgggtaaggctataccaccggcaatcaataagacacattaaaggatcatgatataggaaattactattcggacccaacatgctaggaccaccacttctaggaccctaaggcccggagacttccctttgtcatgacaagagtaggagcttgatcctaagaggcttgataataatgtaccccaaacaaataactatgcaccaagacctggggaagtttgggccccaaaccgtatgataacaattaggtgctcaggatcctctacaagccctgtagtccttaagctcaccagcaccaactcacgaaagtggacaa

SEQ ID NO: 8778 - DNA, 748 bp, Zea Mays
gtaaaatcttaataactttgctctccaataaataaaaaatactaaacagactctaagacggaattttgtggtttacacacttgctgagtgatgaacatatgtgagttcacacttgctattaacaatgcctaggtcaagagcgggtaccgacagtttggaaactacgtccggggttaccggtagttttccttgtgtttatcacctaaatcatgtgaatgtataatgaccggtttgtggagcgactacccatgagaactgtacaaccacaagccaagtatgggcgtgacctagcatagtaactagtgaaatttagatttctgcgcaccaaatagtgttacgggaatggcggggtacgccaaaaccatctgtaaagtgaggtgtgggggttatgtggggaactcctactgcccatctagcacaagaggggccttacaagaaagggctgctttcctattggttgaaaccacaatgcgtatagtttggaggaaacaattgaaaagtcttgtagtggtctcctgatcgcacaccttgggtgtgtgcttgtggctacaactgcgaacaagacaaggtcgcacactaaggaagtgtgtaaacgacttgtgaccatggaccaaatggagatattcaaactccgagggtggggaaatgaagtaacttcttgtggggaaagtgtacaactctgtagagattaaattgtcatgacagtcgtgctcacacttaagagcatgaaccctcacacgattagaag

SEQ ID NO: 8779 - DNA, 503 bp, Zea Mays
gctttggcggcgaggaacggttccgacgagctcactgcagtagcaaacaaagcaataggtcggtgagctttcgtgtccatggaggaggctagaacggggtacagaagggatgtaacctaccctagtcgacctggccacggagacgctcaccacggcggcgccgagaatggcgatggagaagatgttgctctcggagttgctaacgcaattcggctggtgtgtgtgagctctggggtgcgcaaagagatgaggaagcaccgactgaatttcaaaagatcttcaagctttcctgctacgctggcgagcctacgaaagggcagagggccacgacgagcgcctaggtgaatgcaccagctggaatggtgacacctcatgtttacatgcggcacgtagaggaagatttttaccccaatacacggtgaccacatgcagcgaacgaagtaacggtggcgttctcccctgccagcttgaccgaccaagtttaacgacttttgcttccccaa

SEQ ID NO: 8780 - DNA, 479 bp, Zea Mays
gccatatgcccccatatcccaaagtcgcacccgtgcgctaaactaaaccctaaacgcctcgtttgtccgtggacaactcttcctctcgcatcgcgaagccgcgaactcctccctcggtccctccgcctccgctcagatctgtcctctctccgctccggtctacctctcctctctctcgtcttcgcctccgcttagatctatcgtcggagatcctctcccccgccccatcctcaagacctcaacggatttgcgtgtttgtggaaccgggtaactcctatccgtaaccctagctctggtctccctctcctcactctcctatcttcttctccccctccggtgtcatctacaccaactggtggccactggccggcactggcacacggcacaacatcatcctcgtctatctcgtcgtctccctcgagctcatacgccgtcggctgctacggtgctccggattcaaactcgtcgaggaatcgggt

SEQ ID NO: 8781 - DNA, 582 bp, Zea Mays
tccgatttaaaggaagaatttggttggggaccaacaaggagatgcaacttaaagtcacctcagcgttacatgatagcgctgcgggaggtcattccggctttccggtgacctatcgaagaatcaaagcgagttttgcgtggccaggaatgaaatagcaagttagagagtttgttaggacctgccaaatatgccaacaagcaaagcccgagcatatcaaatacccgggacttctactcccattaccgattcctgaacagtcatggcaaacagtcagtatggactttatttcaggtctcccgccgtctcgcaagggtaactgtattctggtggtggtggacaagctgtctaagtatgcacatttcataccaatgcttcacccgttcacagctttgacggttgccaaggtatacatgtctgagatttatcggttgcatgggatgcctactgccattatttctgaccgagatcccattttcacaagcaaaatgtggcaggaactattcaaactaactggaacccagttgtgcctcagtagctcataccacccccagttcgacggacaaacagaacgagtaaacccgt

SEQ ID NO: 8782 - DNA, 457 bp, Zea Mays
gaagtttctatccctcaagcagggaggcatgtcagtaagaaaatacaaagacaaattcatccagttatccggataagctcctgaggaagttgcagatgatgagaagaaacatgaacaattcttggaaggattgatagggtaactccaataccaactgatgtatcactcattcctgtccttctagaaacttctagacaagaccatagctttggaacaaaagcgtgtttagctaggaaagatgaagaggaaggctatcacttagtgtcaaacatgaagcaacatccgccctcgctatgctccaccacaaggaaacccagttcgccagggtggtgtaaagcagtcatacccacaccctcctccataaacaccgcaaaccgccccagacaccacaaaatcccaagctagtacccaaccaaaaacggccacccctgctaccccaacaaccagggcatgcttc

SEQ ID NO: 8783 - DNA, 470 bp, Zea Mays
acagggggctcggggtaagaatccccagacccagagaacagggtcgcaggatggcgggttgatatctaaatactttgggggctctttagaaagatttacaggctgaaggggtatcggaggatctgagccatccgatcaaaatctgaagatccagattagatcgccatcacacccaaccggtatgcatccacaaccctaggatcacgatccgacggcagcggttttaaagaggtaaggagggttctggtccgtccgatcgcatcctacggctaggatcacccacgcgaagggatatctccaatctaatctgggccgctactatggagatcaacgacgcagagcaacatcccccttcccagcagagccgcgcggcggcgctaccctcccgcggcggcgccctcaccggagaaggtggacaccgagctcctgtgcctgaaactcaaatccactaggtgctacacgcataggag

SEQ ID NO: 8784 - DNA, 472 bp, Zea Mays
ccagggcgggctgaccggccgggcccaagggcagagacgcgggtgagggggagagagcagagacagttggatctagatcggagggctatgatcagatccgctcgggtcgttcggtctcgcggtgggagttcactgcagatgagcagaccagccacggtggggctctggtggcttagggaaagggccagacacgttcaacacgtcacggtgaacacaaccgtgggcgcagaaccatcatgggggcgccagagagcgcataccgtggtgaaaaaggttccacgacggcgtagctaactccggcaagcaattgcgcgggctctggtgcggtacttggcaaattaagggcatgggaaggttgctcacctcgagtgcgaactctaggacgcttggagaacggcgggggtgtagtggagcctcaggtcgacggcggcggggctccgactgtgcaagaactgctccggtgagcgtggac

SEQ ID NO: 8785 - DNA, 644 bp, Zea Mays
gaaagcgtgcccaagaaaagcctttgttacaaccatccattcattcgaatgtgccccatcctttctccacccgtcatacatcatcctccgatcaccgttcatttcaaaggctaaacgaaagacaaagaacatcaacgatcgtccgtggcttaggtggactccctattaggtaaaggccctaaacccacccaagagtgtagaccgatgcttgtgatttgtgacgtgtagcctacgattgccgcgaaatttcggcagcataaccctgctgctctccaagcacacgcctgaacatggtgtgttggagaacaactgagttacacaaccgaaattccgcgtaaatcgcctcggcacatatcacaaatcacaaacatcggtctacactctcaggctgtccaaaatacgtggacaattccggagcggcgaacctcacaagccaatgtgacgttcgccgttcccgaacgggtgacgcatacggttcgctacggttaacgattaaaactaaactctaaaaattaaaacataactcggagacaaatatgaatttgaattaaagcaatcaacagttaaactaatcacaacacgacaagatgactaatataaattaatgacctcggagcctcggcaattatacttgcctgatggcg

SEQ ID NO: 8786 - DNA, 887 bp, Zea Mays
ggagtggacaggtcgcaataaatgctgaggaggcacatcgtctgcaaggcggcgcttcctttccgcaataaatgcgggggcagcgtggcccagagcccttacgtcaggcttcgcccactggcttacgtcacgggcgataggccacgtggcagcatcgggcctccgcctgaacggggagcgggagcgcacgggctaaagccctgacatgtgtcagcaccggacccttgcctagtccagggtatcccccgtcccgtgaccttgctgtgggtggcccagatctcactcagaggggtccgaaccccatccaaggggtccagaatgcttacccaggggtcccgaaccgtacccgggactgttctttgtgcggctagagatagccacacaggcaccgtgtcttcatactgtagtaaggggtacccctgattcaaggtaccgacagtggcccccgggcccgcctcaggggaggaacgagcctgcaggtggggccaaagtttgattggtgattggcacgctggttctgcgtgcccactgtcgtaattactgcttgttcacctttgatcgcgccaactgttacgcctatccccgcggctgactgacccgtgacttctgtacttgacggctttgctgggccatgcgcggggtgccttgttactgccgcattagtttcgaaaatttaacctctccatcttctgcggcggccccgaggaggcgcggtattggcacgagcggcggtttgacttctctgtacccagggaccggtacccgagggatgactcgtgggtccaggcgcttgtgtcagggactgggctgttgcttttggcggaggcgaagaggcgcgctaccgcaggcggtggcatgcttcttacgcggcggtctgtcttctccgc

SEQ ID NO: 8787 - DNA, 474 bp, Zea Mays
ggggaagcagatgtggtcaggggaagcttatcaccgtgcctgtagccgttgcgacgtggccggaccgccgatgtcgtcgtggacactccggcgacctcagttatgccacgccgtgactcttcactacgcggtagtaacggtggcacacctaggcttaccctctctgaaccgctgcaccggtgaacaccacgattgagccaccaatgatcttcttcctctccgaccgccagcgcgccattccaaaattggaggccaccgctcttgaacactataaattaagaacaccactagctccattagataatcacgaagccagagcacccactcctgccttcgattagccaccatagctcgctaatttctctttctccccaaattggttttccgcacccgtgaacacctcgccgtggccagacgtctacaggttagctcgtgctcttccgtgggatgttctcgcctccctcatgtcccctg

SEQ ID NO: 8788 - DNA, 490 bp, Zea Mays
atccctcgccggagttggtaatccgccgtgcgccgtgggcagggcgctacaccgcgtcattcacggtatgaactcctcccatgtatttgaattagtccctatcgcgtgtagcacttgtcgggatggagtttagggcactggaacacttgattgggatttcaccggcgaggttcgccgtgaattgtgggcggcgccgccgtcgctagctgtggattgggggaaaacaccctggtcgtccgatcctcgttgaacggtgcagattagatagagtgataccccttcgacggattggatctgggccatcaatccagatcggacggccctgagcgctcgggggttcataatggacgagatccgatcctggcccttggatctgatctgaacggttcgaatcctcctgtaccccttcgcggatacgcatttgcacatgaacccctgaccttattgattatcaacccgccatccgataaggggttcgcctgagtctttg

SEQ ID NO: 8789 - DNA, 643 bp, Zea Mays
gcgaaggactgcacggcacgaaagcgcggatccagtctagagtccatcggagacagagaagatgatgacgactagatctgcagaggactgagcaactgcacagcacaacgtcgtagatccaatacatcgacgacttgatgtacagaggcgaggaggcacgggggaggccggaggttggaggtgaggaggcggaggaaatgaatgcaaggaggcacgacggggaaggcgagggttgaggatgtggtggcgagtaaccgtgttggccaagtcggcaccctgtgttgaggaggcgtcccaaacacacactgcacggtccgcctgctatgtcgggttgtctcgagcacgattagcctccgagtcgtgctggctcatagccttagaaaccgcgcgcggggcggctcgcttagcacggcctatccgacatctataccagataccctgtatatttagcttggttacactacatggacattcttggagaggaatagatggttaggctagtaggtccccagcagcattctgaatcaaggaagaaagccccatggtctagccttgaaatctcaaccgcacacaattacacaaatgctacatggcgaataactttccaacaaagtgtgtacgagacaaaaggcacagatattcg

SEQ ID NO: 8790 - DNA, 790 bp, Zea Mays
ttatcttgcacctaggtgctcatagtaggggatacaagctagttgagagagggagcaggtcctaagtctctaagtatgattgaggtcagtgccaatatcgggagtggagttagtggtcaagtgttgtctcccttctgtagcaatcttgtctttaatggggttcgcgggagacaggcaacgttgtgtgtttccctgttggtgctgttggccgacgccgtgctcagatgagatagagacttctcctgaggccgaggctaggtcggcacactgatacacagtcatgcctggagtggttggaatagcagtcgagtggtctcctgtgagattcgtgagagggtaggtggcatttaacgcacttctgctagggcagttggccaaagccaagctcggggaggcagagatttcttctgaggcctaggccttgactagacgttgcatgtcccactcggagtggttgaaacaatggccggagtgagggaacattgcatggtattcgtgccctatgtgtcatcgtgggcggtgaaagtagataagaccgtagtggtgtcgtcctatgttgactttagcgccctcacaggggtaggtgaatgtacgaatgcacgttttggaaccagagtggttggccgaagcgggtagctcctgagtgtcgtctgaggtgccctcgggcgagttgcgattatgattcttgcttaggggtggccttgggtgagcgctgactgtgtctctcatccgagggtggcctcgagcaagccctgactgtgtctcccgcccgagggttgtaacacccctg

SEQ ID NO: 8791 - DNA, 451 bp, Zea Mays
ttggggttcctcctccgcctcctatgcctccacgctcacatgatcatgaggctgggagttctagtgctgcccctgctacccctccggctatggaccctgctcttgcttcgattctccagtctatcactcagcagcaggctcacctggcagccgagcaggcctggttatccgagcggatgctctcgatgtttcagaacatgcaggacaggcaggatgcgcttcagcagcagctactccaggatcgggctgagagcagggcattcatggcccttatgctacagcattctggtgtcttagtttccccagttcagtctgctccacctcctccgcctcaggctccagttgtgccagcgattcagaccggacccctattccttctgttggtccctctccgctccggccggtcactttggctttcacctctccggttgtcagctctgtctgcccgcag

SEQ ID NO: 8792 - DNA, 987 bp, Zea Mays
cacaacctcctccaagcccaatattgctattgtggaatcagacctgaggagaagtaagaggcttcgtgacgcccgggctggtttcaggcaaggctcttgccaaaagaagaattgtttgatgtgtcagcacaagtgtgagggcccccctcgctttcagctaaagctatcaggcgcttaggagagcgcttttgtaatctgtcagaggaagatttggctgacaaagctctgaagaaaaagaagaatccgcctggctgtgttggctctagcaagtcaggcaagagagatgagggagacaagaatcaagaatcttcagatgatgacaaatgatatgttaattctgccttgggtgggtgtcttttgcaggtctcaacctcgtcaggctttttggctgtctcggccctggcgtttatatctgatctctgtgttcatgaacttggtggtttctggctgtgccctgttctgtctcaacagatactcttttgccctcccattttttgggtttgggctcctttccgttgacaaacttaatctctatgatgaatagtcacaatgctattaattactccgactggtctattttaagttttaatgtccgaggtattaatgtcgtggctaaggggaatggaattcattgtgtgattcgggagtccaatagcgatattatctgcttgcaggagacgaagaaagaatcttttgttaggacagacttaagaaggttctgccccagttatttcgatgagttcgcttttgtcccttcgataggaaactcggggggtttcattactgtttggaatagttcgaagctggttggcaatgttattttccaaaatgagtacgctctttcggttgaattttttgctacttcgtcggaagaatcttggattatcaccaacgtctatgcgccctgttccccaactgggaaaattgattttctccactggttttccaatatcaacatgccctccgataagcgctggttgattgttg

SEQ ID NO: 8793 - DNA, 837 bp, Zea Mays
tgattagtgtttttaagatgagatgtgcgaatgatcggttagtgtttcacttgtctagtcgataaatgttgtcataaattattatgctaaaattggtcatgagaatgcagtgggcacgtggtgtgtttggatgtgacaagtagattggaagtgtggggtctgtcgaagcactatgatgtcgaaagtgtatatcgaagtgcattgtagtgataattgtgttaagttaatcggtagtgtctcgggtccacgccacaacatggttgtatgcgagacaaggtaatataaggtgtgctcgacacgaatgttcggtcgatataagtagaaattgttttggtttaattagagaggtggtgacatgccaaagtagtcatcgctttctctatatttataagtcgagtcgtgtcgatgcgcattatgcgttcgttaaattatgcttcgcatatagtgtatgattgtgctcacgactttgtgtagacacttcaagtaaatcaagtaggattgtgatacaagttgtgtaatgaagttagtttctttagaataattattgaaatgttttgttcatatgataaacatgtatgtgttcacagtttgagaagtaaatgcatggtgattgcgatttggagattagtggtttacgattcgtatgagttggtcggtgtgcaaaaatacttgtgaatatgtgtgtttataaaaatgttgtagtgtatgttgtgtctcggatttcgataataataggctagccgacgagtatgttgtatagcggcctaggttgctgctctggttaaccaacttgttagatgtctttagttaagctcgtagtcgcgatgaattgcttgt

SEQ ID NO: 8794 - DNA, 623 bp, Zea Mays
cgagtagctgctcttcgtttctttccagttccagctgaaagccttctcgccgtacccagttctgttcttgtatctgttgtttctggtctctgtttcgatgccagttttggttcggttctaggctgctagctgttgattctgctttctgtttcgcttctgtttacgacacctgaaccagtttttggtaccggtgggggagcactgtcccaatggctggccgccgttcgccgtcggcggatcccggtctcggtcactgcgaagctcccgaaatgagatccggtggcgctttagagccctcgtccgttccaatacgcagtcggatgctgggttacgctcgcctctaaatctaagcttattatttatgcctttgcttcgtattcgtcagatctgatttcgtatttctgtctcgaccgaaattttgcgcggtgcagtgattataaaaacattcctcgtactgatgggtcatcctcgtgaacgactcctatacacccatagaatctgagcacccaaaacacatctccaaattttttttactttcgtgctctattttgtttgtttgttatactatttaggttttttaaaagaaacttgacttccgcgctgttttgcaaatctgtattttt

SEQ ID NO: 8795 - DNA, 468 bp, Zea Mays
gaagatgttagcgaactgggaggtggtcgaatacaaagaacatgaacaacatcgatggcaaccttgtctcaagcgaagtggatatcaatttcaacaggcttcatacactgatgtttaactaggttggtggagaggtaagcaacactaacattgtcacagtagacaagagtgttgtgaggaagcggtcggtgaagttcttgaagaagttgacgcaaccaccaagcttcaacaacatcatttgctattgcctgatattcaaattcagcattggtgtgggaagcagtgggctgttgtttagatgaccaggagataagactgtcgctaaggaaaacaacacaactggaggtagatttgttggtgtttgtacaaccaaccccaatcagcaatcgacattcgtgtagactatgagcttagaggcaatagtcggctgaagaagaaacctatgggagagagtgccttggagatagc

SEQ ID NO: 8796 - DNA, 590 bp, Zea Mays
cctgtgagagatctcttcgctgcacctagggctacctagttcatgtgagttccaagggtagatgtggtcgagtttgagagataagggggtgggaagttgtctttgtcctagctgtccacaccgagacaaaacttgtgccaagtcgtgtcaaacgacttagggttgggttcaatcttttcctaggtgttctaggggtccttaggcgccactttgtcaattgggtcaagtggttttgaagtttgaataagggtgaacatgtatgatctttggaagagggttggttttggacttagaaaaattctgattttccttttatgctcaaccgtttggtgaaccttttgggatttttctgaaacctttttggggtcacattcttactatttttagtagggtattaggtgtactacaattgttataattggcccaagtcatgatcatgtggtttttatagccttttggtcatacttacttatagtgctccaattgtccaaaggggtttgggcaattcttcccattatatgtgcatgataagccaaggcatgacatctaagatgggttgcacttacttagggtcttgatttccaagtttg

SEQ ID NO: 8797 - DNA, 379 bp, Zea Mays
acgggatccacgactcccccgagatgtagtgtaactcgataaagggtattgcctgcacataggtcagagttgaggttaccattggagacatcctaggcccgtaacacttgaaagtggcgctgtaataccccctataaaaagaatgcaacccaacaacaccttttcatcagtatacataatcaacaacacctttaatcacacaatcatatacaaacaaaggagaggatgtaatggacgtgggagtggtacctctcgacagtctggacgtcctgaccatcagatattatgcctacaatctccttacctatatcggtataggagtagatcacatgcgtgcccaccctacccaagtaaattttttctccttccccctcgattg

SEQ ID NO: 8798 - DNA, 434 bp, Zea Mays
aacctggacaaatgtgtgttaggggtacaagttaggacgcaccttggtttcatcatcagccattggggggatcgaggccaacccagagaaaatcaaagccatcctaaggatggagccaccacgatcggaaaagaaggtccagaagcttactggcggctcggtgagagaggcatgctgttttagaaactacataagaaagtggatagattccagtggacccctaaagctcaagaagcatttgaagcactcaagaaatccctgaccaccccatcggtcctcaaaccacccaatcgagccaccaccgaccgaccggccaaagatctgttgctgtacatttcatgcatgactcacgtggtaagcaccatgttagtagtcaagcggatagaagaagggcacgcacatcaagtccagcacccccatgtaattcatcagcg

SEQ ID NO: 8799 - DNA, 513 bp, Zea Mays
ggaggataagcttcagaccctcgccgccgacgaccaatccgcgtcgtgatttgcgccagggtcgggatgggcgtgcggagtgcatctcctcgcaaacatctttttgatccgggtaagatcgccgcggtggagcgtgatgattccagccgccacgcgaccactaatcactctggccatatccggtcatcgacgccgctcctcttcgttcatccacgccctcactgatttgaccgtgttactgtcgcggcagaatgtggcaagctcgtaggaaaggatagcgctcgatgccgttgttgatcgccagctaaggccggcgatggttatcaccatggccatggcagtggctcactgcgcctataaattcaccgcatcctcaccccctctgttcaaatcaaccgagcacagctcttcgtctctaaattgcgaagccgaagcacctgctcccaccctcgattagccaccatagccggagaatctcccttttcccccaaattaggtcgccgtgccaccgtg

SEQ ID NO: 8800 - DNA, 1281 bp, Zea Mays
attcccacgatctcagtgaaggcgggtcgcagtgcgcagcgctgcctgccacctccttgaggagaaccaagctggaggctgtcgaggcttctagcaatgtcaagcaagttgctcgcctagggaactggggattctggggcctagatcatcgtccctctgtcgttgatgacgaagtcaagactcccaaaacgtatggtcgttctaggggtccaaactacgccactattgttgttggccatccggagcctgaagagttcgtcaagaacatgcaaggcccctacctagcgcgccaattgtcggtgttttgaacctctactccaacaagtaaatttctagatgtgtgttttgggctctggatggtgtgctcggtgggcacaaggtttatactagttcgagcagaacgtccgtacatccaatcctcggtggctcgcgctatcgacaccattgttgctcgatgctcgtagtaggggttacaactgggttacaagcaggctagagagggaggaagggctcccaagtatcttatgcgggggtggtcctaaagactatggaactggagtcatacgctaagtcttagctccaaactttaggacttcaggtctcttcgagtgtgtgtggttgccttctatcgagtgtcttctgtctcatgtcctctagggtttgtccctgtattcgtggctaacttcctccttttataggcaaaggtgggggtcggcggtcggtggctcctttgggaaggagccactatatcgtggtaaaatcgaatgtcttacctcagcaaggtcgcgttgtctgactgtgtattgttatttgtccatccctatttgtgctcattatgatggacaatgtggggccctgacgccatcattactacctctgcgccacgccgaccccgggtctccgtaaactggacctcggcgtggctcattgcattacaggccctgtggacggtttgcgtactctagcctaggcctgatagatcacgggtgctccataggtcgaggggctcataggtcatgagtgcgtgtaggccagggggttgtgcaggtcatgagtgggaggcggaccagctctctattgcaactcggtgtatagtgtagttaatgaggtcgaccatttatagaggcttagcctcaggctaggcgaggaatctactcgagtggtttcctttcagttcgttcggcccctctgtatctccgccacgcccgaccctaggcttggtgcctcagggtttattcgggggcagatgcttccttggtagacaattcccttaccctctcg

SEQ ID NO: 8801 - DNA, 751 bp, Zea Mays
gctttggctgttctagtattcactctaatatatatgggttaagaagaattagagttgtcctctgtgtgatcaggaacctgaaacaattgatcatttgctaggcagctgtaacacatttagtaaatttggcctgcaagcattggcccctcaagtgggcaggctttcctttgatgactggtaggaaacagtaaatagccgagtggagggtcagattagaaaagagttgaactctgtcatcatcctctgtgcttggtcaatttggactcaccgaaataggtgtgtttgatggagtgtccccaaatttaaatgttgtttcggcagtggtggatgatgaattgcagaggtggagtatggctggagcaaaagggatatcctacctgcttgctatggctcctgggtcggagcagatgaatgctatgtgtgggttaaggtcgtgtatccctctgtttctagtggtgtaaataagtagttttaggctaggttttttggcttcttagttgcctaaaacctggctgtttcttttgaacttaacttgcgaacctccaatgaacttcatttgagacaagtgatgcccaagaaaatgggggtaaactgacacagctatcacttgcattacttgccctatgcgcggaagaatctgacacagctatcacccatgaagatttccggttaacttgtggaaccggacttcatttaagacaagacaacaataccagtgttgagcttgccactcggccatagcacacacgag

SEQ ID NO: 8802 - DNA, 432 bp, Zea Mays
gtggtgtgataacctgggggcaaaatacctgtcggccaatcctgtgttccatgctagaacaaaacatatagagatagatttccatttcgtcagagaacgagtggcacagaagcttttggacatccggttcatcaactccggtgatcagttggcagatgggttcactaaggctatcaccgctgcaaagcttcgacagtttaggaccaatctcaaccttgtaagtggctgagattgaggaggagtgttagatgatatgaatatctgttagtctaggttcattgtaactagactcatgcatgcgtgtattgtagatgggaggtgatccttgattacaggatcctccttccatcattgttgtaaccatacttgtgtacatgccaccgccgaggggcttttccttgtgcctatataacacgcaaccgtggacctgag

SEQ ID NO: 8803 - DNA, 389 bp, Zea Mays
gatcgatctgtgtcgcagccgttctgccgaccatgccacaatctcatcagtatgatgcagcagcaattatcccaagtgagtgcagcttcgtgtgagtgcctatgcccatggaactccaggtacaatcgtatgatgatgctcctgtcgcacatgaagatagcttcgacgagcaaggtacacgacatgccaaaactttactgattaccaggttcgagtgcatgttcacgtgtgtgatggatgtcgtaaattgttttaatgtagatcacaatcatgttgtcacgtccgagaagtcaacttgaacgttgaatataggacaccatcaaagaaaaaatatatacttaaggtgataatttatatttgaattttcatatagtgcatcatgcatcatt

SEQ ID NO: 8804 - DNA, 641 bp, Zea Mays
gtggattggtgagagcgacgcgaacagaggaggggatcggggaggcagtcggatcaacattggtcgttagaatcaaatgatcgatggagacgcacgtggtgcgggcagggtcgatggagacgcacgtcgcacggactgtgtcgatagggccgcacgtggcataggcggggtcaagggggccacgagggccgcaggcggggttgacggggccgcacgtgccgacgcgaaagagggcaatagaagagtattgacgcactcatcatcgaggagggaatcgaggtcaggggtggggaggagtcagcaaggtggaaaacctcctcatcaaagacaacatgacgagagatgatgtggtgggtaaggagatcagggtagaggtacccctggtcaagggagtaaccgaggaaatgacagcgagtggagcgggggaggggggtagcttgtgaggagcagtggcggaggtgttgggataggagacatagccaaagactcgaaggtgcgcataggaggggttgttccatacagagcgaagtgggagtgggtgactcaccgccttgaagggaaggtggttgagttgatgagtagcagtgttcagggcctctgtccaatagctagcaggaagagacgccagcaaaaggaggtag

SEQ ID NO: 8805 - DNA, 721 bp, Zea Mays
cgagtacaatgcaagccaacatggcttggagtacaatctctaacactcgcccgcagtgcacgggagaatcatggacacatactagattaaaactcagtaaacaactgaacaagcaagcccttggtcatgatatcggtgaaatagtgagaggacaacacgtggagcacctaaacttgtcccaatgtgacctcatggatgaagtctatgtcaatcaatatgctttgtgcggtgatgatgcactagattgaccatcatatatacaacactcacattatcacaatacacaatggtcgtcgaaagaatggagatgtgaagtttctatattagttgccttaactagtatgggtgatggtacgataatctgctttggcactggagcgggagagtcgtctggcgttttgagggccaagagacgagattatcaccaaggtagtcacaataaccggaggtaaaatgtcggggatcaggacaaccagctgagtttgcatttgtgtaagcagtcaaggtctagatcgggccaatgacgatgtgaaggccataggacaacatgcccttgatgtaccagaggatacacttaatcaacacaagacggggctcatagggatcattcatatagaaacaaacctgttgtacaacatacgccaagtcgagccgagtaagtgtaagatactacaaagcgacgatgaggctctgatactttgtcaaatgagcaataggcgtg

SEQ ID NO: 8806 - DNA, 470 bp, Zea Mays
atcgctctcaactcatgaataaaggcaatttttctgtcatgtccctgcggtccatacacgcaggtgagccaccaagccacgccatcagtagggttgaattttactgaaacactaaaggagtctactcgagaggcaacgattctccccaattttgctctccaagtgatcagcaccccaccactggccccaaccgaggggaggcaaacgaaattattgtcaaaatcagcgcctaacattgacaaaactgtgcgacgatcgcaattaaccaactttgtttcttgcaaacagacaacatctactcttaatgagtcaaccaaactccttacagcatcttgccttgcggcagagttgagaccgcggacattccagaacaggactagggaaggatccataggaaaacagttgtagtagtaggcgaccgcgggctgcaatcagcagactagagtggctgtcccagggggaacaacctc

SEQ ID NO: 8807 - DNA, 743 bp, Zea Mays
cacatgttcatcctgctggtcaccattttcattaattatgccatccatggcttctccatgatacatccacctagtgtatgtactagccatcccatgaagatataagtggtcctccacctgtcctctatgtccactaagacgattcaaacacttgcggcatggacaaagtatctcttcgttcacattaaatcgctctgttacaagcttcatgaactcactaactccttccaggtgtggcttgctgaatagtgttgcattgatccaagatctatccatctatggatggcaaaattattttagtgccaaaaacaaatcaatgttgcagcaaggtaatagaagtgaacaactttgtagtattattgttatgctaccacttaccactatcaaacaatatgccttttctacctaccgaatccaaccaccttgaatacactaactacatagaacaacaaacatcattatcctcatatattcttaaccactccaccatattgttaattgtagtacctatttcatataaaatagatcaacattgttaaagtaatcctcaccgggggcagcaaactggtgatgtacgtcgatgccgaggatgaaatctggtagcactggtagactacagcacgggcaaatcagatcaatcattgtcgtccactgcggattgcttactccggtggcggctgcacaacaagcccccagtctcttgtggtagcatccatggctccggcggcagatgcatagcaggc

SEQ ID NO: 8808 - DNA, 1328 bp, Zea Mays
gcaagcagcacctgctgtggttagattttctttgaataattgactgcaattaccttcaccgttatgttaattgcaaaaagaatcctgggctcctagtagcagtagagttaccttttaaagtgttaataccagaattcataactttgaagctacccttttattaggacaaaaaagtctttagtttgtaacgatgcctactctgggtattcaacatgaagtgtgttcactagcaacttatttctggtaacactatgatattgagcccaagctactcttttttccgcaacgacagagccaaatttcattacttgacagcaacaaaattacaaaagttagcatccgaaatacgcaaagaccgagcccacgctgctctaatattttgatgggttgtgcaacctgaagcctaaaaaactatcttctattcaaaattcatgaaattcaacttgttatgcttttcactattttgcacgttcagcaggcaaacaactatgcctgagcctgactatatgtcttattgtcctctgttcttaatgtgaattgctcccagcgattgagtgatgctgaattcttcactgcatgttctatgatgcatacaagcaacatattcagttgaagcctgtttctaatgctatgctcattaagcatcaatagttgagcattgaagtgtcttaccaaagcaactaacttgcctatattaatattgcattgctcctatataggatcatctcctactttctcctcacaattgcaactctgatttttatttaaaaactttttttccaattatggttcaggtttctgactctgttaccaagttgtctgattcatcatctctgaaacattgcatgagtcaggtcaaatgttgaaatgtttgcacaccgattatccaagatgatagcttgaactattttgttagcaaggagcactatatatttgaagtattggtatcctaattaggatccttaacccatcatcttagcattcataacagtatcatgtatctttgttgctattagatatttatcgatgaattggatgcgattgctccatcaaggaaggatgggagtgaggcgttatctattagaatggtagccactctgttaaaactgatggatgagattggccctagtgaccgtgttctcttgattgctgctacgaatcgacctgatagcattgatcctgcattgcgacgtcctggaagattggataaagaaattgaaataggtagaatgctctgatgctatccatatattttcaacacgaatggctgtggatgcagtttactccacatacacatgccttttaaattaacgcctgcaacttaaatg

SEQ ID NO: 8809 - DNA, 350 bp, Zea Mays
gaagttctcaaagaaactcactccgtcattagtctcaaaatatcatgtgcgcaaggctcattagaacgcttctgaattccatattgttggcatgagacaacatatgtaaacttcatgtcagctatagccttgcattgagtcattaattgcgagtcctcgggcattacttctgttgctctgtaaccttccataagatctaatgagacaagaacagaagttatcacatatgccactaagcccgcattcagaacaacatttcagaaccacagcagactgctattagaaataccatcatcttccgccatatcaagaaaagcctgaagctccaaagcttttcgatagtacatcat

SEQ ID NO: 8810 - DNA, 651 bp, Zea Mays
catgccagccattgtgccgcgcccgcatctgcttctttggccaccaatccgtgggtcccatccgtcaggatcttcatccccctctctgcgcgctccgtgaacggaatcccgcgcatggcggcggtactgcctcaccggccgtgcgaaatcactgggggaatcggcctctgctgcaccgaattcgtctgcgcacccagtaccacttcctggtgggtcccacaggtcgggccggttcttctccctaacagattccccgctatcctcggtggtcagctccctcaacccagcctgccgccgcgttttcttctctgctgaccgcaacggattcttccccaaatcgcgctgtccgtggaaatcggctctcggtttccgatctcgtccccgccactcgactatataacgcacccttgatagcaccgagccacctcgtcgccatggccggagagtagacatagaccgtgggagggagaattgccgccatggacctccatgcccgccgtcagcgaggcctcagtgtagactctggggcttcgtataatcgctggggttgcgcccgtggccgagacaaggaggttcagccactgtgacaatcccaattgctcgtcggtgttcgtgtcgacgcatccgaaaacgctgtgctcgtgggcagct

SEQ ID NO: 8811 - DNA, 541 bp, Zea Mays
tgactatgaacctatttaatttctagcaaatgaaatggtacatggctaggctttgtgggctcagtttgtagttagtggccatgtactccatctatccatctatgaacctaaatctggcgccttagaccactcgaccaaactgtcactattgatatgagtggtacatataattatatattggattcattagcattaaaaattagcagccatctaagctatttgaaagggccaaacatgcccaactcatccaagctagccatttagtctgggaaattcttgcttgcacggataacaatctgctgagttacaatctgctcaactcggactgttccgtactaatggatgaggcgcatctaaacaatctgcccaactcggactgttccgtactaatggatgaggcgcatctaaacaatcctgggcagaagaatcctgggcagcaggactggcacttgagcggcctgtagggcatgttcttgggtcctgcaggttgatgtcagccatacattagcttggctctacactttgaatgcatccgagggct

SEQ ID NO: 8812 - DNA, 739 bp, Zea Mays
cactacagtaacgttcaatattatagcaacataaggaactcgatcaacatgctcagtatctaaaatgcaaaaggtctgttactaaaggtctatgtacacagtcctaaccatagtaactaggttaactagtttataggattgaggatcgagaacgtggtacgatacttacagattttaacactacgggacgagattattccctcgtctctatctatgatccatggcctaacaccatcccatatggtcggcctcgtcagtagtctcatccgacggccaataatgccagcagcaaacctagcaatagatgtcggccatattggctagcaccccaccttacaagtatcagcttcacccacccatggcggccctgcccaccctgctggcagctcgataggatctagatggcaatagggggtggatagcctataaaattctttctctaataaaagttaacacaaaaactaaaataaaacttatatgcgaaagtgtactaagtaatagagaatacttcacaatatgatgatgaaacaatatgtaatagcaagcgtgactgtattattctgccatcaaactagtcaaacgaccaccatcagaaccaaacaccatggtccgatgcccctgttcctagtcacaacggttacctatgagtgggaccccatggtcaatagtgtgattgtattgtatgatgctgcatttttctcaattgtcgaaccaaagacaacgggtctgagcattctag

SEQ ID NO: 8813 - DNA, 536 bp, Zea Mays
ggaacctcttgccttgatcctagaggcaccgacacatcggctcctagggcaccctgctcatcggccacagaggcacctcttgccttggtccttaggcaccttgcgcgctggctcctagagacacgaggtgccttgcatggacaccctgcacatcgccccaagaggcacctcttgcctcggccctctaggcacctcctacactgtccctggggcacctcttgcactagccctcaaggcacctctctcattgacccctatggcacatcagacatcgaccttggggcacctcttgctctgaccttggggcactttgcatgccagccttcgggacacctcttacccccgaggcacaccacacaatagccctggggcacctctttcttggccttcggggcaccctgctcatcagcctctagggcacctcttgccccggtctagtccactatcgatggctttctcttccacatcaggcgtatcttcatgacagtggtccatggtccacccgaacaaatcctcggtccaaggcacatgtatgg

SEQ ID NO: 8814 - DNA, 409 bp, Zea Mays
acccccaccacgctgatggcccggagctgctgcgcactgtcactcgacaaccttcttccccgagcagcaacgacacccccctcaaacaccgaccgttgggcacagctcgtccccgaccacctgtcgtcgttgtggcccggagaagccgtcgctcgccagtaatcttccccaagcaacacccctccacctcctcgagcaccttctgacgacttcgcgagcacctgcatcttccttgggcgcgcgtctacaggtctccaatcagcaattttcaacgtcggccgacacttagtgtggggtgaggttctccaatcagcaccgctccctcaacatcggttctccttccactagtagcaattttcactcgaccaccatcccaatctagaggtatgtagcaattttcagaccccct

SEQ ID NO: 8815 - DNA, 855 bp, Zea Mays
ggggttaggaggttagggttccaaaccttgggttgggatttttgggatgttacaaacctaccccacttaaaggaatctcgccctcgagatttagactggatttgggaaaagataagggtattccctcctcaaggagtcctcactctcccaggtagcttcgtcttctccttctctgctctactgaactttacagagcttcacttctgaggtgcgggtcttttggacagccaaatcaagaatcttaactggcttctctcggtactaaagatctttctgaatctgcactgcctcttcttcgatgtgactttttggtgcttgcaggcatttgcggagttgggatacgtgaaacacattgtggatgtcagacatggactctggtagttcaagacggtatgctgcgggtcccactctgccaatgatgggatagggaccgacgaatcgcggtgctagttttcctttcacttggaacctcctgacaccatgcatcggggagaccttgaggtagacgaagtctccttcttcaaatctgagctctctccgcctattgtctgcataactcttctgccgactctgagcttcaagtaatctcctgcggatcagagcaactttctcttctgcctctttgacaaaggcaggtccttctagtgctttttcccctacgttggaccacatgagaggtgtctggcattttcgtccatacaactcttcgaatggtgacatcttgatgctggcctgatagctgttgttgtatgagaactctgcgtagggtagactggattcccaacttctatcgaatgctagcacacatgctcttaatagatcttcgaggactttgttaactctttctgtctgccc

SEQ ID NO: 8816 - DNA, 454 bp, Zea Mays
ccagcatgcaaatggccatgttatgggaatggtctgcagctgctgcgcgggtaagtgttgttgctttgataggaattggcatgcctcacacttttggactagatcggcagcatcgctcttcgaagtgggccaatagaaaccggatttgtaagcttttccgaccagagtccttgatgctacgtgtactccacactgcccggcatggaaatcatctaacaattatttcccggtagccgagtgaatgcatttcatgaggactcctgctgcacctcttctgtacagtaaaccacctatgatggtgtagtgagttgactgcctcgcgatgagttctgttgcagccttgtcatccggttcttcttcattttttatatacctgatgataggttctctctagtcattggggtccgactctggttggctcaaggtgttgcactcttccacctgattcgagagg

SEQ ID NO: 8817 - DNA, 494 bp, Zea Mays
ccgagggggtccgagtcgttcgatcaagatcagacggggggaaatcagaccaggaaggatgagcgactgcgggtggcactgataggcgggccagggcgtcaggcgcgcgtgcgcgaagcggtatcccgtggtccaggccgtgcgatcaagatcggacgggggaaatcagaccgggggaaacagacgtgcgcgaagaggtgccgctcctctccgcggcgatgaggtcaccggagttgaggaaggcacgagctagggtggctccgcggtcgccggagttgggtagaggggaagagggcgccacggcgaaatcaatggcggggaagaggctataaatccacgggcagagaggggagaacggcggtgagagagtctcgggcgggccggagtaactccggtgagcgattccggccacggggaggggacttaaggcatgctaaggccttggctggcttcagcagagataggggtgacccagggacctactacagtgaact

SEQ ID NO: 8818 - DNA, 570 bp, Zea Mays
atgggtctacgagcaacaggaggctagaacaccaaccaaagaagcttgaactgacttttagagggctagccatggcgaagtgttcatggtggcgcggaaaacggatttgggggaaatgcgaaattgggaggctctggtggatgattagaggtgcgagctagtgcactcggtgcataatgacctagcagacctggttgatcactcaatttatagaagccaacagtggtggcgtccaatttggagaaggtgcgctggcggccggagagaggagaagttcactggcgcaggttgtcgtggctttcactgaagtaatgacttagacgatggactggctatctacggcggtctgtgtcgacgtggtgaaacggcagacggtgtggcaggaccacgaggaatggcggcacgacgacgatggtcgcgcggccacgttgcggcgcaactgggcacggtgacagagcaactacagtgtcccatcttcatctcttgcccaagatctttcaccccgcgaagttatccgtgcgccaccgggcacgaatcacagcgcctacgtgaatccgggcgtagggtcac

SEQ ID NO: 8819 - DNA, 556 bp, Zea Mays
gggacatggagagaaaatgtccacgagcaagagaacaacaaatggagatatcatcaagataggcacaacatatgtcgtcatacaggggaacaatgaaggcagttgatgaagaacaggggaacatatgtataccttctactttacatcaaatgatattgcaatgggtaggcgatgatgtagaacaggtacatgcctatgcattgagttgcattgccatagttgatgcccctatactttggacctatgtgaaagtagcctagagggggtgaataggctacacctaaaattctcaacacaaacttcgaacttttgtgagaaatggcagttcaacaggggaggccggttcaaacgcaattcacctattcaactacaaacttaaatgaaactactcagatcaaccaacaataaacacagtggaagagttgaattaaaaccaattagatagatgacaaatctgagatgatgagagacaaaatcacatccacaaaagcatagaagacacaagatttttacagaggttcgatcacacaggtcaaggtgatcccttcctcaattt

SEQ ID NO: 8820 - DNA, 1101 bp, Zea Mays
acaagagactgacttttctcggtggtctgtgagaaggactgtcttgtttgcgcaactgatgatacctttgtgtttggtcaaccaatccatccctaagatcacatcaatcccttgggatggcaagatggttaagtctgccaagaacactaccccacttaaaaggattctgacttgggagcatttgagctgacaaagaaggtctgagttcgggtgaccaagggaatctctagaggggtagagggaatgccatgcttttccacaaaactagtggctatgaaagaatgggatgctcctgaatcgaaaagtacagtagggggagtaaattcaacaaggaactcaccgagcactactcctggagcttgctgagcctcctgagcatcgacgtgatttactcgagcccttccttgatacggggtcttgttctgttggctgatggaggagggcaccttgggggtggatgctgaggtattcttggggccattcaccgagttggagtaagcaggtcctgatggcttcagctggggacagttgttcttgaagtgactgggatctccgtagtgccaacacccattcgccgggggttggttgcttgcaactgagggggtatgaaaggagctctgactctgctgactgaaccgtgacggggtgggtccagctggtctactgaagcttggtcccttgggtggaaatccaaaggatcgagttttctggtgccgatcttgctgctgagcccggaggacttggaatttcctcttgagatggcctttttcttcctcctttgccctttccacttgcatggctttgttggagaggtgcgagaaactgaggaagtcttggctggcccaggatggtcttgagttctggtctgagtcccttcaggaagtgggccatcttcttgacttcagtgctgacgtcatctggcgcgtagcgggccaactccgtgaacttgtgcacatattcactgacagatcttccgtcttgagttagttcccggaattcgtcttccttgagctgaacgatcccttggggcacatggtgctcccggaaagctgtttcaaactctacccaggtagcatctctgatggtgacattgaaggtatc

SEQ ID NO: 8821 - DNA, 520 bp, Zea Mays
cgtttgaaccagcaccatgtccatttggccaaaaagacgaaacgtaaagcgaataacgacgagaatacgacgttccccgacatacacgagaatacgacgtgagtgaatgaaccctaaccgctgctaatcatgcaaatagcactgactggcggcaccacccgtggtccgtggacgtggacctcagatgggggagtgcaccacgtgtggtgcgtgtgaggggtaccttcgatgggacattgagacctgtttcagaaccaagatcatggcaatttgcttcgatctttgctcggactacactccagcagaaaaaaaaacatggtttgttctaactgctaaccctatggtctgcatttggtggctcatctgaaaacgatgcaacagggatcacgtagaggacactcagcaaataatttcttgccgggtgcctgaggacggtactcgttaaagacataactttgtcgagtgtctttctcgagcactcagcaaagttatcggacgtcagctgtagacggatgttgac

SEQ ID NO: 8822 - DNA, 433 bp, Zea Mays
ataggaggaggttgggacggggaattgctcgccgaaagccgtcatcgccgtggagccagcgggcggcgcgacaagcgtaatctgagcatcgtttgtaggtatgtcgttgttcatcttgtttgccatgtcctcctctctcttcctcgagtagtcgtgtgtaccttggtactctggggcgcgagatggtattgctccggcggacctccgtcgtggctctaggggtggcggtgcctctgctcggctcctggtgggagagaacgcatgtggccattgatccgtgcatgtgcggccgtgattagatcgtagggttgtcggtttgggtaggtatatgtgccgtcggttgtgaaatggtcggcacagatcaaatatctcttcatagaatcctggatggcgattattgatccgatggttgttatgggttacccgttcggta

SEQ ID NO: 8823 - DNA, 735 bp, Zea Mays
cggatatataaacatgcacatcgcgccctcgtcccatcgactctgcactcgaccacagcaagaaatcgtagcgcagagaaggcaaagtgtgagggatcgcgttgtgtgcccgccgtggaggagatcgggatttctgggggctttgaccatcccggggtacctgggtgattcacaggagcccatcgtgcgcacttgtagtctctattggcggaagcatcacctcctggacgccaatttctcgtcggtggcgagcttccttccccttgccgccgtgccgcgtgggtagagttcaccgcggctcgatcacccgtaagtctaccaccatcagatcctccttacctcgctctctgttttccacgatatcatgcgctggttggggcagcgggggccgaccgtgcggtctgccggcgatggcaccgccgcgctggtcttcaacgccgccaccgctctaggtgtgggttggggaagaagtccccctggccgtcgaatccacgggcggcggatgagtttagagccgaaatagcgattggtgtcgattaaatctgaatcgttggggcgcgatccgactgtcccattttgatgcgagcgcgggcaactctgggaccgttaatcccggatcctgtggctcactgattcacataaggcaagatatgatctgggccatcggtttgtgatcgcgcggcccaagtttgatcataccccttcgtcgtggtcattacacagaagagcccctgc

SEQ ID NO: 8824 - DNA, 346 bp, Zea Mays
agtttacagaattgtaaccgtgaagcaacttgttgttgcgtgtctcgctggatgttgagactaacccttcatgttgaaggacaaatatgtagtatccatgccactacattaatctaagtccaaagctcactgcatatataaaacccctatctgtaatgtgcgtaagatttcccaaataaatcaccacaatagcatacattggccacaactggatgattgtggttggggattttatctgtatgcttttagaacatctcggcattagggggaggaatgcccatataatgtaatgcctcaatattctattaaacgcacaaaagtcaaactgaacctgtcgttcggtgtg

SEQ ID NO: 8825 - DNA, 689 bp, Zea Mays
gggacctgagatgagctagccacggcgaggcctctttcacggtggcggaaagcagatttgggggaaatctgaaattggcgagctctggtgagcaattggagacatggcttggtggtttggtgcttgactaccctacggacccgtcggtgtgcttaatttatagtgtgcttgagcggtggtgcttaatttggatgaattgcgctggcgaccgagaggggaatgagtcacgatggcgatctactgtgacaatcgcagagcgactgaactacgactgtcattggatggtcactacggctcataccgacgcgataaacttcctaaggcgtggcgtcctcacggtgaacggcgaacacgccggtgattgccgctcggccacgtcgccggtgtgtactgatgaaccatcaagcacacagtacattccagcccatccgcggcaagatctttcaccccgtgatcgttatcatcgtttaatttagcgtgaatcacggcgatagcacgaatccgcgcgcgtggtcgctggcggcgaggtctctgacctggcgatccaatccggtcactgtaccatcgtgaagcttcatcagctggcctgacagagcatgcttgggatcgattttgctctatattttatgtgatgactcaaccaatactctgcatcaaagtcgaagcctgataaaccagctctaactttg

SEQ ID NO: 8826 - DNA, 416 bp, Zea Mays
gataccgactcctgcttctactgaagctcccaaggataaaactgaagatctgagggaggtatccactacaagcgcttctcccactcacgttgaagcttaaacttcgggggctaagccagcagaactagcgaaggaagatcttcatgaaaagccaacattgcctgctcctgaagcaccttttctcaagttgatttagaatatattgttcgtcatgcttcggggaaacagctatccgaagaacaaattgccgaagtgcaacattatgcaagggatctgaaatacccccggggatccttagtttatggagggagcgacgaagatgacttcctttactatctaccagacaataaggagattaatgtttgtcgggaaatgatggacaacatgggatacccgaagcttgagcttggtctgtt

SEQ ID NO: 8827 - DNA, 465 bp, Zea Mays
agcagatgtggtcgcgggggaggcttatcaccgcgcctgtagccgttgcgacgtggccggaccgccggtattgccgtggaaactccggtgacctcagttgtgccacgctatggcttgttactatgcggtagtaaccgtgtcacacttaagagtacaatctttgagccattgcgccggtgaacaccatgcctcctttgcgccagtgctctttcccctctccggccgccgcgcgtctcctccaaattagccgccaccgctcatgaatcctataaattgagcatgccatcagctccgctaggtagttgtgcatccaatgaaccagctctcacctccaatcatcccctacagctccccaatttgagacttcccccaaatcggtcgtgaacatcgtgctgtgtgagctcgccgtggccagcgcgctacaggtccgttcatgccctctgttccctcgttttagtactctgg

SEQ ID NO: 8828 - DNA, 304 bp, Zea Mays
atgtgataagtaaattggaagtgtgggtttgtctgagcccgatgttgtcaaacgtatatgtcgaaatgcgttgtagtagtgattgcgttaaattaaacagaaatgtctcgagtgcacgccacaacgtggttgtatgcgagacgggaaaatataaggtgtgctcgatgggaatgttcggtcgttgtaggtggaagttgtctttgcttaaatagagaggtggtgacatgccgaagtagtcatcgcttcctctatgtttataagtcgagtcaaaatgcggggtactagtggtacgctaggcaggcgg

SEQ ID NO: 8829 - DNA, 646 bp, Zea Mays
cgagaggtgttgtgagcttacactagagcgtaactacgtgaggggtcccaagggcctataccgtctgacgttatgggacgtggggtctcggggccctatattgttaggtgcctcggaatgtgaagggtcgtagaggcttatacaattaggtgtccgagaacatgaggcctttgagagcttataatgaatgtcacagaatgtagtcctaaatagttggtctcgaggatgcccctctataaactgattgaggggtcccaagggcctataccgtcagacgttatggggcgtggggcctcgaggccctatattgtccagtgcctcggaatgcttacactagagcgtaactacgtgaggggtcccaagggcctataccgtctgacgttatgggacgtggggtctcggggccctatattgttaggtgcctcggaatgtgaagggtcgtagaggcttatacaattaggtgtccgagaacatgagggctttgagagcttataatgaatgtcacagaatgtagtcctaaatagttggtctcgaggatgcccctctataaactgattgaggggtcccaagggcctataccgtcagacgttatggggcgtggggcctcaaggccctatattgtccagtgcctcggaatgtgaagggt

SEQ ID NO: 8830 - DNA, 711 bp, Zea Mays
gttcggggaaacatctctctctagtcttcggtggcttgtgctatcggcaattgattgctcttatcaggggagttgcaagttgggcaagagaaggaagagttcccaaatgcagtgacggacgcaggacaaaaattcatgtaggaccaaacaaaatcataaggcgtctagatcagactgtaaaacagatgtaacattacatatagaaactagtgatcgtataatagaaattagaatttgaaataagagaaacttatgaacaagaaaaaactgcgtgtcgacgttgtgatgacagaacaacaaaatcacgcgggtgggtgagcgcatgcagaagggggatgggcgggtgatgacgacgttggtgcggcgttagagcgggtgagcacaaaaggggaactgtgtgcagtagtgcgttggggtgagcaagcgtataaaggggctagcgacaaagtcagggcgagcacagcaaggggctggcaatggcggagtcgagcgctcctaccttgtgtcgatcggatacatacagtaacagaacaaaagtggagttggctgttttagcagggatggagttgaattgttaggcgggatggtggatgtgtgctatagttttgccctcatatacttactagtttttcaatttgtatcatattcaacatttatataagaagacaaaaaaattgaggtggggccacgaccccctttgcccatctcgtg

SEQ ID NO: 8831 - DNA, 761 bp, Zea Mays
ctggtaacacaccagtgaaattttctttgacgacatcctaagaaatgctgaaatttcttcctcaactgctaaaaacagtctgagaatactgaaggaaaaattcatatatatttcagaaactagtagatgcaaatttgtctttccagacgcattggaatatttcacgaccatgtcaaatggttctataactctgatgccattactctccatctttaaaccaagtatgtttccattcatctccatactgtcgcctttcattataagcctgccacaaaaaaaaggatcaatctccaacctcccgagaacagaaagaccattgtttaatgggaaattatctgcgacacattgataaagagtggtttcagttgtgggacgctgaaaataacactatttatttcaggaaacatcttgcacacaaaatcttgccaaaaatggaaattttaatcgatgcggtgtgccactgataataaccaacgtttatcggtgtgttcttgataaatagtactatttccagtgtcccacagctaaaaccactttttgtcagtgtgccacaaacaattctcttgtttaatgagtgaggcacatgttggcaaaactttttcttcctctaaaacaaatgatgtgcttcaataagtttgttggatccgtgattgtgtgaattccttgttgaatggtgttatggcgagttgaccagttctggccctgaatgtgctgcatcagcatactacaattaattcacagttttgtttctttcctcgaac

SEQ ID NO: 8832 - DNA, 480 bp, Zea Mays
acggcggcagcccgagctccggcaaacccgtaccggccacgacactcaatgaccggtgctctaacttgagacctaattcaacacctaacaaacgtttccccttgatcaattgcatagttcgagctctaaatcaccctgtctacggagacagtgcgaacaacggatgagcagaagtgttcccggcgatctagggcagtctagattaatcaaacgagtcaaggagcatcaaggcatgtaagggtgctgaaacaagagagcagaggacaagatcggaccaaaaacgagctagccacggcgaggacctttttacgatggcggaaacccgatttggggaaagtgagcaattcgggggctcagttgaacaattggagggacgaacgggtggattggatgcttgaatacctaacggagccgagggcgtgctcaatttatagggctcttgagtggtggccagtgaatttgagctcgcgcggtggcggt

SEQ ID NO: 8833 - DNA, 778 bp, Zea Mays
cggggacacaattttccaagaactcaggggttaattcgtgaaaaacaagattgaaccgtatttattctataacaggcaagggacgacgggttgttttgtgtataatgtaagggctcttttgcaaatgaccatggctgaaagggtacgagtatatttcaaccgtcggatcgacttttgagggcacgaattagatcggcatattacgcgaaccagtattcaatccgggctatcaaaccagtgatcggtggttcggatttaataacgcttctcattcaactttcacccgcccgattcttgatcaatggtcgtgataaatcacagtgaaacgatctggtggcacccaatcctaaccgccggccagccgatcaacggccccggacgcgtcttcaacctcccgacatcctgcacatagtggcgcaggacacccagcgacggcgtccttgccagtgaccccgcgcctgattcatttctatgcgatgacaggaggatggtgtatatcacggataaactctcacctgggatgtaggcacagggtcccccgcccacggtgggttgcgatttcacggcgacggtgcacctccggcgagaagttcgcccactgctggtcaccaagtccaccccgtgaagatgctatccgcagaggtgaacgctggcgaccccacacaccgccgcccttcccctccgcggttaagcgtttcaatagcggctcccacgacatgctctcatatggcggaaacaaccgaaccaacggatgaggacccgagatccgcatttggtc

SEQ ID NO: 8834 - DNA, 595 bp, Zea Mays
cgaccagtggctcacaaactctggtgagtcgaggcggtgacgaggaccaccaaaacctgagcgaggccatggcgtagaccggcgatgaggagaatagggacatggatctaggtgagcaccgacgtggtggtgtagccatgggtgaggactatagcgggggtcgaacagggggcatcagggagcaacggttcggacttggctaggaggccgacgcactggcagagcaacacgcaaagcggaggaagggcgaccactagaacaagagacgatgatggccatggaaggagaaaaggacatcgtggaacctgcgtgagcgcggggaagggacttagctagggtgtgatcggtctaggacaacacgactaggggagggagaggcactggccatcagcgagccccggccgtgacctccacagggcagggaatatgccaagcgcattggggaggacactggtggggtggccatggccagaggaagaggcgttggccactagggctggaacacgacgagcagagccagaggggtggacgtccacgcgaacgcctgctcgggcaagagtcgtggctggacacctagtggaggaggagattgtca

SEQ ID NO: 8835 - DNA, 314 bp, Zea Mays
cctgccactccactggcactctgcacgacgatgcgcatcaccacaacggaaacacaccagccccagcccgggcttaggaatagcccgaaacctctgagtacttcctcccgaagtacccgagtcagaagatttgccacggtaaggatggtggcgctgatgctgagacttgcccctcttgtgggctagacctccagtgttgcccctcctcgcgtcctggccatgaggctaatcaacacctgaagacttctgcgactccatggtatactgatgctgcatctccacacccagtgcctgctccactgtagtacggaagt

SEQ ID NO: 8836 - DNA, 732 bp, Zea Mays
agttcctcactcgaagtctggagaatcaacgaccaaatggtggaagaccgcaagacagaatgggggatttcctgaggctcaagcctcccacgttcgccgggtctagcaaccccctcgatgcagacgattggatgcgcacgattaaaagaaagctggaagccattggttgcccagaaaatcagcgtgttcaactggctgcccaccaagtttccgggatggccttagcttggtgggataccttcaacgtcaccatcagagatgctacctggcggagttcgaagcagctttccgggagcaccatatgccccaagggctcgttcagcttaaggaggacgagttccgagaactgacccaagacggaagatctatcagcgaatatgtgcacaagttcacagagttagcccgctacgcgccagatgacgtcagtaccgagggcaagaagatggcccgcttcttgaagggactcaggccagaactcaagacaattctggctagccaagacttcctcagtttctctcacctttccaacaaggccatacaagttgaaagggcaaaggaggaggaaaaagggcatctcaaaagaaagttccaggttctccggtctcagcagcaagaccggcaccagaagactcgatcatttggatttccacccaagggaccaaacttcagtagaccagctggacccaccccgtcacggtttagccagcagagtcagagctctttccatgcccc

SEQ ID NO: 8837 - DNA, 541 bp, Zea Mays
tccttcgaaagtaattgccttttggaggggtcgtctcatttctcggacttcgggtcctggttccgcccttcccccgggtccctgacgggtgggacccctcccacttttgcctgcttcggtgaattcacaagggcggtcttattaaaaatatacgaacaggcgcccaaagcgtccttggagctctcgctgggtgtcacttcaccaaaaccccaaaccactcctttgctctcggctctccggcgatcctcagaaaatctggcaatggcgtaccggcgcgtagacccggagccgttcctccctgcaggcttcagcgcctcggtggtccaacatcgtgggatcatggtcaggtcagtctcgcagcgattaccgccaatgcatgaagactgggcgattatcaatattcaccctttgcctgagcacgaggtcttgttccctgcggtcagagatgtggtcagagagtacctcgttgagcatcgtagggccggtgttagagccattcaacgctctcacttgggccaggtgatagtgcagtttcgtagtg

SEQ ID NO: 8838 - DNA, 560 bp, Zea Mays
aattttgagaagacgcgtggcggccggagagagggactgagtcaccacggtgttttaccgtggcagtcactagttgaggagcaacggcggtcactagtgagttgttgcggttagcagcggcatggttaaagggtcatggcgtggcgcgatcacggcgaacgacatataccacgacgacggccacttggccacatcgccggcgtaagtggatgggcgatagagcgaccatagtgttctgagttcatctgcgacgagatctttttactgtcgagcgtaattcactcatccgaggcacgaatcgtgatggtcagcgcgaatccgggcgtgggatcgccggcggcgaggttcagcgcactagggatatttttcagatactgtaccatcagactttcatcagagcgtctgacagaccgatttgcagggcccagatctcagatttttatatgacaacttgttaatcctcctgtaacaaagttgttgatctataatccaactttgatcttgctatagcaatcatacttaaattctcactgtatcatactcaaaaaagcttccaaact

SEQ ID NO: 8839 - DNA, 564 bp, Zea Mays
tattaagcaagggcaaatcgaagcgatgaaagggagatactttcatgatattttcatcgtgagggctgaaggggagagtactgttcctcttctcgaagctgatgaagtggtgattttcagaagcttcatgaaagttggacttcggttccccctggacaaggtgttggtcgaagttctaaaaacttttgaaatttgtcatcatcaacttatcccgaagcttttatcaaagaaggggtttttatatgggccctgaggagccaagggttagagccagacgccaggtgtttctgcaatattcacgaattatcatatcagacgaaggcgactaggaaagaacaataccacaataattttggctactacagcttcgtgcccagctcagaggccagttatcctatgcctacatttcagaaaaagtggcctagttcttcgatgcaagagtggttttatgtgaagaacgacctgaaccagagggaggatataaggggcatcattcaacgtcctatatggtcacgcttcggcatcagataacctttagccgcactcggaaatgacgtgcaagcg

SEQ ID NO: 8840 - DNA, 619 bp, Zea Mays
caggataataaaagcatggattccaaatcttcatccttagttcaactagaagtggggttggtggatatatttgttaatctgtgccgatttgagtggcagacaggacatcgggaactagcaactgggctatttcaggcgcagatggagtttagcttatttgcccctcctttgtatctgacaacaagcagtaagcaaaggctctttgaacacttctggaacagtggtggtgccagaattggggaagatggagctcttggatggtctgaatggttagcaaaagacgaggagagtagacaaaagttgtctatgcaagaaaattcacaagagactgaaacaggaggctggagtggttggtttgatccttctctgggtaatactgagacaaatgatttatcaaacaaatcactggaaccatcattgaccgatggaaatgatgctgaagaccttgatgctgaggactcaccagcacaagatgatgttgaatccttgctgaaaaagcttggtatcgatgtagatgcagagtccaatagtgaagttaaagacgcagaaacctggaatagatgggcctcaatggagctgtcacgggacaatcagcaatggatgcctcttcatgaaaatt

SEQ ID NO: 8841 - DNA, 552 bp, Zea Mays
gcctccctcgctgtcgctttcagcaccatggcgatgaccccctccctctacatactctggtgcctcctaccacaccactcccactacaggcacgctctcccgctcccatccccctcattcctctcatccttcatcgatcgtcgtttggaatggttccactctacccgtcacctcagtaggtgcctcggttctccctggaccgttctacctcaacgacgttctcgtagccacccacatcactcataatctcctttctattcgtcgtttcaccactgacaactcttgttccattgaatttgacccctctagtttctctgtgaaggatttggccaccacgactccactcgcctgctgtgacagctcagggcccctctacatgctccggccatccacctctagcgcgtctccgcctcctgccctagtctccaccacctcctccaccacttggaatcgttgtctcggacttctcggacctgatgtcatgaccaagattatcagcagcctagatccttcatgtagtaggggacatgttgggggccttcggcttccgaa

SEQ ID NO: 8842 - DNA, 278 bp, Zea Mays
ttcccatatggaatgtagatggtcaccctcgaccacaaatcctgaacaaaagcatcagtcgctatattctccttgcctctatcatacaccattctgaactgtaagcccattaatttgttcatgaatttttattgagtgtatggctgagactgaactgccatagcaccgtttcctgggctaaaaccatttagccaccattgtgtcagttcagatatcccatgtcgaacactacctttgttttgcctcccctcaaagagcaacacgttcttgcattccaa

SEQ ID NO: 8843 - DNA, 428 bp, Zea Mays
cacggggtaaaatctcctagacacagtgaacagtcgcaaatggatcgcgggttgatttctaatagatccagggtttctttagtaaaagatctcggccgaaggggtacgggagtctctgccgtccgatctaaagtgagtgtccccgattagactcttcttctgcgcgaaccggtatgcaaatcccaccattggaatggagatctacggtccgcgctcttcataatcaagattgacacgcacccctcggataatggatcgacggtcataatttatccgcgcgaaagggtacctctgatctaatcagggccgttcgtgaatagatcagcggcacaggcaccatctccttcccctgcggtgaacgacggcgaactgagccgtggcgccagactatactccggcgaggacaagctccaaccctagagcgccca

SEQ ID NO: 8844 - DNA, 785 bp, Zea Mays
tgaccaacaggaagatgatatatctgaagcatccgcagaacttcagttgtgtctgtctcaagctgctgtgactgatatttcagcacctaaaacagtaaagtttgtgggtggtattcaaggaattgatctgctggtattattggattcgggtagttctcattcatttcttagttcccgggtggcccagcaccttacaggattaacccctatgaccaaggaattgtctgttcaggtggccaatgggtgtcaaatgcagtgtactcaacagttggtaggggctgtttggtcgttggggcagtgcgagttccagtccactttacgtgtgttaccactcgtgacttatgatcttattgttggtatggattggctggagcagtttagtcctatggaggtgcattggactgagaagtgggtggtcatcccttacaggggtactcaagttaaattgtttgggttgcaatcttctaaaggacattgttctctgattgaggtgtgccatttgactgagttaaatgagaaggaccagactatcatttctgagttgtctggtgatctacagtcactgcttctgcgctaccagtctgtatttgcagtgccaactggtttgccgcccaccagggattgtgatcaccatattgcattgttgccaggtgcacaaccttttcatatgcgaccttataggtatgctcctgcattgaagtctgagatcgaaaagcaagtgacagagatgttggatgctggaattattcagccaagccaaagtgagttctcttcttcagtgattc

SEQ ID NO: 8845 - DNA, 463 bp, Zea Mays
ggatagggttcctcgttgatctaatagttatgggtaaccaggatgcgactatagatgtcatcctagggatgaattggctaaccaagtatcaagccagtcttagctgtgataagagaacagcgaagttagtatccttatcaggagaagaagtgttagtggagttggtcttgtctagaccaaggaaaggaagctgtcaccaagtcaccacccatattgaggagattgaaccatcagaagctatcaatgtagtatcagaattcccagatgtgtttctcgaggagttagcaggtatgccacatgaaaggaaagttgaatttgccatagatcttataccaggcaccacccatatttccaagagagcatatcgagtgtccagactagaattggtggaactcaagaagcagattgatgagttgttagagaaaggctacatcagaccaagtaccttgccttgggcagcccc

SEQ ID NO: 8846 - DNA, 369 bp, Zea Mays
agggtgttgccagtgataatctggctcaggtgggcagcgcgagctatgacccagcccccgagggtgtccgagcgggttccccttctcatacttccatggatgtccatgtcaggtcttctcctccacactctggttgcatggctgcagcacgtgcttcgggttaggaagtcgccttagaggccggcgcacctgacgctagagttttggtttctgccggtgatgctgaattggtccccaatgatgctctatagattgcttcagttggtaatccttcgtcaagtcaccaactgacttcccatgatttggggcttcctttgttcttctccaatctctaggtaatttggcttttcttgatctgaccatactccg

SEQ ID NO: 8847 - DNA, 766 bp, Zea Mays
gtgcgagtttggagatgcgccgtgggaggaaaaccgagtacctcgacatcccactcaaggacagcatcaaaggatggcgcctggaatggtttatcgtagagaatcacgggaattatctccccctcggtcagggagacagccagatgttcgcgctccaagttggactgaatccccccatagacttggaggcagctgaggccggggctctgcttgccgaggttggcttgttgaaggagaagggtttgactgccgaggctgtggtcgccgattttgtttttaagaacattcaaccactgaaagacagagcgtacccagcttatctgtatcgtggcctcactgattcgacccgggttaccaatagaaggattcctactgtggatctggtaagccggcttgagatgattcttagagacaaggtgtcgaatgtcggtgcttctgttgcatactcagcctggaatctgcctccttccaaggctttcatcagttttgtgtcaaatcctcctgctggtgacagtggcttgggccttagagtgcgaccttctcccgaagaggttgaggctttggttgtttcgcttggtgagatccccgatgacgagaggcaggttcattttgagatgcctttgaatccgagcgacgcagaaataagtgccatgctggacatgttggctaaggattcctctgattcggtccctgctaaaacactagctgtagcacccatcccagagtctggaaaaactttggacattcagagatctgatagtattcg

SEQ ID NO: 8848 - DNA, 815 bp, Zea Mays
atgaagttagggctcgaatataagcatgatctagtaggaatttggctatagttgttatggcaacattgtagctgaatcattggtctacaactttgttgcagagctttgggtgggatgccaaagaaaattgagagaaaattcgccctaaacatagactaacagactgtctgaatgagcctcgcgatggtacagtactgaaacagatcgactgcccagccgttcaccgtcgacgatctctccgccatgattccagctgtcgctacgattcgtgttgcgggaaaggggataagcacgatggagtgaaaatctcggcactggattagctcgggctcagacacagataagattcgtcgtacccccttgctcatcgatcactcgggataggatctcgccgtcgttgagccatcactgccgtctgccgcgtgtccagacactttaccacgtcgcggctaaccgtgctacgcatatccggtgatcaccggaggagccgccacggtaaaggccacgttgcgtggccaccagtgactcatcctgtttttaccgatcacgctccgccgctcaaattcgttgtgctcgcgatcggtctctataaattgaagccaccgtgagcttcgcaagatcatcgcgtacccagccacccagtattgccctcagttgatcactagcaagctccaatttcggatttcccccaaaaccttcaagaacaccgtgtgagttgatctcgccgtggtcacccacttccaggtctgttcatgctctctgctgccttgtttcagcattagtgtgcttccctgatgctcctcgaccaacccaat

SEQ ID NO: 8849 - DNA, 721 bp, Zea Mays
cttcagctgatacaaaggtacatgatgtgctagagaagactatgagtcctccttcaccctctgctgctgaagtttcggagattctgaaggtaatgactgaatccataccatttacactactaagtccaatgaggttagatctgactagcctcttacaatcaaaggaaatcgctccatctacgaaggagaaggccgagaagtagaagaaacgacagatgatgaatgtgatgcaagctattgaacaaatgtcgcccctagcttcggcggataaaacatctgtgcctattgttgccgaagataccgctagagccaaagctgatgaactcgcaaccacaatgtcagaaatcgacaaactcatatcgaatgtggttgcagaggaaatcgtagccgcggcgcctgacaaaggaaaaagaattgaagatgcctcttcggaagacaaggattttgacctttgacacttaggtggccaagaactttctgaagaagataaatcaaaattgagagaatttgctatatcctgcggttaccagaccggatccatactcttcggcggggtcgacgaagagattttgggatgcattcccgaccgcgccggggcaaaaatcataagcaccttatccaagagtgttggattttcgaagctggaaacgaacatcagctgctataggcggcaacacgttatcgatagcttgttctaatcaaactacaaagtaagactttt

SEQ ID NO: 8850 - DNA, 398 bp, Zea Mays
gtcggggtggcaggctatgtggacatgtcaatgtatatgtatgcacgagagagggccggggtgcggtgtccgatcgatcggcaaccgtgtccgaagatcgcctcccgaaacagaaacgccgataggtgcgccgacttgtggaccttgatgaagagcgtctatggtctatgcatgcatacgcatgcaaggttccggcgtagcagtcacgtggtgaagcagcggtacgcggttgattgggccaccggtcagcctacggttgtttaacatgggccaggttcgttgataaaggaatcaggcccgtgagaaaggccctgatcaccatagacgagattgggtcccagattttaataaaataattgcggaggccctgacggctgacgcacagtaatggatcgtcg

SEQ ID NO: 8851 - DNA, 631 bp, Zea Mays
gaggaatggaaggcagtggagtagacatattctgacccaagtgtctggagagtaccaattatcaggtacatcaaaaacgaggaggagctcgatgacaaagctactgctaagcgcattgcgaggcagtcagcccattatgctatcataggagacgtgttgtacaagagaggggttgctagagtactcatgaaatgcatcgactaaggtgttgagaagcctttgctgcaagaaattcatgcagggcagtgtggagtacatgcaacatcgaggactcttgtggggaaggccttcaaagcaggcttctattggccaacaatgaacaaagatgcaactgacctagtccaaagatgtgaagcatgccaattcctggctaggcagcaacacttgccagcacaacaattgcaaactattctggtcacctggcccttcgcatgctggggggttagatatgatcgggccattcaaagaagctcagggagcatacacccatgtgcttgtggctatcgataaatttatgaagtggatagagtacaagctgattgcaaccctaacctcatccaaggcagtggagttcatctagcagattcgggatacccaacagcatcatcacatacctgggatcgaacctcac

SEQ ID NO: 8852 - DNA, 537 bp, Zea Mays
cccctgccaggctaggtgtgccgggcgcgggtcgacgtggcaggtggtcggagtaccgcgcgcatgcaccgagtcaaggtgggtcgtacgtgcgcacccactattaccatttatgcatccgtttcattcgaattccgtatgcatacacgcgtaactgccacggtgagtccgctcgttccgcgcgggttatccggagtcgtggtgtcgtcccgcgtgggaattgaccgcgtttatacttgcatattatgactccaacggttacataaattgacacagcgatgcgacctggtcggtgtggtgtagtatttgggatttatgtttgtataattcgatgttaacaactgcgtatcaattgagatttattatattacgtactttggcgtgggtcttgattaattcttttttgtaaactgtttacgatactatgcacagatatttatgcttattatgaacacacagtaaccaaaccttccaactgactgtgcgctgactagtggacccacagtccctcgccgctcccccgcgggccgaccgagc

SEQ ID NO: 8853 - DNA, 568 bp, Zea Mays
tagagctgatcccaatgggtgtgaccctgtgccgtttattgtccgtattgttgacgaggacgacgaagaagaagaggaagtcccattaattcggaagaacagtcggcgttacagagttagtggggggagtagcgatattccttctctagctctgtctgctcttgttggtctgcaaggattatccatagcaaattttgatcaggctctcgaggatgttgttcctgaagatctgatgcctgagccaactgatggtgatatgatggacgtctgctctgacattccagatgtgggattagaggtatcccgggcagcatctcgtgcatcgtcgaccttggaaggcggacttcggagccaagaggttggtcaaggtcgttcaattcccatggaggtgactgagaatccttcagccttagaggtggttgttgtggagaacccagtcctcaagggtggtgccagcggttgcccagcccccgagggtgttgccggtaatgatccggctcgggtgggtagtgcaagctgcaacccagcccccgagggtgttgccggtgatgatccggctccgatgggc

SEQ ID NO: 8854 - DNA, 430 bp, Zea Mays
atcgcctgtcagaagggtggataggcggcgtgtcctttctgcaataaatgtggaggtcgtgtggcccaaagcccttacgtcatgctccgcccgctggcctacgtcacagacaataagccatgtggcagcattagaccctcgaccgagtggggagcggaggcgctccggatagagcctggacacgcgtcaataccggacccatgcctaggtcacgacacttcctctcctgggaccttgttatgggtggtccggagctcacttggtggggtccgaaccctatccaatggatccgggctactttacttcaggggtccaggttgcgcgtacaggggtcatgtgccttctgggtccgacggcgttgtctccgagaacgccaccttaactgctcacgagatactcctagggctgttctccgcgcggctaagcgtag

SEQ ID NO: 8855 - DNA, 846 bp, Zea Mays
gctggatggtggagctccacgacatcaatgtcgccatgatgtatgtgggacattggttttggatccctaacgtctaccaccaggggcagtagggttgtaggatgacacggctacgacacgacggaggtcaactacactgtcgtcgttgtcgacaccagcttcttctatgtattcagggacgtcgtcagaatgaggcttgttgaggctgcccaacgacatcaccagcgacatcacagcaacgtcggagcgaagaagctaggagagaacttttcataaatccaaaccaggcaagtagacactgatgttgatgtgaccattttttgtaaggcttgtaggctccgatggcactctcgtgcctctccagttgcctcctgatcccaatggttgttgccaccgcacacgtttccccatacctaaaatattcacccatggacgtgctttcatccttctgaatcacggacaagacttcttcttcgtgccctcaaaccctagccccaagctctccaacatgatgttagagcctagtcagggtgccccattcgtgtccgtgtcatcggatgagatgcgacactaagagatctagggccccacattggagtgcaacacgtcatcgctggctgacgagacacagtgggacctcgatgcgctccaccgctccatgcagcctcaacagcttgcttgcgctcctcgaaggggcgcaccttgccaccgatacatggatcttttatggtgacccacccctcagtattggtttcatcgtggcggtgtagggagtggaaggattcacattccgcttcacggtctccctggtgctacaccacaccatcaagcccattgccttcttct

SEQ ID NO: 8856 - DNA, 338 bp, Zea Mays
ttccgatgaaattgtcaagaggtacttgtctgttctaaaacacaaaacatcttgagatgttcttgtttaactgagtatgtttaccactccttgttccttatattgtctaccactcaggatgtatccgtccagaatttatatttagttcctgagcagtcctgttatttataattgtattgtttttctaagatttacttcttaattacattgaaacctatggcaaagtaaatcataactgaatttgatggtacatatcatactacgaagccataaatagaactatgcattaaattttcagcccttcggccctttttcgttttccactgacatggtactca

SEQ ID NO: 8857 - DNA, 281 bp, Zea Mays
ttgcaggctttctcggatggtgtgtctactactcctggttttgtagtccatcggccaaagcgcgaggtagcatccagcaggtccacccctcaatttctgaattaattaattattattacaaccgcgcgcatactaattaaatcagaacatgtgaaatggagatgccacatatcctctcgtctcggcgctccacctcagctctcttgtgatgcgattccccctccctacagctacaacttgctcaagcatgtaggaatgcagcagcagcatagccggcagac

SEQ ID NO: 8858 - DNA, 528 bp, Zea Mays
cttgcagattttccagggatgcgctaagttctgctactcgagctagagctttggcttcacaatcccaggcgagcgagcacgagtttacgacccagtcaatggccgtatcacatttcgtaatttcctgctgcaggcgattaacttctgctgatagttcaacaatgcggcggctatcgcgcgcacgctccctacacccgtggcgtagctcagacctaagtcgcttcactctggcctccaaatctctgatggggtcgttacttccacttctgcttccttcatgtctagaggccagctgatgtcggggtacaccatgtggtcaggttgatttgtgctgagtggtcttggcgccatatctccataagaggggaaaactttatttagtgtagtttaatcatgatgcatgcataacctaataataatgggatcaacttttcattgatccccaatttcctacatatacctttatttagcactctgttacccgactttaaaaggtaagtgactatcagaaagtgataagataagaat

SEQ ID NO: 8859 - DNA, 635 bp, Zea Mays
cctgaatttactgacgctgaactcgatgggggtgctctacctgctgctgaccccaatgggtgtgctccttctgctgctgaccccaatgggtgtgctgtctgtgttgctgatgaagacgactgtgaggaagaagatgaggtccctttgactcggaagaacagtcgacagtatgccgccagtggtgaaagtagtggagttccttctcctgctctgtctgccctcattggtctgcaagaattgtccctggcgaattttgatcagactcttgaggatatggttccagaggatctgttatcagagccagtagatgatggtgtgatggaggtttgtgctgatgtgctcgatgctgggttgaggtcatcccgtgcctcatcgaccttagaacgcggtcttgagggtcaggagactgacttggatcatcttggtcccatggaagtaactgagggtccatcaaccttagaggcggctactacagagaacttggtcctccgggacggtgttgacacttgcccagcccccgaggatgtcgccggggatgactcggctcgggtgggaagcgtaagccactgcccagcccccgagggtactgccggagatgatccggctcaagtgggcagcgcgaaccgtgacccagc

SEQ ID NO: 8860 - DNA, 426 bp, Zea Mays
tgctagcgacagtggcttgggtcttagagtgcgaccctctcccgaagaagtcgaggctctggttgcttcacttggtgatctccccaacgatgaaaggcaagttcactttgagatgcctgtaaacccaagtgatgcaaagataagtgctatgttggacatgttggctgaggattcctccgactccatctctaccgaaaccatagctgctgcaactgtccccgagcctgaaaataccttgactactcaaaaacctgatggtgctcgctcaaagcgccttcgcccagccactcatccaactgctcctgccgaggggaagaagaagaaaaagaggaggcttcagcgagtgtcatgtttgaatcaggatgccggcccttctgctcctgctactaaggaagtgtcagtggaactttttactggagctgatcc

SEQ ID NO: 8861 - DNA, 836 bp, Zea Mays
ttttgattttgattattttgattccaaaattactaaagctaccatcttctcttagtagacttaaagattgttcttttgatgtttgttccaagatgctagattctatgttttcccatataaaaaccacctcatgaggcactccttatcaacctgagaaggccaaaagggtatcaaaagacttaaggtcagacaagagggtgtttgagtttgtcaacaggaagcattccaacacaagttcaggctttgggaacagagtaaagaggccactggaaaacacaggccacaaaggttaggaaaattcagaaccccctcccggctcgttgacctaacttcttaggaattgcatttcgtttctacagcagcagatgtatcaccaacatcagggtccgagtgagctcttcaccacgaggacatcctttccaatggagcagcatccgtttttgcgtggaggaaatgcccaaggagattctgggctggttctctcaactgacgctaaaccaaggctgaaatggacacctgagttacatcagcgatttgtagatgcagtcaatcaattaggtggagaagagagtaagtattatattcttataccttctcaagatatagagaccagctgaattcttatatttctattcatcacccagaagctactccaaaaacagtcatgaggctcatgggaattccaggactcaccttgtaccatttgaaaagccatctccaggtactttggaatcagaaacccgcctgctaaaaatgatattcttaactgctgcagtaatcaccatttcttgggtgttacagaaatacaggctcagcaagaacctccaagctcaagc

SEQ ID NO: 8862 - DNA, 495 bp, Zea Mays
caaaccacacccaaggtagccagcaaagctcataatcttcgagaatgcagcaaacctcctacaggccaccatctccaagaggcatagggggaagaagcttcggaggaaggtttagcactcaacccaggagattgttttgcttattctgtggggaggataagggacacacaacaaggatatgccaagtcacgatccaatagtagaaagagatcgctgaagccgaagcacggcagaatcagctgaagcaggtcttgcatacagcctcattctatttgccatatatccctgaatatgtgggcaaccaacaacctatgacatcagttgcttcgacaagtcattctcaagctgcatgggctcagttaccaccaccaccaccattggcaacctaccttggctcataaccagcagccagaagggcatcgccaagtgcaaacagcgtgacactcgagaggagtccaaggctcgcacagtcaacagtactgtgcccgaatcgat

SEQ ID NO: 8863 - DNA, 821 bp, Zea Mays
ctgctcgccattcattggctgcccaccaggcaccagccatactgcgcgtgggatatctttgcgttgcacgtggtggccaggccccatgcctaggatgctaagccgtcggccggggcaagggtgggagctcagcctctagccagagtgcgcgtacagggcgtgaggggtaagccgccataggtgttgtgcaggctacaggagagccacgcccgaccgacctgcacggtagccggtagggacacggtgaggggttgcaggaaggggcttggctacgaccatggtgaggttgcggggagacttcaggcagcacgcggaggggctgctgccgtgcctaggcgtgcgagggacttcagtgatgggcaccggtaggatcaacgaaggaggaggggagaagaagaggactcaccccggtcatgacgatcggtaaccgaaggggcgcctgctttgtctgagagaagtggaggagtgggcgggacatgggcgggcagttggagaagaggaatactaggaggggaaggaactgacgtgcgggaccctctgcgcagccaacagcctggagcagcgtgatgctaggcgcgggatgggctaggggaagcaacgcggcatgggccgggcgcgaagcgcgcgctgctgctggcgggctggcgaggaggtggagctggtccgcgcgcgcaggccggccgggggtaaggggctgggctggctaagaaaattgaggaagcaaggccctttttctattttcttctttttattcttttcttttatttctattcataattatacacaagaaagagcaaccaattaaatggatacacaccaag

SEQ ID NO: 8864 - DNA, 450 bp, Zea Mays
gcctctaaggctgaaggcccctcagttactttcatgagagcaagacgatcaaagtcagtttcctggccctcaagaccgcgctctaaagtcgatgaggcgcgggacgctgcccgggatgaccccaactcgacgtcgaacacatcagcacaaacatccatcgcgtcaccatccgctggctctgataataggtcctctggaaccatatcttctagagtctgatcaaagtttgccagagataaatcctgtaaaccgacgagggctgacagagcaggagaaggaaccccactactttccccactggcaatatactgccgactgttcttccgagtcagagggacctcattttcttcccccctgtcgtctttatcagcaacacaggcaacacccccattgggatcagcgacagatggagtacacccattgggatcagcaacagacataccacaccca

SEQ ID NO: 8865 - DNA, 321 bp, Zea Mays
cagggagtaagtatgcggcggcggaggttcttgactcggcttcgcgagccttgtgaatgatagggcgtgggttccgtgggtcttatggtcgaagcgcaaggccatatcggccgcggccgggacggacggatctgttgcagtgccgacaaacccgggtggaggggatacctgacaactaggccccatatgtcatcgccatgcacatcgtgcgcagggagacgccgaccagatggttccacccatcagcgcacagaagagggcagcgcgtgcgactgacgaagcgggaccacacgtcggcgccaacatcagcccttggccgca

SEQ ID NO: 8866 - DNA, 386 bp, Zea Mays
tactggtgcttggctcacttattcctgggattttgtggtagggttacccttgtctggtgtcaataattgtatttttgtagtggttgacaagttttcaaaatttgggcacttcattccatgaaagcacccatttacagcacagctggttggcaatgttttcctacagcaagtctatcgtctacacggtatgccttctttatttatatctgatagggaaaaaatcttcctctgatttcaagtgaagcaactccaagatggtgcctttatctctcaaacaaagtacacacaagatatcctcaagaattttgagatgaaggacgctaaacccatcaagacactaatgggaacgattggacatttggatctagacataggaggtaagtcca

SEQ ID NO: 8867 - DNA, 377 bp, Zea Mays
cattaatgtattagcctccagcatcaccttataacgtttgaactcaagagcaagatttctctgctatgtacataatgttggccatggaagggttgtacactttgtgtcctttgatttctaggaagtcaaattcaagattacgcactatagagtttcctagattgtgtcggtgatggtggaggtgcggtgggggtcctcgggagtggaagaagagacagaagcgatgactggtgctgtagagggggtgaggaatggtgagtggtggccagcatagcaggatactaagggcatgtggaggggacagccatggcccgacccagccacatggagacggtcctattccatgggtcgttgaaggacgactatgagggactgcc

SEQ ID NO: 8868 - DNA, 653 bp, Zea Mays
cgggaatcggcttggtggcaatatgttggtatccatgatccaggatctgctttctggctactgtgaaactccttctacaatcaacatgagagatcgagggcaagtgggtcgttcaaagatgtgttaatgttgatattggtgccactcgatcgaccgatggtggcgatgatgaaagtgttgacaccttttgtcttcagaagcaaccccattggacaagaaaatcattgattctaaagatctcaacgacgtttaccctgactacaacataaggctgactataaatgatttgttgatcgacgagcagaagaaatttaaagactatatgaagaagcttgatgaggagttccagcgatgacaagttcagaagtgtgaggaggcgtaggaaaaatacttggttcacttcaagaagatatgatggcaagacgtacagctctccgaatatttacaacaaatgcatgcatgtattctacaatgaactatctacgtatataagctttctccaatactatcgacctcaagacgacactacaatattttcctagtgaggtccctttgggggcgagatccaagtccaaccaagggctctctacgtggccgcggacaatccgccccctaccacagatgatccagtgacctattgtggatagtcaaat

SEQ ID NO: 8869 - DNA, 638 bp, Zea Mays
ctgaaacgtccatgtaggaagccacatcaatgtgatcgctagctacatgctccttaagcgtggaactttttcttattgctgggcattagaaaatatagtgtaggtaaaaggagaatgatgtgcataggtgtacagactaaccgctgatcgaaaaggcaaactgttgagtatctcgtccacgctgcgccacaattcgtctcgtccacgctgcgccacaattcacccaggcagcaagcacccagagcactgaaaaaacagctaaaaaagaattagctaaccagcaaggacatatgtacacagataagcacgcaaatatacatatgtatgcagattccttgctgcattggccatattttgttgtcactttaccaaccgataattgtagtatgtgtgtatgtatgtatgatattactatggaaaaaatacgaatctagattagatatggataaccgaaatgttttgtcaggcctaaaacagaaatcaagcggtaagtactaatttggcaccatctaagtctagcctctaattatgtctcagaagcagcccagccatccacattattaaaaaataccaaaaaatcaatgcaaacaatggatgatacgaatgtagaagaccacgatgtcgcaggaagcatccta

SEQ ID NO: 8870 - DNA, 480 bp, Zea Mays
tgggaaggagaactcactcggacacccttgggggctgggttacagctcgcactacccatcggagccggatcactaccggcaacacactcgggggctgggttgcagcttgcgctacccaccagagccggatcattaccggcgacgccctcgggggctaggtaaccgccagcaccacccttgggggctgggttttctgcaacagccacctctaaggctgaaggatcttcagtcacctccatgggagtcgggcaatcctgaccaacttcttgacaccgaagactgccttccaaggtcgacgatgcgcgagatactgcccgggatacctctaatcccatgtctggaatgtcagagcaaacatccatcatatcaccagcagtcagttacgacagcatatcttcaggaatgacatcctcatgggcctaatcaaaatctgttatggataattcttgaaggctaacaagggcagacagaactggagaa

SEQ ID NO: 8871 - DNA, 444 bp, Zea Mays
gaggtgtaagagtgtcacaatagccatcagagtcataatttcagcactagtgggtatcagagataacaaagttgttaaaaggcgttttcattttgaatctttttggaatgaggtggtgcacaatgcttggaattctgtccctgttggccaatgtccatactccactcttgatttaaaattcaaggggacagctagggcccttcaaggttggagcagcaagaaggtggggcacattgaggctcagctgcaacttgctacagaaatgatccattagcttgagattgcgcaggatggttgtattctttctgcagccaagaggtggctgttgagcaatttgaagaaacattctctggctttggcctcaaccaagcgaaccattgcacgccttagatcaaggatttcgtggctcaaggagggagatgcaaactctaaactgtttcattc

SEQ ID NO: 8872 - DNA, 680 bp, Zea Mays
atttgcctcctaatcgacatactcggtggatatatagacaaccccagccatagcttgcagagatgaatcctcctaatcctctaccaggaagagttgacccactggttgctgctcagatgaatatgatgcagcaaatggcggacaccatggtagatatgcgtgcacagatgcagcaagaacgccaggagatgcgtcaagaaagataagagatacgacaggagttgcgccaggagcgagaggagatacgccaggaaaggagggcgcaacaacagcagctgcaacagcaaatgcaacaacaacagcaacaacaacaagtaccactgcctccacctccaccaccagttccaccccgtgataagcatagggaattcatgagccataagccaccaacgtttgcaagttctcctgatccactagacacggatgattggctgaagtccgttgagaagatgctgaatattgcacaatgcactgaccgagagaaggttttatatgcatctggacgtctgacaggtcctgctgctgactggtgggattcatatactgctgcccacgatgctgctgatactatcacttgggcagagttcagtacacggttcaggaattatcatataccagctggattaatgaagattaagaagaaggaatttctatcgctaaagcaaggaagtatgtcagtc

SEQ ID NO: 8873 - DNA, 431 bp, Zea Mays
gggaggtggaagacggccgtggagcgtccatccggtgatctacggctgagattaaaacatgcgtaatgtttcgcgttgggtcaatctagagcgttgatcagcgatcggatgactccgggtatggatgtgatctccaccgttggatcaacatctgatggtcctcgtagcgtaccggtttaataaatgtagatctaatctaggccgtaggtgtgagatcctgcggctgagatcagcagataccccttcggcttgcatattttgctaaagagtcctcgggaaactaagaaaccaacccgccgtccactgtagggtttggctgagtctgtggattacttatgtttttgcccctgtacttctgtttatttagcgcacagtccagacacctattaaaaccaggaaattcatttagaaaatggtttttcagtttaaat

SEQ ID NO: 8874 - DNA, 831 bp, Zea Mays
gcttgatctcggacagatcagcttgcagtgccgccaagttcgtggagaagtggaggatggccgttgtgagctgttcgttcgtcatcgtgggcagatcgtatgacgacccgacggtgggaaggcccagcgtggaggtcagagcgagcgcggcggtggtggagggtgccgcggtgtgcggcgtggtggctggaggcaccgcgaccatggaggctggtgaggattgcgacgaagaactcatggtggccggaggaacgaaggtctctggtaccaaattggtaggattgtggatcctaccagggatctcccttagcctataaggatgaacagctgcgcgagggagatgggggcggcggtgctggggcgccgtggctgacctaggctgcgcgaccagagggattgattccaactcctggctccctcagggaagccagaataatctgattctgcttaattctacagatgacctcttacaagtatttatatctcagctgatgcttatctgatctaaggataagagctatgagatctcttctaatccctatccaactaactagagataatctctcctttttattagctaccctatccaactaactagagataatctctcttttttattagctaacccttatctaatctatcctagctgatctcccggccgcatgtggcatgtggcctggccgtgggccttagccctcctagccactaatggccctgtgcctggtgtaggggatgtcggtcataataggaggacagtccgcacagcatctctgctgtaggacaacagcaacagcagtcttttgactgcaaggacagcgtgctgcacagcaa

SEQ ID NO: 8875 - DNA, 337 bp, Zea Mays
gattaccggatctaggtgaaaggagaggtaggcaaatagatcagctggatgatcaacaggaatgctataaagttttaggagcaaggatttatggaaaggaacatggccttgatagggtttgcgcaactagacaccaacaataattttttgacacaacaagtgcacaaggaagttttagtttggctagcggttaagctatgggagtctacaagttgtgcaggtttaacttcaaaggtaaaacactcaagggggctagaaaataccaacacaagtaggatttgtttttttaaggaggtttcacttgctaaactcaaggttgttaggaggggtcttttta

SEQ ID NO: 8876 - DNA, 670 bp, Zea Mays
ggcagtaataatggtgccagggctccacgccgcccatactgcctaccataaatgatgcagccagggaagctcagacaaccagggtgcatggcgacaagcatgatttaccggggtagaacgcctcattttacaattttaccacggaccggtaactccttctaagagaaagagatggtaatcgacccccaccttggtctataaaaggggagggtcaataaaggacacataacacacgaaagacaaccacactcgctcgacgagactagaagatccagaggccggagcaagacccaagccactacgacgtccaaggcttagcttagaatctagttccatagtatttaggtccactcacgcataagagacttgggagctcttcttcccactctcgcccgcttgtaacccctaatatgagcattgagcaacaaaggtgatggtagcatgagctagcatagactgaatgtagggacgttctacccgaatcagtataaatcttgcacctacctagcacaccatccagaacccagaacgcacagatacaaatttacttgtcgaagctaggttcgaaacaccaataaaaaccatatgagcccaatcattctccattattttgactagctcaatttgtctctacaaaacacatgatagtcacaataatcttgtgttgtca

SEQ ID NO: 8877 - DNA, 521 bp, Zea Mays
ctcacttgtgccctctcatctttggaagagttgttggagatccgttcatcccggcgttctccatcatcttcctcaatctcattgggagttcttgactacatctccagatcgaggtattgccctatttcatttccttgtactcgatcctacgcgttcttgattatctaatgtatcattcgttgggtacattatagtttgagtgattgcaacacttagattatcttcatttgtcacaaacattgttagagtttagcgatttgatattgttcgttgtagttgaaccgctcatatgaacgattgaagtgcatgctcaatatcttatgcgtatctactcaaacgtgtttgatccttgctcatcataggttctatttttgtttcttagaatggtgcgtcggaggaacccgtctgtggttgaatccgactcctcggatgaccaggaaatccatggagatactcccccgcgctctcgatccaagcgtgggagaggaagcggaaatgttatgcaaggtgctgaggcctcc

SEQ ID NO: 8878 - DNA, 319 bp, Zea Mays
ccaagccgtatactcatttccatgatgtcagcatgcaaaccagttgttcccacgccaatacctgatttgctgctgggtgtgctcgacacgctagatgactttcccagctcgatttcgatctggattctgttgccgagtattgcgtgaagcccctgatcttatgcccgttccttctcccaacaactcgcgcgcactcctcccatgcgtccaagttttgccatggggctgtgcggcgtgccgtcatgcaaagcaggaaggagacgagtaccagccgccgcgagaaaccagggcgagatccgattccgtcgccctctcgtcc

SEQ ID NO: 8879 - DNA, 368 bp, Zea Mays
ccgtgcagagaggaagggctgaggtgcgccatggatagagctcggtggcatgggagcttggagctcatgcgctggctgctgttgtcgtgaaccagggaggaagaggggcgcctgctgctgcgtgctggggaggagggaggaagaaggggattcgactagagcaagcctgcgtgagggaggaggaagggcgccatgggaggaagggaggaagctccctatgcatcaccgtgtgggaggaggagcgcgctgctgctgtgaggaagaagagacagggaaaaagaaagtggcagctaggggggtaggtgaataaaagccaagcaaggaaggagcacctctatttatagaaaatggctaggtttaggtttctt

SEQ ID NO: 8880 - DNA, 495 bp, Zea Mays
aatgaccacctatagcagaggtgtgtaacgcggacagtaccctattttttaactgagaatcatcgcccaaccagattctgcccttgtagcgtaagataccctccttcaagataaagtgtggcgctgccgttggatcaagcgacaatttagcgatcaaggacagagcctctggatccttttcatagctagtctgaacgtccttcagccattgaggaactactgctgaaacagcctgacactccgcatcaactctgtgcgacaaagcatccgcaacacgattttcagagcccggacgatactgaatcttgtattgcaggcctagcaactttgtgaacaccttgtgctgccaaggtgtgtggaggcgttgctcattaagctgcgttaaactcttgtggtccgtgaggataataaactcagtgtgctgaaggtaataccgccactgctgcactgccaatattacagcaaggtactctttctcataggttgataatcccc

SEQ ID NO: 8881 - DNA, 1034 bp, Zea Mays
gttgaaccatgctttccttgatgggctagcaatggctctcggtgagttacaaatgggtaatgctagttccttctataagatccaagcacagggcccgttggggatcgtccacatgctcccaagcaccgactcatatagttgtctactcagttcgatcgaacccgacggctcgccatctctctccacgataaaccatgagtgagaccttctaggactcgaacatgatctagtgacgcccttagcgcttcacacatcagggtccaggctgctagtgtgtccgtcagcggttgtcctcgctctcattttcgctggggcagccacgagccctttgcaggtcggcctttcgaaccctagagtccacgacaatactgtcatgagtttttcgattccccccatatgaaatagagagagtctaaggccttacccaatcgggcgttcccggtgttcgcttggccccttcaggtggaggtgtcctagagggcagtctggccagcttttgtttccttcggtttcctagggtcctgtgtcagttgcggggacaagaaaaaaggaaggaggttcattagtgaggccatgcatgttaaaaagatgtaaaggacacagaaaaaaggtttggggaggctatttgtctcccttctcctccattcctactatctgttagccctagggggttgttctaggttaggaggtaggaatggtccagggcgtcgaagccttgtcgaaggttgaatcatcctcactacttgatgttccaagcgtcagctagcgtccttccttttttctccatccaactcagtgcctcgcagccggaggtggtgccagcctgccgactgaaatgcggaaagggatatggatcctctgggcatgtgttttcgtgtctagcaccaccgacacacatccttcgtcatgcgttctccttctagccagcgttaagtgggctgcacaccccggtcggtgcagatactgatcacaagaaatttgtgagtcccctgcctgacgttgcatcgtttgtgttcgtgaaaacgtcgtatttg

SEQ ID NO: 8882 - DNA, 417 bp, Zea Mays
agttgctagggttcctagtttcgtaccagggcattgaagcaaacccggagaaaatcaaggtgattgaggcgatgaggcctccagcccgcatcaaggacgtccagaagcttacagggtcattagccgccctcagccgcttcatctcaaggctggctgagagagcgctgcccttcttcaagctgttgcggaagtccggtccattctcttggaccgaagaggcagaacaagcctttcaagagctgaagcagcacctggtgtctctgccaatcctggtagcaccaaagcccggggagccgttgtatttatacatcgcggcggctgcagaagcagtaagcatggtgctggtcgtcgaaaggacgacacaagaaggccaggaacctgaggactcgggaccggctgccggggtccggaccgttc

SEQ ID NO: 8883 - DNA, 777 bp, Zea Mays
caaatctaaataccccaaatcaaacctaagccgatcatccacagatcgacggcgcacaacggttaggatgaaacggtacgcgatcttctaatccgagccgtcgatcaacagacggacgacccagatgtctcccccaattcctttgtcgagctaaggtggcgccgcccagggcacacggcggaccatcgccggatttgtgcgattcggccacacgccgcccgagtttccaatccaaccaagccacactaagccaaaggtagggcgaacccgatagagcccccaatttaatgtttgactgatgttaccgccctggccacggagtagagcgggtccgcggcggcgcatagattccggtgagtaattccaggggttcttgtaagctaacttcaattcgagttggtgcaacacgatgggggtatgaagtacaagcgagggatgggatgtttaccacggttttcgctgcgccaagcttcggccacggtgaggtgtggccatggtgaccgcccaacccggtgaggaatcctcggttgattcgagcttcgctttatgccgcggcgatgccaattttgtccacgaggatgccacgaaagtggtagggcagtcgcacgcccccaatttaccacgtcggtgaagaacggctgcaacagagctccccctttctcccgccctttacggcaatggcgcgcccgaccttcggatcgcgagtgtggcgagtatggtggggagtttgcgggtggatgagaggggcaaggaggggcggctcaaatacccacggac

SEQ ID NO: 8884 - DNA, 523 bp, Zea Mays
tgaagagggggactacgataggacagaagagatgcttgatgatgtacaccatgagcttgtacccatcgattccgagaaccccgtcaaccctccgattatgaggatccttctacgcctgaggttcagaagttcttcgagctccttaaagttgtcgaagagccattgcacgagcacacgaaagtgaccgtccttgtgttcgtgactcgacttatgactattaagtccagtttgcattctcaaacaactgctataaggagcttctgaacttgatcagtgatgtacttctggagaatcacaagatgccaaaggacatgtaccagtccaagaagttgctctctggtctcgatatggactacgaaaaaatcgatgtctgtgtcaataactatatgcttttctggaaggagaccgcaaatgagaagtgtacagtatgtggtgagcgtagattcgtaaaggttgaaaacgatgatggtttgaccgtgacgaccgaggtagcacgtaagcagctttgttgcatgcctcttat

SEQ ID NO: 8885 - DNA, 514 bp, Zea Mays
atacaatactaggtcagctaggtatatgatacaatgtatataaggtgtaacatatgatgtagatgatgtgtgagggcgtgtagggatgctcctaagacaacaatgcaattgagagcactaggagtaggtacactaagattgcatggccttagtaatatgcgaataacacaagattggtctgaaaagaaaaaggaaaggcacaagtataagcaacatggtcataacagagaagcccatgacaaagtgcaccaatcgaggaaggggtatggtctcgatagtgctagggatggccacaggaggccacattaaatacatcaatacacatactccaccacctgcacaacacgatacccatagcattatgcacaaatatagtataatgcttcgtggcataggaacaagcgtaatacgatatgcaaggaaagtctacatcaacaagactaaacaactcgaacaaaatgatatggagaaaagtatgaagaacattaaataagaagtgatagaccagtatgat

SEQ ID NO: 8886 - DNA, 469 bp, Zea Mays
ggcggggaagagacaatcccgaaaccagaaagtgatgaagtggtagtttttaagagcttcttcaaagcagggttgaggtttcctctgcacagaattattgtagacgtgctggaaaattttgagatttatcttcatcagctgactcctaacgctatcgttaggctcagcgtgtttatctgggctctccgaagccaaggagccgagccgcttgccgaagccttctgccgagtacacgaactgcactatcaaacgaaggctagggaggatggactgcacgacaacttcggctgttataactttgtgtaccgcaaggacatgaaggcacctgtgattagctaccgcactaagtggctgaccggctggaaaactgaatggttttatgttaaaattgatgagaaaaaggagaagctagttcagagcccgctggaactaaccttcgggttgactagtcctcagtgcaacataacgc

SEQ ID NO: 8887 - DNA, 412 bp, Zea Mays
gccacttgtggagagctgggatatgccgaatccagtgaaaatggcttagttcgatagaagtatacctttagatttagagagaagtttgatgaaccaaatgatgactggttgaaatgcattgaagctaccagcgacgagctactcgggacatgttccaaggccaaagatgatgccttgtccgcagccttcgggggccaggggaagaaaagattgaacatggtatttgatgcaatcggctttgtataccctgattatcactacccactgcgaaggcaagggaagaagagaaaaattgtcgcttcagccaccactgttgtgtcgaagggcaagaaaatgaaggttctgacccaccggccgcgatatattgaaccggtcgtagtgcctgaatttggcgaagggacctcttcaactg

SEQ ID NO: 8888 - DNA, 423 bp, Zea Mays
gttgaaggtaaatctgacaagagagggaggtgatcgcactcacacaactcctcaaccaaacatatgatggagctgctccgttctatctacactcctgaaccaaataaaaaacaacacgcctttattctatcttccaaatattacaggttgtggttgtgataagacgtgactcccatagtctccctgtgcccatctctttttttcagaagctctcgctatatctatcctaatgatgtcttcagaggtatctctatatcctcctctaggtctgtcttttatatatttctctaaactaataactcatttatatcatattactccctaacaatattctattttgctccaatttattgcacacttgtatttgtcatacccgcaaacaccttacacatattttagttttgcttaatcaattgtctaaag

SEQ ID NO: 8889 - DNA, 293 bp, Zea Mays
gcctacttatgatttagaatttttggattcaccatttattgaaaaggaggtctggaaatcgatcaaacaatttccatcagataaggcgtctggcgcagatgggttcacaggaagattctataaggtgtgttggtcaattataaaggaagatgtgatgtcagtcttctcagcagtttggggtagaaaacttatccattttgatcggttcaatacagccttgatgactctgattcccaaggggggagctgaagaggttaagaattacagacctatcagtttggtgcatagtatgg

SEQ ID NO: 8890 - DNA, 532 bp, Zea Mays
gggaaaaatgtacttaataaaacctctctctgcaggtgcttgggctggacatttgtgctgatgttattattggcgatgagatgatcagaggaatttctggcgggcaaaagaaacgtgtgacaactggtatgcatgcattagatatattgcaatcccgccttacgcagacccataatcatgcatcaatttatttatatcctgtttaattttgtgtaggggagatgctaacagggacagcaagggctttatttatggacgagatatccactggtttggatagctcaagcacatttcagattgtaaagtttatgaggcaattggtccatgtcatgaatgaaactgtcatgatctctctgctccagccaccgccagagacctataatctttttgatgacataatcttgctatcagaaggatacatagtgtaccatgggccacgcgagaatatcctggagttctttgagtctgccggttttcggtgccctgacaggaaaggtgtcgctgactttcttcaagaggttacttccaagaa

SEQ ID NO: 8891 - DNA, 518 bp, Zea Mays
cacttttcacatttattatgttcagcgtagagcttattaattactaatatgatgctaacaacgtagcggaaatgcacttactttatttgccactagaaggcaacaaacaaaggccagcgcagcgtagggctaaggaatcaactaaacctctttttacacaagttgattagaaagctcctccggcactatgatgatatataggactgaaacaaaactgtaccatatatacttagttgagttgtcttatatatatagccttaattattattacttccattcgattttattctgtgtctgttgcagttggctccatattgttgtgctgatgctccacacagattggaaatacaatactacttgttgaaccaacaacgaccacccatccatgcaccgacagtctctagctagctaggtttttgccggaactattagctagcttgggcgctctcgtggcataaacctctactaatagattatctttcaaagtaagtgtggaaatattgagaaaattaaagaag

SEQ ID NO: 8892 - DNA, 414 bp, Zea Mays
ttcagagatgggcagtgtatcctggcatgcctccgaagaggtaggtgtgattagttttgcgctggtctgaatcctagccatttgagtggaccgaaatttatctaagatgacttcgccgaagttggcttccgaagtagtgatggatgggaagctttggaggcatagaactttcggcagcaggtagctgagggcagtaaatgtgatccacacccacccgctcgactgtttttatactgagaaatggtcacgaagcggcatgagtcgctaaaaaggttctcgcccatcaccctcaacttctaaatagcagacgaagctaagcctcctccgaagaatagccgaagcagcgtaagggagaaagcttcgttcataacacacagttaaaaaggataaaactcgaagctataagcttcggca

SEQ ID NO: 8893 - DNA, 707 bp, Zea Mays
caattagctctgtcaggcgctctgaatgaagttccaatggtacagtgacctgaagaagatctcaggtgcatcatccctcgccgccggtgacccgcgcgctcagattcgtgccggtgctgtgattcgcgcccagtagcgtgcggataacttcgcggggtgaaaagatctcgtcgtagatgaagttggagcattgtggccgctctgtcacccagacacttgctccatgatgtggccgcacggccatcgctggtgtgaccgtcgtttaccggaatccgccacactactgaccctattaccttgtcacaaggtgtcatgtgaattggttagtcatcgtcttaagcctctgccccagtaaatgccacgttatgcgactccggtgactcacccctctctccggccacgagccttctccttcaaaattcggagccaccgccctcggaccctataaattgagggtgccactagctttgttaggttgtcatgaagcagaacacccgccctgcctccaattagccaccgtagcgccctaatttctttcttcccccaattcggttctccgcgctgctgtaagccaccgcttcatggaccatcgtttctaggtccgttcatgccctccttaccctcgtttcagcacccttgtgtgctatggatgcttatcggcccaaccaattaaactagaccatgttagatcgtcaggaacacctccg

SEQ ID NO: 8894 - DNA, 775 bp, Zea Mays
tgtaatcagagagtactcggtctctattcaactgcagatggcttcaggcccactttggtggttcacaggggtttacgggccacaccaagacaatcttaaacaggctttcctacaagagttaagcgaagtcagggcaagttgtgatggaccatggatcttggcaggtgattttaatcagatatgcaggtctgaggacaagaacaacccttgtatcaacatggccctgttgagaagattcagaagatggatagaggaattggagctgaaggaaattcctttgataggaaggagatacacttggtccaaccatagacaggcccccactcttgttaaattagaccatgtattctgtacctcgagctgggaagagatgtttccagcttctactttatttagcaaggcctcaaaagattctgatcattgccctttgattttaaagctgaaagaagaagaaggtaaggcaagaaggcgatttcattttgagagtttctggaccaagatgccaggctttcatgaggtggtggcaaattcctggaaccagccacttcataattgcgggcatctggagaggatctctctaaagttcaaaagacttaccagagcactgcagtcttgggggcacaaaacagtgggcaactttaaataccaactgggcttagcaagagagattttacacagactggaaatggctcaagacagcagggtattatctccagatgaattatggctgctaagaaaactcaagcatcagtgcctggtccttgcttccctggaa

SEQ ID NO: 8895 - DNA, 371 bp, Zea Mays
gtcaagattagatcacgacacactagttcgcggattaacctgatgtcgtccgatttccgtcgaatgtctgagattggtggctgcataccccttcacggcttttgatctggaccattgtatatgaaatcgtgtggttggcgcggttcataggtttagagcgcattcggttcacagatctcggatccaacgtctctgagtgaagtggctttaagtgccgggatgatttaatctgagtcgtaggatctagatcctgcaaatgataatagatggtaccccttcgaccgtgaatctttgcataagagaccctagatttcttgcttatcaacccgcggtccaggacattagtaagatccttatagagtgacacgaga

SEQ ID NO: 8896 - DNA, 654 bp, Zea Mays
aaattggagaaccaaggcctttgatctgctttgtcaggtgctctgaatggcgttctggtggtacagtagactgaaaaagatcttcaggtgcatcacccctcgccgctggtgacccgcgcgctcggattcgcgccgacgccatgattcgcgcccagtaacgcgctgataatggctcctggtgaaaagatcttcgccggggatgaacttggggcactgtttcgctctatcgcctcatccacttgccggcaacgtggccgagcggccgtcgtcgaggtgtacgtcgttcgccgtgatcgtgccacgccatgaccctttcaccacgtgattgtcagccgtaatagctcaccagtgaccgccgtagcttcttacccagtgaccgccacggtagattgccgcgatgactcaccccctctctctcggccgccagcacaatttcttcaaattgggcgccaccgctgatggacactataaatcaatgccccagtgagttccgctaggtattcacgcacccagcgcaccagctctcaccgctgatcacccaccagagcctctcaatttcacgtttaccccaaattcgttttccgcgccaccgtgaacgcctcgccgtggtcagccttctgcaagtcagttcaagcttctttgcttgatgttctg

SEQ ID NO: 8897 - DNA, 325 bp, Zea Mays
gcgagaactgtctgtcttgtcaagacaaagccacctaacgcggagaggccatcctaaatacaccagatcatgaatatcaatccctccatattgtagtggcattttgactagattccaggaaaccagacagtttccatcattcgcttttgcttgaacaagtcgattttcttttgattactcaagtccatagatgcatctattcatatcttatggaaagatgatttccatcaaatagcacatctttggaagagggattttatttctttagaccatcagaattcagtacttttttaagaccacctttaaacaaatgtggatgttagca

SEQ ID NO: 8898 - DNA, 935 bp, Zea Mays
gctgaccgcggtgaggttggtttcacagtgttcttgaactggattggggagaacgtgaaattggagcttggtggtgatcggctgggagtaatactaggtgtgggggtgcgcaatgatgttgcgaggctagtcacagactcaatttataggcagcttcgttggtggcgctcaatttggtcgagcaacgcggcggccggagataagagagaaccgtggcgcagtgaattcgtggctaacgccgtggcaacttcaccggcgttgataagacagtggtagggagttacagtgacgcggtgtaaagatagagccacgcggcgcacggccgggaggcggcggtcaccggcgaagccatcggatttcaccgtggtgaacgcttgtatggtggccggaatattttatcggctggagttatccacggcgatgatctccaagcgttgtccacttaccccgagcacaagttgggccagcgacggcacgaatcgcggtggaatcggtcgtcggcggtgggtcagtcgcgctggcggtctgatccagctttgctactgtaccatggcgagcacctattcagaacggctggcagagcactttggagctcctatttctcccaattttgtgtggtgactaagctagctctctgtaccaaaattatagcctgacaatccagctacaattttgtcatagcaatcttgatcaaattctcaataattcaagcttgaattcatgcttaaagtttcagtgatcacactgtctgtctgaaaattcagacattggcaccctgacagcccaacttcaaccttaattatctccagatttttctcaataacatggcttccactcttaagcaaacttgttatccattagtaggtctacaagtttgatgtgatgacctagggcaagaaccatatattttaaaagatacaaggctccaaagttga

SEQ ID NO: 8899 - DNA, 500 bp, Zea Mays
gccagagcgaagagtgtggggacggtctccacgtcgtgtgtggccagcttctccaacattttcttatcacgtaccccatgtcggaaggctgtgatgatggaggcatcggaaatacgaggtatagtaccttgtaccttggtgaagcgggagataaacgtccggatggtctctttaggctcctgtctcactgcgtgtaggtgggcctccacgccatgctgctggtaggcgctagcgaagttcgcaacgaaccatgcgcagagctcttcctaggtgtagattgaccctggggcgaggttcatgagccaagtccgggcaggcccagacagggcgacatgaaaatacgttgccatcatagcggtgtttccacctgctgccatgatggcggtgacgtacacctgcaggaactccgacgggtttgatttcccatcgtatttttccggcaggtgcggccagaacttgggcggccatgacaccacgcgtagatggtctgcgagggcggc

SEQ ID NO: 8900 - DNA, 674 bp, Zea Mays
ccattagatttagcccaagttctagccaatcaaacccgactcattgaagtcctcactagaagtctggagaatcagcgcccaaatggtggaagaccacaggacaggatgggagattttctgaggctcaagcctcccacgttcgctgggtccagcaatcccctcgatgccgatgactggctgcgcaagataaaaaggaaattaaaagccatcgggtgcccagaaaatcagcgtgttcaattggctactcatcaactttccgggatggccctagcatggtgggataccttcagcactaccgtaagagatgctacctaggcagaatttgaaactgctttccgtgagcaccatgtaccccaggggatcgttcagctcaaggaagatgaatttcgggaactaactcaaggaggaagatctgtcagtgagtacgtgcacaaattcacagaattggctcgctacgcgcctgacgatgtcagcacagaagccaagagaaaagcccgttttctgaaaggactaagaccagaactcaagaccatccttgccagcccagatttccttagtttctcgcacctctccaataaagccatacaagtggaaagggcaaaggaagaagaaaaaggtcacctcaagaggaaattccaagttctccgagctcagcagcaagaccggcaccagag

SEQ ID NO: 8901 - DNA, 730 bp, Zea Mays
ggctacgtatgccatatggttttctacaatagcaaaaatcgtctatatcttacataattttcaagttagaatacaatatcactaattgatttcaatttattttcacacaaaaaacaaggagcaaagctgattgacacaaattggctaagcctctagttattagccatgaaagatgcatgtgccttgaattgccatgacgacgcagcaactaaaaggtctgggcaagctaggagggtggtgcagctaggggaaaacacgacaactagggaagggcggtgcagcaatgaaggactacaggggcagcccttgctgtgcgacggaagtagcggtccttgctgggcgacgcaagcaagatctatgtatgaaaaatttgtcacttaccaccaccaaggtctgtgcgtgttgtttctccaaccatccttctagggggcatcttgatctcggcccggcagcgaagaacggatcgacgacgatggtggatggggcgacgacgaggaggtggacggatggggcaatgctgacgaggatggggcagtgaatacagcagcgagttggatgatggggctgtggcgacgaggatggggcggtggatgcggcggcgaggtggatggatggtgcggtggatgcagttggctgcaaaatttcttttaggtttagagttataggcgatggtgtatatagaatacgctagaatttggtggtaggatggctgatttggtgtgattatttg

SEQ ID NO: 8902 - DNA, 1007 bp, Zea Mays
gcagcggcgagcaggaggcgcgcttgccatagcggtaggtgtcgccttcggcgtacgcgacgagagagatggcgtcgaagccagcgcccttgaggctgccggtgatgaaggggtccgtgatgctagatgggttggggacgcggaggtggagggcgacgtcgcggaggcgtttggtggagccgttctcctcgggataggagcctgagccagtcatgcaaagctccccggaagtggtgccggtggagtagtaaccgtcaaaggagaaggtgacagagtgactgcccacgtagcgatggtggcgtcgccgccgatgggctcccatatagtggttctcgcggtcgcggccgccggaaagggtcaacatggcgacgacgtggaagacggcggtgttggatgtccgatcggcgtggagtgggagcagagagaatgagcgggtgacataggagtaggaggatgtcacgttgctctcgtctttgaactcgatatctttgcctccgaagaagtagccggtgttgagctccaaggagcggaggagcgggagggcgtcctcgccgtctgctggcaggttttcgggagtaggggagggcttggtgcagaggggggaacctgaggcggagagagtggcagtggacaggaggaggaggaggacgcaaaggctgcaagcagccgagttgtgagctgccattatggttggattggcgacaggaggaggagggcgcaaagcctgcaagcccacggtggcgatggcgaggtgtggcagtgtggcactggcaccacaagcgcctgtgtggcgttgtgtttatatctctgaggaagatatcgatgacggtgcaacgccactactaggcctgcacgggattcgtctagttgaagtcctgagagctgaggcctgctctggattccatggctcaaatctggggtacaggggactttgaccgctggtgatggcagtcagtcgtcggcgcaccttcatacacggcaataccccacaggccacagccacaggc

SEQ ID NO: 8903 - DNA, 732 bp, Zea Mays
ttggttgtttttgaagcatttttcactgcaggaatccagttggccatgcaccggttcatagttgaagtgttgcgatggtttgaggtgcagattcatcaactgacgccaaacaccatggtggccttggtgatgtttttgtgggcggtgacttcatatggcggagtacgtttggtcaaagtcttcaccaagaattactatctccattggcagaaaaaggtgattggtggcatggttgtgtagtttgtaacttgctccttcacgccgaggactggaaagacttcgggtgaagtggtggatattgtgttgtgtgccaagaataagtggggtaattggtgggatttttggttctacgtggtgttggaggacatcgaagggattcctgggctgcctctatctattttgtgcttgcattgttatatcatgttcccgctgtttaggctgaagaagggagataagggtgaagaggctgttcggcgcgcagctaggacgagcagcagccatgatttggtggaagaaattatcgcatgcggggtgtggctgctcgctcatggctaggatctatgtgcatttaagctgcgcccgatgcccttcttgaacaatcgaatggtgctgagccccacctttgccattgagttgtggggacaggatgtggccgccttcatcagggaggtggaagcggaggccatgaaaaatattggcaagttctccgcaaagatagagctgacaaggagt

SEQ ID NO: 8904 - DNA, 910 bp, Zea Mays
gaactccttctctaaggtgtccccaaattccttgagaagctcatcaaggcttgctagggatatatcctcgtcgtcggaccaatcatctattctggggggaggtagggctagaggggttttcttcttcttctctgtttggcatcctcggttggtggtcttcttctggattttctttttgggggcgagcttcttcagcttcttgtcatagtccatcttcaaggtttgataggcctcacggatgttggcttcctcgccttctactacgtcgagactctcctggagggatgccttctcttgcttaagctctttgacttactgctctaggctttccactcgggagtttaggtgggtgcagtgggaggagactctcctggagggatgtcttctgtgggatctcctcctgacagagcctggagtcttttcctcgaggtgggggtgtttttgttgctgggtgggaaatatcggaggggggtctcagagatctctcggctatagttttggcacagttgtttaagggcttttcgagcaacgccctagcaagtgtctgggaagcggtgcccgatgaaggtaatttggaagggagggtggtttgggtagttccggctttctcccaagtagaccgccatagagcacttttctattccattttcacggtactccttccagacatattcgggcttcttgcgggtccccatgcgtagcgcgcaactccgaagaaggtgaggaaagccttcctcctctaagcaataggatgtcctaatcacccaggggttttccatctggtagacaaaaagaaaggtctattaatattggggaaaaggggaaagagtgtttcttgggggtaagaggtgttttcttgttaaggcaacttttaaggtcagggttgtggtctacggccagtcctataggc

SEQ ID NO: 8905 - DNA, 855 bp, Zea Mays
gaagattgatatgatggtcacaatcttggggaggtggcaatcctttaggtactgcaaaaacagactagaacttgtacaacaaggtctgaagatcagctggcaatgcagatagaatagaatgatccttgtctggcaattcagcaatatgacacagttcgacaactgaatactgtcccttgggcgaatgcaatccaaataactgctttggtgaacctttataagtaatggtcagccatttgtctgcccaatgcacccacataggactaaactgttcaagccagtccatgccaacaatcaagtcgtaagtctgaagcggcaatatacgcaacgtcgactaaaactcacagccaccaagagaccaagaagcttgtaccaactcatgagtacactgaagtttagacccatttgccacttgtactgacaacacctgtggcaaaggtgttagcccttgcagctgatcaacaacttgagtactgagaaaacagtgagaacttcgagagtccagcaacaccaaaaggtgcataccctggatgttgcccaaaaactgcatggtcttaggaggttgtgccttctctattgcagcttgaaacagattcatcacatgaagttccccggaaaccatagattgacaatcgtcatcctgctgaggcgcttgcaggaactggcacagttcatcaacaacatgtagctgcactgtttctgcacaatgatgtcccttggaaaatggcaacccacacttgtagcatagacccttggccttgcgatatgcaaacaaggaggcaaccttatcatcagcagaagaccctttggttacacccccaggtgatggcacgttctgtctggttgaagtatctg

SEQ ID NO: 8906 - DNA, 460 bp, Zea Mays
cagcactagaactactcgcctcatgatcatgtgagcgaggtggcataggaggcggtggtaggatcccaaggtcgtcatcatcatctgaagaggtgttagcaactgtaccctaggtctcaaactatctgaacgcctcatcctccgcctgaacatttgtcactagatctggcactaggactaggtcctcaggggctgtatgatacaaaccaaactagaggcgagaggactcgagggtgccctagaactgaggaggcctgatgagctgcgcgaagatgtgacagagataatgcgcatatggcagctgatggcgagcatggagaccatccaatattgtatcctcgatctcacaaataaggaagtcaaccacatcaaactctaaatgtgagatcaaggcaccaagtagccatagctgaatatgagtagtggcctctctatatcccatcctgggtagcagtgtccg

SEQ ID NO: 8907 - DNA, 460 bp, Zea Mays
tttacatatcattgctatgtacaacacaaaagatggataaaaattaggtggctaggatggaagctgcttcagcgacatcgaggacttcgtggtacaccacatttcgagtctgtaccccgcacgaaccgtcctcattctcaataaggattctaaggccatctctggatgtagtcctagatacggccacataaagttgtccatgagtgaagaccggtttcttgaggtaaagcccaaccttggacaaggtttgtccttggctcttattaattgtcattgcgtagcatactcgtactgggaattgccttctctggagtgtgaacggccattttacatcagtagtattgagggttattcttggtattaaaaccgcagcacccacattagagcctgtgagagcaatgcatctcaatatacgctgtccaggctcggtaacgagtagtcgtgtaccattgcagaggcc

SEQ ID NO: 8908 - DNA, 699 bp, Zea Mays
cacgaattgcttgcgccagtaacctcttccctctccggccgccaccgcgccaactccaaatcacgagccaccatccccgaatcctataaattgagcacaccctttagctctactatgtaattattcacccaacacacccactcgtgcctccaattactcaccagagagcctcaatttgaaactttccccaattcagtccagagcaccgcactgcgtgagctcgccgtggccagcgtgctacaggtccgttcatgccctctactctcccatttcagtacccttatgttctcatgatgctcctcggcccgttcaattaagctagaccgcgctagatcatcgggaacgcctctgttcatctatagttcgcgctgtcaccgtggacagtgtgattaagagctcagatcatgcaattgatcgaggggaaacaattattaggtgttgaattaggagtcaaccaagttagagcactggctgttgcgtattctggccagaacaagctcgctacatctgaaactgctccaactgaagttgtctgctcctacatctgaaactgctccaactgaagttgtctctgaaggtgctccagaaggtgccccgatagggtctgctgctaactgcaacatcctagtagaagagcctaactctcctcctcatcaaggcaagccctcgtgcatttgccaccaccttgttgttttaaaa

SEQ ID NO: 8909 - DNA, 577 bp, Zea Mays
cgcacctctcaaacaaggccatacaagtggaaagggctagagaagaagaaaagggtcacctcaagaggaagtttcaagtcctccgagctcagcagcaggacaggcaccaaagagttcaatcttttgggtttcctcccaaatgaccaagcttcaacaaaccagcaggatctgattcgtcatgtttcagtcagcagggtcaaagttccctccaggccccctccgttgcaagcaaccatcctccagccaatgcttgttggcactacggagaccccagtcactacaagaataattgtcctcagttgaagacatcagtgcctacctaatccaactcggtgaatggccccaagagtgccccagcacccgcctccaaggcaccctcctccaacaaccatctaagcaagacccagtatcatggcagggcacgagtgaaccacgtcaacgctcaagaggctcagcaagccccgagagaagtactcggtgagttcctagttgaatttacccccgatgctgtactttttgattcatgagcatcccattcattcatagccactggttttgtggaaaagcatggcatttg

SEQ ID NO: 8910 - DNA, 490 bp, Zea Mays
gggacaggcgcatttaatgtgtgtgccaacccgcgccgtggcagcggagcatagtggtggacaagacagcgatcacgtctagcgcagcggtatgattacgcctatgccaaacattgcgcgcacgtcgcctgtcgctctccgatgggatgcctaatacgacaagccaagctgatgagtctttgggcgcaacctctccgcctcgcccgaccccgagctcagaccttgggcaagtttgtcgcctcgcccgagctcgacctcagccaccgactatgccgtgaatccctcagacagccactccacccgactgtagcgcacgtcgagagacggctcggctagcgcctcgggaagacttctgcatcaaccaagcaggggctctgatctcgatgagtgctgcatgaaatcttgacgtcatcacgcgccagggcgatgacatgccccttaagcagcctttcacccataccccggcgctgtttacaaccactacggcatg

SEQ ID NO: 8911 - DNA, 462 bp, Zea Mays
gtccgatcagaatcgatggcccagattaaaagccggctacagcgaaccggtacgttttgtggttcgtcagatcttcatccaacgacccagggaccgcccacacctccaccctatcgcagccgcatgccaacgatctaacggtccagggcgaggcgtcgaaccggtatgcgcagatatgatctcgttcgttcatcacgattcggacgaccagagtcacttcttcttcctctgggcggcagggcggcggcgcagtgccctcacggcggagacccaccggcgaacaccattctcgcagccaagtgcaccagccctttctccaacctatgctacacgaagaggcgaggatggcgaatgcgagggatgagatcttaccgacgacgttatcgcagaggatccggtcgacgatggtctgcggcaccgcggcggcgttcgcttcatcccatccctgagcgtcgatttccc

SEQ ID NO: 8912 - DNA, 963 bp, Zea Mays
ggcagggggatcgaatccattggagaaatggcaagctaagattagaaaagtgcgtcagtacttaaggggatgggcgcagcatacctctggtatttttaaaaaggaaaaggagattatttctaagcttgatgaaattgataagcgagctgaatcggttccgttgagtacatcagagttagatcttcgcaatttcctacagagtaggctagctcagcttctccatgaagaggaaataaagtggtaccaaagggcgaaggtcaaggagctccttgagggcgacaataacaccaaatattttcatatggtcaccaatgggaagcatagaaagaatcgtatcttccaaatgcataatggtgaccatatgttatatgaggatagggagttaaagagtcatataactaggtattataaagatctatttggcccaccagaaaggtcatcttttactctggatgaggatcttagagatgatataatacaagtcacccaggccgagaatgaagagctcataaagactttttcagaggaagaagtcaaggcagcggtgttcagtatggaacataacaaggcacctgggcctgatggattcccagtggaattttatcaagtctgttgggatgttataaaaaatgatcttatggctttgttccatctgttccatgctgggaaccttcccttgtacagtcttaactttgggactataatcttgcttcctaagagtaatggggtgattactgttcaacaatatcgaccgatatgtctcctaaatgttagcttcaaaattttcacaaaagtggcgactaagaggatcacggtggttgcgcaaaatgtaaacaacccatcgcagacgacttttcttcctggaagaaatatcatggagggtgtggtggtcctgcatgaaaccttacatgagcttcacaccaagaaaagagatggggtcattttcaaaattgactttgagaa

SEQ ID NO: 8913 - DNA, 457 bp, Zea Mays
attagacatgactttaatcgaaacggtacacaactagcaccgtccgatcagatctatatggtcccgattgaatcaacagggaagtaagcgaggttagatctctaccgctcatctctgaacgcacgacaccgattacactagcctaaatgggcagtgtgctgcgatctacagcgcccactccaagatcaacggccaaaatgtcgtcgtcctcgaccagacgacaatgcagcggcacacacccaaggcgacggaggatcaccggccaacacgcccccacggtgaatccccgtccgattcacgcgtctgactcggtttccatgaactctcgactactacgaatcacatggctagcccccaatcacgaaacaaagcgcccaggccctacccacggcgaagcaccgatccacggtggtgttgactccgctagacacaattagccaccgagccacgattccat

SEQ ID NO: 8914 - DNA, 468 bp, Zea Mays
cttttttgatactttggcaccaccagtttgagaaccgagtgcatccaggctgagggacaatggctaggaggcctaaattgtgtagaatggacgtccatatttgtcgagcaaacacgcaggagacaagaatatgctggatggattcctcagcctgatcacacagagggcaagcaactggatggggcaggcctctttttgccagtctatcagttgtccaaaccctgtttttgattgccaaccatacaaagaatttgcatcttaaaggggcccaggtcttccagacacgtcgccaaggggcaaaagagatagagccaacaaagaaagcatcataggccgattttctacaataagtaccttgagcagagaggcgccaaaaatgttggtctgcgatgttaggttgaagaactaccccatcaaccaagttctagagctgcagatactccactagaactgatacagataagcctc

SEQ ID NO: 8915 - DNA, 689 bp, Zea Mays
cccctccacatgtcggcccattcctcttttttccctagcgtaccagcccacttacccttttatcgctagcccaactaagcaacctgacacagacaggtggggtcgtgccatcagcggtcagtcgcgctcctttctctcgtcgtgaggaacctctggtaggtggggctgccatgacaggacccttctcccttcgcgcgtgatatcgtaacagcctctatggaattcgaggaaacaagtgcaacaaccccgccagccatagattcctattcctccttgtccaacgcagcaccaacacagaaaatcgtgagaataaacatgtcgaagagggaaggggggacaagctagtcgttggcgtgattccacagatataccgatgacgagtcctcggtaccgagcgtccgggcctaggagtttcatgggatcatgccacacaagtccggggcactgctgagcgcgggggaagcttcggatcacgggcatgctctcaccggactctgagagccacacgccgccatggccgagaccttacacgtgattatctcgggtaagagcgctccccatcacttcatttttctctctgctatgtgtagttgcttatggattgaaggattgttctcgggactgggggcttgggagcttcggtgatggcgctgccgtgtcaaccaagggcgccaccacgtctgtgttct

SEQ ID NO: 8916 - DNA, 718 bp, Zea Mays
atatactgatgtgaggacgacctttgttcctagggaggcacagaaatcccaaaagtcttgattgtcaaactattttccattgtctactgttagctcggagggtaccctaaaacggcagacaatgttttgtgagaagaatttttgaactgtttttgttgttatggtggactgcccttgcttcgatccacttggtgaagtattctacagcgacaaaggcaaatttgaggttaccctgagcgatgggaagatgccctactatgtcgaggccctagcactgcagaagccatgtgtgggagattaactttgtgagctgcgaaggcgtcctgcttcgaggtgcaaatttttggcaggcttcgcaggatcgcacaacacggttcactgtgcatacaatatccggctagtaaaatccttggcgcgtgactttggcggcgagggccctagcgcctgagtggtagtcacatgttcttttgtgtacttcgcggaggaggtctacgccttctatagccgtgatgcatttgagcaaaggttgacatattccttttttgtacagtttcccttctattagggtgaaacaacggcttcggtacttgagtcttttggcctcggcttggtctgtaggacgatagtgcctttgtaggtaatggacgattggtgccctctagtcttcggtcatgatgagacttataattctgtgcccataggggtccctcacgacgga

SEQ ID NO: 8917 - DNA, 560 bp, Zea Mays
gttgtgagccgtcgcagcacacaggtaaccaactagtttaacaacatgcacgagatcgttgaagcaaccatgtttccatacgtacatgtgtaaggtggaaacgtcatgcgtgcgtgcacagcagggcagctttgggacccaccagtcttccaaacccatcggccacgaggtttcctttgcccatctattgccaatgcatgtcgtgatgcgtgcgtgggtcttgggcatgcagttgcacgagcacggtggccaggccgaggacgaagcgaagggtggtttcttgaagcagggtgcagatcgtgagcaatcgcacatgagcgcacgcagaaggtccatgtagtcgcgagactttccatcgccaccaccagtcggcaacgaaggatggtgggcccattcattcgctcagcttcctatgtatcgcgatggccagcgggtggcgcgtggcggccagcattggtgcatgggtacaaatccatgaaactctgcagcacggatgcggtgagaaacagggggtcgcgagatccaggctgtcaaatccgtccaagagctgtccggcgggc

SEQ ID NO: 8918 - DNA, 680 bp, Zea Mays
gagaaagatccgaaagggacctcgtatcatattctagacgcagaggcgtccctgtctagggtttggtgggatgacagagacggggtgcaatccaatgcaaatgcgatacagacgcacgctagttgctaatgctagctaccctcctcggtgctccccttgctcctgtggcgtgcgggaaaaaggcaacttaacaccagcatcgtccgaggcagcagcaacggacgactccacaagatcaaggtatgaattttcaacaggcacagggccttgctgcatccatacctcctgaagttctgatccaccccaacgtatgtacctagagctgcaggttttcgtgtcttctttatcaacaactcacagcagccaacaacttccatttacatcaaagcaacagtgcccagcgccacttcagtgcggcagcaatggcattggcgtcctgagtggtggctgcaatgggcatactgagcccaaactacctcaccgatagccaacagctgctgacatttttaatggaaccaacctctccacacctccagcatgggacaccaaatacttcactcggagatttatcaactgcgatgaagcaaacatctacaggtcttccaggctgcaagaattcgaaacaacacagcgcatgtactagctaatcaagcttatcactacacatctatgtacactca

SEQ ID NO: 8919 - DNA, 537 bp, Zea Mays
ccccccttgccgccggtgaccttgcgcccagattcacgccggcatcgcgattcacgcccggtcgaacacggataacgctccttggtaaaaaatcaggcaccgcggatgagcttgagaccctgttccgcctggtcgtcgtgttcgcttgactcacgaccggttcagataagctcaccagagatggctgcctgcccatcggatgccacgtgccttgaagcttcacacgtcgcagtaaaccactctatattgttggcttgttgccggtaagcctgccacggtgaaagacacgcagctcttgcgccagtgacctcttgcttctccagccgcccccgcgccatcccaaattcacaggccaccgcccatggagcctataaattgagtgtgtcgtcgggtccgtaaggtagtcaagcacccaatccaccaagccgtgcctccaattgctcacccgcgagccccaatttcggatttcccccaattcggtctgaaacaccgcaccttgtgacctcgtcgtggtcagcgtgctccaggtccgctcat

SEQ ID NO: 8920 - DNA, 303 bp, Zea Mays
atctctcataacaacagacgcacgatcatggcctttgtatatgtacttgaacaggtatttaacaaccttgatgctcccacatgcctcgacattgatgtgacagttgaagacatgaaggaggtatgggttataagggacaacccatctattgtccagttcgcaccctcggaccttttctttacgatcatcgtcacgacgtctgtaaatagggtacgaatccttcccttgcaaggttgtgtcactgaaaggccgagggtaatgattcttgcatgatttacgacccttagtgcatgggcagttagg

SEQ ID NO: 8921 - DNA, 473 bp, Zea Mays
ttctacacttttagtaccttgttttaactgttgcagttggtttaaaagatcacgtgcatagtaagatggaacaaatctagccctcatgatccgtttcaaagcatcccaagtttgtggcatgttatgaggatttttcttgccatgttctatccaccaaacagaagcaaaatcagtgaattcactagttgcagccctaacacatgcattttttggaaaatcatgacaagtaaacttttgttcaacagccatctcccaagtaagataagcatctggatcatacttaccatcaaaagagggtatcttaaattttatcttactgaaagcaatgtcattgttatgtacctcatgtggacgctgtccacccataccttgacggttacgacgtagacatcgttggcctcgatcctcaacttcggtgtcagcagcataattagcacctgaattttctacgtcgtcctcatcgccttcgccac

SEQ ID NO: 8922 - DNA, 435 bp, Zea Mays
cattgagcctttccattccatcatgttagcgtcgctattggcagtttagtaataatatgctattattaggtgcccttcattattggggtttgagagatggtgagggctgagccaactcccatttatttgacaggtgcaccaacaatacggtgcctgcactgaaggattcctgtatattggttaggttagcgtcgcacatttcagccctcaaatctagttcagttggagttccttgaccgcttttgcatttgtgaaacagaaactaactttttggtactttaatcaaatggcctatgtgtttttttacatctatccctttgatccatcgatgaaggacaattattagctgcataatatcagcatgatgctatgtctgttgatcactgtgctgtggttggctggccactcgtggtggcggacaatgacccttaaaag

SEQ ID NO: 8923 - DNA, 369 bp, Zea Mays
gcggaggcgagcgaacactggatgacatcctcgatgcccagtgcccgtatcacaaggatatgcgccacactctgcggaactgcagagacttcaagaattccatcgataatggccgaccattccagcctctaccacctcccccaccacgatgagggcctggcgagcccaggcagcctcagcagcaggaaaggggaggaggtggagcattctcgcgcgtcgacggtgaggtcaacgtcatcttcggaggacatgggtcgcaggagaacagaaggcaacataagctcaatgaccgacagatactggtggcaaccaccagtgccccagccccctatcggtggtcagagtacccgatcaccttcacccgggcgg

SEQ ID NO: 8924 - DNA, 395 bp, Zea Mays
atctgtcccccacacaaatcgcggtcccggacaaaattacttttgggggagagcttgtacattccagtttccagcagaacaagactacacataacctgactagtgtagtgctgaccggtaacacaactaacagatctggccaatgctcatacagattcatgtcacagaaccagcacgagaagatgtgagctcgacattggtctaagcttcattgccttgcttgaagtgttccttcaggatgtgatgttaattcttagtcaagatagcagcatagaagccaagatgtcaggatgtgattagctcaattctgtgcgatccggccgggaagctcggggagcatcatctggatcctcgcgagctcggccaccacctcccgggcgtcgggccgatcgtcc

SEQ ID NO: 8925 - DNA, 510 bp, Zea Mays
gaagaacaagtccggttgataagggagaacttgagaactgtgcagtcaagacagaaaagctatgcagatacccagagaagactattaaaatttaaggagggtgatcacgtgtatctgaaggtgtcaccgatccggggtatgaggagatttaaagttaaagggaagttgtcccctcgctttattgggcccttcttgatcctgaagcgagtggggaaagttgtctatcaactagaactacccgaccatcttgcggatgtacataatgtcttccatgtgtcccaactaaagaagtgcctcagaatacccaaagagcagctacctatggaggatcttagtgttcaagatgacctgacttatactgagtatcctatcaagatcattgatactttgactcgtgtcacaaggagtaaagtgataaaaatgtgcaaagtgcaatggagtcaccatggtgaagatgaggctacttggaaagagaagaagagctgcgagtacattttccccacattttcc

SEQ ID NO: 8926 - DNA, 687 bp, Zea Mays
aataatgtatacacacacaagtactcgtacattgtacaaatgtaataaatctctgaccgtacgtcatcgctcaagctcccggttcacgccgtgattagttatatatctctactacaccttaaggctagagcgagggcatccaccagcctcaccgtgcccccgctctagcctcgcgccgcgccatcttccttcctgtaatcccgcccacgctcgcgccgttttccttccctgatcccacccccgcccgcgactcctagcgcgtgtctcgatctacctcgacccgacatcatcgcgcgcccacaatcctcgctagcctcgctcctgatccgcctcgagccaacatcatggcgtaccccgtcccctcgcgtccactccaccgcgatgctagcccaagctccaaggaaggcgcgcccgcaatccctgcatcctgcgccgaccccgcgctcccatcccatcccatccttgctctccaaggtcctagcgtcctggtgctcatacacggcttcggcccccaggcaaagtgacagtggtggtgccaggtctgctcaagaccgatgctgatgaccaagcctggctcctctatgccggtgcgagcgtgtcgaggacacatcatgcttctgcgcttccctcgctcttgtgcctcccccaccgtaacagccacctctgcgtccctcgccacgccccaac

SEQ ID NO: 8927 - DNA, 638 bp, Zea Mays
ctcttaggagttgtggtagaactcttttgtgccttcagcgttgttgcttctattgaaggacttaaaatcccttgcatctttgttacttcttcagtttttgacctttcagccttatctttgtcaaccttcgtttcaactacctcaatcgaaggtttcttcggcattatagtcggctcttcagtcctctgcatgggaggaacagtttctcttgattcagcagctgaagaggcctccccgccaaactcaagcaccacagctggttcaatgtaacgcggccggtgggtaagtaccttcatctttttgaccgcagcctttggcacaggctcggctagggcggtcaaagcagcaacttttctcttcttcccctgtccacgcagcaggtattgatagtcagggtatacgaagccgatggcatcgaaaactctatttattctcttttttccccgacctccgaaggctgtagataacgcattgtcttctgccttggaataagctccaagcagctcatcatttgtaacttcgatacattttagccagtcattgtttggctcatcgaacttatccccatacctgaatgtatacttcagccggaccagttcaccttcgctagacttggtgatggtctccttcggcatttc

SEQ ID NO: 8928 - DNA, 566 bp, Zea Mays
ggcattacgaggtcttcgaccagtcagacgaaaactttgaacgtgaaatcttcaaggtcgaggaccctgtgctgaagcagtcggcgggggcgttcttcgacaggatgtggggcctgcacggccaagagacggtctaggaacggtccgaccgggcaatagatcaggtaaaggctattttttgtgtggttatgtgtgtgggtatgtgtggttttgctgaatgagtgtgctgtgctgcagatggtgcatgtcgaaggcgtcgaggacctcggtggtctagacgacgcgctacccgaggccgcggaggtggatccggcgccgccatctgatgctggcgagggcccctcgtcgacccccgcaccgactgtagctggcgaagagcccgcaccagcccctgcgccgacatgtgaggacacctcgaaggcggtggtcgaaccagctaccgaagaccccgcggcggcggccgagccttcgcaggtgtagggataggggttatggattgcatgtgaactttttgtctgtgtgatactgaacctcggttgctgcgcaggttccgacgtttgggcctg

SEQ ID NO: 8929 - DNA, 449 bp, Zea Mays
gggttctcaatcggccttgtattggaggcgtcaacctgtcaaaaatagatgattgaggtgccccccaggcggggtattgtggtatcccgaatgtatatggtggcgtgccccacatctaattcgggatatatggtagtggtggtatgtatgtataatgatatgacataggtgtgcatgggagtggaggtgtccatgcatgtacgttaggtcttagttggacattatgacctccagtcctttctgattggtgaggtggtccaatcggcctaacctgctgtcgctcctgggtgggtaagcgagaccgctttggtggccgatcactggggcctgtcttctttttcacatatttagacaataattgatcaaatgtcaggctagatttgaccaactaaccagcggccttgaacatgttagttttccacgtacctatttctggtcgtcgtggtttg

SEQ ID NO: 8930 - DNA, 419 bp, Zea Mays
attaaatcaaagcaaacacgaagaacagagcaacagagtgcaaatggttgcacatgtcatggtatcaacaatatggagcaagctgacacatttgccagatctagtatcatggcctcacggacggtggaaatggcatgtgcataagcaatgtaagcatattgtcatgccacccttcacatgcatgtttttgggtgatcgtcactggaagtatgcaagatgaaagtgaacaaaaacaaattcgcagtgtttagtggtaatctatgttagaagtttagcactaatatacaaggtcaggaaggactttatagcacctgccttttctgccagatatccaaatttatacatgaaatctgaaataaacacagtgggtagctcgtctgtcagataacttgagaacatatcaactcatgatgataagg

SEQ ID NO: 8931 - DNA, 388 bp, Zea Mays
gcgcccgggttttggacccctgaaatctgggtgtgacactaagcatgtttgaatggctctttggtaggtcgctcccgtgtttttgaggccgaagggcatggcggtatagcagaaagctccaaacggggtgatgaatgcagttttctcctcatcttcttttgccaagctgatatgatggtatccagaatagcagtctaggaaggacaacatagaacaaccaacagtcgaatcaaccacttgatctattgtagggagcccaaagggatccttcggataatgtttgttgagatcagtatagtcgacgcacatgcgccaatccactttattctttttgagtacaagaacaggatttgctagccactcaggatgcaacacttctctaatgaac

SEQ ID NO: 8932 - DNA, 461 bp, Zea Mays
cggcgaggtggctgcggctgaacgggaactcgggtatcagtcgttcgagggggacctgaaggatatcttcgccggaggctcctactccggtgaagacaactagacggacatcgggggaactccgtgtcccccgatctatgaagctgaagcacgccttcctccgaaggcccttccagacccccatgggtccgagctgcagacaggtacatgcagaagtgatcatagccagagacaagggctcccgtgtcaaatgcagacaggaaccctgggtcggggcctagccccgcgtcaagtgccataccaagaggtgctccgcaactctcccccagctgggaaggacccttcaaggtaacgggagtgcactgacccaggggcaaccatctagcttcgactggaggagtaccttaccccgatgccaaatatctctgtaagttctatccatagagcaagactaaggggtc

SEQ ID NO: 8933 - DNA, 426 bp, Zea Mays
gaagtggatggccgatcaagtgtgttcatgtgttcgttagtagctgttcaaagacataatgaatgtttggttggctatgcgaaagggaaagagacagattggctttaattaaggccatattcaacccaaagaacgcataatatcagaatagactttgtgaaattgcaaaaagttgggtaatggggtctcgacgtcaacacgccatggtctctcatgtactcccatccattagcagcaacatagacaacaacagtgatgccaaactaacagggtcgtacggaagggaagataccactgccacatctccgcgaaaaaaggaggcagcaagcacagcaataggaccaatgagaaagcagcaagtacgcaacaccatatatggctaaccggtcactgcgcactgcgctacgcgaaccacatagaaacaaa

SEQ ID NO: 8934 - DNA, 772 bp, Zea Mays
ctttacacattttccagtgacttagtaatttcatgttgcttagtggttcctaactttggtaacccttttaactgacaggcaggactattcccattgctcagatatggctgttcgaggaagcagtgctttcaagctacgtttctatcccaacttagaagtacaaaatattgcacaagaatgggttaaagagagccggaggctgttctatctaagaactgccaacaatgtcacaaataacatctataagggaaacactcctctatggactggaatggtacaaaatgaactctctgaagattgcaggggtttgaactacacttatttgaataatttgagggaacgcgtatcgtccaaatcaattgtaaatagacatggtaataaccgagaactgatcgggcatagtacgataaatcagcatgtgaaatcagtgccagctccagtacgtgttgttaatgatagtgtcaagtgtttcagcatgcctagagcctctaaggtggagattccttggcctgcctattcaccagcggaggatcctttgcttgataaatctaatacagaggtaattttggagcttgaggataaagttcatgatggtgatgacaaaaagaaaaaaactgttgtaaaaaaggtggtttcacctttcccaactaaagcggccttctctgaggaatctttgaaagcacgggaggcacttgctagcatctacgacaaagttttggtagttgacgatatcgagtcagctaggaacattgttaaactgctcactacaaag

SEQ ID NO: 8935 - DNA, 831 bp, Zea Mays
ttcctgacaacgcctccgggatactgcccaacttttcaatactaacagcattgaccgagagactggtgccctgagattgttccagatccagctgtgtatggccagcgcacaccgatttcccactggtcgtgttgctgttcagcatagaatccgaaaccttgttaactgcccctgctgaatcctttgatgttcccttcaagctcgcccccttactccctctttcacctattttgtgatccttgttttgatcctgaaattcatcatcatcattttccccgatatgatccatatccatcggcaaaggctggtcaccttcagcttctgactccaccctgaatttcagttcatataagtagtctccaattaccacatcaactacttgcggaatcaaattcgggtcaagcacggccaccttcagccttgccctgtcaaatttccgagtaaacagcatatccacctcttttgagatgcctagcatagaaccaaccgcccagattactgagtactctctaagttccttaggtaaaccagtgaactgcacccaagccttaggcatctcatattttatttcctctccaagcccctcttccttgacaagcatctgtgcaccaaattttgtatgaacagttccccactcgatcatgcggtgaagttcaccccgggaagggaaacacgtcgagaacacattgttccccacacacttcacacaccagtcccaatcagcagccaccaaccttttaagctcattcaaaatctgctcttcattcatggaaccctccacaatagacactgttccaatgcagccaccttgcctctgcttcgggcagacgc

SEQ ID NO: 8936 - DNA, 449 bp, Zea Mays
tcaggataaacatatcaaatagcatcaaagacccttttagtctttgtttctcttgagcaccgaaggcaacatacatggcttcgccctccgccttcgtgtagctccctagcaatccatcacttgttccttcaatggaatctagctaatcatcatctagctcaccaaattgattcctgaatcgataagtatacttcaggtgaaccaaacttctttttcccgcatttgcattagcttaagcatccttcgacatttcccatagcagctaagggacacacgttgaatgttgtgtggtcctgcactaagtcaccggtgctgatgtagttgcacacatcattaaatgccgccaggtagccttgtgatttttctgtattcacgataatatgcctccacatttctgaagcaggattagataagccactggattacatccttaatatcacttcttggac

SEQ ID NO: 8937 - DNA, 483 bp, Zea Mays
gctgctcccgtccatgatccatccaccctcttctccctttctcatcaggccttgactgttctcgactcccctaatcaccagctcggtctattctcctcttcctcgccgcgctccgtcctgtctccgacacacacacgccatctgctgccgcgtaaacaccgggaaataccaggccttcctttcctgctataagcaagtttcaactccccaagttcgctgcttttggtcaatcttatctgcgctcccaggtctcagcgtcgccggtccccttttacttcgatccctctatccgatcactgcaattctaagcttcaattacctcctttctgggaaaattcactctctgataaagcaagccgttgagcggctcacgcaccacaccaccagtagctagcttcagctaagatctccatcttcccccatgctacaagctcctccaggaccgtcagccatggcagagctatagcggttgctccagttggc

SEQ ID NO: 8938 - DNA, 647 bp, Zea Mays
cggcggccgagacgaagggtgagtcactggtggccgcgcaacgtggcttttaccgtggcggcacctccggcgatcaccggatatgcgtagctaggttagccgcgacgtggtaaagtgtctggacacgcggcgggcgacagggatggctcaacggcggcgggaatctatccgagtgaccgatgagcaagggaagggaggtacgacggctagccagaatagtttattgaccgggcatatccacggcggcgtgacactgagtgctatccgatcaacccgagcacgaattgaaacggcggcggcacgaatcgcggtggaggtcgtcggcggtgaaatgcgctggcgttctgatcttgttcaggcactgtaccattgcgagctgccatcagtgcacctgacagtcaatgtttgggctccattttctctcagattcatatagcaactgatccgaggttctgcagcaaaattgtagaccaatgtaccatctccatctttgttatagcagccatgggcaaattctttgaagatcatgatctgtagagctccaaagatggctcaaggccactggtaatccaacttcagatttcaaacagcctgaaagtccaactttagacttaattatctctaaattcttcctaacaactaggctt

SEQ ID NO: 8939 - DNA, 495 bp, Zea Mays
aattagtaaagaaaacagggtctgaagtgaaaggttacaggacccgcttgttatgaatcttaaaggtggaagggccgcaggttgatttataaaggttccaggggttcttttgcaacttgacaagcgcgaaggggtatgaagcacccagagtcgttggatccacgtcgcacggcccagattaggttggcgatgtatcgaaacattatcttttaatctctaccatccgcagtggatcgaacggtccccggtcccttcatatagaccagcgcacgatcacagccgcccgacacgcaaccgatggctcagattcacccaaccacatccgatggctagcccaaatctgaaccgttcgacatacgatcgatgatggcacgatcatcttcatcctccagcagccaagcttggccgcgcacaccacgctcgcagcggcgcgcccatgagcgacggcaatggcccaccagagcaccacgccgcgaagcccgacgaccacgtcga

SEQ ID NO: 8940 - DNA, 482 bp, Zea Mays
gctgaccacggacgcgccacactcctgttgtgcttctgctgtgtgggacccgttggtaagtcccatccctatccccagtctgttcagccaaatccatggaggccgcaccttccgccgcgttttcctctcgcctcggcctcaacctcaacagattccgccctgattttcggtcggttgcggcatcttcgggcgaccgggctcctttaaatgtcaagcgccgcctgaatctcgaatcactgtgtagacctcgtcaccagagcgctgtgagttcgtcacctaggccggctacacccccttgctcgtcgtcgacataccgcaccgctcagagctctggctttgcccttgaaacgtcgctgcgcgggaggaaggtgttgccccgcatcagagttactccacgggcggggcagtccgggaattcctcgccggtgctcgcgcccaatctctctccgcaccctgtcgtggcctgcttccgccatagttcc

SEQ ID NO: 8941 - DNA, 1043 bp, Zea Mays
gtccgctccgtcatgtttcagccagcctggtcaaagttctctccacaccccatctgttgcaagcaagccaacctccagccaatgcttgttggcactgtggagacccagtcactacaaaaataattgtcctcaattgaagacatccgtacctacctactccaactcggtgaatggccccaagaatgtttcagcacccgcctccaagacaccctccaccaacagccaggtaagcaagacccagtttcacggcagggcttgagtgaatcacgtcgacgctcaagaagctcagcaagcccctagagtggtgctcggtgagttgctagtcgaatttacccctgatgcggtactttttgattctggagcatcccattcattcatcaccactagttttgtggaaaagcatggcattcccactgcatctttagaaattcctttggtcacccgaaccctagggtcagaccttctatgccacctcaaatgctcccaagtcataatcttctaagtggggtagtattcttggcggacttagccgtactcccatcccacgaaattgatgtgatcctaggaatggattggttgaccaagcacaatggcatcataagttgcgtagataagactattcttctagatgatcaccaaggaaaaacagtttcgtgcaaagctcagccaccaacccaagatccaatggtgtttagcctagtagcaaaaagtatatctgtggtagaagagttcatggatgtgttcccggaagaattgccaggaatgcctccggaaagagaggtagaattctacattaatctcatcccagtcaccacactaatcgcaaaaagaccataccgcatggctcccatagaattggaagaactgaagctccagatcgtagaacttcaacagaaagggtacattcatcccagttcatctccttggggagcaccagtcttgtttgtcaccaagaaggatggaagcatgagaatgtgcattgattaccgatccttaaatgaagttacaatcaagaacaagtatccactacctcggattgatga

SEQ ID NO: 8942 - DNA, 489 bp, Zea Mays
tagatggaaactattatccagcaacctgtttatgagctgcaagcaacctaatatttgtgctgctctagaattgcaaacaacctgagaagcctttaattggtctcatgcctctgcaccaaccagactttgattttagtacaccagtgactgggtggtgatcgaatagccgacatgcacgttcagcaaaacaggcgcagaaaaatagcccttgcatgatagatggttagtgttcaaaaaggtctaggtcatttaaatctgaaattgtttgttgacgaagctggcaacccactatacaggcgcggaaaatagtattgttgcctggaatgcctctgcaccaaccagtttgttggatgaaggcaggcgacatcgttgagccaaacacagcaaatacgatgcacaagatttgttcctcggcaatgaatggagaaattaaaccaggggcattacggggagtttagaagatgatgaaaaatgaaaggaaaaagaaat

SEQ ID NO: 8943 - DNA, 374 bp, Zea Mays
actactactgcatctttataatctcgtaactgaacatgactgtagtacttgttagatagcttggaaactctaaccctgattagggtaggcaattatataatatagcacctcccgctgtcgaaactctagctagagcaaatgttgagacttgagactgaagcgaaactctgaaaacagtgaggagggaagatcattggcaaagatgtcgacaaactgcgagcttctagggatgtgatggacctggtcgtcctcaacagcaacactctcatggacgaagttgaggtcgatctcaacgtgcttcgtgcgttgttgctggacatggttgacgaagaggtagacaacgttgttctcgcagtagaccaaggtgctccggg

SEQ ID NO: 8944 - DNA, 437 bp, Zea Mays
atgtgaggcttttcttggcatcctgtcacactttggactgtggaaatatttgtatcactgtcggcctgggatggccggaggacagcatcagctggtgggggcgcgagcttggagatgcgccgcgaaaggaagactggttatctcgacatccccctcaaggacaacattaaaggatggcgcttggagtggtttatcgttgagaatcatggaaattctctccctgcacggtcagggagatagccggatgttcgcgctcctagctggaccgaatcccccacagaccaggatgtggctgaggcaggagttctgctagctgaagttggagtgttgaaggagaggggtctgactgcagaggctgtggttgctgactttgtcttcaagaatatttagccattgaaggacagggcatacccggcctatctgtaccgaggcctagc

SEQ ID NO: 8945 - DNA, 1323 bp, Zea Mays
ttttgatgaccccactgtcgaagaagcggcaacatatatgcaattgcagctaagcagagccaaggaacatttaagccgcaaagggagagagacattctaacggctggtctcggtaaccttgagcatcctggtcgtgtacgaggaatctcatctaaggaaggatggaaggaaggattcggaccacaatgggaaggtctgtacaagaaacgtgatcgatacaaggaagagatggcgaattattttaaggaggaggccaagaaagagttcaaaggcctgatgtctgaaatgctatcgaatcctcctctagaattgatgcagcaattggcgatggcgagtgcgatgtctgttcaacagatgaccactccacagatacaaataattccagcagctcaaacgccggcttccaccgagggtacgaccatcccaagctctatcgcgtcaacgggaaataaggtccgctatccagttgatgacatcacaaggcctgtggcatgcacactagttataagatatggtattaacaatcagcgtacaaagaaagtagccacaggccttgcgatcccaggacgcaagttccatggaaacgacattccagaagaatattgcagggtagaagtgacgacagtcgtccaaggatccgaggacgacatgctagacatccctgggcccgaaggtatcgagacacttggacaagctatcaagaattttatcctttggcctcgaagggatgtcgaattggttgatccaccacgacagccgtcatcgcaggcccaaccgtctccgccttctcaaattgttgttcctattgtacatccatcatcacctcctcaaacttcacatgctgctcctcatcctctttctgaccctccttctcctcatcctcatggtggcccaccgtctccgccacatacatcgcccttcagggatccacattctccacagctatcaagggatccacgaccatcaaagaaatctaaagtttctataccaaaattagtgtccccattcgagaagaaaaagaagagtaaatccactgctggcacagcttgctttttgaaagggattggacagagcctcacgtcaaacactattgatttggccggtctcgaggagtccgcaaaaaaggatgaggcaatggccgcaaagataaagaagccaactaaggcagattataaaaacgtgcctaaaaaatatgtgccgggcagaccactactcacttttgagaaactaatgaaggtcccggctaatattaaaaggttgcatgattggtacatgcgggcatcttcagttggcatcgacaccatcagtgtcaatataccagcc

SEQ ID NO: 8946 - DNA, 665 bp, Zea Mays
gcaggactaagagggctccagctggttctgtgggacctacctctttttctaatgtgtcggctcctcagttgcctcttcatggctcttcctcccatgctgctgctgcttctcgtcctatggactgcggcgggtaaggatgaggtcgtggaagaaggcctagtctgtggtttcacctagcgagaggtattgctagtgtgttcgctatctgtcgcagccatgcagcagacatagttgagatgtgttgcgaggctcagcggatggacgacaacctacgccaatttgccgcttccatgggctatcggatgcctgatcggcagcccgcaactcccctgcatcaatatctagaagatctcaaccagtggcaccaacaacaatatggtgtcctcttcataactctagaggaagaagaagaatatgttgatgatgatacctttggtcagtctatcaccgctgctcctgcttctgccctagctcctagtggccctcgcctgtcctcctccgctcctcctcctccattctaggaaccttcttcctcagcctatcctcttgcaaatgaccctcttcgcgagttgacatttgcagataattggctgagaagcttttcctctcataccctcctcctagttcttatagaggtcctggctctagtggatggtaagtctgtg

SEQ ID NO: 8947 - DNA, 437 bp, Zea Mays
catcggggtccctggcgattgttttcaaattcccttatagactagtcctcgggtcactattcaaatgtgccactgacagttcagaaaaccccctggggttttgctaaacctaacccgaggtccttctcccaattaaacagtacctgttgcggaggaaagggcggaggggcttaccggcggcgagattgctccggtgaggtggtcgagggcgtaggggaggttgtgacggtcatgccgatgtgcaaatcgttgccgttgatggtcagagtaggctggtccacgtgtgcaggcgggggagctcgtcgacggcgagggctctggcctatatagggcggtagagttcaattaaaccggtcagtgagcttcactagaggttaggtaaggcatgggcacgaggaattgaagaatggctcaccggatagctcggcctacgcgcg

SEQ ID NO: 8948 - DNA, 416 bp, Zea Mays
gcgggctggcgtgcagtgggcatgtcagcgcggtcgagcacgtggcatggtttcttctgctcctgttctaatgccaatagggcgcagatctttgcgaatttgggcaagatcgccgtgtaggatttgttcccccgactgagctctgtcgtttgtgtgtggacgttgtgcggttttgggctatggacagggagttgtcgcgttgccaaatctccagtgtcacacgaccaagttccgaggaaaatctgcgccaagatcgtgtcaaacatttgagaaattttctcaaacatcgccagggcgtgttcaaggtagtttggcgccattttggtatttggacttatttgattcaagttttgaaaaacagagaacacagttgatctttgaaaaggggctgaaattcagatttctgaatttttcca

SEQ ID NO: 8949 - DNA, 695 bp, Zea Mays
gacaactgtaaccaggatcgtggttttgggcctgttttcacccaaccccgcggcctggtcaagggtacgctctatgattctcatcctgctccattcaatgatgatttagatccatggcggggcaacgagtgggatgggggccatgagggtggacgttctgggcaaggaaatttaccacgtgtgaattttcctcagttcaatggagacaacccgcaattgtggaaaacacgttgtgaaaattactttgatatgtacgacgttgatccgtccaagtgtattcgtgtcgcatatatgcatttcgagggccgagcagcttgctggttgcaatcggtcaagcggagagtgcgctactggtcctggcaggaattttgtgcccaaattcatgaccgctttggtcgtgaacaacatgagtcccttattcgccatctctttcggattcgtcaaaccacttcagtagcagattatgtagaacggttttctactttggttgatcacctatccacatatgaggcgaatgcagatccattgtactatactatgcgctttgtagatgggttacacgaagaaattaaagttgtaattatggtacaaagaccttctacattggatattgcttgtgttctggctttggtgcaggaggaggcattggagatgggccgaggagtacacgacgttactctatctcgtcagcattc

SEQ ID NO: 8950 - DNA, 1361 bp, Zea Mays
gtcgggcgccagagctgccttcatcaagctcgaagagatggagctgggatctgtgcgtttcggggatgactcgatggcacggattgaaggccgcgggaccgtcgcattcctgtgcaagactggagaaatcagatcgctgggcggagtctactttattccccgactgacgacaaacattgttagcatcggtcaactcgacgaggctgggtacaaggtcgatgttagcgcgggagtaatgaagatccaggagcctggcggtcgactgctggcgaaggtacggcgcgaaacaaatcggttgtatctgctccaagtcaaaatcgccccggcaacttgcttagcagtgcgtgggcgaaatgatgaagaggccaggctctggcatgagcgttttggccatgtcaacatggcggcgctccggaagctagctcgggaggagatggtgcgtggactaccattgatcgggcaggtggacagggtgtgcgaggcttgccaagccggcaagcagagaaggacctcattcccgatagaagcagagtaccgcgctcatcagcgcctcgagctagtgcacgcggacctgtgtggtccaatcacaccggcgacgccacgaggtaacaaatattttctgctcatggtggatgatttcacccgatatatgtgggtagccgcaatcccttcaaaggattgtgctgcggctgccatcaaggagatacaagcacaagcagaaggtagatctggggcgaaattgagagcacttcgtacagatcgaggaggagaattcactgcaactgaattcgcgaagtactgcgcagctgaaggtatacatcggcagcacactgcaccttacagcccgcaacaaaatggagtcgttgagcgcagaaatggctcagtcgtagccactgcaaggagcatgctcaaggccaaaggtttgcccggctggttctggggtgaagctgtaagtaccgctgtttatgtgttgaacagatgcccgacgaagagcgtggacggcatgacgccattcgaagcatggcatgggaagaagccagcagtgaagcacctcaagaccttcggatgtcttgtgtatgttcgaaacacaacaccgcatctgaagaagctcgaggatcgcgggaggaaaatggtgttcatcggctacgaacacggctccaaggcgtacagggcatacgaccccgtcacgaagcgtgtccatgtgacgcgcgacgtggtattcgacgagcgcgcccagtgggactggggatctgttgaagaggccggggaacccagtgggggcagcgatgtattcaccatcgagtacactgtcacaagtccagcggccccggctgttgaagcaagggcagatcaagttccgg

SEQ ID NO: 8951 - DNA, 680 bp, Zea Mays
gtcgaggtcgagcccgcttcaggattcgaagacatgcgtgatatagttgaaggagtgtcctcctgtgggattcgtggggagcaggtagccgaggccgggcttgggcgaggcagagtttcgcccgaggccaaggtcgacttcgggcgacgcagagtgccgagggccatcccgcgctcttatcgtatcgtgcgtcccatcgggagttggcaaacggcgtgcgagaacagtggtcacatgcgttatcgtagttggtgaagcttgacatgatcatggtcttgttgctcatgttcacctgcaactctgtgtggggttcgtatgcgcattgaatgctcctgtcccctgcggacttcggctgagtcctgcctcagggttgtcttccttacccggctcggacgaggcagagacagcggttcaagggagaggggacctcggctgggacaaggattctcccaagaacacaccctgtccgagggcaagctcgggcaaagcggagctatggtgacccctgagaggggcctcgggtgaagcgcggtttgtgatcctttgtcctcggggaatgtatcttgatggtggccttggggttaagcatgttttaggggcgtaatctaggtacccctaattacgatacccgacagtagcccctgagccctccaagtaagtgttttgacacttgtttgtag

SEQ ID NO: 8952 - DNA, 687 bp, Zea Mays
aacgaccgccacaagacgttgtacgtgatgtatggtgggagctgggagctcacctctcgcaggaacgtcaagtccctgcgccgagaggtcctttcagcggtcccaggggtctcgaaggctgctccacatcagtggtggaggagtaccactatctccttcggggcatccgactgccccgagaacatggcaggggccggcatactgccgctcatcaccgcccctatcatcgccaacatcaagctgcatcatgttctgatcgacggtggggctgggctcaacgtcatcagccacactgcgttcagacatctgcagatcctagggtctcgactgggaccctctcatccattctctagagtgggcgctcaaccggtgtatcccctttggagcatcacgctcccggttacattcgggacagaggaaaacttccgcacagagaacgtccagttcgacgttgtggaggttaacctccagttcaataccatcattggcaggctggccctgtaccgattcatggccattgcccattacgggtatttggtcctcaagatgccgtctccagccggggtcctcaccgtgcggggcgaccgcgccgctgcgcttgcggctgtggagaagctgcacgccctagcggcggaaactgctcacccgaacgacggagggaggaacccctcgacctccggtaccaag

SEQ ID NO: 8953 - DNA, 1129 bp, Zea Mays
ctttactattgatatgttatgttattgtctatgctagtttgacattatctgaagtgatgctatgccaatcttatttacttattattctcacccctgtggcagcagctatgccgcctcgtagggctcggggtagtctgcaagttcctagtgaggactcgatgagtccggcgacaatgttagccgcgatggaggccatgcagcaggagttggccattcaggcaagctattcctgttgcccctacgggtgctgctcagggtgctggtggaggaggagtgcccgagggcgctgtccctgcgggtgctgctccaggtggcggggctgaggtgcctcttccagtcagtggtgtttctctgatgtagtggatgggcatgaagctagatgcttttgatggtagtggtactccggttgaggcggcagattggctaacttacgtggaggataagatgaatgtctttgagattgtgtatggtgatcgtgttcgctttggcacacagctgctgaagggagaggctcaaatttggtggagaggcgtgcaggcagtgcactcctcacccggagtcgtgacttgggatgtcttcatcaggcagtttgaaaggaggttctccccggtcactttcctggagaaaatgaagtttgatttgcagtctttcaagcaagagaagaagtctgtcacagagtatgaagtgggcttcaacaagatggtccgctttgtccctcatgtggcttttaatgagatggagaaggcgagccagttccgtcagggcctgaaaccttctatcaggcatgccttgggtgcctttccgttggtggacttccgtactatagtggagcagtcactgggtgtggagatgcagcatcagtataccatggagtcgcagaagtcttcgggtgttgatgagccacgtggccaggacgcgaggaggggcaacactggaggtccatcccacaagaggggcaagtctcagcatcagcgccaccatccttaccgtggcaaatcttctgactcgggtacttcgggaggaagtactcagaggtttcgggctgttcctaagcccgggctggggctggtgtttttccgttgtggtgatgcgcatcgccgtgtagagtgccagtggagtggcaggtgtt

SEQ ID NO: 8954 - DNA, 526 bp, Zea Mays
tctaatcccaggtatgccaatcctacctgcacccaccctcgtggtcacgttgttgcgcagagtggtgtcggccgggttctgtcacctggacaatcggggcgagcgtcgggtggccagtaatggcatgagtggtgggtacggtggtcggctaggccggtgtcaaggggttgaagacaccaggatagccctggatcataggatggatggctagattaggtctggtacatctgtttggctgggatgcgatccgttccgtcaatctaggcgcttgatgcaatctgatccatagatcgtattctcctgggtgatgcattcaatctggggccgtgggctggcagccgtggattcgggatcagacgtacaccagcaaaccccagtacacttagcaaggatttaatcggaaccgtttatcggatcgggcgatccagatcccgcgatacccattcgcgggcctgttttacacttaagcccttggggagaaggaaaaccaacccgtcatccagttctaagttagtcttacgaaaat

SEQ ID NO: 8955 - DNA, 434 bp, Zea Mays
cgatggggcttcatcgaggttgatggcaacaaacagatgacgaccgacgaacatggacagacgacgtcgtggcgttgaacaacgacgagtgcgacagcagcagtggcaagtacgacacggcaacggcggggcactcagcgatgtgtggtgtgacaacggctgaagttccgtcgatggtgcggtagtagcagagagcagcacgatgatgacacgaacaagtgcttggcgcacagcaatagggagcaggggcttcggcgacggatcggcggtgctcgaggtgaacttcaacgagctgtgttgacaacagctagaaggcgaacacaacgacagtgcggataacaggcgcgcgagtgacaaatgatggtgagggcgacagctttgatagggacgaaggcgaggaggctgtgtgagcagagtaggatgttggtgtcacg

SEQ ID NO: 8956 - DNA, 1670 bp, Zea Mays
agagaaattatatcactctacatctatatgtactaccaatgtttataatttcatgtgacacaaataaataagtaacaaaagacactcaataatacatgcatcatgctggatttgtatatttgtgtgtgtgcattttgtgacaatatacaaatgatgtatatatatataatccaaatttggaatttaacctctaacttgaaagcaaagccatgaaaatagaggaaagaaggaaataatatccaatataaaataatattatagttaaataacatcctcataatttggtatgaccaatatgcatagttaaaatgagtttaaatttgcacttgagattgcattcaaaatttggattcaaaagaattataaataaaagaaaacagaaaataaaaacaaaagaaaaagaaagaaatgcgctgggcccaatctcctatccggcccacttcgcctctttttctcccggacggcccattagcgggcgcaccgttcagttgtgaaggcgccgacgactggggccgtcttgtcagccgcctagagtgtttgtcccgcttacgcacgtaccccactttgtcagcttcaacaacctcctcccttcgcgcgcgtgtgacgccgcaggaatcgggtgccgctccccttagctcgccgacctcggggggatttaaggcagttgcatgcatttgtaccctagcccattagaccaccgccgcaatcacaaacccctgagcgccgtgagctgttgtcgccgaagacctgggggaggattgaggagagccgagattggaaattgggatttgagttctgccatcggcgtaattaccaccgacgagaggggagaagcgctcgggattctacgggtgatcgtggacgctcgctaggatcgtcggtggcctcgcgacggtggtttggcggctggtgatttcgaaattcgtcgccagagtgcacgctactctgcctgtccgccgtgcgccgtggtcggggtcaccgtcatccaccagcgaggtaagagtaccttccgtaggtctgccatgttccttgctccgcatagcagagttttggccagtgttggctcgcctgggcgtagtcagggaccttgttcatggcgccgccgcccaggttggtcgagaggatgggaagcccctggctgttaaatcggccattaaattcacggcgaacatacctctgtttgaagtccggtcagtggctgggtccgtacggggggtcctcggcgtgcgtgctcgcctagaaagcgccgcggtgcgaacctgctgactcagccgtgtcgcgtgcgtagagaggaagacgatacggtagccgtcgatctcgtaggtaacggctcagattagatctgggttgtaatggaatctggtcgttggttcttcttaggacggttggattagaatgaggtgtaccctttcacggcatgtaatctctaccatcgatctatctgcgggcggccacgatttcatcgcgccacgctcggttctggaccattggatcgggatccagtgatcctggtttcataccgattcataatagcttcgctctaatcctatccgtctgtgtttgaacggacgactctcatgtcgtgataccccttcgtcgtgttaacattgctaaagagaccctgactaaaacagaaaacaacccgccgtccacgccagggactctctgag

SEQ ID NO: 8957 - DNA, 861 bp, Zea Mays
agacgctacaagtctggctgccaggggctctaaattgcatttctgatggtacagtgcactaaatatcccagagttcagtccctcgccgccgatgatctgtgaatccggattcacgctgccggtcgtcgtgattcatgtcttgagctagtggattatgctcaacgcgaaaagatcttgccctggataaacacaagtcaccgaggtcactccgccttttgcccacttgcgccgatgacgtggccgcacaaccattaccgcgagcaccaccgttttccccggtcacgccatgctatgatcctttttaccacgtcgcagtagctcggcttgcggtgtatgtttatcgccggtgagttcgccacgacgaaagacaccaatcacgcgcgccagtgacttcctgtttctccgaccgctgcacatcttcgtccaaatccccggccaccgcttaagcccgttataaattgagtgcactgcgagctccatagggtaatcacccatccatagcacccacgcttgcctccaatcgttcaccagagactgtgaattgctcattgcccccaatctccgtttctgccaccgtagaaacacctcaccgaggccagcttgctccaggtcggttcatactctctggtcgttcgttttagtatccttaagttctcctaatgctgctcgacccctccaattgagcaagagtccctaggatcgccgagaacgtgctcggttagccgtgatgtccgctgtcaccgtgggcagggcgtggtagtgtgccactggtgcaattagttggggggaaacactccttaggactggaattagatttagaccgaagaagggcaccagtcattgagtaattcgaacggtatg

SEQ ID NO: 8958 - DNA, 694 bp, Zea Mays
cgcgtcgtgtcatacccgtggtattcgcccccaacaaaggtggagggtgtctcctagtcacgagcatgcgtgaaacaaaagactaggggtggtggctgccaggagaaaaggaaaaaaaagatagagacttctcccagacctaccatatgatagtccaaattgacaggtatcctaaaagctcatctagaatccaaaatccaaactagaaaagttaggaattgatctgaatcgtctcgacgagctctacgcatctataatctctgaccgtctgtatgtcataccataattcgattatgatcatgatttagttgataggttattatagttcactaaactatggttcaccatggcgcaccacccgctatgttccacgataccctatgcgagctgccacgagctcaagtggtggacggcgtgtacatgccattgtatcgtgtgtcattaaccacctcgatgttccctattgtcctatgagctgtgaagggctcaatcaatggggtatgggtgtgccgtcatgccatgatctcctattctgataaggcaacctacgatttataggtacggaactgtcgatgttatatgtcatcgacagtgacatcctcaggcgttgttaacctcctttgagacgtcaatatagccttcccacccatgtagctataggatatgtcctattgaaaacctagctctagttctc

SEQ ID NO: 8959 - DNA, 793 bp, Zea Mays
tcccatactcatatatatacgagttggagtaggggtgtaatcggatcagatacggtcgaatatatattgtaccatatttgttttcatattttttctcttcaatttcggatcagatatggatattatcgagttgtgtcaataagatttaaatcgattttggacaatagacaagctgacgtctcacgcggtagtgagcgccagcccccctatgtcagtcttggggtgtgcttgcacatgacatggctccttctgatgagttgtgcgctattgtactccttggtatggcgttccatcttgtccgtccgacgtacgagtccctatagcttattcgatgtcatgtaactgtatctgatgggtccctagagcatgctcatgatgaggttgagggtcatgttcagtacgactttatattccgtcataatggcccttgcatcaccttccagcatgcatggtcttgcaccaggtatggcgtgttgttctctcctttttggtacatgagttgttaatgtggaggctctaatgccgaggtcccccttgatactacatacatggcccaaacgtggtttgatgatgttgtgtcttatcgcggccatcgcgggccaacagcgttgcctgggttccttccttgtgggtccgctcggcgggacttgatcgttcgccccacctcgtaggctcgctcgggggagacttggtcgttcgtcccgcctcgcaggtttgctcgttggggacttggtcgttcgccccacctcacagacttgctcggggggacttggtcgttcgccccacctttgtg

SEQ ID NO: 8960 - DNA, 442 bp, Zea Mays
gattttcgaaagcatagcagaagctgaggccaccaggctggaggacatagatgtacttgaggaagaacggctaaacgcagtaatccaatcagcaagataccagcagactctaaggcgctatcacgacaaggctgtgcgacaacgattcttctcagtaggagatctcgtcctccgccgaattctaacgggggagggacgacacaagttatcacctttatgggaaggacccttcgtggtagcagaggtcactcggcccgggtcatatcgcctcactcagatggatggcacagaagttgggaactcctggaacatagaacacctcagaaagttttatccctagttgtacctcaaaactgctagggtgatgatgtactctgtaaagtggaaatatgtcatcaataaaaaagaggtttcaaggatactcagttcatttacgattgac

SEQ ID NO: 8961 - DNA, 694 bp, Zea Mays
taaagtccaagagactaatgggacataagatacattgtggatctcagctcgtcgattcctacttaaagatcgcatacaggagatgcataggttcacggagtcaatgtgttatgacagcccgatgcgtattgagtcgaggagattgaaggcggcaaatgagaagagagcataggatggaagggaattggaggcggctagagccgagaaacagatgttggggaatcttgctggtcttctgagtgcaagtgaataagaaaaaggacgtgttggtttcacttgtacattgtatttatattgtctttgcaaacttgtttgtcccattatatttgtagagattggatgtgtcgtgaactatctcgcagatgaggctcgtgcaagatacgttcaggaaaaaatggcgatggtggagctgatggaggaggaggacacatcaaggttgagtgagcttatcgcgatcggtgaggcaggattacatggggaagcggaggacgacacatcaaggttgactgagctcattgcactagctgaggcatgattacatgcgcaagaggaggaggacgagtttatgtctcaggccaccaaagaagcagagggcgcttattaaaagaagaagtgtgatgaagcggaggctgaggaccagctattctcctaaaccgcagatgaagcagaagccacttattacaagagaaaggta

SEQ ID NO: 8962 - DNA, 1102 bp, Zea Mays
gccgcggtgaggttgggcttcgggtggcggagaacagatttggggcgaacgtgaaattggagagctgtggggagtaatcggagctacgcgtgggttctctggacgcacaattacctagcggcactggccgaggctccaatttataggcagcttcgacggtggccgggaattttaatggcgatgtatggcggtcggagataaggaagaggtctggcgtcgtggttacgtgtccccagccgtggcgagctcatcgacgatgatgggacggcagtagggaatcacggcggtgccgtggaaaggctcggacacgcggcggcacagagatggcacgacgacggcgagcggccttatctacggcggtgagcaaaagggggaaagtattacggcttaccggggtggcttccagctcgatggcgacgacgatctttttaccacgcagcgttatccggttgccagcgaacgttaatcttaacgcggcggcacgaatccttgcgtgagggagggtcaccggcggcaagcacgcgatgctggcatcctgatccactcgagctactgtaccatggcgatccccccattcagttgcctgacagcccatgtttaggtcacactttctctaaaatttgcatgtaaacttcatcaaacctctgtaccaaagttgcagagttacaaaccaactacaattcgactatagggcttgaacacatttgagtacaaaatcaaggttgaattcatactcaaagttggctctgctacactgaatatctgaatttcagactgaatcaacctgacagccaatctttaggcttaattatctccaatattttcttaacaactctactcacactcttaagcaaagttatgctcctataattgggctacaattttgatgtggtgacctagggcaaaaaccctatagtttgaaagttacaaggctccaaagttgagccaaaactgtgaaatttcagacttagaatagaacttaattgaggtccattttgcatttaagtccaaaatccaatatttggcttacaagtccatacatttgtgaaccaaaggacttaagaaacttatttgacttggtttttgcactttagtccaaaag

SEQ ID NO: 8963 - DNA, 860 bp, Zea Mays
cgcgaggacttcaaggaggacatccggaaggtgtctgaccgagaggaagaggtgacccaaaaggagaaacgtttggccaggaaggaggtacgcttagaccaaagggaggaggccatcacagcgctccatgataagctgaaagcttataatacggtgctggagaaacagcgggacaagcaggctacgactgaggtaaagctgcagaagcttcagcaggaactcaccgacaaggcccgcgatattactcgcgccgaggaaaacctcaaggcgagggaagcttccctggcaaaacaggcaactgatctcacctggcaggaggaggacctcgccttcagggaggagatgtgggcaaggcggaacaagctgctggatgagcttgagctcgaagcggaggagagaagggagcgtttggagggaaaagtgcgggtactggaggagcgggtccgtcagttccaggcagcgcaagatgcctaggagacgtagataggctcgggcccctaggcggtggaggtgatgaggaagacactcgacgaactctaggctgagcaacacgcctgggcctagcgcatcgccgcctgggctggtgaggcaagcacggcgttggtgccgttgggggtgagccccatcccgacgctggtgcggccggcgtccatctccgatgcgctcccggtactggattccgctgctgagcgtcttcgacgtctagatcagattcttggtgcccgcttggaggccgagggcagcagactttgctggtcggcggtagaatacgtcttgacatgcttccggagtcacgacccggctgcctccttggggccagtcatcgcgggtctggtggccgatactgaagatgctgcccg

SEQ ID NO: 8964 - DNA, 793 bp, Zea Mays
gagagcaagttccaagaattgttgtcttcgccgaatggggcgggcataggcgaaggggatcttcgggagctctttgagggtgaggagttgaggataatgctgtttaattacagggagatgggtatcattccgaaggttgagccgatgtgttaggcgatgccctcgccgtgtgtatgtaattgtaatggtggtgtggcctgttggtcgtattcgtacgcttgtattgttccggctacgtatatgggcggctttgtgcagagtgtctttgtaatgatagactttgattaacgttattctggctgcgcccttaggtaattgttgcgctgtcttttgaataaaagactttgtttgacgcttctgttgtgctgttccggctgcacccttaggcgacttttgctcggaatgtcttgtaaagaaaagacttcgaataacgctcttgttgagctattccggctgcacccttaggcgacttttgagcggaatgtcttctgaagaaaagacttcaaataacgctcttgttgagctattccgactgcacctttaggcgacttttgcacggagtgtcttctgaaaaatactttgaataacgctcttgttgagctattccggctgcacccttaggcgacttttgcgcggagtgtcttttgaatacaagactgattatcgcacttgttgtgctattccggctgcacccttaggcgactttttgcgcggagtgtcgcacacgagggtagtctgcgctgcctctcgcggtgactttggagtggtcgaatgccgaagaccgttgatgcgg

SEQ ID NO: 8965 - DNA, 365 bp, Zea Mays
tatgcttgcagtttaaagcatttgccacctgtggtgttaacatgtttgctgccatgttcatatcccagtgcaagtgctccttattttactatctcagccaagtggttggatgaacccaaagtttcacacctctgtaccatgtttgatgagatttggactgagctgccaggacaagaagtagtgtatagatggctggactggctgaatagctcttcatgggcttgcatttctttgaatgacaacataatactaatcgcagataaaacttcagatgttggagatgcacgtgctattgcaagaaggcttctagttgatcatactattcctcttatgcaaagttacaatgagaggaggtctcatgaaat

SEQ ID NO: 8966 - DNA, 560 bp, Zea Mays
acgaccaatactagactcggccgaaacgctacaatcaccctaatctccgtcactcatacccgatccaacagtgcacatgcatcgtcatcttcccagacagcaaacggctgaaggctccggcgagcccgacggttattcgcagtagggccccacagccttcccgaggtcgtctaaacgcaacatagaactaacgcgaatcatatgggtgtggtattaccagacgttgtgcagaagagggcctcaatcacggcgaggagcggagtgcggggttggggcagcgccggcgagaaattcggatacctccgaacaccgaacttgcctagggagagcaccactacgcgtggagcaccgcgtcctgtccctggaacatgtcgacacttgactttcgacacgtagatgcggcgtccccagcggccgcctctctatctctcacctcacagctcgcgtccctcgatctagatccacggtgtggtaaattcgtcttatcaggaaggggatcgtgaaggttggtggccgtcctattttatacagagggcgaggggactccagctcgctcgacg

SEQ ID NO: 8967 - DNA, 1350 bp, Zea Mays
gtcgccgtgattgaggacgtctaccacaggtctaacgactcatctttcgtctgagccaccttggaagagttgttccgagaggcatacatctacatcaccaccgatgaacgggcctaggacttcatcggccatgcgaagcatacaccccaggtgctgaaggaggggaaccagcatcaggacaagcactaggaaaaggtgccaagagacgaagtgcatgccgctgggccctcggcgactcggccccgcagcgtgccacgaggcaacatacgaacactagacgagattctcgacgcccagtgtccgtaacataaggatatgcgccataccctgcataattgcatggacttcaagaactcagttggccacggtcgaccattccaatcgctacctacacccccaccacgaagacgttacaagaaccactgccgaaacaaagtggggtggtggaggcgccatcccacgcattaacagggaggtcaatgtcatcttcaggggccacgggtcctaggagagaaaaggtagcataatcttaccgatcgacaggtcctagtggtaacccacagtgccccgacgctgtatcggtggtcagagcactccatcattttcagctgagctgactagtggctcaacttcgatcaccctggcaagtacactcttcttgttgaccctgtgttccaagagagtcggttgaagaaggttctggtggatggtgctagcagcatcaatgccaccttccctagaacactccagtcattggggatctcgactgcccagctcattgagttggataccccattcttcagcatcataccgactgaaggagagtacccgctagggcatctcttcttgctggtcaccttcggtgcttcagacaattaacgaaccaagttcctgtgctttgtggtagctcaattcgagtgcaggtacaacaccatcatcgggagacctagactggtcaagttcatggccatcccgcactactcatacatggtactcaagattctcggacctcaaggaataatcactgcccgaaccgactttcaaggagctgcagtgtgctttcaaggggctatctagacgaccctcgccaccagaccctcggtagcacttccgacgatgaatgacgacgcatcgacggggcatcgcctcaaaatccccataaatgaagcatctaccactgccaccatgcgactggccgaataaaccaagaaatccaaccttggtttctccaacaaacgcaagatgacgatcatcagttccagcctcaccgccaaataggaaggcacgctcgtccagtttctgcaagacaactgggtgtattcgcgtggcaacccgcggacatgccgggag

SEQ ID NO: 8968 - DNA, 473 bp, Zea Mays
tctgagtgaggcgatatgatcccggccgagtgacttctgctactatgaacggtccttcccatagaggtgacaacttgtgccgtccttcccccgttagaattcggcggaggacgagatctcctactgtgaaggatcgatgtcgcatggtcttatcgtgatagcgcctcagagtttgttggtaccatgctgattgaattaccgtgttcagccgttcttcttcgagtacatcaacatcctccagcctagtagcctcagcttctgctatgttttcaaagatcaaccttggcgccccaaacttgagatcagcaggtagtactgcttctgaatcgtagaccatgaagaaaggagtatttccatgcagagctcgactaggttgagttcttaggctccaaacgacgtagggcaactcccttatccattttcctgcgaacttttcatttttatcgaagacttttttcctgagtgcctccaat

SEQ ID NO: 8969 - DNA, 346 bp, Zea Mays
gcaaggtattaggcatcatagacataagactggtctgctcaaatctttgccaggtgttgccttagccaaagcacatggtgtttaggctccatcttcacaaagccatcaccttgccttttgttgtccaataggtaggtaaggcaagtcatcaattcctcatcagtgaaacctggaatactcatgcaaatttgatacagatcagggtggacatctgtggtctggactacaacaggtgcttggacagcttcagccaatttgttcacagctccagttagtcctgtcataatccccagctcttcatcactgagtctccttttctttccatatgattcataggaactaccag

SEQ ID NO: 8970 - DNA, 387 bp, Zea Mays
ctcgggggctgggttatcctcaatcgaaccctcgggggctagataaccatcgcacgtaacagcaggaactgaagtgtcctcacggatcaggccgccctcaaaggtcaaagaagcatgggaaactgcccaggttatttcttgcccagtaagaatgctagctgagggaacgtcatccaggacctctacacggatgccaacacccccagcttcaggaagttccaataaaagactttctgggataatctcctccaatgcatgatcaatagcagacatcgtcatcctctggagattaaccagccctgacagagcctgaattggaacatcgttgctagctttgctatgacgattcttgcgaactataggggggatttcttcctcatactcttc

SEQ ID NO: 8971 - DNA, 488 bp, Zea Mays
tgtccttgccttttttgtaaacaattttgaaatgaagccccatcaacttagccatagccttcctctgcatatcagattgcaaaagttgatcatccagaaaactcaaagcctgatgatcagtattaatcacaaattcagccctctgcaaatattgcctccacctgtccactgcaatgattagagccaaaaactctttttcataaatggagagcatcttattcttagcacccaatgctttacttagatatgccactggtctatcacattgcatcaaaacagcacatatcccatcatcacaagcatcagtctccacaacaaataactcatcaaacctaggtagggccaacacaggagtagtaagcatagccttcttcaacgcttgaaaagcctgatcagcctcaggactccactgaaaagccttatgcttcaacagattagtaaggggttttgcaataatcccataatgtctcacaaatctcctgtagtac

SEQ ID NO: 8972 - DNA, 417 bp, Zea Mays
atacgctgagcttctaatcacggttgttccaactaacttttgtagttgttcccagaaacgtgctactaacggtgttcctatatctgatacgatggtcctgggattccatgcaagcagactatttggtcaatatagatatatgtgtattttttggtcctgtgggtggtatgtactggcaagaaatgagctgtcttggttagcctatccagaatgacacaaatggaatcgtggtgccgggaggtgttgggcaatcccacaataaagtccatgctaatgtcctcccacttccaagatggtatgtggagaggttgtaaggtacctgctacctttaaatgactggctttgattctttggcaagtgtcgcactcaaatatgtacttggcaatttccctcttcatcctggtccaccaatacaag

SEQ ID NO: 8973 - DNA, 747 bp, Zea Mays
tgaaaatataaattatgtgacatgtgattcgtgttttaaagacgagatgtgcgaatgatcggttagtgtttcacttgtctagtcgataaacattgtcataaataattatgctaaaatttggcatgagaatgcattggggacacatatgtgcgtgtgtgctgtggtgtattgtagtggtggtggcataagatatttgattgaggtgtgcgggtatatgccgtaatatggttatactcgcggcgaggaaagatgtacgcattgggtaacacgacgcttaggtcgctgttgtataatcgaataaatgatgtattattgagcttgagtcaaaatgtgggatactagtggtacgctaggcaggcggtgttccaaataaataaatcggtggatgtggttgttgtcgtgcgtgatttattgttagtgagtagtttgaataacgagttatatgaggattatgttagaaactagtatacggcgtgtaactgtgcttgtgatgtgaataatatatcagtaggtatttgtaggtgtcattggcaagtgggatgatttcggttgtgcgataaattttgaagggcgaagaacatgtgtagtgtgtcgatcaagttaaccgataggttccgtaaatatgcttgtgatgcttttatgtgcatgataagatcgatgccttgccttgtcaattattgcattccattcccattggataaataaatatcttattgattgattagaggtcttatatgagcgttatcg

SEQ ID NO: 8974 - DNA, 609 bp, Zea Mays
aattaccaagcgccatgagaaggttgtcttcgcgggcaatttctcggtgagtatccctccaacaacttcgcacttacctccgcctcgagtagctagtttgggagaattgttttgagctcaggatcagggtccagctggaaccggtgatgccgccaccactggttgttgccgggcttcaccgttgggggagaggaagacgcggctggcgccctcgatcctcctttgaacggttcggatcggatgaggggtaccccttcgggtgtgccgtgcgtgggccgttgagatcaaatcctagggacagtggcggaacacgtttcatgaaaccccagccgtctatttagggattaacggttgagattaaaagccgaggttaccccttcacgcttcgaatctgggccgtcggatgcgatcgggcgaatccaatcgatcgcgcctgtttaaaatcctagccgccgtttttggatctagtggctatcgtagcgtaccgcttcggtacagctaagatctaatatgggccgcagaattctaatctggcggcccatgtgcaacagagcccttttagtcgtacaaatgtgcaaaagagcccctgaacttattaataaacaaccc

SEQ ID NO: 8975 - DNA, 706 bp, Zea Mays
cgggagagctgaaaaaaccgagttgacaagctccagcctgccagcctgagagaggagggcagaagtgcatgatagtcttttttgaatcctctgaatgagtggtaaaaagtggcagattttaggctttgaaagacccagcggagtgcccagataggtaaagggcattgaacctatctgacaattaagagttcctgcaaggatcgccattttagcaggactgacattgatggggtacatacttgatttgttgtagttcaccttcaaccccgttgaacaagcaaaagagtttaggacagctcttaggaagaatagctgtctagggcaagcttccaaaatcagcagtgtgtcatccgcatattgaactatcgggaaatcttgaccacaattctctggcaatggtaacttgagaaggtcttgccgccgcgctttatttatgatgctctgaagcagatctgccgcgagtacaaaaagaagaggcgagaggggatctccctgcctgaccccacgcttgcagtgaaaggttttcccagggacaccattaagaagaactgaagacgtgccagactgaagaatatccctaatccagctcatccatctgggcccgaagccattgtgcagcaatacctgaagaatgaactcatgctctagagaatcaaaagccttttcaaagtccaatttgagcactataatctctttttttgaaata

SEQ ID NO: 8976 - DNA, 421 bp, Zea Mays
atcacatacaacatactgatcactgtgtgactcactgttgtcgatatcaattgcgtgtttttttgatgttgttgtctcattccaatgaggagcgttactttcaaccttgttcctagatccaggaggtcgtcctctcttacgtccagcaaggctagccaaccgtactctattctcctccaatgacaaacatgtcctactgttgtgaccatcggcaataccacacttctgacatttcctgttcattttctttgtaccttttgctcccaatttaataaccttttgttcactccccttgatttttcttcccttgggttttgagttatttggtcttgccaagcttataccatcgactgcaaaatccagtttctgcaattcaaaagaatagatttcttcagcacataatattatgcagtcccacatt

SEQ ID NO: 8977 - DNA, 372 bp, Zea Mays
gcagaattccccgtcgcacgaatggggcgtacttgttgccgcgaatctcgggagcctggggtcgacttcgcaggactataaaagcgtgtgcctggtgccccgtgaccttcacgcttgcaccacgccgcggaagctgcttcatcgtggagaaggggagaaaggcaaggagatctgccaccgtggtggaatctcggattgcaccaacattttggccgtgctgggtaatcgggggacttcgtcggtgatcatcgagcgcgggcgtgctcttactggcaaggacatcggcggtgggttcgacaaatcatcactagagttggagccccaccgttaaaccatcccccaccgtggtcggcctccgcgacttcatcatag

SEQ ID NO: 8978 - DNA, 369 bp, Zea Mays
tttgttttaatgaaatttcataattggtcggacagaacttaccaccatacctcaagatgatcatgcacttcatgctttggaaacagaagtgacagagcaagttggactcaactgttctggacattcaggcaaatttcttgtaacctcagcttatcattatccaaaagaatggcaaaggcacatttttttggaagttacttactgtgccttcatattctggcagattcttctgtttgcagtggagtgtcaccgctagaaaattcttgtgcaaattgtgaagagaaaatggtattacacagtgcaaatgaccctgttggagtaacagtgcatggtttgcatctttcaccttttaactgtgactgattgttc

SEQ ID NO: 8979 - DNA, 875 bp, Zea Mays
aaagtaattctaaggcgccatcaagtagtgacaagcacccactggctgtctgttatgctagatatatcacatgtgctcggtggtgcggtaggattaccaggccgctgtacattgtatacactagtgtccatgctagctatcaagatcaatagctgtgatgttgcgaagccagttgttctgcgtacaatagatgcaaaagcaaatgctgatttacctatcgttgctgagaaatctccccccatctgttctctccctcttgctctcttgtgtctacggaacacactttgtgatgctatataaagggcagaccctgtgctggaggctcccactttgtgatgctgtatatatggtttatatgatttcaaacgtgaagtttgtcgctcaacttcgattctcaagtgttcaattgttcatgggtttataaattccatactcctgtgacactgcaaaacaaatatgaacattgtggtttgaaccacactctactaattagagggctacagcagttaccactggtacggaaacatcataattatcagcttatggttgactatcgaaccaggcttcaaaaagcatttcattcctacgctccccacaaacttgtgcacagattacatcctcacgctgcagtaactactatactgttctcatgctgaccagtgacaaagttatcaacttgtgtaccccaatcagttgaatggcaatgtgttccaggtttcagaaagttctactacaaactgaagtttatgatacaccgtcatgtacatatgaaaaatatattgatgcactgataaaagggcaggatattgtgaagtataatatatgccaccacaagcgcggcctgcactgggcttctccttacactcctggatagc

SEQ ID NO: 8980 - DNA, 581 bp, Zea Mays
tccacgacgacggtgagtgcggtggagctccggcgagctagcagatcggcctaacggggcaatgactggcgttcccgatcggcggacaccaaatcagacctactccgagcattttccctaagttaattgcacggttggtgacctactccgccctgcccacgagaacagcgaaggctaaggacttttgctcgtgttcctggcaatgggtggcggcctaattcaattggacgggttggagagcatcaccagaatacagagacatgagaacaatgcgcgaattggatggtgccttaccagaacgggctggccacggtgaggttggtttcacggtggcggaaacttgatttggggagactccaaaattcgtgagctctggcgaacgattgctagcgatttttggtggctgggggggcgatgaccttgcggggctggcgggggcttcaatttatagggctcaatggtggtggccgggaatttcagtggggacacgcggcggtcggaggaagaagaagagtactggcgcagtggattcgtggctagcgccgtggcaatcactccggcgagccacagagagtcgcaaa

SEQ ID NO: 8981 - DNA, 570 bp, Zea Mays
gttgagcttttaaactcacgatgagcgattaaattgtatagtgggtactcggacacgccgatcaggctgcgttattaatcggctgagttatggcatcacctatgcattggctgcgccctggcaacacgacgcagtatttgtgtcgtacgaacttggctgcgtcatgtgattgttatgtagcactctcgttcattcggacagcacccgttgagtcggcccgccatcactgagtcgcgtatttttcgcatgccctgtaggcactgtctatctgccgtgatcattgagccacaattgcgcctgttgcgcacgttgcgtggacttatcatgtaccccgattaccgagtcataattgtgcctgttgcgcttattacgaaggcttgttatgttgtcgtggccctgatggccgctcacgcgttgacgccagatacgctagagcttatactcgcgtggattatggtgggttgttcaagcccctaaagtcacattatgcgcaaccttcgtaaacaattttgtttagctctatattttatttgcttgtgttgtgtggcgtcatatatttatttatattgc

SEQ ID NO: 8982 - DNA, 668 bp, Zea Mays
tgtcgtgactatatacattggatccagtccgcaccatgtggaatggagtgtcactgctgctgggcacagattcaaagacacctgccaagtcgtcgcttgcaaggcattgaggaccatgtgtcaactttatgaataagaagtggccgacaccccgctcagattctttccgccctttcagagagaccgtcccgtttggatggccaagatgcgtgcattggaagggcagcagctgcttgaggacgaccccacaatcgtgtacctcactgcatacctgctcgccctggatgcccagtatgatttcttggcttggcaccattgtcagatgattgcttgagcagaagatgcagagaagctcaaccgtaagctccatgtggatctcacctcagctcaagcccgtgtagctgccttggaaagtcgtgaagccattgatgttgaagccctgaagcaagccaaggatgagcacatccagaagttgatggaggcctacttggtaacccataaccaacgtagagccctgcggatccaagagcccgcttcatccaacccagttcaacccatgagagctgaagatccctagattcttgaaggtcacccggtctctatcagaggagagaagaagacttgggaactctcggaaggagccatagttttggaaggaattccagtct

SEQ ID NO: 8983 - DNA, 424 bp, Zea Mays
cgggcagttctgtcacagctggtatcggagcaagtatcaccacagagaaggacaataaaccatgaataccaattttcaaaatctaaaacttgcttagaaaactgctaataatcgtcaggactagaccgctagacctaggacgaaaggccttaaagatagtgggagaataggtggctgagtaagtaggccatgtgggccagtacttagattcttgaaggatgccttaggagcaccctttatttcggagaggagtcgttattcttttcagcatgcatgcattataaaatttgaaggattaagaattaaagaagtaaaaattcaagctaacccacttcttttcaaaccatccaggctctttattttcttccttccaccataatctttacatctgatacccttccgcagatgaattcacccaccctcg

SEQ ID NO: 8984 - DNA, 332 bp, Zea Mays
atcttggatcagagattgcatcctcatacaaccatcacactctgtcccctttatggcattccaggacagctgatgtaatccttccactatatgctcctcctcctgttctagctttagcaacacttcatcagttagaattgtgctcatatcctccactgtcaactgatgtatttgagtcactactctcttgggacatttggcttgatgcccaggttcaaatttgtctccacatatgtaacatagcccattggcccttctataatctcttaactgtctttccttactcaattcaggattcaggatcccacttctactccccattgcctaagtct

SEQ ID NO: 8985 - DNA, 572 bp, Zea Mays
tcgccgtgacttgctttagctctccgttgatcgccggagagattgccacggtaaccggacaccaatccactgcgccaatagctccttgtttccccggtcgccgcgcgtcgtcgcccaaattcacggccaccgctcgcgggctctataaattgactgcgcccttagctccgtcaagtaatcaagcagctagcgcacccacctgcacctcaactcctccaaaagagagctccaattttggattctccccaaatcgttccagaactccgctcggtttagcctcaccgcggccagcatgttccaggttagttcaagctcctcaatcagttgtcctagcatccttaagttctcctcaagctcctcgatccctctaattgaactataccaccatagatcgtcgggaacgcattgttcctttgattctccgcactgtcaccgtggacagagcagggtagaccaccattcatgaaattgggttgggggaaatgcatgggcgaggttcaattcagtgtctgctgcatgagagtcccagccattgcccggtccggccagcctgagctcatcgtagatcggcc

SEQ ID NO: 8986 - DNA, 961 bp, Zea Mays
ggactgtcagactgctaaaggactgaaatcaggctaacagtgagctaacagcaacttcaagcccaatttcgagtatgatctaatggcttttagtggcaacaccatattgcaacatggtatatggtacattgctctacaatttttctgcagagattgacacgggttgtcattagaaattgagagaggattgggctccaaaattgactgtcaggcgtctgaaccgaacttcaccatggtacagtaacccaattggggatcagaccgccgcgacagaaaaatcccgccgacggcgacctccctgcgcgaacagtcacgacgcctccgtgattcgtgttcactggcggttggataactacggcggggaggggataggatcgcgtcgtggatattttcgggtcgccgtggcctcgcggtattccgaccacgtgcatcgacaacgtggccgtgcggccgtcgccggagtttgcgtcctccgccgcgattgtgccacgcttccggtcagtgaccacgtcgccgtaaaccataatcattccccagtgactgttgaggcttctcatcccgtgaactgccacgaatcaccatgccggtgactcacttcctctgaccgccaccgcgctccacccaaattcccggccaccgctatcgtcccctataaaattgaagccaccgtgagctccgcaaggtcatcacgcacccagccaccatgaatcagcctcaatcattcactgagagccgcgaatctggagttctccccaaattgttttccgccgccgtgaaacccacccccccccaccgtggccagaccactctggtaaggttccgcgcctctcaagtattgttttagcatctgtgtaggcatgtaaagctcaccgtagcatccgtttgcccaatccgggcctgtataattgggaacatgggatcgacgccgcggttctcgccgtggacgtggacaggccattcg

SEQ ID NO: 8987 - DNA, 565 bp, Zea Mays
tcgatctctttgttatctatagccatctggtgacaacctcctttcgttggctcaggagagactagctcagtcaccacttcctctccaagtggggataccaacttcactgtcctcttatcacagctgataacagcttggtacttatctagccaatttatccctaggataacatctattccctgagtacccatcactatgaggttagcgggaaactctatcccccttatttccacacttacattcaagcatacactatcggctcgaacttttccactggctgaatcaatttgaattggtgttgtcatgttggttattcggagattatgcgcttctacccatgatgcagtaataaataaatgtgttgctccagtatcaaataacacttctgcaagatgggattcgactagaaacgtatctactatcatacctggtgtgttcctagactgctttggcctccagatgggttagcctaccatggttgtagcgcgtctaagcacgattgcctgctccttgctgaggtacattctgccttgcggggcattggggtggtggtggcaactgctgc

SEQ ID NO: 8988 - DNA, 323 bp, Zea Mays
tccaacaaaagataaccaaactaactctaactaagactggctagaataagacactgaattaaacattattatagactccgactccaccgatttatggatctaaatctatgcgggtcctgcagtctggggtaccataatcgaagcgaccatggggcggtgagtggtaagggtgctgaatcccgacaggggcgggagaaccaccatcaagatagtggcgtgccgcgcattcagcacgcaattctgcaacctccacccgaaccttgcccaactcgtcaagggcgtggtctagctctgtgttgagcacggcagccaggttgaccatg

SEQ ID NO: 8989 - DNA, 407 bp, Zea Mays
gtcaccaggagcccacatgatatacatcggcacgattgtgcgtccctttcttataatatgaacatactgcattgtctgacgtgatggagctgccccagtcagaggcgatctcagccccgaagtctccatagtagtcggtatgtccaaatcgataagacagggcggcatatcgaataggcaaatctgtgtgcattggaaggacgacgtagggcccacgacgacaggagaaagtcgtgtcgtataaatcatgccacggggctgaatcgtgggacccaccacgcgtcaccgcaaggacgtcagacatgaacccgccataagaataggtgggatggacgacaccataccaggagcactacttcgcacaacctagaggaggggttcgccacgacaaccgaaggactctctct

SEQ ID NO: 8990 - DNA, 562 bp, Zea Mays
gaataatgttgatcgaagtctatcattacaaccacactccgcacaaagccgcccacatacgtagcaggaacaatacaagcgtacgaaaatgaccaacaggccacaccaccattacaactacatacacacggcgagggcatcgcctactacacatacacggcgagggcatcacatattacattggctcaaccttcaggatgatacccatttcctgtagttgaatagcattacctcaattcctcaccctcaaaaagatttcgcagctcgccttcacctacactcgccccaatcggcgaggacaacaattctcgcttactagtcccatccacgcgaagacgaccactctccatctcactacgatgacgcctaccacttcgcgacaattcactcactttccgtttcaccaccgccctacgtcgcctatactcagtactcgcgcccgggagctcctcggaaccctccacgcgtggtgaagactccgctgcagccacatctaacgctgcaaaataatccaagtcctcatctgaagactcctccgtccacgcaatcgaactcccagaat

SEQ ID NO: 8991 - DNA, 380 bp, Zea Mays
ccccgccgtgccctctgccacggtgagcttcgcctcgacgtccgcaacctgggacacgccccaatttctcctctccctccctaaattcctctgcccgctctcactcgccgtcctccgtgcagccgaagtggtccgccaccgtcgacccgagccgtcgccgagccttcgccgccaccgagaggtccctggggttcgccttgaggtaaggaacctcccctgccctctcccttcccttctattgctccctgctgcgcttaattcctcgccggagtcgattagcgctgccgccgagccattccgccgtgggccgccccctccggtgcccctatcacgacctagcccccgccagtaagttccccgcgccttccccaacctcccag

SEQ ID NO: 8992 - DNA, 690 bp, Zea Mays
caaattcatcccccctcgccaccggtgatcttgcgtcgggattctcatcgctgttgcgattcaggctcagcaaagtaccagatgtggctcagggtggtaaagatcattgtgtggataaactccggccactgttctcaccggccgtcgtgtcccgccgtggttagtcgcactggcatcaccagcgttcaccgttatccggccaggctacgtgcctcgacgctttaccacatcgtggtgagtcaccataaaccgctccttagtcctggctcgtcaccggtgggtctgccacgatgaaggccacgaatcaccgtgctagtgactcagttcccctctcgaccaccagcgcatttcttccaaattgaacaccaccgctcaagcacactataaattgacggcacggtctgctgcgttgggtcatcacgaagcctgagcatccgctcctgccgccgattagccaccacaactctccaatttcccatttcccccaattctgtttccgccgccgtggtagagccctcaccgtggtcagcgtattccaggtctgttcatgctccctactcttttgtttcagcatccttaggttctcctgatgctccccgaccccgccaattggactaggaccctttagatcgccgggaacgcgttcgattgcccgtggtgaccactgtcaccgtggacagagcaagttag

SEQ ID NO: 8993 - DNA, 410 bp, Zea Mays
gacagattggcccggcgaggtatggatcaccatgacaaatgcctcttttgcgatcaacatgaagaaacagtccatcatattttgctctcttgtgtgttctctagaaacatttggtggcaactgttgtgtaaagtggggctgcaatacctggcgcctgggtctgaggacatgatttttcaagattggtggagcaatgccgaaggtcaggtttctaaagagaagaaaaaaggttttaacacgttggtaatctttgtggcctagtggctgtggaagcatcgaaacacttgtgtcttcgagggagcttctccgagcactagaggtatcctgcagcacatccacgaggatgcaacgctgtggggtatggccggggctagagggcttaggggcatttggccttaagactagggggg

SEQ ID NO: 8994 - DNA, 696 bp, Zea Mays
cagtcccaaaagtacgaaatccatatatatacgttagtaaagacagccctgaaagtactcatgactcacgagagctttcactgtccagcggggacacatccgtgtggtcccactttccagcgaaagagacgctctcttcttccgagccgtgtcgcatcaagtccttcagtaagcctagacgttggagctgcagcggctggaggaggcggcaagcacacgggcccacatgccatccagtgttccagctgctgctgctgctcgtaccaaggcatgatcagtactctactagagcaaaggtgtgtgtagctagctgcctggacgttgcagcgctggaggaggcggcggcaagcgcacgggggggcccacatgccatccagcgttcagagaagcttcacatgcaaaagggcccctccgaagaatccaaacgttacgaaaaggcccgtgcccccgtgagatgacaaagcggcaaacggcgtgcctccacccacccacacacacacactgacaaacgacccccctcggtattctccaatccccaaaccctcgtcgacgccgtcgtcttcactgttcagtcccccccacagccccactcccttcactctcctcccctccaccgtcgccgtcattccattcgtggggggcgcattacttctgcggttctgcgccccgtcccgaatccctgtagcgtccaccttc

SEQ ID NO: 8995 - DNA, 791 bp, Zea Mays
gcagggttgaacacgggccagagaaaggggcgatccaatcctagctgatttctgcgtctcattcctcacggactgaggcgaaaccggcctggctggggtcagcgacccgaggggcccaagcctagacatcaccgggaggggcgaactcagccctgtcatttccagcgacccagtcactttggactgaggcgaaaacggctgggtggagttcagcggcccaatagtgcatgtccagctgtcagtaggggcctcatcatggagactgtttggcttctctgcaggcaactcattaatgagtatcatcccattatccgaggccatctgctgtaactccggtgcgtcaaagagtggttgttcatgtcccctagatgaatgtgaagtccttccatgtccagacggcgggggaggcccaaggcgaaggtgaacagaccgttgctggggcaagggactgcccaaacgccgaggctcatcattcctctggtcatccatgtcgtccgaaccatcagtctgatcgccatcctccggtggagtcagcagcgagggacctctaataccatcatggcagattgcaagtaccctcacgcttatgttataggctaagcatcttcgttcagagttttgtgggcctggctccagaatatgcagaatcatgtcacggtgcaattgtttcggttgaacgaggatggggatgtttccccatttctatcacccgacagggactaaatctttcccgttttgatccccatggggactaaattgtcctcatactcgtcccctattgggcatgtccg

SEQ ID NO: 8996 - DNA, 543 bp, Zea Mays
gtagagttcaatcgggcgggtcgatgagcatcgcgacatgtaagagaactcaaaacactctcaatcccgaccacaattacctccgagagctctagccacagcgagacgttacacggtggcacggatgatcgatttgggggaaaagggaaattcacgagctatggtggatgatcgtgagtggggagtggtgcgctgatttcgtaacaagatagcaaagcaggtagggccttcgatttatagtgattggctatggtggttccaaattttggaggagagtgagactcatttccctggcggaatgattaccgagacccaccgtggagctcatgcactcaccggtcgacggtcacgactcaggggatgccacgaccacgacaccacggtgaatcagacgactacttgtctttcaccgggaacacggcgaacactggcgacgatatttaacctgaccgcaggggcaagtgggcatggcggtgatctagctcagggcctatgttcacctcacccagaatcttttcatccaccaagttatccactccagac

SEQ ID NO: 8997 - DNA, 798 bp, Zea Mays
cgtgggggtgcgagtttggagatgcgccgtgggaggaaaaccgagtacctcgacatcccactcaaggacagcatcaaaggatggcgcctagaatggtttatcatggagaatcacgggaacaccctccccctcggttagggagacagccagatgtctgcactccaagttggactgaatcccccacagacctggaggtaactgaggccagggctctgcttgctgaggttggatttttgaaggagaggggtctgactgccgaggctgtggttgccgattttgttttcaagaacattcagccactaaaagacagagcatatccagcttatctgtatcgaggccttgctgattcaacccaggttaccaacagaaggattcctgctgtggatttggtgagccggcttgagatgatactcagaggcaaggtgtctaatgtcggtgctcttgttgcatactcagcctggaatttgcctccttccaaggccttcatcaattttgtgtcaaatcctcctactggtgatagcggtttgggtcttagagtgcgaccttttcccgaagaggttgaggctttggttgcttcacttggtgaaatccccgacgacgagaggcaggttcatttcgaggtgcctttgaatccgagtgatgcagaaataaatgcaatgctggacatgttggctgaagattcatctgatgcaacctctgctaaaacactggctgtagcacccatacccgagtctggcaaagctgtggatattcaaaggtctgatagtattcgtctgaagtgtcctcgccgaactaatc

SEQ ID NO: 8998 - DNA, 535 bp, Zea Mays
atgcagcaaaggaccccgcacttatgcaatacctcgcggctatccgtagtctcgagagacagttcaagggtttcaccttgcagcatgtggatcgggccaagaatgaggaggccgacgcattagccaaggctgtcgccagaggcgaatccctgccctccgatgtgttctaccatgtcatcggcacaccagccgtctgcagccccgaagggctccaaataaccaacgacagcgagggccaccgcatagtcaaccttattatgaccgaagactggcgggcaccaataaccctgtttctacaggggtactaccatccaaccgacatcaacgaggccaagcgcctcaagcatcgaaaccgggacttcgcgctgattgaaggccagctttacaagaagggggtcagtcaaccaatgcttaaatgtttcaccgagaccgaaggcgtccaaatcctgcgcgaagtccacagcggtacttgcggctctcacgcagggccaagggccctagccgcaaaggtgatccgtcaaggtttctactggcc

SEQ ID NO: 8999 - DNA, 584 bp, Zea Mays
gtgtactgggtcggcccattctggtatcccgatttgtgggcttcaggccgagcccatcaagatggttgtagttcacacttcagagttcaatccttggcccatgtgcaatgctgaatgttggcaccaacgttccagttgatcctgacaggaaggttggcctgcagttcgcgtctctgccgatctgatgctattcgcctattcctcgggaaatcaagatacaagctccaaataaattgggtaatgattactagcaagcacacacttgacactagacgcctattcctcgggaaatcaagatacaagctccaaataaattgggtaatgattactagcaagcacacacttgacactagacgcacctcgtagtcacatgcagaaaattatgtttctccgcaactcagttttacagaactggaacctctcgtttacacctaagttgccatgtcatattgtaacgtttcgtgcattcgttctaaaatcgctactacttattaagactgtaagagtagtctgccatcattccatgttctgtcatttcgtgttctgtctttctcatttccccctccccgtaaaacccattctca

SEQ ID NO: 9000 - DNA, 522 bp, Zea Mays
agaagtttagggtttctaaccttggagccaaaaccggggtgctatagacctatcccacttaaaggaatctcgccctcgagattcaggctgggtttgagaaaaggtaaggggtattcctcactcattgagtcctcactttcccacgttacctcttcttcgccttctctgctccactggactttactaagccttacttctgaattttgggtcttttggacagttgagtcaagaatcttcactggtttctctcggtactgcagatcctcctgaatctggactgactcttctgcgatgcggctctctggcactttcaagcatatccagagctaggatacatgaaacacattgtggatatctgacattgattctggcaactggaggcgataagctgttggcctactctaccgatagcaggataggggccgacgtagcgtggggctaactttccttttgcttggaatcttctaacacctttcattagggaaactttgagatagacgaaatctccatcttgaaagctaa

SEQ ID NO: 9001 - DNA, 344 bp, Zea Mays
agggaagcagggtgatctgtccaaagaacgacaggtgatggattgtgctacacatgttgtgaaaagtttgagccgggacacattactaaatgcactaaacgagggcctgcccaactcaatgctgttatcactgagaatgtagagatggttttaacagatgagttgttgcaacagcttgagcaggaggatgatcaataggggttgtgttaccaggtttcaacacatgctttatcgggtactgttgggttgcagaatatgagaattcgagcagtagtgcagaagcaaatcatggtaatgttggttgattctggtagttccactaccttcattagtgaacatatggt

SEQ ID NO: 9002 - DNA, 862 bp, Zea Mays
gtattgtcttagtttttgcgggggatttttgcgggtatattacatggctccgcctcattaaaaacctcaccccccgggaggaaaagagtgcgggccggaatgatactgtttggtgaattacaagggcgtgttagccctgatgattcaaacaaaaaaatttgcggagattctcgatattccaggaatgctctaggtcctcgctagatggcgttgttagcctgtacgcgctgggggacaccttcgtcttgacgatgaaaggaccctcccactttggctccagcttgccccgtgactctgtccgagttgtccggacgagtacgaggcccccttcgtcgaattctcttgggatgacggcgtggtcgtgccaggccttcgtttgagcttggtatttgttgagagcctgcagggcgaagacacggtctccgtcgatgagttctttggaggttggttcgtctacatcggggacggatgaagcgcttgtccgcggtgacccatgtttgatttcctgcggggtcatgcctccgatccgtatagcaggcgaaagggagtgaacccagtcgcccagcattcggtcgtgttcagcgcctagactgcttcaggtagcaggtcggcccatttgcccttcttgtcgtcgagaagcattttcttaatggcagtgaaaatcttgccgttggcgcgctccacaacgctgttagattgtgggtgatatactgaggcgaaggctagctttgtgccgatggagaagcaaaaatccctgaaatcttggctgtcgaactgtttgccattgtcaactgtgagctcaaacgggactccgaatcggtagataatgttttgctagaaaaatttctgtgcagtcttcgac

SEQ ID NO: 9003 - DNA, 616 bp, Zea Mays
aaaagctgttgctgcagagcgtcctgtctgttctgaatagtctaaaacatggagagcattctctcggacatctgctattgggttgctgccagatgagcctgctgctgagtaagagactggagtatcgcagccaaagtagggtcaatggcaggagggccagcaggagcagcactggaactcccgacctcatgatcatgtgagcgtggaggcataggaggcggaggcagaggtgggatcccaaaatcatcatcatcatcaggaacggttgtgccctgagtctcgaacggatggaatgccgcatcctctgcctgagtgtctatcactggatctggtactggcactgggtccttaggggctagacgataggagccaaaatggaggcgtgaggcctcgagggtgccctggaactacggtggtcggaccagctgcgcgaagatgtagcagagataatgagcatatggcagctgtcggcgagcatgaagactgtccaataccgtgtccttgatcttacagataaggaaatcaaccacatcaaactctgaatgtgagatcagggcaccaagtagccagagctagatgtgagtggtggctctctataaccaatccggggcagaag

SEQ ID NO: 9004 - DNA, 418 bp, Zea Mays
ctttcatttgcgcatcgtgtagctcgtcctagatcaggggtttgtggtctagaaggttgggttggacatcgtcggccatgacacgccgccgtatggccctggtcggccatcggaattcggacggagtaggggaggctggggcgaatgtcccgcgggcattggtttgcagatcaacggctgtgattagtccgcacgtaccagttcgcctgtatcgatccgatccatccatttcagatctggcgcataggattccatcggagtatattagatcaggcccatcgatcgttgatccgacgtctcgtgctgcttaccgtttcacagagttggggatctaatctggtgcgtccgtggcagatcgggtggccgatctcactccgtaacccttcggccagggaattttgttaaagagcccccgcca

SEQ ID NO: 9005 - DNA, 538 bp, Zea Mays
gtgatacgacctcgaatcggtggatggagggaagggggtcgcggagcttcggcttttatgcaccacggtgaagtccgagcatggttaagaagcgatatcttcacgcgcggattcagcgtttgcgaacggaactagagctgggagaagaccctgccggtggggcccaccagcaagtgaccgagtaagacccggaaagattagttgcggttgcggcgaactcggggggtgagagccagctccgcgcggattttgttcaggtgcgagcgcggatgagaacgatgacaagcgggaccctcttgtcagccactggatgtgtatgcgcgtgaggagccagatgattttgggccggccaagcgtggttgaggtgggtcgaaggattgggcccagtttagtgttttcactttattctttttcctgctttcttattccaaatttctatttccaaattccaacttggttttggatttcaaactcaattaggtgcacatactaaactccagcatgaaattctataggtttttagtaatatagttatttt

SEQ ID NO: 9006 - DNA, 534 bp, Zea Mays
ggcaatcactctgaatctatgatcatcgctctctctcgacttattatgtttttcttggctccttgattgcctagaaaaccaagaagtaaatagttgtttcccctcgagtgttgagactaagtttcttgccatagcaagtatagctgtggaggtgacatggttccaatggcttcttgagaatttcagtgtgcctgctactacgctaactcctttcttctgacaacattgttgtgttctgtattgttcgatccccagtcaagcttgagctcaccaagcacattggcgttgttgcttcctacatgagatcgtagatgcatgatcaagttgtgacgctccaccatgtgccttcagaggttcagttagctgatttcttcatcaacgcacagacacgagcccatcatcgattcttactctccaaactcaatgttgtagatcccgtttgagggcaatattagatgtataggatgcttatgtatttttcctctacttcaagaacttctttgcatacgtatgttgtatatttgtccctttgag

SEQ ID NO: 9007 - DNA, 343 bp, Zea Mays
cacaaacctccctggtataagcaataggtcagcgccagatgatgaaacaaggaggggctgcaatgcaatgcggcttgcaacctaatctagggctagcgtggcgaaaattcacacaaggcggctagcgagggcaaatcgagtaatgtggtgtctcgacttataatctgggtaaggtggatgggatagcggtggaaacaaataacaacgatggagcggttgaactacgatgacgacacgacctaaaccaacaacaagactcgtcacggacacaaactcaacaaagcaatctgaaacgaaattgcaaggctaaacaagggttctaggacagcggaatatttttttt

SEQ ID NO: 9008 - DNA, 361 bp, Zea Mays
gtttatctcaccatcaccagacctgatattgctcatgatgttcatatgttgagccaatttgtatcaacacctacttcagttcatgatgatcatttgcttcgtgtgcttcgatatttacgcgggacaagatccagatgtttactctatgcttctgatagcccacttcagcttcatgcgtattctgatgccacttgggcaagtgatcctattgaccgttgttctactacaggttactgtattctccttggatcatctcccattgcctggaaatccaagaagcaagcggtcataactcgttctagtgctgaagccgaacttcgggcacttgctactaccactgctgaaattatttggttgcgct

SEQ ID NO: 9009 - DNA, 1070 bp, Zea Mays
ggccgagcgcatcattaccagaaaacccaggggttaatccataaaatttcccagactcagaacccatttatgtgggccgcgggttgactctatggtttcccaggtgctcttatgcaattttacccatacgaaccgatattgacagatctcggtcgcccgatcaaacacggacagatagaattagagcagagctgttatgaatcggtatgaaaccggggtcactggattaaattatttcccacacacatgggacggcgggttgattacccataaactaggggtcctaactgtaaagacgctcgaccgaaagggtatctgcccaactgagccatccgatcaccaacgatcggcccatattagaacccagacgatacgtaaccagtaatttgctctggtcgccagatctgatatcgacggatgaggaacatccacgccccaacatgacctaaaccgtctgtcatagaatcgacgccccaaatcaactctcgcaaagggggtacatgctgacctaatcttggccgcccgcactccaatcaatggccatgctcaactcagttcctcacagcggaactcggcggcgccgcccaccgcatacggcgaaccatcgctggagtaggatatccattacgccctaatgtgctaattccatcggggagtggtgctatacgcaggtgggtacatgcgaacaacatgaagaatatctcaccgttgagtatggcgcagaggtcccaagcgacagtgacgccgatccacgatggagaggacacgccggtgagcaattcctcggttcccctagtcggagctctcacaggggacgattcgcaagcccaggatgatgctacggtggcccgcaatgtgatgacgcccccctctctcttgttcatggcagaactgctgacaacggtggcaaacggtgatttgggtacggcgaggcgacaagacccaagggggtgtttatatccactgtgcacccgatcccgcaggtgcggaggccgttatgccagtcgggtcgcctggccgcgccatgcgcggatcgatggttgcgactccgagcggatcgacgaagggtg

SEQ ID NO: 9010 - DNA, 410 bp, Zea Mays
acgaaagtgaaactacaaaacagaagaaccggattttattttctggtataaaaagtcaatggtcttcccaagaacaactagtagcagatgcactgtcagacgatgaattgccaggttttccaaaaaggaaacatcacaaggatgctcatctccaaaaagaagcaaatgagtgttacattgatggatggactatcacctgcacacagtttcagcctcgtcgtcgcatcagttccaagaaacaaaaggggaaacatggaaaaagtcaagaaataacttcaagaaaagcttgctatcaatgtggacgtgaagatcattactttcgtaattgtcctgagaagagttcactaccgaacacctccgagattaagctatctcagtctccagacatgggatatgaaccaaaatgtaca

SEQ ID NO: 9011 - DNA, 390 bp, Zea Mays
ctttggcaagagatgaagatgggacactgtggtcgctttgtcactgtgcccacttgcgccgcgacgtggccacgcaaccatcgccgtcgtgccgtcgttcctcgcggtcatgccatgccgtcaaccatttcaccacgtcgcaatagaccgcagtagatagccagtctatcaccaaagtcattacctcagtgaaagccacgacaacttgcgctagtgaactccctccctcctcggccgataacgcatcttctcaaaatttggcgccaccgctgataaccactataaattgagcgttcggctagctccattaggatgttacgtgtccagtacaccagtcctcacctccaattagccaccgtagctcatgaatttcaacttcccccaattcgg

SEQ ID NO: 9012 - DNA, 397 bp, Zea Mays
attttggccaacccaaatcaaactgcccttcctgatgactccctgagaaagagagtagccatactcatccgagctgtggacacacaaccgagccaacagtgactgcgcatcagaatcagtcacataagaattggtaacttcttgaatccagcgaggttgaacttcactgactgctgtcaacgccatcacacagcccacccgagaaagagcatcagcgactttgttctctttgccctgcttgtagattactttaaactgcatccccataagcttttccatggccttacgttgcaactccgaatgaagctcctgactgcccaagaaactgagagccttgtgatccgtccggatttcaaactttcttcgttggagataatgacgccaacgatccacagcc

SEQ ID NO: 9013 - DNA, 625 bp, Zea Mays
gactgggcacatgaaaacagggaagtgcagggttatcggtgtaaagtttcccaagactcagaacactgtttcactggacggcgggttataacactataaacagaagggctcatatgcaaaagggcacggcgaagcggtatcatggatccagggccgttggatcttggtctaacggactagattaaattagtcccatgccgaaccggtatgcaatcgtaaccctaggaccacaaatcacggtattgtttttaactctcctacattaaatcatgcgcacacatctacggatctacggttgtagatcacccaggcaaactggtacccagacctcctaatcctgaccgtgcgggtgccaatttacggtcacgggcggcttctccttcctccggcccgacggcggtgccgtacgactaccatggcgcagaacttcaccggtgaggcgagtctatggtcctagcaccccaacccctaacccaaacggctttacacgattcgggaacgaaagcgaatgcggttgagggaaccataccgaggatgatgcgtgcaggcgggcggaccacggcgtgagcggccctgtggcggttcgcgtactccgacgagagattacaggtcacctagtggtgca

SEQ ID NO: 9014 - DNA, 703 bp, Zea Mays
gtttaaaccctcagtcatgtgtcaattacatttaatcgataattgagattacaaaggattaaacaaagatgaaacatatacatgtttttgcggtgtggcgtcaaacatcggcaagtgggaagacgtatatgagctcataatgttgcagtctggtatatgttgaggtgggatgtttatgtccctcgacaatttattaccaacattaaaatggtaatcatgttgacattattatggttttgtctaatatttggatgcaaagtggaaattaacatataatgtaacagtgatgagattgtatataatacctgctttttggagtttgagtatgtgttcgtctccatgggcgcagtaacgtccaaatcatcaaggcagccctcaaatgcacgacgcatttgttgttactttcatgtatttcctcaaactgggtgcatgtcaactccgtagttggctgtgaagttggcatagtcagatccagagtattttggataccggaacgaatgcatgcctctgtaaggaaaaggttttagtaattgaacagaaacaactgaaaatggtgaactaaaatacataaattgaaaaaaaatacaatgtgggaaggtcacctgacgatagatgatgagatatatctgtaggtttagctggctgacgcgcttccgcagcattgtctgtgtcgacagactccgcacgaaggacatcatcgatc

SEQ ID NO: 9015 - DNA, 388 bp, Zea Mays
ctcgaattgattaaagattatgatttgtctattcattatcacccggggaaggcaaatgtggtggttgatgcccttagcaggtccggggttccaaaagtggccttgcagttgattgctgatctggaccgtttggggatcaccttgtgctatgtcggcaccgctagtgaggagactcatatgcttattcaatcttccctcatggagagagtgcgtgcggctcagcagcaggatcgtttattgcaagaagttcgaaagagggttggcgatggtaaaccctgggagttctccatcgatgagaatgatttggttcgtttcaggggtcgcctttgtgtgcctcaaaaatcagaggtgaacatggatatattgagagaagctcataaaacgcctt

SEQ ID NO: 9016 - DNA, 1384 bp, Zea Mays
aagaagaaaaaaaccaaaagtcttacatttctggatataatagtacgcataaacctaacagctgctacaaccaaaaacttctccctccgttgagtcaatgtaaggattttctcgatagcattattcataagaaaattgcacctatacaagattaacaaacattcagaaacatgcatataaagatcatagaagtatcatggtacaatgaaagaagtttgtacagagtagtacttaattctgtagggatgatgaactacacaaaagcacagtagttcacaaacatttaacaaaatctcaggcttgatatgatgtccttcagcgtttccaccaacacgtacagagttagatcttggtcgagacaagctcctcgggggacaagaggatgctattacatcaaccaaatagtcaagatgcctttcgtagaaaatctcaataattacgtctctctgcagaaagtaataaagacttattgcagctaaatcaggtcagaagaatctgtgagtttcaaatatttgtaacagatttcaacatttcaacacaagatgctgaaaaatgaccatgatctaccaccacgaaagttacaaaaaaaacaatggccgcttcttttctcaaacatacagtagagctgggtatccttatattaggaagaaaaaacaacaatggcaaactatccatcagagttcagagataagcaaagtggaaggaatgacgaatgggtagcctagaagagacaagcaatccataatgttttataatttcacatcgcataattagcaacagaaccgttcaacagattgtaccctaggtggcaaatggtagagatgtgcaatactgcagtactataaacacagtacacgtcaccatactgaaattaaaaattagaaacttgaactagcatgggaaaatctataccatggttgtatagtagtggacttccaaataattttatcaattaaatatcaaagattacaagatatgtgagccaatttgtaagactcaaactcaaatgaacaactcaagaggtaatgtgacttcagagtgaaagtcaatatgtaacctaaactcagttcggtcgaaaacaacttacatgtgctccagacatagtgaaagaatccatcaatatgcgcaagatttctagaaactggcagtgcatttcctcaccgaagtcagttaccatgcctttaacctaaaaattagcattgaaattatacacaaacatgactaggaagaaataataatagtggcattgagaatttgagggcaagttgggccatctttcatttcactccaagtcaattgcaaccaagagtaaatgagctatacatgaataagtcagatcttgtcaaacaatatggcctccacaccccccatccccgccccctct

SEQ ID NO: 9017 - DNA, 815 bp, Zea Mays
gggtgtgaccttgatgatgttgatcccaatgggtgtaatccggccaaagttgatcccaatgggtgtactgtccacattattgatgaagatgaggaagaggaggaggaaattcccttgattcggaagaacagccggcgctatatagccagcggggagagtagtggtgttccttctctagctttgtctgctctcgttggtttgcaagaattgtctctagcaaattttgatcaaactctcgaagacatggtcacagaagatctgttgtcggagccggcagatggtggaatgatggaagtttgcgctgatgtgcctgatgctgggttagagttatctcgagcagcatctcgtgcctcgtcgaccttggagcgcggtcttaagagtcgagaggttgatctggattgctccgttcccatggaagttgttgaaggtccttcagccttagaggtggctgctacagagagcttggtcctcaaggatggtgctagcgtttgcccaacctctgagggtgttgccggagatgatccggctcggatgggtagcgcgagctatgacccagcccccgagggtgtccaagtgggttctccctctcatacttccatggatgttcatgtagggtcttctcctccgcattctggttgcatggtagcggcacgagcttcgggtcaggaagtcaccttagaggtcggcgctcctgatgacagagttttgatttatgctgatgacactgagttggtccccactgatgccttgcggattgcttcggttggtaatccttcatcaagtcaccaattgaattcccatgatttgggggttcc

SEQ ID NO: 9018 - DNA, 769 bp, Zea Mays
cggacgacgacgcgacgttccctaagctacgttgtggtagcgttcaattggccgagaccgggagtttcactagcaccagaggatgtagaaacatggatcagagggacatgaacggacctgagaacggctagccacgacgtgatgcctcacggcggcgttccggccgatttgggggaaatctggaattcgcgagctatggtggatgatttaaggcgaggagtggtgctctgggtgcataacaagaaggcgaagcaaggagggcactcaatttaaaggggccggctgcggttgctctgaattttggacggagatgaactcacggcggggatggggtgagtcaccggagctcgtctaccgtggctctcaatggggtaaggactcagggtagtaaatggtcatctaccatcactcactgcgacatggtaagtcggcacatggtgtggcatgaccgagataaatggcggccaccaccacaacggccggatgaccacgtcacgacccaagtgggtacagcggggcaggctcaatccaacccccctctgatcttttcatcctcgcggaaatatcccttctgacccaggcacgaatcatggtggccagcctgaatcaccgcgcccgttcaccgcggtgaggtggactgcatatgtgatcttattcagacactatgtcattgcgatcccgttcagttcgtctcacagagcaacttcaaggtcatttctcttcgattttcatacaccgaactatcaactcgactataccaaagttgttc

SEQ ID NO: 9019 - DNA, 280 bp, Zea Mays
ggcttatccattctacggtacaacagcgatcatgccttggaaaaggctgatgaattaggcaacactgactaggccacgatcgtcacgtcgtcggagcagcaaaggctgtattgtagtgtagcccggtacgaccggtccgcagcctcgacacgtccaccccacccggatggatgccttcccgttgccgaaaggaacctgacacgttcaacttgcttgccgacccatcctgccggagccacggcggctgcaactgtgccgtgaaaacctcacgacgtaccgt

SEQ ID NO: 9020 - DNA, 339 bp, Zea Mays
gtcttttgaggaagacctcgattttgcgcacttgttgtgctagtccggctgcacccttaggcgacatttgcacggagtgttgcacgcgagggtagctagcactgcccctcgcggtgactttgtattggtcgaatgtcgaagaccgtcgatgcggtctttttttgacgtagatttttgcggaggatttttcgcttgtatattacatggctccgcctcgttaaaaacctcaccccccgggaggaaaagagtgcgggctagaataaaattgttttgcgaattacaagggcgagctagccctgaggagtcaaacaaaaaatttgcggagattatcaatgttcc

SEQ ID NO: 9021 - DNA, 419 bp, Zea Mays
gcagacggtacaggttgcatgtccattgaagtagacgtacctgttgatctatgcatagacggtatgtctgatgttgtcccttccctcaccgttaatcgccgctaaaacacgcctgatgttgtccctttcgccgtcgttaaccgccgccaagaacacacggatacgatcgtggatctactgcggctgtacaggaaaggctaatacaaatctacgccaaagtctgtaaagaaaaattgatttccttgtactaatgctcctcaaaccgtaactgtccctttattttcgcgattgtacaacacgtctttccttatctcaaaccgatcgagatttacatattgcatggtttatgctatcaagttacacatttttatgcagtcgtaaacactgtacacagtgtcatattcgttccacgtgattcg

SEQ ID NO: 9022 - DNA, 303 bp, Zea Mays
gaacaagaggcgcaggttcgtccacggcgcgcctttgcctcttggggccagcatgccgaaccagtagctgcagactctcgtggccgtatcctccgaaaatctccacgcacacatgcattgtgcagtagtgcagagtagctagagaatccgaacgcacgatatactgatgatctgaggagcacgaatccagcgatcaacgtacgcgcaggagagggtccgtccgtctgctcgagtaggcgtcgagttcgatcgatccggcggcacacgcgcgcgcctaggaggagagtacaccgactaccacac

SEQ ID NO: 9023 - DNA, 405 bp, Zea Mays
gcctcaattaatgggaagcgcaggggtcacggggataaaattcctaagacccagtgcacactaccccaggacgacgggttctattttagaaagacgcaggggttcttttgtgaaatgtggaccgaaggggtatggagcgatctggtccacacaatcgaccaccgacgctccagattaaacccacgcgtcatgaacacgtataatccgctccgaccgttagatccgatctcaacgcacaaaggacaaccacgcaccaatattgatctaagccgttcacgtccgcatcaacgatccagatcgcatttacgcaaaccgatatgccacgatctaatcctgaccgtccgtcaagatctgacgcgtgcacgtgcttcttcctaacccgggactcgccacggcgggccgtca

SEQ ID NO: 9024 - DNA, 568 bp, Zea Mays
gacagaagaggtgagcacgtattagtcacatagtcataagtatatgaaatgtgaataaatacatacacagagagatatggcacagaaaacaagacatgagacgatcgagaggtcaaacgacgtgaaaacgacgtttgaacgataaacagtgccattggaggtttggaatttgaattgaggcacgaaacgacatggaattgagccgatacttcacgaataggtttgtataggtgtatatgagtgaagtgtgtgcttggtttgaatttaggcgaagaaaaagagatttgggcactcggctcggaaacgatcgctcgaaacggggaatgtggtgaaatttaagcctggaatctcggattggcgtgaaatttggcaagtatgttactggaagtgttgtgaaggtgcctgaaaaatttgggttcaattggagcatttttggctggtttgggcatttcaccgaacacatggcgtgcggtgaattaggttttgggagattgaggcaaattaggttgtgaaaccctcccaaagggagctagaaacctgcagggatactcaatggggacaattgaac

SEQ ID NO: 9025 - DNA, 1029 bp, Zea Mays
ggagtaggcagacaaatccgtaatgctgccggtgccgatgtgaagtccagtggagagggtacccttgacataccgcaggacccgcttgagcagggccagatgaggcttgtgtggatcatgcatgaatagacacacctgctgaacggcataggcgagatccagccgagtcagcgtgagatactgtagagctccagcgagactgtagtattgggtggcatcggccaccggggcgccatccgtagcgaacagcttggcttgagtgtcaacaggagtcgccgtagggtgacactcagccatgccggcgcgttggagaaggtccgcagcatactgacgctgggagagaaagaggtcgtccttgcaacgcgtgacagagatcccaaggaagtggtgaaggtccccgagatctgtcatggcgaactcggagtgaagaagctcggtgaggcgacgaagaagctgggtcgtcgaggctgtcaggatgatgtcgtcgacgtagagtagtaggtaggcgatgtcagtgccctttttgtagacaaaaagggacgtgtccgaagctgacgcagtgaagccggatcactgtacgaagctggagaagcgctggtgccaagcccgaggcgcctgcttgagtccgtacaaggacttttgcaggaggcacacatgatcgagggcggccgagtcgacgaagccgggcggctgctcacagtagacggtctcgttcaggtggccatggagaaaggcgttcttcacgtccagccgatggatcggctaggagcgagaagcagcgatgctgaggatgactcggatggtaggtggattgacaaccgggctaaatgtctcgtcgtagttgatgccgtgccgctgggagaacccacgaacgacccacctggctttatggcgagctagggagccgtcagcacgatacttgtgcttgaagacccactttccggagatgacattggcatgaggcgggcgaggaacgagacgccaggtgccattgtcaacaagggccttgtactcgtcagtcatcgccgc

SEQ ID NO: 9026 - DNA, 550 bp, Zea Mays
ctgggttgtttggttcccccattccttccatatgtgaagcaatcccctgatttccctatttgtcacagcggatctgtctgggggcgccccatctttttttctactcctccctgcgcattctgtctgccacaaaaggggagggtgaaccgtaccatgcttccctcaatggtcgagttcatggcgctcggtgagctccaaatgggtgatcttgaatgaggccctagtgccttttgcaaactccaggcgtgggtccattgggggttgtcctcatactcctaggtgtcaactcatatagttgacaaccccactcatccgggtccaacggcttgatgcctctctttgcgataaataatgattcatacatttcttgagactcgaacacaatctagaagtgcccttagcgctcgtgtgctgggtcctagccgctaggtgcccaccacctgaccacccctcgctctgtggtttcaggagcgactatgaacccttcgcgagctgaccttcgaactccgaatttgtggctctggtccgaccttgtcatggttgttagtcg

SEQ ID NO: 9027 - DNA, 874 bp, Zea Mays
caaaggatgtgctcggcggatctgattctcggctggctgatgaagctataggcgttagccactgcgaacctgaagccatggtggttaacaccggaggagacaccgatgtgaaagatgcctgcaacaatgtctcggaagagatcaagattgcccctcatgacctaaccaacaaaccggtgagtttgattgtggagcatctccgcgcccttctttttctactagctgttcatggtagcaggatatggttttcgcgtggttttctactagctgtgtaggtacactatgttgctgctactcagctagtttcgttatcacgtataagctcgtgaactgtataggaggattaaaacattgggggattaccaaaagtctaaaaccttgtattttcgtccctgctataatgagattaggaaaagcatccatgattccatgatcatgttttcagattagtccagttttcttcatgaaactaagtttttttggtgtttcagttgcttgccggatgcacaaggtcgaggtttgttcatcatccgagctcgttcagctacaagaggatgctgccatttctcatggagaatggtaagatacctgctcggggtttaattgatagtgattaggtggtcccttgtttagattttgtttgcctcactgtttgctgttgtcttgttgtttcagacatttctgctcaggaatgtaacagggtcaaaattcgaaaaattgcagaggaaaggcagctagcatcaaatgagaatgatgtctcagccagtgggcagcattgtcttgctgcatctgatgactcttctcaggaatgcaatagaggtcaagttgaaacaatggaagaagaaaagccagcaaaagcagatgagaataatgt

SEQ ID NO: 9028 - DNA, 549 bp, Zea Mays
cagtcttcaccgcgggcgcgcctaccatcgtggccgaggttcgtctgcgcagcgggatcccggtgagctaccctatgttgttcgcccttctttaagcatcgcgtagaacgtttccgatttgaaattggtgctctgggtgcggacttggccggattccggtggcgaatcaccgtggttccgggcggcgccgccgtcgctcgtagggtgattgggggaaatcacgtgggccgttgatcttctgccgaacggctaggattagtccccgtttaccctctcacgttgagttgatttggtccgttcatttggatcggacaggtggaaacaaatctagagtaataaaatcctacccgtcgtttttacatccaacggttccctgcgcataccgcttcgcgaccgcacggatcaaatcctcaccatccgcgtgtgatcggatggtccaaaccccaccgtaccccttcgcgggtcaacattgctaaagagcccctctgctttcaggatatcaacccgccatccagagagtactattctctgtgtctcggtaatcttgcg

SEQ ID NO: 9029 - DNA, 356 bp, Zea Mays
ggaaattaagaatagttttatggaagacataaaaatcgtattcatcatcgaaaaaccatcactggaatgcataactagtgtaagtagcaggcataaaacataatcatcgatggcataaacatggatcgttagttcgtcgcggcaggacgatcccgaggccgccaaatcaaaggactcctcagaggccatcgagtcaaaggtggtcgtcgaaggaggacacccttcgatgtgccgcatcggaggagatcattgtcttcatatgccactacagacagtcaccgcagccatcaccgctcgtgcctcggaaggtcattgccactgccacagatcacgcctcgcgaggtcgcggtcgccgc

SEQ ID NO: 9030 - DNA, 719 bp, Zea Mays
atcgtgggcaccccaaatcccaacacctccgtcggtaaatccaccatccccaagtttggcctgacctccacattgcgtagcacgtttctgggggaagaaatagtcacctttgggaccatggcgcgttagccggtgggtcccccgacgtgtgagcaggcagcgccgcccctgaccgtcccgtcttgggggggttggttcgggtgccgtcgatgtggtgatgggtggcgtggattaacggctggcataccggttggcaagagttgatcgggatcgtcgatctcggtctgaacgactgtgatcagacctcagtcctggtggctcgatctaggatctgtgccgtcgatctggcggttgacggttgtgatcagatcaagcacgtaccggttcaggatttttgaatctggtacatagtttcacagacgagcgcgctagatgagatcgtggcgtggcgagttctcagctattgacctcggttccagaggctaggaagacctaccagctcggtataagtaaaatgtaatcgtggcccttggcttttgatcggacggttgtggtcgtcccgtaccccttcacctagacgttttagcatatgagcccctcggtaatttcaaaatgaacccgtcatccacagacattataaaatcattacaacagagtcctttttctgcgtaaagaaccttgggttccgaagaatttatggccgcaatccactaattcgg

SEQ ID NO: 9031 - DNA, 528 bp, Zea Mays
ccttccttctgtcctcctccgaaacaaaaatctttgggcagaagcttagagatggagtcaacatcagttgatcacttctatcattagaaaactgcaacaggtatgtttcaagtatcgattttactcaaatcgacctacaactaaaaggtatgctttgctcctctcctcttgccgatatgttgatgaaatggtcttttgctctttgatgtgcttcattttggctctgcgtgctctaaattactttatttgtattttgcagagggcacatactattgttgctctgcttgaatgactgaaaatcttgcttcaggtaaacttcctgttctgacgagtttgtagtaatcaccaactttatgataaatgagcatggtctttgagcagaattaaaatgtctgaatcttagttgaccatgatccttgaataaagtagggttgtgtaagatgttgcagtttgttacgtatggctagggtatagaagaaaacaaaaacacgatgcaaatatcaaccaaaaatatgcttcatctatgtt

SEQ ID NO: 9032 - DNA, 1018 bp, Zea Mays
gaaaaacttgaaagctaatttctggttagatcttgcagcaattgaggcttgcacataaggttgcagcttgagatatacttgatcccccaccttaaagaccagttcagagcacaacttatccgcttggcgcttcatccaggattgagcatagagaaggtgttgctgaatcaatttggaaataagctctcgatcctgcaaccactgtttcagattcgttatctcgacggtagtcactgaatccacaccaaaatgtcggggagcatggccgtaaagcacctcagaaggagaacgtcccaggaccgagtggtagttggtattataccaaaactcggcgacagcaagccaagatgaccatttgcctaggcataaatgaacaaaacatctgaggtagggttcaatgcactggttaaccctttctgtcttgtcgtccgattgaggatgataggccgagctcatacacagctgtgtgccggataagtgaaagagctgttgccagaaagcactggtgaagatccgatccctgtctgaaacgatgctggagggcataccgtgcagtttgtagacattgtcaaggaaaagctttgccacttttgcttctgtgaagggatgagccagaggcaagaagtgactatatttcgagaatctatcaacaaccactaagatacaatccactgatcttgacttcggaagtccctcagtaaaatccatggatactgagtgccaagcctgaggtgggactggtagaggattcagtaaactgggatatcgagcacggtccgacttggcctgttggcatgtgttacaggactgcacataacgatggatgtcacgtttcataccttttcacatgaacaattgtttcacccttccgtaggttaccggcacccccgaatgaccaccgagtgatgaattatgaaacgctacaataaccttggtttgcaacacaacattgctaactaaccacagacgatccttgtggcgaatgaggccattcttcagagtgaacggagagtctgat

SEQ ID NO: 9033 - DNA, 533 bp, Zea Mays
aaagaaaaaaactggcaagaggcactgatatgagaaaaaaaggaaaaggaacatttcaaagtcatcgctgtgttgccatcatgatgcttaaaagttagagtagggatccaatccaaatagacgattgtagaatctaaaggcattgtgtgcgcgttgatttggattctagcatagtgattgaattccttgcgtgatctaagcttccatggtctctttgtccactgcctggtgtctttgttgcggtggcaagcactgagagagctcatcgatggagtggagctgctgggcattcaatggcggctagtgcagactagacgagacaggagtaataatgtatccggaaatgactcggcacgggattctttcgcatcagcgggcggtttgtccacttggttccgtccccatcgctcctaataatactctacattgggttgtatctatgatctcgggatgctggcgtttggttggatgattcaatcaacatttagtatatttttttaatagccactccattctatgattttttttttgaa

SEQ ID NO: 9034 - DNA, 488 bp, Zea Mays
tctaccggcaaggcgtcaactgccactggattgcccgattcatttagctctattcaagtgacccaagtaaccccaacctctctgcccctctcagccctccatgaatggctgctaaccacacacaatcctgtcctctacaagccattgtaccttccacagctccctgctcctagccgcaaatccacctgacctaggcctcccaatcacacagtcctgaactgtccgaacttagactccaatcatcaacgtagtcaatgagcgctttcactggcctcctgttcatgatgccccctagatatatcttccacaaatcctgaccttccaacctctaaagtggtctgactttcaacaattcaatgggagcatcctccattatcttcagtttcacctttgagccaccgctgttcgaattcttttccctgtccgcaccaggtgcggcactgcactgcgagctcaccagccaccacctttgggtttactgtcttgtg

SEQ ID NO: 9035 - DNA, 443 bp, Zea Mays
ccttagaaatccattctaacaatggcaccaaatttgtcgatgatgccacctctagattcttagcttctcgtggcattctcctacgcttttcttgaccataaactctcgtcaaaattgtaaggacaaatgcatgatccacatgctcactaactccgtcgaatccctcatccatgtacacatgcccttttcttgtgtgccgagactttagctactacaaacaaccttattaacaaaagttcatcatttcaaaattccatctttttgagtttctccatttcaaaatgctaattacaatcatcttcagatgtttattctaccctaatcttagttcttgctttgacactatccgttgacacataatcatatcccatcaaattgcctttgatgaatcatgtttcccctttgctaccatgtggcatcctcttttgactttatgtcatgta

SEQ ID NO: 9036 - DNA, 332 bp, Zea Mays
taaaaaatctagcatctaaatgattacttctaaactcttttattaaaaggagacacaaattgaatctctttctattaagagcctcctccgcaactcatgcatccctggtttaacgacacgtagtaggcttctttgttgctgtgcgtagcatagcagacccttttgttgctatgcatggcccacatatggcacccttcccacgcaacacacacctcctagatcctgttctccccaaacctcacctctgctgaccccattgccgcctcgggccgccacaatggcgccacaaccgcctctccataccacctccatggcctccatcttatcctcca

SEQ ID NO: 9037 - DNA, 435 bp, Zea Mays
ctagtgcattcactgttttgttgggattgtgtaggtgccctcgggttcgctctaggggcattgtgcgttcatccgggggtagccgccggagttcatccaccgcgggcggaatggccaccatcgcgtccggccgtcatgggggtcgaagggttttgaccgttgatccggtaacgaactgtctggattagatctcacttgccgtttgggcagattgtgcctcagccgtcgatcggaagatgggtggccacgaggtgatcccgatgttttaaatctgagccgtgtattacggatcatgtggatggagatgcatacctcttcgttatcctgtcgctctaatctggtgcgtccgaaatcgatcagacagccgatctcatcccgtaccccttcggccaatgcatattagctaaagagccctcgtattatagtcaattcaac

SEQ ID NO: 9038 - DNA, 1097 bp, Zea Mays
gtgaaggaaggcattattgacgtccagctggtagaccacccagtcccgagagaggatggtctgaactatgacgaacttgaggacggggccgaaggtctcgtcgtagtcccctccgacccaacgagccttgtagcaatgcagagtaccattggccttgagcttgtgacgagtgctccacttgccagtgaccacgttggtgtcagggggacacaacaccaagtcccaggtgtggttggtcagcagggcctcatactcctcgatagcacggcgccggtggggatcagcgagcacgatacgaacgcaggggacaggcgagagagtcatagtagtggcggtcgtgagcccccgtcgatccactggtcagaggacaccggctgagcggtctgtgaccattgggtggacgtggtagggtcgcggtggatggcgacaggatggtgcaccgacgactcgttacgagagcgggccagggcatggagcagctcgtcggaggagggacctgtgaaccggcctgcacatgccgctggtagacgcgggcgggatcggcaaagcgagtcaaagggggtcggagaggtggggacacacgcatggcacggtcgaaggcgtcgggaccgcgtagggtgtggaagaagtcgtcggaaccggtggtaaggagagaggagagatggcaacaaaattggcgtcgaggagagtcgaggtctagaggtgaggagccaacaaggggaaaagtgtcctcatcgaaaacatgtctagagatgatgatgtggttggtgagaagatcgaggcactgataccccttgtgatcagaggattatacaaggaaaaggcagcgagtggatcggggcacaagtttgtggagagcagtggcagaggtattacaataggaagcacaacaaaaaacacggagatgcgtatagaaagaggctatgtcgaagagggcgaagaatgaagtgggatgactggccgccttggcggggaggcagttcaggaggtaggtgcaatgtggaggccctcagcccagtaacaagcaggaaagaaggcatgaaacaggagggtgcaaatgaggttggtgatggtgtgaatcgtgcgatcggccttgc

SEQ ID NO: 9039 - DNA, 515 bp, Zea Mays
gggacatgacctcgtagcctaatgcagaattgacaattttgtcgatgcaaaggaggggaactcatctttagtgcaggctttgtttagattggtgaagtcgatacacatgtgccattcaccattcttatttttgaccataacaacattttcaagcctagtggggtagtcgattggttcaataaattttgtgtccaagagccgctaaacttcaaccttggttgcctccgtcttctcatctgacatcttgcggagtctctatttcttggggtgagcagaggcgttgatatgcagtctatgttcaatgatacttgggttgaccccaaccaggtcagatgatgaacgagcgaagacatctttattcttgcgcaggcagtctagcaagctggcatcgtcctacagagctaggccttcgccaataaatattgcatgattggggagagaagtattgagtggtactttcttggccccctcgtcacttcggatggggttttggtgcctattagtcttggctggcg

SEQ ID NO: 9040 - DNA, 798 bp, Zea Mays
atcaatgtctaatgcctttcctcccccagcatttggtaaccctaaaataaggtgcaccgtctcctttgtaatttttagctccttccctgggccgactcgaattgtcatatcattatggtcaagcttttccatcagccaagctaaatgagatctactaccaagcgcatcaactctcatatcaagtatactggagaaccccctccgtgcaatagcttgacgttgcctgtcatttaaaatctgaatgcttactataacatcttggggattgcatctcacattaagcctctgctgaaataatgtaaacaatgaataacgtaaacatttacatctgcataatcgcaactcaatgtttaaatcaaatctcaatacaacataatttcacgcaaaaaatgatatattggcattgaccatcaattctaacctgtcaggggatccactgctttcctctgctttgtaactatcttcttcaagacttttggaggactgtcatcaaagttacgcttctttgataatggtataaagtcatcgtcctcgtcaccggcctgcatttgtttgtgtctgacagcattcgccggaacacggggtatgtcgacactaaagcactcttgagtagactaaattataattcgctttggattagatggaggtcggtctacgttcttcatgtatgattttcctgccaaatcaaacaacacatatacatataaaacatataaaaacaatcttatggagcaataaaaattctgctcatatgcaacagccaattaatgtataagctggctctttcgtgcgtactgg

SEQ ID NO: 9041 - DNA, 3823 bp, Zea Mays
caggcagccactgactccatttgcttgggcaggcatgaacgaagcaccgaaggtatgtctcaatgcattgattgacccgttccgtctggctatccgattgtgggtgatacgatgaactcatgcagagttgtgtgctagacagtgcaaacaattgttgccagaaggcgctggtgaaaacacgatcacgatctgagacaatattgtctggcataccatgtagccgatacacttgatccaagaagagcttggcgactttaggtgctgtaaaggggtgagacaaagccagaaagtgtccatacttggaaaaacgatccaccaccaccaggatacagtccgctgcaccagacttcggaagtccctcaatgaagtccatagagatggagtgccaggcatggggaggcactggtagaggtgccagcagtcctggataacgggagcggtctggtttggcctgttgacaagtgctgcatgactaaacatacccacacactgcctgtttcattcccttccaatagaacaattgcttaatgcggctgtaggttactggaaaaccagagtggccgccaataggggaatcatgaagggccgaaatgatttggcgttgaatatctgccgaactccccagccatactcgtcctttatgtcgaatgacaccctgagatagtgtgtacggggcaacagcatccgcggagacagccagttttgtcaaaaggtcctgtgcttgtggatcatccctgtagcttgcaacaatttcttgaatccacagtggagtaccctgagatatgtgcatggcttgcccttctgtcgggacccgagaaagagcatcagcagccatattgtcacaaccctttttataaataatgcggtattgcaaaccagccaacttgacatacaatttctgttgccagacagtatggagccgctgttcatttagttgcaccaggctttgatgatctgtgtaaatatgaaattcagccaattgtaaataggaacgccactgcgtcacatcgatcagaatggccaaatactctttctcatatgtagaaaggccttgattcctgggtcccagagacttgcttaggaatgccagagggtgtccacgctgcatgaggactgcgcctatgccagtgttgcaggcatcagtaaaaatacagaaaggcactgaaaagtctggcaatgcgaggactggtgctgagcttaaggcctgcttaagtaactcaaatgcctgttggtgttccacagtccaaataaacaacacatttttctttaacaaatccgtaagagggcgagatatcatgccaaaatgtctgacgaacttacgataaaaaccagcgagacccagaaaactgcgtaactccttgctattggctggtgtcggccattgttgcacaacagttatcttgtcgggatctgttgatacaccctgtgcactgattatatggccgaggtaagcaatactggtttgagcaaattcacatttggacagcttcactttccagtgatccttccgaagcaagtgcaataccgatgacaaatgagttaagtgagaatcaaaactgggactgtatattagaatgtcatcaaagaaaaccagggcacatttgcgtaagactggagccagggtagtattcatggcctccagaaaagtattgggtgcgccagtgagtccgaaagccatcacgcgaaactcaaattggcccaaatgagtttgaaaagctgtctttggttcttctcctggccgcaaacggacttgatgataaccagccttcaagtcaagcttgctgaaccacttagcttgagtgagttcatcgatcagttgatcaaatactgggactggatattttcctttcactgtgatagcattgaggtaacgatagtcaacacaaaatctccatgtcctatcctttttcttcaccaataaaactggggacgaaaatggactctggcttttttgaatgaccccttggtccagcatttgttgcacctgcgtctcaatctcatccttgagcgcaggaggataacggtatggacgcaccgcgaaagggttagcgcctggcaacagtggaatggcatgatcacactgtcgtgtaggcggcaaaccaatggggtcctcaaaaacttctgtgaactgtgacagcacggcttgcactctgttgtcggctgtgacttgctgtggatcgttggttgttgctggagagtccgaaaacagccgcagctcaatcactgctcccactggtaacgttgacagcataccttgctgagagacataggttccctgataagggatagtaatccacttgtgataccaatcaatatgcatgggactataatgttgaagccaatccatgcccaccactaaatccaccgaagggagaggtaaaaagatgaagtcggacacgaactggtaggtagccatagaccaagttgcttgtggaagatgttgagaacaagtgacgatctgtccattagccactctgaccgccattgggcgttgcaatggttgcgtgcccgtcaacaacgacagaaatcggtcgctgataaatgaatgagtcgatcccgaatcaataagtatcatcaagggatgctgttgaatattgccctgaaaacgcaatgtggagactgcatctttccctgtccatgctgcatcagacagggtcatcaataattgaggttgagtgtcttgcactgtctcactgtcatctggttcatccagcaaatcccacacctcttcaataacttgtagttgcacagtatttggacatttgtgtcccctgaaccacttttctgcacagcgatcacagagaccacgagcacgccggtaacttttcaatgaagccagacgatcagtagatttacccagccgacgagcgtcattcaccggcttgtcaactcctggagtcacgccatcaagtcgatcgtgatcagccggcgcggtgggaggaggccaagccatccggttggaaataggctcgacccgtcggcgtcttgtggattccaacgcctcttcctgcacaagagccagagcgcagacaacatcgaggtttgggggacgttgaaccataattacagctttaatgtcatgcctaaggccatcaatgaaacacatagtgtaatacaatggatctgtgcgtgactcataagctgccaactcgtcaacgagagatgcaaattgttcaacatactcagacacaggacctagctgcctgatatgaaacagctgtctaatgagagattcatgttgctccctaccaaatctctcatgaatgagctcacaaaattcttcccaagacataaaacataatcgacgctctactgactgcaaccagcgataagcctttccctcaaagtgcattgacgccactttgacccacatgtggtattctgtttcgtacatctcaaaataattctcagcttgaacgcgccacagttgttggtgtgaaccgtcaaagcgaggaaaagtaatttgtggtaaacgaccgggtgtcgatcgtgctatgtcgcgtcccgattcatatgaataatactgctcaggcatgaatccagagaggcaattaggatggggagggtgcgtacccttgaccgggccgtgagatggggtaaattcatacccgcactcacgctcccggtggtagtgttctggccgatggccatacggccctgcagcaggtggtggcgtggctgcggcgcggtgcggtaccatcgccgcacgcaggggcgcctccgtgccggagccgaagatgcccggtttgtcgatggagtcagctcgacgctcccgctcgaggaacttgttgacgcgcagaacctcgagggcgatgtcctcgac

SEQ ID NO: 9042 - DNA, 781 bp, Zea Mays
tggaactccacgggcggagattgactgtggtgcgctgaatttgtcgccgggatcgcgcctccgccgcggaccgctgtccgctgtgggcactcgtcggtgggtcgtctcctgctctggtaagttctttattagattcgtggagtccgtaatgtcgcgtagccgactcaatttaggatggtgcggtgcctaggccgcgattcgaatttctcagccatggcgctccgccgagctcggggtgcagtggccgccgtggtttggttccgtggtgggtgatggacatctagccgtccatcctttccgttgtaatcgtgacactacttagtatgttgggattaggggatttgaggtccgagcgtggaattcggtggaactccggtgggtctctggcggagggagcactgcgaccgctggtgtggtcagtgatagggataggagggagcactgcgccgtccgatccggatcatgcggatgcgattagatcgcgcgcaacgcttcagccgggagtcacatgggccgttgatatattgtggacgcctcagattagtagtaacgcgttcctcttcggggggattaatcggatcccttgatccgagggcgtttggtccggattgaatcgtggcgtggtcgtgtgtgggccgctgatccatgatcctagggccgcagttgatcgctgtttcttaaaagcgctggtgtaatccacaccgatggatgatgatcccatggccaggattctaagataccccttcgcggtgcgcttctttcaaaagagaccccgagaaag

SEQ ID NO: 9043 - DNA, 1515 bp, Zea Mays
ctgaaacctctacgaatatccttcgggagagctctagtggtctgcctccaccaagaaataaagcgactagaggaattaggctgctgcacggcagctaaattgagatttccgaaaacccaagcccatatctctctggatagaacataagatgtgagaatatggttgattgtttcctctgattggtcacaaaaaggacatgcttgttgatgtggcaggccacacttagcaaggcggtctgcacatggtttttgccagtctgcactgttcgtagcgaaaccactctcgcccatccccaagacatatcatgccgctcttactgatccacgcactgatggaagaggagtacgctacacccacactgctgtccaacaacacaatgagaccttgtacctctcccactaggtgccaaccttgtcaccggcaagtggatcttcctctacaagtttcacgttgatggctctctggatcgttgcaaggcccagtgggttctttgtggcttcaaacatcgtcttgtagtggattacgacgagaccttcagtccagcgaagtgggtggacgaggggttgaggacgacagagacaagcgaccagatgttctaggcaccggcctactgagcgtggaggtggctgatgaccgtggcctcgtactccgcaggaggaggtggcactggggccgccagaggaggcttgaggacggaggagccgaaaaggtgacacttcgtcttggccagctgagtggcaagagcatcagccacgttacgctcgtgctcccaagcaagggccgccacacgcttgtagtcctgggcagcggccatgtcggccttgacagtggcaagtgaggtggagacattgaaggccggtggtgtaggggcaggcgcgacgagcgcaaggagagacaaggtcggtgtgatgggaacaggcgtggatgatgcgtggagataagcaccggtgacgacggagacgggcacatgcgcgtcggtgcaaggggatgcagactggatacgactgtgacggtgagggcccaagcgtgttcggcccacgtggccatcgaccaagcgagcggaagatgcatgggtgaagttgacgttggcggcggtagcgaggcacgcgccgacgcaggggtggcgacgggtgggctctggaaccatggtggcgcatgaagggagcaggaagatggcacgctcgccagagcagtggacagggtggcaccgactgtggcaggggaggctagccctaggtggcggcagtccgcttgctggagtagaggatagggcggcggcgtcggtcggtttgaagagggcggcattgggtggcggcgccgaccgtgggggagaggtcgccagtggctgtggggaaggggggaggaacaccagtcgccgtagaaggagatcccatggggaagaaggggggcgcaaggttgtcggcatgcgtggggaagagcgcagccttggtcgcgtagagtggagaggcggcgccgtgggggagtcgccacggttgggaacgtcgcgcatggaga

SEQ ID NO: 9044 - DNA, 361 bp, Zea Mays
cttcgcggcggcgagaggttgtgggcatgtggagtaggggaaacgagcaggggagtgatgcgaatgagggagtgggggtgtgcatggagtctgggggtctccgatttgaagctcggacaacacgtgagcgtggacgacagttgctagcgtggggcacgcagtgagcgtagatcggggtgacggttggggaagtgggggctgacgggtgggcctgggtgtcatcgacgaaaacagagcgggctctcgtgcatcggtgctgataggcgaggcccgattaggagtgagggaggctagcgaggcacatgcgcgggtggggtgagatgggtcgagtgggctgggtccaaaggccaggtgagggggg

SEQ ID NO: 9045 - DNA, 564 bp, Zea Mays
ctgctgcagctagatccaacgccgcaaaatagtctaattcatcctcagaggattcatccacccacgagaaaggcctccctaattctccaccctccgaagaccacgacccaaaaatctgcctcgatacattaccaagagacatcacattcgcatccaccaaaacatcattaattttaacatcattagggtttgcttgcgtaggcccggacgtcggaacctgcgcagcaaccgatcttcaatatcatacaaaaatcaaaactaccaacctatcccctataacatcccctcaacctgcgtcgaagcagccgccgccgcgagaccctcagtagcaccccctggaaccgtcgtctgcccttcggttcccgcctccgccgaagcacccgtctaggtcatcgagctttcaagaccggcaaggtcatccacatcttcctcgttcatcacctgcgaagactatacaacatgtccaaaaacgaacacacaaaacacctctcgccaaaccaacaacatacatgtgccagcgctcggtccgcctttcccagacgattccatgaccgtggggacccc

SEQ ID NO: 9046 - DNA, 431 bp, Zea Mays
aaagacaatactaggggagaggggaggagcaaagaaaagaaaagaagcactagcaaaacagcccattagaaacccagcacgccacacaaacaaaacactaaaactaactagaagctctttgcgggttgaaatcttctttgacgaaattggccacttctcgctcgctcttctcaagaccatgaaagattcttcgatttctttctttccaaatctcccaccaaaagtaaatacagagaccatcgaattccttgcgagcagttttctctacttttagtctgcacttcctccaccattcatagaccgacgagcactggtccaacttttggcagagaggagaggttgtaccacgagctgagccaactccaacacgattttgtgaatatacaatcttttgctagatggcccaccgtcttcggttctcgcttacaaag

SEQ ID NO: 9047 - DNA, 525 bp, Zea Mays
gcctggcaaggagagggtcgacgacggtgatatggtcgcgggagaacgggacctcaggtatcagtcccccgagcaggtcctcaatgacatcctcactggagactccgactccggtgatgataaagaccgccaccagaagctgtacgtgatgtacgacggaagctgggaactcacctcccgcaggaacgtgaagtccctgcgccgcgaggtcctgtcggcgaccctaggggtcctgagggcagccccacatcagcggtggcggatcaccactatctcctttggagcatccgactgccccgagaacatggtaggggccagcatactgtcgctcatcaccgcccctgtcattgccaacatcaagctgcatcatgttctgatcgacggtggggctgggctcaacatcatcagctacgctgcgttcaggcagctgcagatcccagggtcccgactgggaccctctcgtccattctccggagtgggcactcaaccggtgtatccccttgggagcatcacgctcccggttac

SEQ ID NO: 9048 - DNA, 546 bp, Zea Mays
ctttactaagtcgttgtaacttgaggaataggcgcacaacaacacaaatagattgcacaggagcacaccaattttggtggacatcctcgacgaaccctggcaccttggtctagaaactctcaaagtggaagcagtgctttcctttagtttggattttaaggccaaggagcaaaggacagtggttcgagacagcagaagcagtgctttgcagcaccgaattagggaagatgttttccagtcctgacaacaaaacctctatcccaacggacaaacgtgggggatctacattcatttcaccaagtgtactttcggcccaaaagtggaacttccttgatttccatgtcatctaagaatcgatgaaatctgcccatcatagctctgtccacattgcaattattcttgtctggcgcctaatatatcatgttaaatctctggcgatcaaccacgacccatacacaatcctctaatgtcccttaattcctacaagagcatcactttctcctcatggaccataaactcctgtaaatcacaaattccgacctttag

SEQ ID NO: 9049 - DNA, 417 bp, Zea Mays
ctcgtgcatctacatcccgtgttgccctttttagcaccactccctcctatgaccatcttcatgtttttgggtgtgcgtgctaccccgacctttctagctctgctccccataagcttggtactctctctgcccaccgcgtcttccacgggtactctcctgatcacaaacggtacctttgtcttgacctcacccctcatcgtctcttgatctcccatcacgtcatctttgctgagatagatttccccttctcgactatcagcccaccatcacctcacttcccgatttggattttattcataattctgacttcgtggtgccctatggttagctatcctttgtttttctccgtgcaagttctctcacattgctttggtctgtggcaccagtgcccctagactccctctaggctgccatgcc

SEQ ID NO: 9050 - DNA, 375 bp, Zea Mays
agactggcatgtcgacgtgcgtagggggggggtacatggacagtgttgtcctgtcctctccacctgtcacttaagcgggaacagtaggagccatgatgagagctgaccatgagcggcacaaagagtcaatggtctcgcctcagtaatgagcaggttactagcgcaacccatgccttgtggggcgcacgccgcctatcaatggtgcagacatgtgcacatcttgcctgcatttaatgtgggtggccccatgttagaggcttgtgttagcctacacctagaggcttttgtcatgcaccataggccacatggcacaccgtatctcagcctgagcgaggagcggtggtttggagcgcatgcaaatgtggcagctttgga

SEQ ID NO: 9051 - DNA, 991 bp, Zea Mays
ctcaattgctttgatcttctctgggtttgcttcaatgccccggtgcgaaaccaggaaccccagcaactttcctgcggagacaccaaagacgcacttgtccgggttcagcttcgtgcgtgttgcccatagcttgtcgaagaccagggtcaagtcttccactagggtcgaccctctcttagtcttaaccacgatgtcatcgatgtatacctctactttgtccctgatcaggtccccgaaagtcttactcatcgcccgcacaaatgttggcaaggcgttttttagaccgtaaggcattatgacatagcagtaaagcccatccactgttacaaaagcggtatgcttcctatcttccctagacatctggatttgatggaaattagagtaagcatctaagaagaacaagaggtcgcactcggaggtagagtccacgatttgatctatacgtggaagtggatatgggtccttgggacaagccttgttaaggttggtgtagtcgatgcacatccgaagcttcccattcgccttgaggacgatgactgggttggccagccacactgggtgatgaacctcttcgatgaagctggcgtctagcagcttctggacctcctttcggatgaagtcatgccgcttaacggactgtcttcgaggcttctgactcaccggtctggcgtcagggtggatcttcagatggtgctcgatcacctccctggggatcccaggcatctgcgacgactcccatgcgaacacgtcgacatttgcctggagaaaggcgacgagcgcgagttcctatttttcttccagatcacccacaatgcgagtggtctagggggaatctacgtagagtcggatggccttgacgaggacgtcgtccgcgcccggatggccgcaccttcggcaccttggtaggtgccttggtatcggaggtcgataggttcttccctccatcgtccgggcgagcagtttccgccgccagggcgtgcagcttctccac

SEQ ID NO: 9052 - DNA, 406 bp, Zea Mays
ggaagctctctagggggaatctgaaattcagatttctgaatttcagccttcacctagaacttgagcgttcaccttaatccctagctcaaatccttaagtccccattgacaaatttgttcttaactaacccctttgcaacgtgtgtgaagatggcatcgagatgcgtgccctagacacatcaaacctgggattgtctcttggagttcagcagtgagacaaacccaacttcatccctccatatctctttgatccagtcagcgaaacccataagcctccacacacaaacgacaaaggaatgtcagggaaagagatctctcaacggggtcatggctataatcgcaaagatttggagccaatccgcgcttgaacatgacctctctctgcgctgcctcgtgctcaacgtcgt

SEQ ID NO: 9053 - DNA, 332 bp, Zea Mays
tccttcttcaagcagcagacagggcgcggagaggagggactagggagggttctagaaccttctagaagtgaacactccttgccgggggcagctcctgttgctctgcgccttctgcagcgtctttgttccgccactcctgttcctgagctcctccactccactcaagtggttcgaatcgagttcggcgcgatctgaatttctccatccaaattttgaaatctcctgttcctctgacgcggatctcctccccatgctccttcagctctcagaaggcggccgcggcggcagacgatagagagcaccattcgccgcctcaccatcctcctgctcgc

SEQ ID NO: 9054 - DNA, 1449 bp, Zea Mays
gtaccttcagcttccatgttccaagtgccaaccaacaatttccatgtcgctgaactccatcgaccttgaaaactttgagtacttcttcatattcaacgtttatgcacataaacaacagactgccagcgaggacatgttagacatgtgtcgattatgcgtgcagttgggttaccttaccacttgagttgtattaggggttaggatagagctggagttgaattttatattccagggggccataaatgtgaggcaacctctgttgtaaccatgagatgaattggcagctagtttggatggcggcgagaccgttggatcgcttggatgccggtataactgcttttttatggggagctggtgaggcatgctagtagccatgccaaggggatgtaggcatatcgcaaacctagtgaggtgtgcctgttgtcatgccccagggatgtaggcatatcacaaacctcaataaaaaacattatgcctcggtgtcgttctcattcacatatttttctttggtggttatgcttcggtgctctttggtggttaatagatcctttcgggtttcgatctaaccgtgctctcaaacaggacatgttatgcatggttgctgtggagtaaaacagaagcatggggtgaaaggatattgattgactctgcatgtgatattttttttttcaaatcagtgactgcaagacatgaataatacgactgcaacacacacaactagcatgagtgggttacctctgattgtgcattacttattgcccaacatacattttctagatctaagggacctagtccctgttcatatatgctttgcacaacacaaaggttatatagactttacattcccaaattaaaagatcatggccatctactcacgaaaccacatgaaacaccaccacaccaggtgaattgcttgactaacttgcctactctcaaagcaaagtcattaccagcataacacatcacattcatacaattcagtaacaatgagttattcttctcacttgaaaacatgtgcggctgagagcacaccttccgtaaactttagggcagagctcctccaatcttctgacctgcctggagcttaccagcgatcattttcccaacaaattgatggcaaacgatatgtaattcaataaattcatacatttttataagttgttaattcgaacctcccctcctatatgatgaagaacataaaatgcaataaagtatgatgaagaacttaagataaccttctatttttataagctgtacttttctatttttagctgttcttttctatttttacttgtccctatgtactaaagcttaaagcatgtatggtccatattcttcgccttctgacccttccatttagtatcttgaacacataagatatttacatgtcttctggtcactgtctcaactaactctcttaagttacatgtaagtgacactacattccaa

SEQ ID NO: 9055 - DNA, 1711 bp, Zea Mays
cacttctcctctttgcaaacccggtatcacactctacccccttaaaaagaattcgacctcgaattctgacgcttctatcggaacgacaaaaggaaaaaaattaatgaatcaacaacacttacccacaacaaaaagttccggatatttctgccgcagctcctcaagttcccacgtagcctcacgctcagactgattagtccataagaccttgacatacttaattgatctcttcctcaaaacacgctccgaggattccaagatacgcaccggacgatactcccaggtcagatcctactgcaccgcaattggttccatctcaaactgatggtccggatcctgcaagaacttcctcagcatagagacatgaaaaactgggtgtacccctgccatggaatccggcaattgcaagcgataagccaagctgcccacccgggccaagatagtgaacggtccaatatatctcgggctaagctttccggagacactgaactgaacaactcctttagtgggtgataccctgagaaggacttggtcacccactgcaaattccaaatcccgcctcctcacattagcataactcttctgacggctctgagcagccaaaatattcttacaagtttcccgaaccttttcagaagtctgctcaacccaatcaggaccaaccagagatctctctcccaaggtctcccagcacagaggggagatacactgcctgccatacaaagcctcaaatggtgccatcttgatgctagcctggtagctattgttataagcaaactctgccaatgcaagatgatcttcccagctacccttccaagacagaacacaagcacacaacatatcttccaaggtttggatcgttcgctccgactgaccatcagtctaaggatgaaaagcaacactaagagaaagcttggtgcccaatgcactgtgaagactctcccagaatttggatacaaatttagagtctcgatcagaaacaatggacttaggtaccccgtgaatcctgattacttccttcatatacaaggggaccaattctgaagctgaattggtggtcttcatgggaataaagtgcgtagacttagtcaagcgatccactaccacccaaatagcatccctgccccgaggagaacgaggtaagcccaccacaaaatccatggtgatatgctcccacttccactccagaatctccaatggcttcagcaaacctgcaggcctcttatgctcggccttcacgcgctgacatacttcacaggcggccacgtacttagaaacgtcaaccttcatccacttccaccagaagttttgcttcagatctcggtacatcttggtttcgccagggtgaacggtgtaaggcgttttatgagcttctctcaatatatccatcttcacctctgatttctaaggcacacagaggcgacccctgaaacgaaccaaatcattctcatcgatggagaactctcggggtttaccatcgccaaccctctttcgagcttcctgcaataaacgatcctgctactgagccgcacgcactctctccatgagggaagattgaacaagcatacgagtctcctcactagcggtgccgacatagcacaaagcgatccccaaacggtccagatcagcaatcaactacaaggccacctttggaaccccggacctgctaagggcatcagccaccacatttgccttccccgggtgataatga

SEQ ID NO: 9056 - DNA, 653 bp, Zea Mays
ctcaaacaagaaagcagagaggatgaactgaccggaattgcgctggccgtggtgaggtcgttttcacggtggcggaaaaccaaattaggggaactgtgaaattcgagctcgctggcgatcaactaagggcaatactgggtggtgtggtgcgtgatgatcttgcggagctcacggtgggctcaatttatactaagcgagagcggtggccgggaattagaacgatgacgcgcggcggtcggaggaagggggagttcactaacgcagtgaattcgtgtcctacgccgtggcagtcactccggcgatcaacggggagcgagagcaggtcacggcgatgcggtggaagtgcctggacacgtggcgcaaggccggaaggcggcggtcaccggtgtgcttatcgggttccactgcgacaagctctgtatggtggccggatttgtttaccggccggacttatccacagtgacgtgactccgagcgtcatttgatcaacccgagcatgaatcaagacgccggcgacacgaattgcggcggagatcatcagcggcatgttgagctggtgtcctaatccactcagatactgtaccatggcgaattgcattcagtcggcctgacagagtagattcaaggcagattttctctaaattttctatggc

SEQ ID NO: 9057 - DNA, 724 bp, Zea Mays
gccgcagattgactcggtcgaatcagtatctagggtataatctcgaccgtagaatatcagatcgatggccacagcgttatcttcttccctcccccgagctgggcgacggcgccatgccccaaccacagctgcgcagatccgagcacccaagtttcccccgccatgcacgagactatgatccaaaacgtgctacgtggtgtggaggtcagggcgaacatgtgaatggtgggtttagcgttggaagtgctgggatttgagcagggctcacggtgttatgcagcaccgcggcggcgcccaggctccggcgagaaacccaatccgatgcatcggggcactaatcccccaaccgagacgatctacgcgtaccatacgagaatgtgaatctgtgggagagaagctgaccggcaattacagcacggaattcctcgaccacggcccagggcggattggtgagcgccgacgtgcaattgtcggcgtcccgaccatggcccacgcctgacgaggccacatacgtgcgcggcgaagtcccgtgatgcactagcaccacccatcgcggtcggtaggtcatcccacgggtgcgccaacggtggtggcgccggtttcccccactgcaccatggcgaagccgctcccgtggtgcgatgcaagcgtggaggtcacggggcgtcgggtccaacttttatacacagagagaccgagtccaggtcgtgattactgcagagttt

SEQ ID NO: 9058 - DNA, 526 bp, Zea Mays
gggcagtggaagctgtctcgatgtagacgtacacgtcgatctgtgtcgtgcagtcaccgacatccttcgcatccacgcgtggtttgtcctagtgctccagatgcagcacctccaaggtatccacacgtacatggaggaagcattgcgtaccgaactgctaggttcacgattttggcttggctagggcgagtggggcacgactactggtttgctggtcgtgaattaggcttatccctaagcgcacccatccctcattatataggcgttctagtgggcttctgactccgaggcccatcagcaaccctaacaactagtctaatttcggattcaatccgagttaggcttcctttcccttaagtgtgtgaccctataggttcacgtacacatagacatggctcgagtactcttacttggcccaataattgacagcggcctctagcaagacgtgtcaagtcctatgtgcacgtaaagatcatattagacgaaccattacaacattacatacatattgttccatttatcccac

SEQ ID NO: 9059 - DNA, 741 bp, Zea Mays
gtccacaccatgtagccccgaggatagtaaacaacacatcatctaattcctcaaaaacaaaatcatgaacgcatattctgaatgcatagaaccacaacagattattttagtataccaaacaatgattagtatctccaaagtactactcacgatccagacttggtagtggtcaccatccacaagaaatttcgcttaaaattttataaattggatcacatatcaatgtactatgaatgtatgtagaaaaaaagaagcaagcgagtttgaaatggcgtgagataagttcttgcaatatattgcaacagtttttctcagcttccaagtctctttctagctactgcctagaacccaaacaatttagcctatcagctttctctaaaagcacatatataatgacgaaacacgcaccaaaataacagtggctgtaagagaaatttctgaatcgacaatatggttctctagaaggatctttgttctagtcgatggcctgcaaaatagcaatacaatgacctgaaagatatggatcagtggtggtagagtagcgggcatgctacctgaaaaacaaagtaaagtcacatgtcaatgtgctagcgcttgtaacaccttttaaaatccatctgtctttggtgtaacagaacaatgagatgggaatgcgagtgggaggaagtagactaagcaggacttgagtttcattgatcatgcctaaaacattactatatgtgcttgataataacataaaac

SEQ ID NO: 9060 - DNA, 287 bp, Zea Mays
tcccagtagataatgacgccatattttaagggcatgaaccacaacagctaattccaagtcatgagttggataatgctcctcatgccggcacaactgtcttgaagcatatgctatgactcggccctcctgcattaagacacatccgagaccactgcatgatgcgtcacagtacacatcaaaagccttttcaatgtccagttgagccaacatcggagcagtggtcaataataccttgagttgctcgaaggcttcgttgcatcttgaggaccagtcaaacttcatgtcat

SEQ ID NO: 9061 - DNA, 433 bp, Zea Mays
cgacaaccagccttcatcatgtgctttaaaagttaaggaattaatacataaggaaaacatcatgtgcattacaagttaaggaattaatacataaggaaaacatcatgtgtattacaagttaaggaattaatacataaggaaaacaaaacagaaacaagaataaagcatgtctggttgcatatctagatttgtcaggcgcataagaaaaaacataatcaaccaaaagtgaaatactaacatccaacatcttcgccatcgtcatcctaccatttgtctagtcaaccttcaaaaacacaggttcttttttaggagccttggccacgaaccgctctcatctttcttgttctggtagcatatgaatttatatctcatcaaaaaggaagagatcaagagaatgctcattgcaggtcaagcaacccattctcctccttgc

SEQ ID NO: 9062 - DNA, 363 bp, Zea Mays
gtcaggctttcgctactggaggtggacagccgcttgtgcccgttggcgttgaactgcgtggaattcctgcgcatctctgggggattgaggctgctgaggctgttcttggtgctttctgtttgattcatggttttttgcctggcttggtcaaggaggaagacatgtctgttctcagactgaaagtatggtgccggtcacctgagctgctgccggcggtggtggatctccttgctgaagagccgatggtctgtggagaggatgggagatgggttcctagcacgttggtgttccctgtttctgtggtggttcttcattctgatggaagttcagcttccggtgtggatcctccagcgccaccccctt

SEQ ID NO: 9063 - DNA, 450 bp, Zea Mays
gatagagaccaggtgaccttcaagaatctggggatcttcagctctcatgggttgaactgggttgggtgaagcgggctcttggatccgcatggctctacgttggttgtgggttaccaagtaggcctccatcagcttctggacgtgctcatccttggcttgcttcagggcttcaaccgcaatgacttcacgactttccaatgcagttgcacgggcttgagctatggtgagatccacatggagccgacggttgcgcttctctgcatcttctgctcgggcaatcatctgacggtggtgccgagccaagaaatcatattgtgcatctagggtgagaaggtatgcagtgaggtacacgactgtggggtcatcctcaagcagctacttcccttccaatgcacgcatccaggccatccaaactggacggtctctctgaaagggcggaaagaatctgag

SEQ ID NO: 9064 - DNA, 326 bp, Zea Mays
agaaaatgacaactcaagctttgtccaatgctcttgaatgattctgcgctttatgtggaaaatgaaagaagctgtttaaaagagcaaccgctgtaatttaaggggcatataagaccaggaaggttacacagaagcacaagcaggactgcataaggacagggtaggacgcagatagacaaaggttaccgaaccagaagggccagcaggaaacaggaaccagacaccttggcctaggaggccaccaaacctgttctgttgccaaacaatagaaatcagacaatcatcatgagctcaaagggcagacaccaggccgagccatgcccaca

SEQ ID NO: 9065 - DNA, 668 bp, Zea Mays
aggtccagacatgttgccattttttgttggagcctgtcattaagtcccctcataaaacaattcttcttcttcttcaggcctgtatccacctagtcaatgacgtactgggagaggtggttgaatttattgagatactgcaccaccgtatctcctccttgcttcagtcgaataaactcttctagtttcatctggagtactccctctggaacataatgttcctggaatgccaacttgaattcttcccaggtaacctaatgcccaacaggttggattgctgaaaaatttgaccaccaagtactagcagaccctcttgcgtctccatgcatcgaattaacccaaacttctgttccatcactctcacccattcgtcggcttctaagggttcctctactttgacgaagagcggcggtcaagtctcagagaattccaaataggtagtatcatgtggtccttgagggggaactctgcctccatgctgttggaattggttgtctgccatttcgcgcaagaagcgagtattgtccgcggtggcgttgaccagggcagcgatagcctcggccaaagaaggtggtataggtggtgggttgggagtgtcctccccaccgcgggacatccccgcaccatcatgtgcacaagtccgggatggcatctgaggcaaagaaacattt

SEQ ID NO: 9066 - DNA, 460 bp, Zea Mays
atcagctccagcctagacaacaaataggaaggcacgatcgtctagtttctgcaaaataaccgagacgtattcgcatggtagcctgtggatatgccgagagtctcgagagaagtggtcgaacacaaactgaaggtttatccacaggcaaggccgatccgacaaaaggtgcgtcatttcacgcctgacaagagagaagctattcacgctgagctagctcgcttagtcacagcagggttcattagataagtactgcatcctgagtggtttgcaaatcctgttcttgtactcaaaaagaataaagtggattggcgcatgtgcgtcaactatacagatctcaacaaacactgtccgaaggatccctttggacttcctagaatagatcatgtggtagattcgaccgccggagttctatgttgtccttcctggactactactctggataccatcatatcagcctggc

SEQ ID NO: 9067 - DNA, 701 bp, Zea Mays
ggcgtccaccgcgagaaccgtcggtggcgagcatcagtggaagggtggccacaggcatgatcgacggcttcgacacgacaggaatgcctgggacgacaataggagcgacggggacagggcgtgaacaagatgttgcacgcgcccaccgcgggaaccgtcggtatggcgagcatcagtggaagggtggccacgggcgagcgacgggggcaaggcgtgaacaagatgttgcacacgcccaccgcgggaaccgtcggtatggcgagcatcaatggaagggtggccacgggcatgatcgacggcttcggtacgacaggaatgcccaggacggcaataggagcgatgggggcagatcgtgaacaagatgccacacagtgtagcacgtagtgctgccgtcgccgatgaacatgatgagcgctatcatcacgagcgtcgtggcggggaagagagacgaagcgtcacaagtcatcgctagcggctaggagaagtgcttcctcatgagtgaggagctacaaggccatcgcgcgcttgcgacgggttcttgacgagcattttattgtagctccattcaaagttgagcgtgtactgtttcgcgagagctaggccagttgggaacgagatagaaatggttggtgaccttccgatgcaaagcatggacgacagatacgtagtggatggcttttgtccgaggcatttggttcatt

SEQ ID NO: 9068 - DNA, 518 bp, Zea Mays
ataccttctccccactaacagaatgtctttgagatcaaggtcattaacaaatcgacgaaaagacccaacatagctctattaatgttgatattgtttttatcctcagctgaaaggatcatattgaaatcatgtaaccatccaaggctcgggacatagaatcctgacctctctcagtccatttagaaacttattctttcttcatccgattgagggctataaaccccagtaaaccaccaactgtagtccctcgcggtatctttaactttgactgtaacaaaatggagcatgaccctctagatattctggatcgtactgggatgactgactggaggccctattccaccctggttgatactcaggccaagctctcctctgctgttggtgcccctgtcgatgacccctctaccttccgaagcttggctagcgccctactgtacctcactttcactcggctagatatctcctatgttgttcaacgggtgtgccttcatatgcatgatccccgagagccgcacctc

SEQ ID NO: 9069 - DNA, 532 bp, Zea Mays
acatggctctgcctcgttaaaaacctcaccccccgggaggaaaagagtgcggtccggaataaaattgttttgcgagttacaagggcgagctggccctggggagtcaaacaataaatttgcggagattgtcaatgttccaagaatgctctaagtcttcgtcggatggcgttgtgagcctgtacgcgctgggggacgccttcgtcttgatgatgaaagggccctcccacttgggctctagcttgccccgggactctgtccgtgctgtccagacgagtacgagatctccttcgctgaattccctcgggatgactgtgtggtcgcgccatgcttttgtttgagcttggtatttgtttagagcatgtagggcgaagacgcggtctccgtcgatgaggtccttcgaagtaggctcgtccacatcggggacggctgacggaactatccgtggtgacccatgttttatttcttgcggggtcatggcctccgatccatatagaaggcggaaaggagtgaacccggtcgccctgcactcggt

SEQ ID NO: 9070 - DNA, 764 bp, Zea Mays
gagggttttacttccagtttgctctctggtactggcaaccctggtcgtaacagctgtgattaggtgtctggttttaatttggggagggagggcaggcagaactaagcagcattcttttcgagtttcggcgaagtggttggcgtcattgctgctgcgggtgattgtgacaggccactgtgggacttcggctcggcatcaatctggagccgaaaggaaccaaatgaatgatggcatttactagtagctagtagtatgctgggtgtcctcttcggtccgacattgcgaggaatagaggtccactattagatctcgacgctgttgggttgtgacttggtatgagcagttttaccagcctctcgccttgactgtttcacacactttacaagttacaagcacttccagatgaaacatagtgcactataacatgatgtaaatgcagtagtacaacattacagctgactagcaaggatgaacttgctgtcaagacatgactaatttgattggagtcctggtttgtcgctacttggaagaagttatgcttttaacgtcttattactccaggtgacaactaagtaaactatttgcattttatctagactgctgttgttatggcatttgatacaggtcctagtaatacagtacaggaagtgatgccgacaattttggcattaaccaaacatgtgtgtgaggcatccaaggatacacttagtcttagataggatgttgggggctgtactgtattactagctggtcctgtagattta

SEQ ID NO: 9071 - DNA, 667 bp, Zea Mays
attaggagaacttaaggatactaaaacaaatgaccagcgagtatgaaccgacctgggattcgctgaccacggtgaggtcaaaccgagcggtgttcttgagcgatttgggggaatgagaaattggggagctctggtgaacaattggaggcacgactaggtggcttggtgcgtgattatcctacggacccgacggtgtgctcaatttatagtgtgcttgagcggtggtctccaattttggattggtgcgctggcggtcggagaagaaaggagttactggcgcacgagattagtggttgtaaccgtggcaacctcaccgacgatctctggataggtcagtacgagtcacgacggcatggttaaagtgctgaggcacgtggcacaagaccgtgaggtgtctaactccggcgaggattgatccaaggcgatcggggtagagcggacacggcgaccgtagtaaacagtggtcggagttcatccactgggtgatatttcgcacccccacaatgttatccaacgacgccaagcacgaatcacgtcgatcggcgcaaatctagacgcgcggctcatcggtggcgagggggactgaacccagggatatttagtgcactgtaccatcagattgttcttcagttagcctgacagaccaagtttgtcattgattttctcc

SEQ ID NO: 9072 - DNA, 452 bp, Zea Mays
ccctcgggggctgggcagtggcttgcgcttcccacccgagccgagtcatccccggcaacatccttgggggctgggcaagtgtcaacaccatccttgagaaccaagttctctgcaatagccgcctctaaggctgatggaccctcagttacttccatgggaccaggacgatccaagtcagtctcctgaccctcaagaccgcgctctaaggtcgatgaggcacgggatgacctcaatccagcgtcgaacacatcagcacaaacctccatcacaccatcatctgccagctcggataacagatcttctggaaccatatcttcaagagtctgatcaaaattcgtcagggtcaattcttgcagaccaatgagagcagacaaagcaggagaaggaactccactactttcatcactggcgacatactgccgactgttctttcgagtcagagtgacctcatc

SEQ ID NO: 9073 - DNA, 544 bp, Zea Mays
tttctttttctgctcatctgcggaaggatcaagttgattggctcggcaagggcgtctcgggcgagtactggcaggcttctagatatccaaggttgtaccagtttctgggagaggcgctaccaccaatgtcccagcaggagcagcatcagaagagtcctcagccagcaaatcaagcatatcacttatttctgcgtcactaggatccaaaggcacctcaaagtggacctgccgttcatcatcaggaatttccccgagcgaggcaaccaagacgctaacttcttcagcagagggtcgcactctaaggcccaaactgccatcagtgacaggtggattcgacacaaaaagagtgaaggccttgggaggaggcaagttccaggctgagtatgccactggggcaccaacatttgataccttgcctctaagaatcatctcaagtcggttcaccaagtctacagagggaatttttctgttggtaacccgagttgagtcagctaggcctcggtacagataagccgggtatgccctgtctttcaacggctgaata

SEQ ID NO: 9074 - DNA, 319 bp, Zea Mays
ttgtatcattacagtggatttaatatcatgtcttagaccatctaggaaccatgtagtgtaatataatggatccttcatctcctggtaactattaagctggtcgacaagttgggcaaactgatcgacatattcagctacagaccccacttgcctaatgtgaaataattgacgaactagcagggcatgttgatctttaccaaatcgctctttaatcatggtgccaaattctgaccacgagagctatggaactttgtgttctacaaactgtaaccacctagcagttgccctagtaaaatgtattgtcgacaccttaatccac

SEQ ID NO: 9075 - DNA, 366 bp, Zea Mays
aatctgctgtaaaaatttgagctcaaatggagcaccgagcgaaaagttatgcccgttttatggaaggtacctcaagttatggttttcaaaggcacaactcggcaggaaccgaagcgacgactatggagcacaggttcagttttagagataggatttgttttctggatatggttggtttagatataggatctgttttgtggatatggtcgattttagagataagatatgttttgtggatattgtcggttgtagagataggatctattttgtgaataggatcagttgtagagataggatctgttttgtggatagggtcggttttataggatggaagcggatggatacaatcaaactgaaccaaaacaa

SEQ ID NO: 9076 - DNA, 424 bp, Zea Mays
ctcgaggacaacattggacgttgtgatgatgtcagagttggtggtcgtgtgcttgatgaggatgaagaggagcaagaggaagaggtccccttggttcgcaagaacagccgcagcagcaggagctgtgacatcccaatgcaggcttttattaggacttgttagtctccaggggttgacaatgtctgccattgaccatgcattagaagaaattatccctaaacaccttttatcagagcctcctaaggttgagagttctgtcatccgtttagaggtcctagatgacgtccctttgtctagtgatcctatcgggcaagagataacctgaatagtttctcattcttcatcgaccttggaaggcggtctagctcacgaggacatactggcccttgatgttgccgaccaaggtcacccggctcctttgggt

SEQ ID NO: 9077 - DNA, 588 bp, Zea Mays
cgacgacacagtgcagtagcatgcaaattgggggcatggtaagctttagcaacataccaggactcaagaatggatttgggggaaatcccaaattagggtgctatggtggatgatcgggggcgaggattggtgctctagcatcgtaacaacctagcagagctggctgcgcactcaatttatagcacctgaccacagttgtcccaaatttgaaggagatttggatcacggtggtgacaggatgttgcaccggtgagctcatcgtggcgttcaatggcactatgactcaagggcagtaactcttagcttgccatggcttcgggtatgtggtgaaaggactacggcgtggcgcaatcatagtgaatggcgacctccacggtgttgaccatacggccacgtcgctgcgcaagtgggtgaggcgactgggcaataacagtgccccgacttcatcccttgcacgagatctttcaccgccagccattatcctcacaccagggcgcacgaatcgcgacgccggtgaggatcacggcgcgaagttcaccggcggcacgttcattgcatctgaagatcttttcgttcactgtaccatgg

SEQ ID NO: 9078 - DNA, 542 bp, Zea Mays
gttaattctcggctacccgattaaaaatgggccgaccagatcggatccaggcgcttatgaagtggcacacgtcatcaaccattggatcacggattagcggttttgattttatgtttgcccgagctgcccataaccaccggatagaagatctacggctatgatcgaatccaccgaatctgtacgaggatcctctaatctggaccgttaacgccgatccaacggtcacaacgccatccccacctcagaccctgattgcgcggcggcgccaccatgcccacgtggtgaagttcgccggagcgcgacgatcaaatccccaggtgcccgactacccttgtaaatgggtgtagcagagagaggaagcaacagggaacacgacagaggggtgtattacctgcaatgaaccgcgcggaccccctggccatggcatcctgcggccaacggtgaacggaccgttccggcgagcaattctcaatgcgccacccattctttttgcccggccatgtagtgtgaactatctggcgatttgcgtgacaccccaggtt

SEQ ID NO: 9079 - DNA, 567 bp, Zea Mays
aagaagaggtgaattgcttacaggacttgctgccatgtaatatttcagattttccctgtaagtacctcggtttgcctttgtctgccaagaaactcacaagggaccaggttcaggccattgtggatagagtggccagccttctgccaggatggaaagctgagctcatgaccagggctggtagagttattcatgtgcagttcgtcatgacggcaaagatgatttatgcagctttggcacttgaccttcctgtatgggccatcaaagcaatcgataaactgaggaagggcttcctctggaggggcaggaaagagttctgtggtggtcattgcctcctggcttggcctaaggttacccgtcccaaggagctgggtggtcttgggattagtgagttaaagagcctctattgggctctgagagctcgttggccatggctggagaaaacagatcccagtaggccttgggcggacttccccactcacgtttgtaaggtggtacaaaatctgattgttgtagccgttactactaagctcggtgatggagccaatacccttttttggaaggacagat

SEQ ID NO: 9080 - DNA, 665 bp, Zea Mays
ttccgctcagtctggcacccttggctcttggtcttctttcggattttctttgtgggggtgagcttctttagcttcttatcgtaatccatcttcagggttcggtaggcttcacgagtgttggcctcttcaccttctgctatttcgagactctcttggagggacgccttctcctttttaagttccttgacctgttgctctatgctttccacccgggagtttaggtgggtgcagtgggaggaaaggtcatcatagtggttatcgagagtgtggagatatccggccatatagacgatggtggggtcctcctcagtaggatctcttcctgacagggcctgaagtcttttcctccaggtagggctattttttgttgctaggtgggaagtaacgaaggggggtttcaaaacctctctgctgtagttttggcatagctgtcagagggcttttcgggcaacattttggcatgtgtctgggaagcagtgtccggtgaaggtgacttggaaagggggtggtttgggtagcttcgactttctcccaggtagactgccatagagcacttctcagttccgttctcacggtattctttctagacgtactccggctttttgcggatttccatgcgaagcgcgcaactccgcaagagatgagggaatccttccacctctgag

SEQ ID NO: 9081 - DNA, 636 bp, Zea Mays
ctcccagtaatatgttgtctcctataattgctgagatctcgttcgagcttcgggaatccgatgctccttgataaagtatagacaattttcgccccagtacggtcagggatgctccctagaatctcctcgtcgacaccaccaaagagcacggatctaggcttgtagccactagcaatatcaaattcttttaacttagagatatcatcttcgaagagttcctgaccgtccaagtgtcgtaggtccaactctctatcctccgaagaagctccttccaattctttcatttttaagggcaaacccctattagtggtcacttcagccatttccctctcagggatcacatcagctataatcctatcaatctctgacattgtggttccaagagggcctctgctattttcagcatcaggggccgcttcatcagcttcggcatcaacatcagctccggcattagcaggggcaacacttttttctgccgagaccggaggcggggtcttatggatagccttcatcatagccatcgtgcgtcatttcttctaaccccctcatttcccatagttgctaaaccagtcttcttcccttccacgcctttttcaacccccttcccctttgattgcaataagctagtcagatccg

SEQ ID NO: 9082 - DNA, 483 bp, Zea Mays
catctacagggcccgcaacactacgagccttgccgagacctaggttacgaaggctaggggtcgatgtggcatagaggcagtaatgatggcaccagggtcccgcgcctcccatgtcgttagggttgggcattcaggttacccgaaaattttcggcccgggtaatttggttaatataacggggagatcaacgttggcatggcggatgcaacattagctggaagaacgaccacgacggacgaaggggccgctccgcccaacggtagagacacgaggatcgagggagttgtgagccccctcaccacagaattcgcgtccttcaccgacttggcagaacacacatgctaaccaagaaaatcagagaaaagaaaatggaatgaagatcgaaaccaaagacaagaagagcaagataaccaaacatagtgcgaggagcgcttccgggtggtaaccttttttcgggtgaccaccggaggtgccggaggcggc

SEQ ID NO: 9083 - DNA, 536 bp, Zea Mays
ttcgttctctcggtggctcggtggtcaaccaaagcttctcaatgcaagaaggccggccggaacacagaagccactagtgatacaagtcacactcacccccacagcagtaggaacatctcttccttgagcacaaagcaagctgaagacgcagacacgtcgtcgcacgcgttccccgtcccgcgcgacggcgccccggccggacgtagtactattactatactagcgttttctctagcggcaagcaagcatagatgctaagatcaaacaacaagctaatgaagaaaggcagcgcagccacctcgtcactccccctctatcctccatggccactgcccaatgccagtgcgtgcagcagtcgtcgcaacgtacaatcctgacgcgtgcctcctctacgttttcttcggaaagcgaaagcaaagaatgagagcatacatgagcaattgttgagagcatcatccaccaccgccaccgccaccgctgccgatcgatcccttcttttgcctctttccgctgcgccgcccggcttttagagtttc

SEQ ID NO: 9084 - DNA, 640 bp, Zea Mays
tcactacctccaacactggggggtaggcgtaagcaagaaacctggcgcgagcacttgttctgtgtatcgcggacggtctgggacaccgtcggacagcccggctcattccagcggacggtccggcaacgcttaggaggcatgacaaccccgtaccttttaaaccatgatgaccagaaataggtacgtggaaaactaatacgtccaaggtagctggtcggctggttaaatccgacccgacctttgatcaattattgtctaagtatgtgaaaaagaaggccggcccaagtgactggccgccaaagcgacctcgctcacccacccaggagcgacaacaggtaaggccgattggaccatctcactaatcggaaaggacaaaagagcataacgtccaatcaagacctaacgtacctgcgtggacacctccacctccatacacacccatgccatttcattacgcatacatacccccaccaccatacgtccaaaatctgacatggggtatgccactatatccattcaggacgccacattaccccgcttgggggcacccattcatccgtttttgacagggtcgcacatcccacacaagaccgattgagtatccctcaattcggtcaccagccacaagtccaacaagatt

SEQ ID NO: 9085 - DNA, 977 bp, Zea Mays
ctgaccacggtgacagcggataccaaacaccgatcaagacgttccagttgattaggtgaagtcaaactcaatgggctgagcaggtgacgatcacaagcacgtgtgggcactgaaacatggacaaaaagagcgagggcggacctggaagcagctagccgcgatgacgcgattcacggcggcgcagtcgactgaattgggggaagaaggaaattctccggctatggtggctaattgaaggcggaatgggtgctctggctttgtgatagtatagcgcaacagaccagaccatcaatttataggagcgcaaggcggtggtgtccaatttcgcgaagacacgctggcgaccggagagggagaaggctactggcgtgggtgaaaccgtggcactcaccggctgaggggctacggcggttatcggcgagctggtgcggctggaagcgacgtggttaaaggcctggggcgtggcacaaccgcggtgaaagatgccaactccgttgacggccgtaaagccacgtcgctggtgcaagtgactgaggaacagcgaggccacagtaacttgaacccatccgcgacgagatcttttcaccggcgaactcaatccacagaccagacgcacgaatcgcggcgagcagcactaatcccggtgaagggtcactggcggccagttcactgaatctgctgattttttggttactgtaccttcacgatcttcttcagtcagcctgacagacagatttgtgacgccaaaatcttgaattttcacgtaagaacttactaatccatttgtagcaaatctgtagccctatgatccagctataaaccgactgtggtaaccatgctcaaacatccacaggatcatcttcaaaatggcccccaaagttcatcttatgccactgaataccataattcaggttttaggcagactgacagccaaactttgggatgcagtttctttaatttttgtataacaaccaaag

SEQ ID NO: 9086 - DNA, 561 bp, Zea Mays
ggcgaggagcgggttctctcgctggagcctagcgtcttgttctgcttgctcccgctcgtgctcctgagcctggcgacgatcgcggcggcgatagttgcgccattcttagtgcgttctttcatcaggggtctcccccatttctgaagcttcgtcctgagagacagactgagccagatcttgctctccagcctcgtggtgtcatcgcacgtttcggcgcctgtttcaccgtcgtcgtgcatcacgctaggaggctcttcccccagcatggtgggttcaccgtcggagataggcaatgattccagtctcccctgaatgaagaggatttttaggaagaaaggtgtgggtatagcggtgcgttccttcccgttctcccttgagggtggagcaatcgggatggcggtctgcagcgcttccctgccccggtttggagtgtttgtctccttttgctgggtgatccatgtccactccttgttgggcgaggtggacaatagagtttgttgagttggggaggccattgtcgaccgaccttctacctttggggatctcgagcctagattcgtg

SEQ ID NO: 9087 - DNA, 424 bp, Zea Mays
cgatgttgcgcaaggatctccacgtgttgtgccacggcgcattcgaaaacacatgtgcgccttcactttgccttgctacgaccggggggggcatggtgattgctcccctgacttgagccttcatcggaagattccaacatctcgtctgtgaggatgtcataaaactactcatgtgtgtacggtttaccctctcatttccacggatttagtattcaagtcctagggtagagcctcaagccactgcatgtgtcgttcgtggacatcgtagggacgtttcccatgtaagttgtcaaatcatggagccgcagctccctgtgagccatggcaatgttgacggaatagcgcaagggttttgcgactcgcgctaatgctcccttagtggtaatgatgaagtcaacagtaccgaagtgtgcgcttgcacccg

SEQ ID NO: 9088 - DNA, 922 bp, Zea Mays
ctttgctcaagatacggtgggttatctcggacatgtcatttcagccaagggtgtagaggcagacccgaacaaagtgcaagatgtggatcgttggactactcctatgtcagtggcagatatccggagttttttggggttggctgggtactaccgacgttttattcatcattatgcttcaattgcagaacccctcactactcttcttcgccgccaacagttccactggtctgaagctgctacaactgcctttcaacgtttaaaacaagctcttcagacggctccagtcctccgccttccggacttcgctgttctttttgtggtggaatgtgatgcttttggcatagggattggtgctgtgctccaacaggaaggacatccagtggcttattatagtcggaaactagcagattgtcatgtgaaactcgcagcgtatgaaagggaattgattgggttatccaaggccattcgacactggagaccgtatttatgggggcgcccattcgtggtccgcccagatcatgccagtctgaaattcctgctggatcaagctctagtaactccaccgcaacagcactggcttagtaaactgatggggtttgacttttctgtggaatacaaaccaggacggacaaatgtggtcgccgacgcactatctcacctccatgccccagtgagtacttgtgcagctatttcagctccaacactgtcatcccgggagaggtgggaagccgagctgagacaggatcctgccattcaacaacgttgtgcacaacttcttgctagaggtcagggttctcaggaggagtcaaattccagcaattcagcgacacccgctgcacacatttggtccacacatgggggcctggtctttcgcaaacaacggttattcattccagcaacctcttcccttcgttcccagttg

SEQ ID NO: 9089 - DNA, 371 bp, Zea Mays
ttgggggtgattttggtggtgtgggtttgggtgatgcggaggcggatgcgggggtggaacaacttgtacttcctgatggtgccggtatgcatggttgggtggatgctggacgtgatcgttgttgtatggttattgttggtggtggtggtatgtgtgcgcgacaactctctggttgtcggctggctgtgctcgagacatcctgtccctggtggccttcgtttccgggcaatctcttgttgggtgtgcgcaatcctcgccatgaaacatgtagtaaaatctgcatggttgctgcgtccgtccccggccccgccctctcgtgccattaccgtggccctgggggggatattcctgacggcgagcggcctcgccgg

SEQ ID NO: 9090 - DNA, 310 bp, Zea Mays
gatgatggctacattagtgcttccgacggtgaggatgacgatgatgactccagtgatgttgttgctaatgatgatgctatgcttggtgttgatgctacggtgaaccttcgaagcatcatggtgcaacgtgttcttagttctcagcctgaatcatcagagaagcagcaacgccataatttgttccagactttcttcgccatcgagaattggcgtgcccatgttattattgatggtggaagctgcaataatttggtgagttcagatttggtcaagaagcttggcctgaccacacgtccacggccacatccat

SEQ ID NO: 9091 - DNA, 673 bp, Zea Mays
agagggcgctgtctacggtagagtagcccaacggtgacacacatcaactccggcgagtgattgtgcggaaaacagtgcagcaaatgggaaattaagagcatgggtgggttagttaccttgagagacggctctagggtgcttgaacggtggcgaggacaccgtgagggccctggttgacggcggcggagactcgtctgcacggtgaaggtccggtgagtgtgaaccgagagaatagaggggctaggggcaaaccagagggtgtctcatgttgctggtgaggaggcggatctcaccgaggcaacagacacgacagaagctcgacgacgaccatagaatggatggtggaccatggcggagctctatgggcgtgcgcgcggtgcgagatagaggagagagggggtctgctggggcgcaactgagcgaggggagtgagtgagtgggtgcgggctccagaaaaggggttgggcgcgtggggaagtggctgggaaacgcgcgtcatgggcacgtccacggcggatagcgagggagggaggttagggaagaagaggtggcttacaagtggggtccgcgagctagcaagggcaaatgcgcgaaccggcggtcatcgttgacaaagcgggcccaccgagccgcgagagagaacagacgcgcacacgaggaaaacagcgccgac

SEQ ID NO: 9092 - DNA, 893 bp, Zea Mays
cagcaaaggtcatggttgggcctcaggcggtggatggccacggccacgcctgtgcgagggcgggcattgatgggcagaggcatgggcgcctaggtaagggccgcaatgtgcaagcgcgctggggagatggctgagcgagggccagtgttggtggtggatgagacagtggtggccgcctcaagtgggtgatcaacaaacacaacaagcaggagggtggtagttgggtcaggcccgggactagcggatgtgtccagtggcggtggcgtcgtgttgggggtggccacatcgatgtgcaggcaggcagggaggaggcggcagcgtcatgtcaggggtggctgcagcctgcagccatggctacgttggccagcaccaaagccatggatggcgaccggaggtgggcgccgatcaggaagtctggatgccaactcagtggctaatgaagaagaagatggtctaggaggataaaatctagggccaacctaactatttgtctaacagatctaaaacggtcctacatcctctccctccctgtcaggcataccaaacgcaaaacatggacatctccatccctcaaccaaaatgcagagatgcaaccatcgcgtcctgaatggatacatcccatccctcctatcccaaaaacaaacacaccccgagtatagtggtattagtggcctcgatactaaagttctagcaatatatagtatcatataaaacaacttaaaaggtacgacctgaactcaactgttcagttttgtgatttctaataattcaaactgcacttatatgtaaattttattaccgataaatatcacttttgcttatgtgtactacattaactagtttctgctaattacatcagtgatgtaaagtaggacataaaatattataatgac

SEQ ID NO: 9093 - DNA, 694 bp, Zea Mays
gcgactggaccgaggtgctgaatgacagaagagaaagagagttgccagcgtcctgaataaagaagctgctgaattggtgaaagatgatgaagaaaaactgaaaaagagaaagctgaggcctgagccgaagacagatgcttcgaagaaaagaaaggttgcggctccgaagcagaaggcaactgatatagaagaagaaactgctgcaacaccttctgccaccgacatggaggaaatcttaaaggtaatgactgaatctttgcctatcaggctaagtccactggggccgcatatgacgaagctttttcagaaggaaaaggagccctcgatagcgaagaaggtagccgggccgaaaaaacgaagaattattactgtgacagaagctattgaagggacactgcgaccagcttcggcttcgaaggcaccagttgttgagagcacaacagcgaccgaagctgcacctgccgaagatgtacatttagaaagcacactttttaatattgataaaatacttctagacatggccgcagaagaagctgctgcagccaccgaagaaaccatggccacagagcctgagaaggagaagaaaataaccgaagacgcttcagaagaggaaattttcaactttcaaaacttagttggtcaagagttgacgaaggctgagaaagaagagttaaaagaatatgccatatcccgc

SEQ ID NO: 9094 - DNA, 413 bp, Zea Mays
gacgggcggccaactccggtgaacttatctgagccggccgcaaagcaaaaggggtatggtggccagcctccggtgttatcctgtggcgaagatcttttacccaaaagcgttatctggtcatcggtgagcacgaatcacaacggtggcgtgaatccgggcgcacgactcaccagcagcgaggttctctgaacttgaccgtatccattcactgtaccattggaaacgtccaacagagtgcctgacagagcaacttgcaacgcctagatctcggatttttgtgccagaacataccaatccgtctacaacaaacttgtagccctttatttcaactataattctgctatagcaactaccctcaatcgagcaatgaatctaactctaaatcgagctctaagttcatcctactttactgc

SEQ ID NO: 9095 - DNA, 647 bp, Zea Mays
tacgatggctgaaagagactatgctttagaaatgtggagattgcttgatccagattcaagattaattaattctgttcaacttcatgataggatggtgtgcgtaaaatctggtatgtaatttgtcattttattaacaaagtacaaaagagcatagcgtaatttgtcattgtaaatgttgtgatactcagaagctaacaaactgtgaaaaatactactcaaatttcgtttttagtttcattctactgaaattaatgccaaatttaccttttgtaggtttaaagaagtccttgctaaatgtcttccatgatggttcttgtcatcctggtatggcattagtaattgatgatcgtctgaaagtttgggatgagaaggatcaattacgagttcatgtggttcctgcatttactccatattatgctccacaggcagaggtgatgttcatagcctgtataccaatataaggatatcatgttgtcactaacaggacccatcatttccacattctaggcaaattgttctatcccggttctttgtgtagccagaaacgttgcatgcaatgttaggggtggtttcttcaagtaagattacctttttttaatctgattgtagtgttcatttgtttgcattttgctgtcaacctaatactt

SEQ ID NO: 9096 - DNA, 513 bp, Zea Mays
cattctcggccgttggatcaacgatgaccgacccatattagtttggtccatcaatccctcccgcactcgcccgtagacgtaggatgccagatcaacggcccagaccattaagtgatcgcgattgacccacagacgtgagatcgggatcgagtggaccacactactcggacgaaacgctatcccaatatctaatctgcgccgtcccctcttcaatctacggtaagaagaccatcgccttcctccggcgctggttcactgcgcacaggtcaccgcacggcagcgggttcgccgaagatagcgaattcagccatcttgagcgccataccccaattcgctcgatcctcgcgaagttaacgactctctgaactcaataccccaaccaatttcagccaaaatcgagtgtagaacccggcccctggcgcgtcgcggcggcaccactgccgtcgacacggtatcgtgaactaacgcacataagccaaatccgtgctaccctagacgtagtagagattcaag

SEQ ID NO: 9097 - DNA, 856 bp, Zea Mays
ggcaaaggttgatggtgcccgaggcaaatttgctttcctgcatggagacagagtcctcaatctgccaatgttttatctccaaggtagcattcctgcttcctgtagaccatgcagtgtatgacaaaacttacctctaattaatttgaatataaggacaatacatttttaactgaaccatcctgttgtcctttccgaaatctgaatggtcctaatattgactgtataactagtggtataatctcatcttacaaagtatatctagaaatgccatctgtgttggcctttttcaccgtagtgaggactattttatgtcgatggcgtatattttcaacatagtggaattatattaaatgttctgttatggaacttctgcaggagttgttttgtttcctgaagcttccctacatcttcgagtattccagcctagattagtggaagctattgacaaggctattaatcatgttgatgctccatgcatgataggtgtggtgagtgccatttctcattgttgtgatgcattgttacattgtcgttttaattggctatgacccaatgtcaggtttatgtttatcgacacacaaatgatggacattatactattgcttctgtcgggacaatggcagaggtgtggtttctaagctatttaattactagttatgtcatgtgcacctttggtcttcctccttgttgaattgtttctactactgattgagtatctgcttatatgttacagtgatagattatttctatactagtgtacatgatcttactatctaggaaccaaaaggaacaaatatccttgaagtgttctgtagtaagttagtaacacaaaagcctagacaaggggtgaccgaac

SEQ ID NO: 9098 - DNA, 692 bp, Zea Mays
aagcttcacgatggcctatagaatgcgaaacacaagttaaacaactatgaccaaccttaggaaaggctgaccacgcaggtgcaccactcggcagcgctggtgaccaccgatggggaacaactggtgttcttggctaccgacggtggaacgggggaaacaaagggtggcatggatgcgtaacggagaggcgagactgagagcaggctcaatttaaagggagtcaccatgacggtggtcaatttgacagctgaatcacgacggcagcggtagcccgtggagctccacgttagcctcaaaggtgtccacaggccagtaatgtggcagacttaccacgaaccctttatgacggttcaacatgagagcccccaaccagctgtgtggatggccggagcgaccggtggcttgctacggtggcggtagatgaagcacggtgaggacacgtggtgtccgtggctagagcggtaactcgatcaccgaatccgagccagagatcttttaccacttcattgatccacgtctcagcggcaccaatcgtggtgcgagattgaatcatggcgggggacatcggtggcgggcacacataactcaatcttgttcagttcactgtaccatgggatgttcattcagcgcgcctgacaaagcgatttgaggagttcctttctcaaatttttatgtgacaacttgtttatccg

SEQ ID NO: 9099 - DNA, 447 bp, Zea Mays
gtagttagggatagccatgaacttcgtgtaacatggtctcccgagaatggcgtggtaggtccttgaaacctgactacctcgaaggtcagggttttggtcctaaagttggtcggcatcccgaaggtaatagtgaggtcaatccgcccaagcagggtcactcgccttcctggtaagaccccatggaagggccctcctatcggtcggaggtgctcccgatcgaggcccatggcgtcgagcgtggcagagtaaaggatattgagtctgcttcatccgtccatcaacaccttcctcggtcgcaccaacccgacaatgtgggtatcgctcgggtctggggatatgctctgggtgatcggtatggtcgtaggtaatggcatgattggaccaatcgaggaaggtcggggatgcttgccatgcctggagtatctcatgccatttcgacttctgatg

SEQ ID NO: 9100 - DNA, 763 bp, Zea Mays
cacctctgtcgtgtcgtcgtgactcctcacggctgtctcatcgatgccggtgagcccggccacggcggtggacacgaaatcgcgaagccgatgaccttccttatctccggccgccgcgcgtcatcgcttaaattcgcggccaccgcttgagggctatataaattgacctcgctcgtagctccgccatgtagtcaagcaactcatgtatctatctgtgccctgaattatctacccgaaagctttaatttgagatttcccccaaatccacccaaaacaccgcaagaacctagctcaccgtggccagctcgttctggtaagtccctattcaatccatgtgttgttttcgttcctctgcgtgcttgtgaagctcacggtggcgttcgtttgctcagttcggccatggttatgtgggaacgtgagctcgacgccccggtttccgccctgagcgtgggcagaacactttcttggagcgccattcgaaattgaggatcgttcttaggtcaccttaggtccgtaaagcttctccgatagttagcttgaaccatcatcgccgatcatggccggtacgaatcacggcagggatgagcggggagcgtgccatgaccaggggtactcgtggagaagagatagaaacccaagggcatttctgcaatctgtcaatgacttaatacaatagtgaatgaacctatttctgtttagccgttaagccgagggcccttctgcaagatggccaacgctggcgcgggcgcgtacgcgggcgcgc

SEQ ID NO: 9101 - DNA, 580 bp, Zea Mays
gttttaatctcacccgtggatccatcaatcaacggccaaaggaatgcctcatgtactgatctaacctcccccgcccatatcagatcggatggtcagagcgcttcttccccgaccgaggccgagtagcgaaatgcccaggccgttggcggaggtgtgctcgccggtgacaggcttctccctccttggtgggtctacgcggggtaaaaaggatgcagagggattgaagggaccttaccagtgctgattccatcctgagttccttccgcgaagggtgcaattaagcggcaccaccagccacggagcgcggcggactcacggcaacagtggactacggcgagagattcccagtgcagcacatgccaatcgagtccggcgaggccacgagcaccatcctggtggcgagttgaagctcctagacccgatgccgggaccccaaagctggtgtacgtacgtgtcccctgtggcggctgtttcctcctagctcatggcgatactgcgatggaaacaggggggcgcggacccagttttatacaccaagatgcgctacggtcggggaaattggttaaaacggcagcgcgat

SEQ ID NO: 9102 - DNA, 613 bp, Zea Mays
gttgggccacagaagccgcaagcccagctcgaggatttcaggagcagaatggattcgttgagtcgtacgacccatattggtgtctgtaataaatactagagagtattagttcctggacagtttttgatcattagtaagacaaaactccacccgagtagtttggctagccgtcggcaaccaagagtgctgacaagtggtatcaaagaccattttggtctggcggacttcgtccacttcaccaggagtgcgaagatggcggggcgttagatcccaacctggccacgacgatcgcagcgcagtccaagtccatcgagacgcagtccaagaccttggtcgccctgtccaagattctgcagcaactctgtgatcgtttggagccccagaaccaccgatggggtggattggagaaggcggtccatgccaacacggagaacatcgccaagctgcacgataaactgggtcagacaatgatacccagattacggagatgcaggcagcccagcaggagcgcgtcaacaacatggtggtgcatgcctccacccgtctggcggcgttggagaatgtcaccaaggtgttcgagtcttggcgcccaaggatggagggctcggttgag

SEQ ID NO: 9103 - DNA, 540 bp, Zea Mays
tcgctatattaataaattccgacccatacttccggctaccattatcatagtctatcaaaaaaggcaagcatactagtaccccctctgttttttatttacattacatggtgcttccagacaagtcgtcgtatattttaaaaaagaaggtgatcgacaatatccacgtccctaacagaaaagtgaccttcaactacttaattctagggtggggagtttagtgcagtgcacaaaaagatggtcttcagtctattactcactcggcaacgactatggacgaaagtttttttttcgtttgttgttaggctcggtttaacactgtaacaatgttaatacgaagagaccaaaggaggttctggtaccataatacctgagaattgtttcgtctcctttctagaggattatttggatgaagaaaacatcgtccttcatgcacctctctgactgcacgggggcggagaccggagaggatgagaatccatggattccttgcagctggacagagagaagatgcacctcggacccactaatgggccgcgcggg

SEQ ID NO: 9104 - DNA, 384 bp, Zea Mays
tgttaaccaagtacctaagacttgccataatgcttatgtattatgttgggtttaccggatgtgttgtactctctttgcttagcttcagtcgagtctccatagacacttcgtaggaattagattcctccatctctctcctctctagaacctttgctacatatgccccttgactgagcaacgtcgtagtttgcccttgcatcacttttatgccaaggtactagtaaagtaaactgaaatcactcatcttaaatatacctatcatctcttccttgaacaccttgatgagtgacatcaaattgttgtccaacttctcgttctaggtgtgtagtatttgaagtagtccatacaataccttttgcagcttgagcaccatgtgccccttgc

SEQ ID NO: 9105 - DNA, 348 bp, Zea Mays
atgacaacaccaatacaaattgattcggctggtggaaaagtccgaaccaatagaatatgcttgaatgtaagagtggaaataagggggatagagttccccgctaacctgatagtgatgggtactcagggaatagatgttatcctagggataaattggctagataagtaccaagcagttatcagctttgataagagaatggtgaggttgttgtccccactaggagaagaggtggtgactgagctagtcccgctcgagtcaagaaaaggagtttgccaccagatgactattgatagcaaggaggccgacccactcgaggccatcaaggttgtgtcacaatttccagatgtt

SEQ ID NO: 9106 - DNA, 806 bp, Zea Mays
gcaggctcaacccctcttagccgagtcttcactgagaggacaagtgacgaccaaggcatagaggactcgagccgaaatgcagtggtgtccagttcatgaatgcaactggagacgagcgccatccggggagtacaggcggacacttcccccaaatgcaaaacaccaaggtggtcgcatacgaggtcgatggccacggacagattagagtgctcaacgctaagggcccagaggtgctccttcgcttgcgcaagctcctccagcaccatcgttggtaaaaacaggaaaacccatcagcgaactattgtgactaaaaggatcgaaagttggggatgggagagtatgatactcaccttcagtcaaggaccccggcatggatccatcgacacaactgtctgacgattatgtctttaggagatctagctgggccgttgggaggccgttattcgtctcgaccatgagatgattaggccgtgccaattgaccgaacgctgaccctactgccgcaaaacccctctatggtgggacttcggacggcgacgcgagacccatgcctcctgaaacggctgagtcattgtcgaactgctaacgcctgggttcaggaaaactaaacactcccccgacccccacaaggcagccgcacacctcagacgctgtgcatggaccatccttgtccttcgaatgtgatatgccccaacgacggggaggtcgcatctcctccacatgtgacagttggtgcagggagtcgacactcctaggatgcagttcgatgaagggatggcctcttgcggcgagatactcggctaggg

SEQ ID NO: 9107 - DNA, 954 bp, Zea Mays
tcgctagccaccctgctcacgcgcgcttgctctagatcactgatcgttgggtcgctcgaacagctcgtcttctccaatccaccgccgcacaacaacttctgcgaaacagcaggcagatccatcgccgtgatcctctcctggtgatttctgtgaatctcgactatgcggttccctggccgaagcttgcccatataagaagccctaacttcgcctcgacctatcgacctaatctacatcgccacggggaaggaagctgatggtcgccgttgtgggcccatgtcctcatctcggtgccaacctaggtgcttcaccgaaccttgggggtcacaaccatggtatcacttgggcggattaagctccggaccgcctagtaattgctcaccggagtaaagattagccatctagccgcaagaactcgtgggagggccactaccatcaccatgtctggtaagggctacctcgctagcatcgttgatctctccgcttcgtttagctcttgtctgtatctacaagggagggctgggctgccggatcacctaaacgctggtgtgcatccaccgtgggagctcgacggcgccgccacgtctggctggcctggggggaaatgtgggtcctggccatcgatctatcatcgaacggtggagatcaagttgcaacatacctcttcactgttgaatgtgaaccgtgggatgaaatcggagggctcggatttgatgcatggtaccctttcactgaattagatccaggccgttgggatgtcatcggatggctgtgggtggataccggttcataagcgtgcaatgtgatctgctccatcctagtgtgatcggacggtggagatatgagcataccccttcggccctggtcgtttttgaaaaaaaagcccctgcacttgtgttaaaacaacccgccatccattatagtgataagatcatcacgcttgggtcctgaaat

SEQ ID NO: 9108 - DNA, 561 bp, Zea Mays
gggagccattggggcccacctaggtggcaaataagccagtgccaggcacccaggccccataagggctgaattggtatctagggaattggtggagatccacggggaggaatccccttcctattcaccaaactagcctaaaatcttgccagatccctatgtctgcaagatccaaggacccacaaaaaaaccaaggaagggacgatgctctcggcaacactcccctccctaattgattgccacttgcctctctccactaccaccagcactgcagtagctctccatcataggttgtcagcgtcattacctgaacaagtgaggcaacacaaagacggtgcccacctcaaggaatagagttgtgaagagcctctctttccagttctgtctgctgctttctcactcctagtcatttattattgagttgcatgcgcaaccagtttaacccaaaaacttaacgtgctgtttggttaggactctgtgagtgtaagcgttaatggaatggttacagatgtgatccaacaagctgtaacggaagcctgtggttgtttgcttagacattttttt

SEQ ID NO: 9109 - DNA, 834 bp, Zea Mays
cccaccctaaacatttcccctaggttaatttcaccaatagcgcactaaaacgccctggccacggtgaccgtatgggcaatggatgaacacgggcgttcatggcaacccagggcggtctggttcaatcagaggggtcgtgaagcttgaggaggacctaaggacgctattacaattgatcaagacactgggcctaacctggaataggctggccgcggtgaagtgttcttgcggtgggttcagaccgatttggggagaattagaaattcaagctcactgatgattgactggaagcaatactggtcggggtggtgcaggataatgtggtggagctggccgcaggctcaatttatagaaggagcaagcggtgacgagcaatttgggcagattgcactggcgccggagatgaagaagaaggtgctggccgcgtgagtgcgtgtccacagtcgtggcgagctcaccggcgacgatgggactgctattggagtcacggtgacgcggtggaaagactcggacacgcggcgggcacagagttggcacgacggcggcgagcagctttatctacggcggtgagcaagggggaatgaattacggctagccggagtggcttccaaatcaccagcggcgaagatattttgaccccgcgacgttatcgacttaccccgagcgtgaatcatgacgccggcgacgcgaatcacggcgggggggggggggggtcaccggcggtgggatttctttgcgctggcaatctgatccggttcaggcactgtaccatggcaattcccccatcagtcgacctgacagagcactttggagcaccattttctcccaaatttc

SEQ ID NO: 9110 - DNA, 3258 bp, Zea Mays
ggcgtcgcgtccgaggccgtgaatgggagtggcggggcgctgcgggcggcggctgcgtacatggaggccggggcaccgccccgcggctggcgctgtggggtgctctggctcgtcagcgtcgaggtgagcccactgccttcgatccggtacgggttttggcgggcgggcggtgggagctgagtacagattcggggcggagtggtcgggaaagttcggggggctcagcgtgctctcagcggatttggtataggctgatgcgggcatcgtgtttggaggttgatttcagatatttggcttccctgctgcgcgtagggttttactgtttctctgcgcacttttggggcaacaaatatttgtctgtctctcggagctatttttggatgcttggggcgcgaccaaatttaggtacacctagggttttatcatttatatgtggattgcttgacgtttgctctctctttcgtgaacatttgggcttcttataacttgcgttcaagtaccattgtaaggaggaaccgtgctttttgtattgatcccgacgatttttctttcaattcttttctcgtgttgcagattgtgttggttctagtctgcactcgcggagctggtgcggattctggtgaaagcaaaggatcgtttctgcaagactctgaagctggagaaaaggatgtctaccttagccactcctgcatccacgacgagatactacatcaacggcgacgagctgggaggaaggagtactctgtcatgccacaagtgtaccatgagtctcgggaggatgcggagcgtgtaagaggacgacacttgttgggcatgtcatcttggcgtgctccgcacgagaatgccaggaagccaatacgaatatacctcaattatgatgccgtcgggcattcgcccgaccgtgattgtaaaaatgttggcgacatcgtgaaggtcagtttgtcacattagcttttctcattgcaccaccagctattttatctgtgtagtagaattgaaactgttgtttctatttggtagcttggcgaacctcctgtatcatcagcaccaggaacacctatatgcgatcctcatggtgatccaccactggtgggagactgctggtacaattgcacccttgaggacatagctgggaaagacaagaggcaacgtctccgtaaggtgcagttctcatgcttttgttgtctctctgaaggttcagttcaaatgcataccgaacactctggactggtatagaagctgtatcatccatatccccatttccatatttttctgacttctgttttgttgttgagaatcatttaacaggcactggggcaaacagtagagtggtttagaaaagctctagctgttgaacctgtcaaggggaacctacggctcagtgggtactcagcttgtggtcaggatggaggtgtacaactacctcatgcgtatgttgaaggtaattttcagttttaatgaatcagtttagcaatcttgcattcttgcctgctaattgcctgactatgttttcatgtgaatctctcctcaattgcagatggtgttgctaatgctgatttagtcctcttagtaacaactagaccaacaacaggtaacacccttgcatgggctgtggcctgtgaacgtgaccagtggggtcgggccattgcaggtttgtgaaccaactcaattaagtacagacatccacatgccaggggtttctagtgttgttctgaccctacatgtattctttttctgcttttaggacatgttaatgtggcccctcgtcatttgacagctgaagctgaaacattactttcagctactctaatacacgaggttatgcatgttctagggtttgatcctcatgccttcacacattttcgtgatgaaaggaaaaggagacgtggtcaggtactcaacaatgtatttcccacttcagtattgtgatatattttcttttgcttaaaatagaccctaatgctcaaaatgtcagtgcattaccttatttaaatttgggttgcacttcgacctgcttttaatgtttctatgactaaagcgctagaaattcgatgggtgatgtcaactttgctggtttatggaataatcgctttggcaattaccactatatggtggtaatacaagggcagttaagcggataatcctaaaaaatggttagatataatttaggttgcaggtgcttataagttggagtcttgggagttacgtgtagacctcatcggtctgctgtaagctttgtcacatcacatgttgggcaaccagctcacgatgacatttatgttaaaatgtatgccagcaactcaatgattgctgaagaatttgagaacatgacctccatacttgtgtgtgaatatgtactggacaaaaagaataaaattccacacagtgtggcatgcttagcttaacaaccaatattcttctctaatctatgtttatctatttgttccttcaggttactgctcaaagtttggataaaaagcttggaagaatggttactcgtgttgtcctaccacgagttgtcatgcacgcgagacatcattatggagtaagttctaactaaagatgtggaaaaagttaattgagtcattggcgacagttatttattttcatgctctttacttagaaaaccccttcatataaactaaccaatttgttttcatgctctttacttagaaaatcacttcatataaactaaccggtttttgtcttgtactcttgtgctaggcattttcccaaaacttcactgggttagaattggaagacgggggaggccggggcacctcaggtagataacatgcaccctttatggtcttaatttttatttttctttctttccttttttcatttgctgttatatgtatgcatcatgcaagtttccaaacacattcatttgttttgatgtttgatatactattaggttcacattgggagaagaggctcttaatgaatgagatcatgactgggtcagtggatacgagatctgtggtttcaagaatgactttagcattactggaggacagtggatggtatcaagctaattacagcatggctgaacatttagattggggtcagaatcagggaacagagtttgttatatctccttgcaactcatggaaaggggcataccattgcaatacaactcaattatcaggatgcacatataatagggaggcagaaggttactgccctatagtaaactatagtggggacttgcccaagtgggctcaatattttccccaagccaataaaggtatgccc

SEQ ID NO: 9111 - DNA, 710 bp, Zea Mays
gaaacttcttcctatttcgcggtgcatagagatcgccccaagacaggcaattcgcaaatgtgcttatgctgaatcgagtagtcatgagcatgtcatgccgatttaagttactaccgacttaaatcgactgctccgttggtagggtctagtggtcaccctgagttaggtaaacgtgagcgtgtcgcaccgccttaagtcattgccgacttaagtcgattgctccgttaatagggcatagtggtcaccctaggttaagtaagcgtgagcatgtcacaccgccttaagtaattgctgacttaagccgattgctccattagtagggcatagtggtcaccctgagttaagtaatcgtgagcatgtcaccccgccttaagtcattgccgacttaagccgattgctccgtttgtagggtatagtggtcaccctgggttaagtaagcgtgagcatgtcacgccgccttaagtcgttgccgacttaagccgattgctttgtttgtagggtatagtggtcaccctgggttaagtaagcgtgagcatgtcacaccgccttaagtcgttgccgatttaagccgattgcttcgtttgtagggtatagtggtcaccctaagtcgagtaagtatgcagattgacaataaacaattcgagtgcctttgagaatgaagtcattttattgatggtgtatcttccaattatagaatacaatgccgtccc

SEQ ID NO: 9112 - DNA, 380 bp, Zea Mays
cagggggtagagggtttaggactctatcagctcatgagtccctgacaccgctatccacctacgctgcttcagtcagtgatgctgcatgacagactttgtggtctctcagccacacctacaggcagcagctgcatgacacgaggttcagacatcatcctttgcgtctgagtggaggaagccagaccagcatcgttccaggtggagatggtgaggatcgcctcaatgccctagtggatgtagtagccggtctcaacaccgacctagctggtctctagggtgcacttagagctggaggatgcccacgccaggattgcagccctggaagccctacttcaaggactggatccgcctgaagcccaggtccccccatggcgttgtcc

SEQ ID NO: 9113 - DNA, 319 bp, Zea Mays
gcagggctcaaaagggagctgggggacgttggcaggcgacatggccagggttctcggtgtgcgcacgcgggtcagtggtggctcgtggggaggacaagctgacaggacggtcccatggtgcaaagagagaggagcgcatggagtgaatgggtaaccgcgttgacgggtcaggcccactttgcagagggagagcgggacgcacgagagagagaggaacgacgctgacagcatgggccttcctggcagagggagagagggggcggacgcacgcgcgggcgagctaggcctggtgggccggctgggtgagagaggggggggg

SEQ ID NO: 9114 - DNA, 1044 bp, Zea Mays
ctgtggggacaggagtggacataatcaccttgcggaagttatctggtggagactggaacactttcctttgatcagagggtccaagcagtgaatgtaaaggaaggatccaatcagatgatgcccctccaaatctaactaaagcagataatctatcaatcaacaagtcaatctctgcaactccctgtagcagcatcaatggaagaaaagggctaagatatatattagcaaacaaagcactaagctgatgtgatgccatcgtaaacttacaggaagaaaaacaagaatagcaccctgaggacagttctcatcaatatagcatatcaagtcttccaatagatcaaaatcgatgacatcttcattcaagcgtttctgtgttaacaacaaaagatttagtcagaacaaaaacgttattagaaccgaacaatgccataaatatagatcaaataatggaactcactagattttggttggttctctcattatatgacctatagtaatcagaaatatagtgagggttaacatagccttcggaaagcgttgactcatcaccccatgaggataagacaaggttcttttttcctcgtcggttgttcactgagctgctagcatgcttccactggagcagggtcaaatagattaaaggtaagtatagcattaatgatcagagacacaataaatgcctatttggcacagctcagctccaagattctttttggagctactcaaccctagctgcagaaattcttggggccggagctgtggacacactgaacgtactcgatagaacaatttagttattactttggatgaaaatatgtgattggaccactttattttatcctataaactacaaatcatgcatgaatctcagagatgaagctatgacaaacagggagtataatggatgtcaaatggttagctcttcagatatgaagggcagtgacagaatatgccgttgcaaaaaaacataacacactctttcccctaaagtagcactacgtatcaaacaggaaaaccccaacttaactacaactttattcgaaa

SEQ ID NO: 9115 - DNA, 565 bp, Zea Mays
ggaaggtgttcgatgaaatgatatgggttttttttgttgttgttgttgatgctgtacatgtccgtatcatctgtgccttcgtatttgcatttgaggtgtatctgtatgtgtaatgctgctaaagaaagagggtaaatttctctcgatcatgatgtgataatgcagaaatttctgaaatgcgatgtgcagcttggttggtacaatgctgatcacgtgaaatatttttgtaaatacgtttttcttctgtgaacaacatggatacgactgatacaaagagggcaacttgagttgtcgttaggaattcaggattttagagtgattttggcctgctcttcagtcatggcctcataggtactaccaatgtcctgaccaatttgtatccacaatgcccgccaacatataggattcagtacaatcttgaccatcattgctttatagcacatgattggtgaaaatacatgtcttcaagaagcatatatttttctgggacttggcgccacagacttgctgtatctgtatgcacagttttgtatgtattcttggcatccctcgtcgatcattctct

SEQ ID NO: 9116 - DNA, 468 bp, Zea Mays
ggggagcatcaccatcatgtaaggatgctagaacagggacaagaagggaatgagcagacctggggaaggctggccgcggtgatgtgtggttcacggcatcagagaatcgatttgggggaaaacccgaattgcggggctacgatgaacgagtggagatgagagtgggtgctatagcttgacgattacatggcgcaaccgactaggccctcaatttatagaagggtaaagcggtggccagcaaatttggggaggacgcgcggcggccggaatgaaagggtgagtcaccggcgcgacttacagtggcacttactggttgaggagctacggcggtcatcgtcgagctggtgcggctagtggcgacgtgtttaacggatggaagcgtggcacaatcatggcgcagaacggcaactccggcgatggccaagaagccacgtcgccggcgtaaaaggtgagggacagcgaggccac

SEQ ID NO: 9117 - DNA, 365 bp, Zea Mays
tggtgattggccgaattagcccggtcctgtgcccctgctttggtccgtagtgttccccttaccctgccatagctagtccaggccttagcgtgccctagaccccctctccccggccaaaattcctcatcggagttgtacgacctgcccggagcacctccccttcgtcgtgctctcgtgtccggtcccattcttgcagccaggaccatgccagtgagttcgccggaccttcttcacccattccagccctcaccggcaatcctagacccccggcgaccgtgtctacctcgcctccggcgaccttgccgccacggagggagcaacgcctgtcaccaagctgtaaagcccagcgcgccccatcacaaccg

SEQ ID NO: 9118 - DNA, 671 bp, Zea Mays
ggagggaggaagccgtgacccagagggaggccctaacaatggagtaccagaccaaactgagtgctctggacaagactctggaagcccagtgggcccagcaggtaaaggtcgtggaaaggctgcagaaatggtagcaagagcttgagggcaaggccagcgacgtcgccctcactgaggaaaaccttaaggagaaggagctgtccttagacaggcgggagacggatctcaccaggcgggagacagatctcgccttcagggaagaaatgctcgtccggcgaggcgagttgctggccgagctcgagctcgaagcagaggaaaaggagaggaagctagaggagcagatccaccagttcgatgcggtgcaggcggcgtcaggtccccaggcaatggagggcaccaaaaaggccctcgtagatctccaagaagaacaccgcaccggggtccagcgcattgccgattgggccggtgaggcaagcacgacactggtgccactagggatgagccccatcccagtgtcggagccgccagtgtcgatctccgataccctcccggtgctggactctgccgctgatcgcctccggcgcctggatcagatcctcggtgcctgcctggaggcagagggcagcaagctctgtcgggcggtggtagactacgtcctgacgtgcttccgg

SEQ ID NO: 9119 - DNA, 428 bp, Zea Mays
gaaaaaagaagggtgaagcaacaaaaacaaagggatataagaagaaaccagcaaagatcttgcggtattttcctttgataccgaggctgaagaggttgtatgctaatgagcaaacagcaagcgacatgcgttggcatgatgagggtcgcacaaaggatgggctgttgaggcatccagctgatgggcaagcttggaatgattttaatttgagatatcctaatttttctgctgattcccgcaatgtgaggctcggtctttctagtgatggagtaaacccttacagaaacatgaatattagtcacagtacatggccagtactgcttattccgtacaatctacctccctggatctgcatgaagcaaacatcttttatactgtctatgatcattccaggaccagatagcccaggaaatgatattgatatattt

SEQ ID NO: 9120 - DNA, 721 bp, Zea Mays
cgcaagggtcaaaggcgacaacagacaagggtatgagagaaaagatgaaggcattggaaagccagtgatatgagtacaacaaaaaatggagttacgtccaagcttacacgtggtaaagaagaggatatagccaagggtgaggtaagtaaaacaccactctcaaattgagattggagactggagattttagataacagacataatgtaatcacaaggcaagatagagtgatgagaagggtaaaggaaataacaaacaaaaacacaacaaaggatagagttaaaaactcgcaggtgacaaagaagaggatacacccaaagggaaaataggtaaaatgtacaactctcagattgggatgggagagagaagattttaaagggcaggtataagataaacatcaaggtaagatataaaggtgataagggtaaatgtgataatggtgaaaagcataaccatggacagagttaaggcaagactgacaaagtggagaaaacaagcaagggtaagataggtaaggttcaataaaatggttgaagtaaagaaaattaattaccaagtggagttacaaggagacaatgagatcaccaaggatatgcaaagtaaaatgaccgctcatggatcattaagaaacaagggtggtcaatatcatgtaagttgaaatgtcttaaacaaatattgggttatgaagataagcatacataaaaacatacgagagtatgcaag

SEQ ID NO: 9121 - DNA, 372 bp, Zea Mays
tgaaaagatcgggaggggagtggatttggtcgccgggtgaagcttatcaaccgtgcttgtagctgtgcgacgtggaactccggcgacctcaattatgccacgtcgtggctctttactgcgcagtagtaaccatggcacgcctaggcttaccatctcagaaccgctgtaccagtgaacaccacgattgagccaccagtgaccttctttctttccggccgccagcacgccatgccaaaattaggagccaccgcccttggatactataaattggtgccctagcctggtccactaagtaattgtgcaccctgtgaaccagccctcacctccaatcgtcccccacagctccccaatttgggatctcccccaaatcag

SEQ ID NO: 9122 - DNA, 396 bp, Zea Mays
atcgtccgtgcttcctggtctcctctcagagggtgtcttcatgcaccctttatcatgaagatgatcgaagtggtcacccagacccactttgaaaaacccgtcaaacactcccgctacgtaccctactgggttgattcctccaacccagctgctcgtacgaaatgggctccctcacggtctggaggccctgcctcctccactgagccacctcgccagcctccccatcatccatcttcctctccccccgctgctgcctcgcgtccctctcctggccgcggatctcccatgccatgtgctcgtggtcgtggtcgaggtcgtggccgagggatgggtgctcgcttggtccatgggtttgcggcatttttctccatgtgccgcaacatttctgctgatgtc

SEQ ID NO: 9123 - DNA, 481 bp, Zea Mays
ggctgacccaggaaggcgatgggcccacgcccgggttactcgtggcttgggcgtgatcccgttgaagttgttcgcttttcccgcgcacgatatcctcgaacatcggggatagctcggagtggaggcaccaggttttcctcgggataaccgaagtctgttcgctattagctagaagataagctggaagagtgtgtacaacatgtacgcgggaagtgccatacagtcgtgtatataaagccaagggggatccccatcattttcatctcattagcacctcaccattcggtagacaccacatgtaaacacctccctcatacaaagtcatcccaggaagtagggtattacgctcctcaagcggcccgaacttgctgaaaatcgctcgactctctctttctcgtgcccccagcacgaaccatcgagttacaatccacgacaccgtcgtacccaaaagcaccacgagggtaccccgggtgtgcgatcg

SEQ ID NO: 9124 - DNA, 961 bp, Zea Mays
atagcgtctcagagtctgctggtaccgtgctgattgaattactgcgttcagccgttcttcttcgagtacatcgatgtcctccagtctagtagcttcggcttctgctatgctttcgaagaccaacctcggtgccccgaacttgagatcggcgggtaatactgcctctgacccatagaccatgaagaagggagtgtttccatgtagagctcggctaggctgagttcttaggctccaaacgacgtagggcaattcccttatccacttccctgcgaacttctcattcttttcgaagacccttttcctgagtgcctccagtatcatcccgttagctcgctcgacctgcccgttggccctcgggtgcgctaccaaagcatacttgatctgaatgcccttttgctcgcagaaatcgaagaattctgaacttgtgaagttggatcccaagtcagttatgatattgtttggtattccgaacctgaatattatgtcttgtatgaatttcacggccttggctgaggttaaggaagcaatgggtttgaattctatccatttggtgaacttgtcgattgctaccagtacatgagtgtaccctccttgagctttcttgaaaggtccaatcatatccagtccccagcatgtgaagggccaagttactggtatggtctgtaattgttgtgctggtaaatggtgttgctttgacaagtattggcaagcttcgcacctctgaactaactcggctgcatcgcttttcgctgttggccaatagaatcctgacctgaagaccttcccgactaatgtcttggatgctgcgtgtattccacattgcccagcatggacctcatctagaagttgtttcccagtagatgagagaatgcacttcatgaggacgcctgatgcaccccttctgtataatgtttccccaatgagtgtgtagtgggctgactgtctggcgatgcgctcggct

SEQ ID NO: 9125 - DNA, 698 bp, Zea Mays
gagtgcaatctgttttgaggaaatgacaatactcttcatttatgtccgaggaaatgacagcaacaatgctaacttatttgaaaaaaaaaacatttggcatgctgctgcattctgtttgagtgcaatctggatttggggaactaagacattgaagcaataagtatgttttcacgacatggcaattatatgtgtgctttgcttctcttataggtgcagagataaaagggaggaaagaaacagatgtgcattatgctctccacattctaattattacccatatgatcatttcggattgacacatacaccatatgcatcttgctgtttatcttctgaataaaataaaaaacattattattcaagcttagtctatacggtttgcttaaaagtgatgatatcgatgtacttagctatatatttgttctagctacttaggtatacatttactctgaatgttgttatctaaaaattttgccatgaacttaccaagcatagatgttcaatttatttagacatatataagtacttcctccttcagatacaaatggtcatttttctcacttgcctgtctattgttccaatcattatctctaaaggctgccttcataaaattgtgttatttgaagtgttgtctctaaagtataattctgatgcccccaactacatgtagatcaattttttgtagagcttggtacaacagc

SEQ ID NO: 9126 - DNA, 715 bp, Zea Mays
ccaaagccacccctggctggcacaaaattcccacgccctctccagaaaccacccctccgagaaatcttgttacctataaaacttcctagacgatgatgtccaatttcttgctgatcctgctcggtctgttcccctggggccctctagagcttggcccgtaggtcttcctccctgctaaactccgaatccagcaagtcatcatcttccatccaatccttagggggtcgcttctagctattccccctggttctcttctccacgccatccctccttccttaaccacctgagaaaaggatcgctcaaatggtgtcggtggctcaactctcttgatacgcctagcactttgccctagccggcgtacctcttctggtcttgcctggtatcctttacctgagagaatgttggtcctgggcacccatagccattttgagttaatgggcctccaggaatgcctgaacacctaggccagggagaggcccatacaaacgtgcttctcctccccaacttccaaacgaccatccccggtagaaccctcttccaccttggaattcgataggacatgttgtgcatccgtgcatgaatgatctatagcaactattggatttgccatccttctcacccttgagaaagtgatagccaaatcgtcatcaaccctgtcatcttctagcccaaactccataaccccaaccccctaacggcagacgtcgcgaacaag

SEQ ID NO: 9127 - DNA, 519 bp, Zea Mays
gggaggaagagggtagctggtagaaaagctttttgtagtagtaggacagatgattccaacaatcctatttctagtgaattctcccctaccattgaagtccctgggtctcgacctgtttgtagtccctccttacgagtactaacagattgtggtggcactgagcctgtatctggttttagttccttttcattactagtactagtagatggtagtagaggggctgagtctggttctagttccttaccagcagatggggatattggtgttgatgtgccagtaaagggtgctaaaccatctgtttcttgggcagaatgctggaagcatatggataagcgggagattatcgaggatggtataaaaagttatattgctatatgtcactattgtaaaaatgagttgagtgcagattctgctggtggcactgggcatttgaatcgacacttcaaagcttgtttaaaaaaggcagggcaaacttttggtgcaggtatgcaaactcaactaaactttgctgcggacggc

SEQ ID NO: 9128 - DNA, 479 bp, Zea Mays
tatttgggcctgagattatacaagaagcagaagaacaagtccagcaaataagggaaaatttgagaactgcacagtcaaggcagaaaagctatgctgataataggagaagactactggagtttaaggagggtgattatgtgtatttgaaggtgtcaccgatccggggtatgaagagattcaaagttaaaggaaagttgtcccctcgcttcattggacctttcttgattttaaagcgagtgggagaagttgcatatcaactgaagctacccgatcacctgtcagatgtacatgatgtattccatgtgtcccagctaaagaagtgtctcagggtacctaaggagcaactaccgatggaggaccttagtgttcaagatgacctgacttatgttgagtaccccatcaagattttggatactttgactcgagtaacgaggaataaggttataaagatgtgcaaagtgcaatggagtcaccatggc

SEQ ID NO: 9129 - DNA, 679 bp, Zea Mays
tgactctctgtggccatcccatcgtcgccggtgaggtcgccacgacgatagccacgggttcatgcgcgccaataactcctgccctttccgaccgccacgcgtccccattaaaattcctggccaccgccgttgagccctataaattgaagcccccaccagccccgcaagatcgtcacccacccagccaccgagaatcgttagcaatcgttcgccagagctcgtgaatttcgaacttcccccaatttcggtctccgccgccgtgaaccacaccctgccgtggccagccatccacaggtcagtacctgtcccctgcttcctcgtttgagcaatctcatagctctgtgatgcttgccgaaccaccaatttggactgcgggctcaccaatcgccgggaacacactcccctgtccgcatggttctcggtcgccgtggccagagctagttagttagtcgttgatgaaattgggttgggggaatggatcggggagggttcaattgggtgttagtcgctcggagaccctagtcattgccccattcggccggtacaggtgctcgccggagcttccccgcgctcgacgccgtcgtggacttcaaaccgagaatggataggagtgcgggggtctttttgtaaacggtcagtgactctgttaaacagtgagagaacctgttttcggttagta

SEQ ID NO: 9130 - DNA, 766 bp, Zea Mays
tggtgcaagaatttgtgcaggtgtgctctacttgtcagcggtacaagtccgagcacctccatccagcagggttgctcttgcctctgcctgtgccctcagcggtctgggccgacattgcgctggactttgtggaggcgctacacccgcgtgaacgggaagacggtgatcctgttcgtggttgactgcttcagcaagtactaccacttcattccactcgcgcacccgtgcatggcagagatagtggcccaggcattcttcaccgacattgtgcacctccacggcgttccgcagtccatcgtctccgaccgcgaccccgtgttcacctcgacattctggcaggagctcataaggcttatgggtactaagcttcacatgatgttcgcttttcatcccagtcggacggccagacggaagccgccaaccgagtcatagtgatgtacctgcgctgcttcactggagatcgcccccgccaatggctgtgctggttgccatgggctgagtacacctacaacacttcgtaccagacttagcttcgggacacaccgtttcgggtggtgtatggtcgagagcctccttccatccacttttatgagccgggggagacgagggtggcagccgtcgcccgggacatggaggctcgggaggccttcctagaggaggtctggtaccgccttgagcaggcccatgcgacccagaagctttactacgatcgacaccaccgtcaagtctcctaccagccaggggattgggccctccttcgtcttcg

SEQ ID NO: 9131 - DNA, 423 bp, Zea Mays
ccgacgacgcacgtgaatcttccacgagggcaagggaggtgaggttggtgaccaagttcttcagcgcgtgcgacatgggcctagatgaagaagaggattgacttggttttcacaatgttggggaggcccagaagtgagtcgtcgtaccgattgctggtggcacaggagaggagatgcggagcaaacaaatgacgtcctcaagcactgtcacggctcaaagtaacccaccagtggcctaaagtgtaaagaggttgtgcaggcgtgggtcccctcgagcgcaccagggggtgacgaggatggaggatctacggtgcctaggtggcgctggccaagccgcgggcgatggggaagtatgccacaacagcattgccaactagcatctccttcacccctcccccatctcccctccccaatcaaagaatc

SEQ ID NO: 9132 - DNA, 653 bp, Zea Mays
atcttggaaacctggtggttgtaagacatatacttcttgcagattatcattcaaaaaggctgatttcacatccatatggtgcacctgccagttttcttatgctgctaatgctaataacactctgacagtctctagtctagctactggtgcgaaaacttcatcatagtctacaccttccttctgagcataaccttttgcaacaagcctggccttgtgtttaacaacatttcctactgcatctttcttaagtttgaaaacccactacaaacctatagccttttgacctcttggtaaatcagaccaaaaccaagtgttattggattctatagcttgcagttcagcttgcatagcttctctccactcctgactcttcaaggcattttcaatggtcactggttcatctacagctagcattaaaacaccactgtattcatagtcaagaatttcttcagtgttttcaaacaagtcagtcaaggtcctatattttacaggaaccatgcctgagttttctgaactcgatgattgtggaatgttgtttgcaccaaatattggacctgtattctgtccttgtgaggttgaggctacaaatggagtctgtgagtttaaaggtgtcacaggtgattgtggatgtggtgatagtggaagtgatccac

SEQ ID NO: 9133 - DNA, 680 bp, Zea Mays
agagagagctgagaatagtcggcgagcactggtcctctaactgtttcaacaggttggagatatagctctgagaatagtcggcgagcactggccctcttaactgtttcaacaggttggagatatagctcctgcaagcgtgttgctgcaaatgatcgacaggtcgcatcggatgccaactaccatcgtacgttgttgcgtgggtgtttggttcactgtcacgtgcgtcaaatgtttacctagaaccaggtcggatgccaaccaggtcgcatcactgtcatagcctaaggtcggatgagtcatattgctggtgccatgctagaaaccaggtctttcttttcacaggactaataatgtttggctaaaggtatcacaggtcaagcagatgagctatgtaatgttccccaagacttactaaccttatcataggctctaaacaacaaatgcatgtgtgctcatgatcatgtcttcgtttaccttagttgtccctagtgaatattttttttacaagggaaagtaaatcaccaactgttggttgcactatcagtttccaaagaacagacaatcagtatcagttgagaaccggctacaatgccaaatttctaagcggtactacaatcgagattaaaggcgtccgattgcatgcatggctcggtactacaaagattttcaataccagtgtt

SEQ ID NO: 9134 - DNA, 647 bp, Zea Mays
ccacgatggacgacctagagtttgtggagatggccggtggagatggggacctcatctacgacacgctctgcacggactccgactcagatttaggtccctctgggagcgatgatgagtagcgcccccggtgacaaggggaacgaggaccatccggacaccatagcttcatcgacagtcctagcaggacaggatgccacgcatggtaggaccggaggaaacaccggatgtaatgattatggcaaaagagctcgtagtagatgaccggtcggagagcttccgcaccttctttgtaaaaccaccgaacggttataaataaagtgtgttgtcaagaatgctcttagccacaaacatggtaagtgggggagagagcctcagtcgcaccttggtctcccctctcccaattgtttcctctttcctttcccttctgctcgtttcccattggtaacttttacgacaggaagcataccaggaaccggacgagccaggacgaatgaacaacggactcgacggagtaacgagcgaaagctccgatcacgaaactagctttatcgttttcccttttctataacaacgcgctttgagtctttgtaacttttcgttgaagagtcttaagcaaaacgtaacatcgcaccgctcgtgcttccctg

SEQ ID NO: 9135 - DNA, 306 bp, Zea Mays
ttttgttgctgctgatgtggaagagggggtgggggaggtacgatttgtacttcctggtggcgttggtatgagtggtgcggtggatgcggagcgggggcgtggatgtatggtggagggggctgctgatatgtgtgtgcgacaactctagggttgtcggctggttgcgcccatgccatcctgtctctggtggccttcgtctctgggcagtctctggtttggtggacgcagtcttcgccgtgaaacaggcagtaaaatcggagcggcggttgcgcacgtccccggcctcgtccgcgagttccgtttctg

SEQ ID NO: 9136 - DNA, 1282 bp, Zea Mays
gttggcgaggtggctgatcttcctagtgcgaggaccaagtgccggcgacgaagggtggtgttgaagcatagcgtgggcgaggtttcgcaaagtggtaggcaccgtcgaatggggatggagcaggaccgtcttcgagtagaccggtttggtaaacaagagctattgtcttcgccgattgggacgagcattggtgagggggatctgcagaatctttttgagggtgagtaattgaaaataatgttgttcaattatagggaggcgggcatcatcccgaaggttgagccgatttagtatgtggttccttcgctgagtgtatgtaactgcaacttgtattgtaatgtggcctgttggccgttttcgcgcacttgtgctaatccggctgcacccttaggcgacttttgcgtggagtgtcgattgacacacttattgcgcttatccggctgcacccttgggtgacttttgcacagagtgtctttttagtaaaagattttgattgacgcacttattgtgcttgtccggctgcacccttaggcgacttttgcatggagtgtctttttaataaaagacttcgattgatgcacttgaaaaaaaaaatccggctgcacccttaggtgacttttgcgcggagtgtcgattgacgcacttgttgcgcttatccggctgcacccttgggcaacttttgcgtggagtgttgcacgcgagggtagtctacgctacctgtcgcggtgacttcgaattggtcgaatgccaaagaccgtcgaagcggtctttttcgacatgttgcatctgagtttttgtttttgcgggggcttttgctggtgtattacatggctccgcctcgttaaaaacctcaccccccaggaggaaaagagtgcgggccggaataacattgtttgctgaattacaagggcgcgtgggccctgatggttaaacaaaaaaattctgaagattgtcaatgttccaggagtgctctaagtcttcgccggaaggcgttactagcctgtacgcactgggggatgccttcgacttgacgatgaatggaccctcccatttcggctccagcttgccccatgattctatccgggtggtccgaacgagtacgaggtctcctttgttgatctctcttgggacaaccgcgttgtcgcgccaggccttggtttgagccttatatttgttgagggcctgtagggcgaggacgcggtcttcgtcgatgagatctttggacgttggttcgtcgacatcgagaactgctgatgtgcttgttcggggcgacccatgcttt

SEQ ID NO: 9137 - DNA, 462 bp, Zea Mays
ctcattcgctgctggctgggaccctgccgccctcgccgccgcatatagcaccatggcgttggccccaccgccctctgactggatcatcgactccggtgcatcctgtcacaccactcccaccacaggcatgctctctcgctcacacccacctccccacacacaccctacctcgatcgtcgttggaaacgattccactcttccagccacctcagtaggtgcctcagtactcccttaaccgttctacctcaacgatgttctcatagctcctcacatcactcacaatctcctttctgcccgtcggttcaccaccgacaattcttgttccattgagtttgaccctaccggtttttctgtgaaggatctggccaccagtaccccactcgctcgatgtgacagcgtcgggcccctctacacgctccgaccgtcgtccaccggcgtgtctccacctcctgtcctggtctc

SEQ ID NO: 9138 - DNA, 929 bp, Zea Mays
tttactagctgcaatgaaccaccaaatagaaaggctgttaggtaacttattggagcaaaagggtattttaatatcaaaatcatctacaataaatagcaaaactcaattggcagatacaccgtcattgaactattcatttattattcgtcaacaattggcatttccaaatttcatgtaaggcgacaatgatttcatattccactagttacaaaatattgaaatagagtttacacaaagatgatatttcagcacctaattgaatggccatatgtgaactccattttaaaggaaatatcttgcataaatatgcatagtaggcttttcaaaatgtcttgctagggaataggaaacaggaaagtacaaaatgtagacctgcaagaattttcaactcagcataaacggaattccattagccacttacagtatacacaaatacagatgttggaagactgctatccttgtaatcatgaggaatgaaaggtgatatttgacgacatgagattttaaggtctggatcaggttcacctgcaacaaattaagaaaatcttaaaggggtcgaaatcactgtgctatcaacacactgccaccttattgcattagcattacagtgccctattaaaaaacaacagtctctttggtaagaacttaaaaaatacaacaaattccttgcgtaggttgcaaatttaagcatgttaccatagatctacaatggcataccatcataaacagtccatgcccgagggaacaatgcatgataggtcgagtgttgaccacttaaattccagtcccatgaagaaattccagagtcactatttttcctgaaaatcgcataaaacatcaattaaggtacttctacagaatagatagcatgaaaagcacaaaatttgaccaagttgttaatctgatcagcatgccactcccaccaatat

SEQ ID NO: 9139 - DNA, 302 bp, Zea Mays
gtcaaagaggcagaagagaaagttgccctgatccgcaggagattacttgaagctcagagtcggcagaagagttatgcggacaataggcggagagagctcagatttgaagaaggagacttcgtctacctcaaggtctccccgatgcgtggtgtcaggaggttccaagtgaaaggaaaactagcaccgcgattcgtcggtccctatcccatcattggcggagtgggacccgcagcataccgtcttgaactaccagagtccatgtctgacatccacaatgtgtttcacgtatcccagctccgcaa

SEQ ID NO: 9140 - DNA, 882 bp, Zea Mays
attgccaaagcacacacaaactcctctacctctacctcgtcctcccccaacagaggctgcacgtccccgtcaactggacgaaaagcttgcgtctatgaaggcctaccggcgtgcgaggggactgtgcgacaggtgtgcggagaagtggtctcccgggcatcgttgctcccctacagtgcagttacatgtgctcgaggagatgtggcaactcttagaagataatactcaatcttctccagtggacgctgagaccaccccaacacaagaattgctgtctctatcattgtcatcggtcaccggtccgtccaggcggcacacgatgcaacttattggtgaatgccaaggtcacatggttatcatccttctggactcaggcagttcccactcgtttgttagtacatctctggctactaaactttctgggatgtcacttttgcctacacaagtgttggtgcacgtggcagatggaggggtcgttccttgcaatcaagtattcaagtcaacacaatggtcagtccaaggtcatgtgttcgtcactgatttccgagtgtttccactacaatcttatgatatagttctgggcatggactggcttgaaaagttcagtccaatgaagatacattggtcagaaaggtggctgtcattttcttatcagggcaagcaagcagtgttacagggtaatttttcttctgataacaagaacctgctgcatgtggtttatttgctgcattccgccactgatacccatacagatacccaattagacccaaggattgcccaagttattaagcagttccagtcggtcttcgagtctcctaaaggcctacctccttcacgatcttgtgatcataccatcccactgctgccaggtgctcaaccggt

SEQ ID NO: 9141 - DNA, 746 bp, Zea Mays
aataccttgggaggttctgtcacacgcacgaccctatggacgacgttaagagggctacaccacccagtggcaacaagctgacccccagtagaataaggagtttctactataaagccacccttgagctataaaagggtacgacaaccttctctccccacacacaagcacacattctataacacgctccaagtaatacaacgatcaacactatgctggagtagggcgcgagcctaaactagtacaaccccctatatcagatccatcatagagtcccaatgattcaccattcggagtgaatccatgctagcaccccctgtcaaacacaaatctccttgtccctggtttccgaaaccacgacacctagcgatctacagggcccgcaacacaacaagtcgagtaataatagtgccggagcccctcactgcccacatgcagccagacttaatgagcctttctagggagcgcagacgaccgaggcgaatatcgatatgcacgtttaactgagggtgaaatgcttcgttctaccacaacacgataactcattccacaagaagctatctgcagccgcaccctcccctttttctataatagggggtcagacgacacgaagaggatataggcacacgacacacgaagaactacgaaagctaaagtcgaggtgcacaccaccaggacgtccaaggcttaactatatagaaaaccctagattcatagtccttaggtccatccatgcatgagatatctgg

SEQ ID NO: 9142 - DNA, 577 bp, Zea Mays
gatgtatctagcatcactaggtttggttagatccagcttggtaatagttagcaactaagaattaggcagagtgaaccacaagataccaatgcataaaggtgtgctacccgtattaggcatgtggcttaccttcttcttgtggacctttctgacttctgtgcctccttatgttcaccatcaaggtcgtctgcgatgacccaaatccagcgatggttagggtttaggggttggcgagagaaatgtggatggggcgtgttaggtggaaggggcgagagaaatgcggatgtcaatgagatagagcgggatgcggcgagtgaagtcggcgacgacgcagctcatcgacgcgatgagaggtaagggggcggcgttgaggtacctggtctagggggcaggtcgtcgacggcggatgtgtccaagcggcggtggtgaggtacctggtcgagggggcaggtcgtcgacggcggttgtgtcctggcggtggcgattagggttggagaaaattgtgggggagaaagaagaggagtgggggagaaagaggatgagtggaattgtgtcccagcggcgtttgttttagtga

SEQ ID NO: 9143 - DNA, 445 bp, Zea Mays
gagcagcaaagttgtctagaagaggagctctgtgatcgccaaaccccgtgggaagggaggctgtgcaggggaggagtcgagtgttggagcaggagagaagggaagggaagagaaaaggagatgagctgtcctttgtgatttgaagaaaccagtcctgctgttggtaccatgggaatggaaggaagcctggtttgaacgagtttgaaggagctagaggctgcaaaagaggtagcaattaaacaacatgacggtggtaagactatctacaacagactacatatcatactccctatcttacactcttattttaaacttctctacataaatagtgtcgtctatagtacaaaacagtacaaaacttctctcgtcgtctatagtacaaaacagtacaaaacttctctctttttggctttcattgtagcttacgctttcgaattgcctctat

SEQ ID NO: 9144 - DNA, 598 bp, Zea Mays
atcgagaattcctgctggagggcatcaatggtgcgccggagtagaccatcagaggacgcagtgagaacaatgtcatcaacatagagtagcaagtatactatgtcagtcccacgatgaaaaatgaaaagtgatgcatctgtctttgcttcagtaaaacccaatgagagtaggtgagcagcgaaccgaccaaaccaagcgcggggagcttgtttgaggccgtagagggatttcttgaggcggcagacatgatctgggaaatgaggatcaatgaaaccagaaggttgaacacaatatactgtttcagacagagttccatgaagaaatgcattgttgacgtcaagctgatgaattggccaatcacgagcaagagccaaagtcagtaccgttcgaattgtagtgtgtttgacaacaggactgaacgtttcatcaaagtcgattccaggtcgctgagtgaaaccgcgaagtacccaacgagccttgtagcgagcaagagagccatcagggttgagtttgtgacggaatatccatttgctagagatgagattaatgtctggaggccggggaatcagatcccaggttctgttggtcttgagagctt

SEQ ID NO: 9145 - DNA, 802 bp, Zea Mays
ggattgctgcagaaaatttgtagatctatattttgggaataagtttagttaacttaggttggtcttttattgcttggaatagtgaggtttgaaggggtagaaatgagagttcagacggtttgttttgagttcagttcaaatggttgcagcttggttcagttttggggagcagaaaaatccccacgtctctgctatgctccacttgtagcagtttggattgaggccatggataaaagtaggattcgatgcttccagtgcctaagtaatttatgcttggtgtttatccattgccggtgcccatcctgtctacctgtctctggtttgtgtgtgacttaggttcactgctctaccgtggattcgatcgggcatggtgcttgtgccgtgaagccgcgtgtgcaggtttaagcagctgctggcaccatcgaggtccttccctgctgtgatcaggacaacttcagccaacacctatttctgtaactcgtggccatggttctctaggtgtgtagcgctcctccacgcgctcaggcgcgtcctccacgttcggcgtcttactgcccctcgtgcgcgctcggccttacctcccctgaccacattgctctctccaactctcgagtgtcatcttccctagcggctggtcgtgcctctatcctactccgacgttcaccggcgcgcatgctttgcccctgcttgccggtcatccctgccccagcgcctgcttcatccatggccggctctttgcgtcggcctcctctgcaaactccctggcgctcgatgctctctgcgcacgctggttccagttcgg

SEQ ID NO: 9146 - DNA, 577 bp, Zea Mays
ttgtaaatgtctagttgataatcttgccaagaatggaagagggaaagtgatagaattacatggacaatagcaggcttcaccatgggactaaatgtctcatcatagtaaactctaggacactaagtgaagccctagagaacccatcgtgccttgtacctatctagagaaccatctgactttagaaccatccaccttcctcttatgtgtccagactcacttgctagtttccacattactgtctgaggatgggacaccaagttacaggtgttgttggcaaggagggtctcatactcttcctccataacgggatactagtgaggatcaactagggcactgcgaacggaagatggcataagggagaccgacgaagaggtcacaaagaggacaagataatcaaccagggaagaaacccagcgacttgtcgtatcaccttgggttgacttggcgagggtcatggtgaagggggatgatacatcatcggcttggcctagcagtagggcagtgcacccattcacactcttcgctaaataaacatgcataaagttagtgtagcagggagggatcaacgccagcgagg

SEQ ID NO: 9147 - DNA, 604 bp, Zea Mays
ctctgtactcactgacagacatgttgccttgcttcaatgacagaaactccttcttcttgatcttcatcaatccagctagaatgtggtagttcctgaactgtgtactgaactctgcccaagtaatagtatcagcagcatcatgggcagcagtataagaatcccaccagtcagcagcaggacctgtcagatgacccgaggcataaagaactttctccctgtctgagcattgggcaatgttgagcatcttctcaattgctttcagctaatcatctgcatctagtggatctggcgaactggcgaaggtcggcggcttgtgactcataaattctcggtgcttatcacgaggtggaactggtggtggaggtggaggtggaggcagtggtacttgttgttgttgctgctgttgctggaattgctgttgtagctgttgttgtgcccttctctcctcgcgtatctcttctcgctcctggcgcaactcctggcgtatctcttctctttcctgacgcatctcctagcgttcttgctgcatctgagcccgcatatctgccatagtgtctgccatttgctgcatcatcctcatctaagctgcaatcagtgggtcaac

SEQ ID NO: 9148 - DNA, 477 bp, Zea Mays
gagaagtgcatcttcggagtccgacaaggcaagatactaggataccttgtatcgcatagagggatcgaagcaaatccaagcaaaatccaggctataatggacatggccccgccacaatcaaccaaagatatccaacggctgacaggaagactagctgcactaaacagattcatctcatgatttgtcgagtgttcctaaaaacgttgcacggagccaaggacttcacttggggcccagagcaagctatggctttcgagtccataaagcaaaatttatctgatctggcaacattaaccagcccagatctagctctacccctactcttctacattgcagcatcacccaacgcagtcaacgtagccctggtgcaagaaaggtgcagagaaggcaagacccaccgattcccagtatattttgtctccgaagcgctcaccacctctaaatgcaacatgactgagttagaaaagatagcataca

SEQ ID NO: 9149 - DNA, 635 bp, Zea Mays
ggcatggtggtggagacaacctggaggcggaactgcagcagggaggaagtccacgcctgggagcgatggctggagaagataaaggcccagcggcgacaggataagctagacgcgcgcgcgggatattttctcacaggcacagagcgacgcttcggatgacgacggcggctaggaaacaaatatcccctccggtggcagaagataggagcgcgcggggaggaaaaaaaatcaagccgcggtcagaagaaagatcagggagagagaagcggcgtggaggatattttcttttcttttaatttcaaatcgcagatatttttgggattctggtatttggatttaagatatgtttaaaaggttgaaccaaaattagttcgatagaatatttgaatcgggaattttagcgatgattaaaaggtcgacacgctattcatttccgcatcccattccccgaatctcgaaacggaaattcgagggctaacaatttgatttggcgaattctctgaactcggacaaaatcgtgctgttaattcactttcgaagagttaaactgaagcgagaagcaatgaactggattagacggactttggcttcgatattttaatctgtgtgattcgactaatattagccgaaaccag

SEQ ID NO: 9150 - DNA, 701 bp, Zea Mays
gatgtggacgttgtaggctaagtcatatatatgtaatggttagctaggagctctcacatgagaaatctgatgcttggctccatatattacatatgatgatgatatagtgttgaattggctgggtactataatttgacaaagatcaaatttgcattatgtgatgcaaagcaggcatagtgttgtagagaaccaaacatttgaatcttttaacagattttccgggtgtagcttgtccatacagacatttatcaaagtttgagagttattggtattcttatcatgtcaatagtaggttaactagtcgacaagcaccttacacacatagtacattcattgtgattctttcaatgtcaatactttctttgtgaaacgagtgctggatctctgctattcatttaaaagaacagttaacaccagacaactaaagggccaggaagagataccaaatggcatgtccacagtttaaaatactactctatttttgtactacctggaaagacgatgtggccatgtcatttttttctatctcagtattttccaataaaataacgcactataaaagaaaaggtccaacaatttaaccaagttctgatgaaagctagaatactagttccatctgcatgcagggtgggatctttatgtcttatactatatagcaatagcaaaatgaaacgtaggaaattatactactagataccaaa

SEQ ID NO: 9151 - DNA, 462 bp, Zea Mays
cccatcatcaccggctctccttccggtgtagtagccacttgagtgtaatatacacgccccgttttcttcgtattcttccccatagcatttcctttaggctgagttgatttcccagatccttgcggagtattagattgattttgcctaggatatgggcagtctttgatgaagtgtcccgacttgccgcaattaaagcacccagttgaagaactaggcaaggcagggaatcgagtgcctggggcacccggctgttttggggtagtgggagcattgttggggcggataataataggctgtttgaagggaaatgaaggtggacgagaaaaagtgcgattttggtttgagggtcgaatcacaaaccgttgcttcttcgcccggccctgattaggcctctcaccaccgaatcccttattctttccagaatttgtgtatttggcttcaacagataaggctgtactgaca

SEQ ID NO: 9152 - DNA, 469 bp, Zea Mays
catgactacggctgcaccggggtgaatcatcatccagtgtgggacttaggccagggcgaattggatcgcgggagctattggggcgggcttaattcctcgccgaagaccttcagcgtggtgaatccgcccttcgtcgtgttcgggtgttcttgtgaccttcacgagcggttcggggaggtggtcgtcatcgtggcgagggagacccgcggccgatgaacccagaatttcacaccggagctcggattcatggtcaagccgccgtgtgctgcagctagcttccctctccgccctccgacgatggtaagcacctccctctggttcgcgaacaccctctcttcgtttagcatccatcggatcggagattcgagcattaaggcctaggatggaggaatctgaccatggcgccgccgcatcctcgcttgcgccgctgcgtcgttgtactggacgaagatgaagccctctgggtcgt

SEQ ID NO: 9153 - DNA, 736 bp, Zea Mays
attcgtgtcaccggcgactggattcgtgcctggagttgatggatagcatcgcggggtaaaagatcatcaccccgtgcgctggacgccactctggctagctgtcgtgcctcccccttgcgcactgatccttcggataaggttctcaccgccgttaagccctcaccaccgtccgccgcatgtctttacctgtctaccgcatcaccgtgactcactctagctccacgttggtcgccggtgaagtcgccacgacggtagacacaaatccactgcgccaaggtccttctttatctccggccgcctgcatttgcccgaccaaattacgcgccacctcctaaaccccctataaattgatggccggggctgttgcgccgtataatcccgaagccatagcacccgctcccacccttaatcattcacctagctcttgaatttcaaactttccccaaactggtctccgccaccacgaagagcacctcgccgtggccagcgtgatacaggttagttcatccctgctgctcttgtgtttgagtgaccttatatgctcgtgatgctcgtcgacccatttgattaaactaaactgccaccaatcaccgggaacacattcatctgtccgcaacaccctcggttaccgtggccagagcgaatcgggtcaccatttctgaaattaagttaggggaagtgatcgggaatggttcaatcctatgttcgctgctcgggagcactagtattggccccc

SEQ ID NO: 9154 - DNA, 559 bp, Zea Mays
ttgcaactataccagataaagtttatctgatcacaataatctctagataacccaaacgcaataatctctagataaccaaacacagccaggagtacccccttttgctgaattgacaaatttaaagagcgacatgctaaaaagtttggtggagtacttgggtgacgtaaaacggagaagggggaaaaaaaggggggagaaatttaatgtggaatgaaaaaacggttggggcgcgggataggtgacacaggtccgtagccgtaggtcactgttcacaaggagcagcagcagtgcacatagccagataggataggcgccggggtgggctcagcgacagcgacggcgacgcgcccaacttccccggagaggccacgatttgtcactatcttcaactttttttttctttttcttctgtcgctctactttctttgctctgataaaaaaaaaacggggctcggtcgggcgtacgcgcagttgccttgccggtttgaggaacgcctgtccccgttggtgttggttgacgcggaaagccgtggatccgcttgccgtttcttctccaaac

SEQ ID NO: 9155 - DNA, 862 bp, Zea Mays
tttgtgttggtgggggtgtgctttttgttgaccgatgagatctcttggtgacatgtgtggatgcttcttcttgttgtatcggctcagctatggcctatgggtgttctgcctttcggggatggagggagatagggagaaaaaggttgtggcatgtgggcgcacaagagagagggccgcctaaaatctttgcttttggtgcaggatcatttgatctatagcagggtggaaagggaaaggaaattggagctacgaccatatatgcttgccaccatgccaatggtagagttggtagacagtaggcttcatttggtacagaaactaatgtttagtttttcaatctaaggttcatatggccaggatggggaggagctgataaaccaaaggttcgtcaggttcatgaacactgcctccatcttcttcagattgcaagcaacaaactccacttgtgcttgtgcatgttccgactctgtttcagtgccgctccactttcccagtggactctttcaattcgtatctggtcgggtttgtttctgtgcacatcaagcaccccggaagtgatgttccctacattgattgcatcttgttctattgtaacagccggcctcctctacggctccgcctccacctctgaattgttgcgcttcttccatcagtgctcgcgagaaaagggtaagttatgagtgcggcggttgtggactccagtcgatctagaagatgttttgcagcggtaccaagtagggtagaagatgttttgcagcagtaccaagtagggatgaatctggatgtttattcggatattaaattttcggttttctttcttcgattacgaatatatctcgaatattaaatttttggttttttt

SEQ ID NO: 9156 - DNA, 625 bp, Zea Mays
tgtcagtcgctactgctgactgaattatggccactagtgaaactgggagaacttggagatcaaattgtgaggaattgagtgggtagctaagtaagatatttataacaaacttgtagctggttctttggagactaatattgatgcagacaagtgaccgagttgttacatgaaaaatagagaatgaagctctccaaatcgcgctgtcagagtgtctaatgaagatcgccatggtacagtgaccataaagatctctggtgccatgatctcgacgccggtgatctgccgccacaattcgtgcccgtctgggagattcgtgccgcaggaagagtagataacgtcggggcggggtgaaaatatctagcgtggggtgaatccggtcgctggccgaaccggccatcgtgtcctgtcgcggtcaatcgcgctggcatcaccagagttcaccgttatctggctaggatacgtgcctcaaagccttaccacgtcgcagtagaccgccttaggtagcttgttcatcgcctaagacactgcccctgtaaaagccacgatagcggttgcgccggtgacttcccctctctccggccgccagcacacttccttcaaattggtcgccaccgtcgtaggactc

SEQ ID NO: 9157 - DNA, 1080 bp, Zea Mays
agcagtgtgtgaggctggcgttgacgctgagcatcggcgactgagggtcagcggggtccacgggctggctgacctagatctggatgtgcccgtcgccggaaggcggtgcctcgggtccgtagatctcgagtaaggcagagtacgtttggtctatgatgatcagaaccatgttgtcgaccatattccgtggatgatgctcgtcgccaaacagctcctggacgtgcggacacggcggcgccgtcgttattgtcctcgcgctcggtgctacggtaagacgtaggacaaaagcgaaccgagacattggtagagctagtgttgatctctttgtgatctctgatgatctgatactcatgcctttatattgaggcaatgttggtaggtatgggatcgtatcccgtgcggtctctcggactccgaccgggatttctgtgcggcctcggactccgacagggatttccgtgtggatcgtatattcgtatcccgtgcagaaggcgtagatgaaggcgtcgtaggtgtagaagccgttggcggggcactgcgtgttgtcgcgtttgggcagcatctggttgtacacgtcctgcgtgatgatcgacgccacgtccgctgccgccacgccgagcagcagcgccgccgtggcagcggcgcacgccacgagcgcaaacctcgccatgcacgtacttgcttccaatagctctcaacccttcgatcgcgcgttgctggaagggctatgtgggctagctgtctcgatggcttaagctgctgggtttgcagcgctagatttataggtgtgacatttttctcagccaatagcaagatgcttcattttagcggatatagttcttcgcacgcatgcggtgtctagctagtactccacaaaatcactcttctaaaagaaaacaacaaaatataacacgtggtttctatgacgtctagaatacgctccaagactatccggtcagtgcggcaagaatttcttgtgattgcggttcttggggatgactgttgaaccgcggctaatttgagttctcactggttgtgtgtatctctactcctatatacactcttgtatatacaataatt

SEQ ID NO: 9158 - DNA, 463 bp, Zea Mays
atgggaagctggggtggtttgtatgaaggtggccatggggtagcctacaattctgtagctagggggaagcatcatcaaaagcaatgttatcatgatgaaaatcatcataccatatgtcatcatggcttgggctttctggacgaagttctctctgttgtggcttatgcccttgctcgttgtcttgtgtgatgtgacgcatctcttcggcggcttcatcaatatttttctggagctcagccagccgaagcatctattcccttcttctctccatttgttgatgaatagcctctagatccctgatttcttggtccaactcttcttcttgtggtgttgggctaatagcttttcttttctggcttcgggcctcccttagaaggagcccatcttgattggtgtccagcagtgcaagggcagcccgtggcgctgctgtattcttcagcggcatgatgaaggtagttgttcg

SEQ ID NO: 9159 - DNA, 616 bp, Zea Mays
cagaaaaactagaagatcactatagagctagagcaaacaaacagcaagcacacaaaagagttacacggacttaaccgtaactgtttcaaggtcgtggttttctgaattctggtacaatgcatgcatacataagctatgactatgctaattttccaaaacaaaacaaataacccaatttagcaaataaaggaaactgaaccttgaagatgcaccggatcttgatcactaataaagctttgtgattgacccactaggtaaggatttatctattgcagttgcaggcctgatataggcggaggttgccgcacaagcggtgttaaattatctgagcagcagttaggaagcagaacagaaccctatgagtacagtaatatctgtgagcgagggagcagaagagggggtttaccaactacgttaactttgggactgaagggctctgttgatatctcctccttgtagctcttaaacccttcgattacgacctgaaccagacagatggccaataagccaacaagcttacatggggagaaaaatatcaccaaattgtacccagggcagaacatcttgccttctttatatacattttctaggccgagacaggtcacgctaccatgaa

SEQ ID NO: 9160 - DNA, 598 bp, Zea Mays
tggagcagcaccgttctttccactagaattgccttgaatattggatcgcaagcctccagttgaaccttttgtcgctgaggatgcaacagtaaaccttgagatcgatttgcttcctccagtcatggttcgtgcaccatatgacaagggcttgctgctcttagcatcttgttgcagctagcgttcagctttggttgcttgatgtaccaaatcaataagactttggtacgactgaaactcatcaatacaccgaatgttgcggtgtaacccagccatgaaacatgcaatggtttgctcttcgtcttcatacacattggctctaatcatggccttcttcatcttctaataatactcctcaacagagaaacttccttgcctcaaattctacaatttatcaaaaagatcacgccgataatggttcagcacaaaacgaattctcatttctcgcttcatctcttgccaaataataatagggtcctctccatcttcttcacgatcactaagaagttgctcccaccaaatcagggcatatccttctaactcaagagatgccattgcaagtttcttctcctttgaataattatgtaggcggaagattttc

SEQ ID NO: 9161 - DNA, 658 bp, Zea Mays
gaaaacccattcatgagatcacacagattctgtcagcatcccaaaaaaatttcactgaacattagcatctaacacatgacattactttgtatgagcttcaaaatttttttactaacacaaaagagaagggaccactaccttgatctatcgtggtatcatagtggtatctataataaagttatagagtatcgccgcacagtgaatgggtaccatcaaaagtcatgcacaaactgaaattggaacagttcaaataggagttacctggataaaagtcgtgcacaaactcgcactgagcaacccgtcgtcgtgtctccccgacatggcacacctcgtagaggttagtttctcccactctaaaaatgttttgtgtttgtaggtcacggtgttggaacctggcgtgcgcacgtgtcgcagatgtgcattgcagatgttcgttcaccagcgaacctgcagctgccgaatttacagagaccagatgtgagcaacgacgtagggaaatagggctggtgggggcacgtgggtaacttggtcctggagcattggagaaggagcataccaaaaggaaaccaacactgtcagtcaaaaccaaatctagataatcatcatgctacttctatgttttatgtctgttttgtctgctatcaagtgttcatgcaaa

SEQ ID NO: 9162 - DNA, 404 bp, Zea Mays
gttaaaaaaaacaaaaatgaagcaagtatgatgtagcacggcagtgacggcacggcacggatgaaaagcgaacgtgggagagcagtagcaccaacaggataacttggacagcaaactgccacatcacaggtgttgttcacacctcagccttcgccatcatcgtcatggatcacaatacaaagatacccgtaccatcacaaatcttgaaggacaaaagcgttacctgttcatgttctaaaccacgtgtattttcattagtaatcagcaatccacctagcaggtggtataaatagctgtgtaaaatactgttttataatgtggattacaatgtttgtagagttaagtttaaaacataacttagatgtttgtagagtgaagtttaaaacataacttaggagaggtgg

SEQ ID NO: 9163 - DNA, 488 bp, Zea Mays
ggctaccttcatagccgaacggtgaagcaccctgacccgccagtgcgcccccgacaatgacgtggatgaagactgacgtcggcggtcatccccccattccacttcctcccggtggtgccccaacgagcaattcggtggggtatgcgctgctcgacagaaggggatacgtggcacggggaggtggagcagagaaggcgagcgcgctagcgccggtgcccagtgcgacggaggagctcagccgccgaagaggtttggcatgggacagggagacacatcgtcgagcacaaaaaaatcagcggtggcagatcccggcagcaatttctctcatctcacacaggcttcctggtgacggcgcagattcactcgcccgttgtggtgcgaggttccatgacgactctggtggaccgaccagaaattcgacgccccgggttgccgtcccgtcgcagcaaggccacaggtacgagtggtgcgcaccggcggtcacaaag

SEQ ID NO: 9164 - DNA, 764 bp, Zea Mays
agcttcggtaatttttcttgtaggagcaggactcaaggtttttgttgtttctaacacaacatctagcacattcgccatccttctccttttaggagttgcggcagaactcttttgtgccttcgacactgttgcctctgttgaagggctcaaaatctctggcatttttgttatttctccaatttttgacccctcagccttatcagccgtcgcctcaactagcttaactgaaagtaacttcggcattatggccggctctccagtgttctgcgcaggtggaacattttcttttgtttcggtagctgaagaggccccttcgccaaattcaggaatcacggccggttcgatgtaacgcggtcggtgagtcagaaccttcaacttttttccctttggcacatgctcaattgtggtttccgaagtagctgctttcctctttttcccctgtccccgtagtggatagcggtagtcggggtaaatgaagccaatggcgtcaaaaactctgttcagtctcttctttccccgacctctgaaggctgcagatagtgcattatcttctgccttggaatatgctccaagcagttcatcacttgtagcttcgatacacttcagccagtcatcgtttggttcatcgaacttatccccaaacctgaatgtatacttcagccggaccaaaccaccttcgctagagttagtgatggtctccttcggcatttcccaactttctacaagtggccatactctgaaggctatatgttcttgaattaaat

SEQ ID NO: 9165 - DNA, 371 bp, Zea Mays
gtctacagagggaattcttctgtcggtaacccgagttgagtcagctaggcctcgatacagataagctgggtatgccctgtccttcaacggctgaatattcttgaagacaaaatcagcaaccacagcttcagcagtcagacccctctctttcagcagtccaacttcagctagcaatgcacctgcctcagctacctcctgatctgtgggagactcggtccagcttggggtgcgaacatctggctgtcttcccgatcggggggagagaatttccataattctcaactatgaaccactccaggcgccatcccttgatactgtctttgagagggatctcgagatactcagtcttcctcccgcggcgcatctccaag

SEQ ID NO: 9166 - DNA, 440 bp, Zea Mays
aaaagaagtaacgaagattggctcaaaggagccaaacttgggccagactgggcttcatcagacagtttgatgtgcaccgcacatgtccggtgctggcctagtcaactggtcgctctcggattttagctggactcgcttgctaaaaatcaccgaacaatcctatgtacatcggacatgtccggtgggccaggcagccaacgtctccccagacagcacaatggtcgactcgctagccacgtcggcgtgacaacgatcgggaggagtcaccggacagtctgatgggccatcagacattccagtgcccacccgaaaaaggaatgcaaccaatcagatgattctatgagcgttgcagacaaggatgtctggtgtgcactggactgtccggtgcacccgcgggcagaagacaatctccagtttccaaaggaaggaggaacgactcc

SEQ ID NO: 9167 - DNA, 1051 bp, Zea Mays
gttccaacaggcagcaaacatactacatcggatcagccttcgagataaggcctgcctcccaaaaattaaacaacatcattttcaactcctcaccctcaaaaagattatgcaaatccccctcaccaatactcgtcctgaacgacgaggacagcaaatctcgttggccaccccgatctacgcgaaggcgggttcgctccatccccatcggacaacgcctaccacttggcgacatctcaccaacgctatgcttcgacactacttttcgtcgtcgatgatcgatcctcacgccagccgggggatcaaacgcttcgcacacctccagccgcggcgaggactctgccgcagccacatctaacgcagcaaaataatccaaatcttcatccgacgactcagtccaggaaaatgggctcccaaactcaccaccatcagatgaccaagacccagattcagaaccagacaaactatcattagtaggcaccgcatttgcggccaccacaaaattagtattgtcagtaggggttgctagcgcaggcctagacgtcggaacctgcgcagcaaccgactttcagttatacacaaaaaggccctaaacacaatacccctaacacgaccccgccacctgcgaaggagcggtcggcaccgaagggtcttcggtggtcatcgcagccgtagctggagcgtcttcgctaggcaggatggtctccgccgcaggatcctcgcgagggccggtcggcggcgccggttgttccctagcctccgtcttcacatcttctgcctgggtctctgagctctccaggcctctgaagtcgtcgacttcttcatcattcgccatctacagaaacatcatcaaatataaatatccataaaaaaaccatgcacatacacacatcacgcacctgctcaagcgcccagtccgacctctcccaaacagtatcgcggccatgctggccccacatcatgtcgtaaagagccccagcggaccgctttaacacctcgtcttcaacctggaatatcccacggtcgaagtcctcgtttgatcggtcaaacactt

SEQ ID NO: 9168 - DNA, 854 bp, Zea Mays
ctaacatctgagcatctgctatctcacttgaggcattgacagactccaagaaaaatgtgccagctggactattgacaagaaaattgatcaagtgccgacccctcctatctgtccaaccatcagacataagtgtgcaaccaaatttagtccaagccaactcatgagtcttttttatctcatctacactattctttgccttctcaagcaatggcaccgatatgaatgtttcacatacccaggaccatattgcccaaccgcttcaagcatgatctcaaaggcccttgagttgatgacattaagtggtaagccacactcataaataaaatcagcaccatacatatatgttctttccttctcctccttcctctttcgttgcaatgtagtttgagtgttgcccttgcaatgcctctcacgaaccacatctccaggtgctttgcgaagcgtggacccaattgacttagaagacttcgatgcgtgttgattatttgggcttgcttcagctgagagccttctcttttgggttgttccggaactaggctaaacaaccgaatgagatgctttactttccccttctccaaatacttcatcttcatcatctttatcaccctctttatcatcatccaactcaataggcttctgtctagcattcttcttcaaataatcactcatctcattgctgattgttgatattgtcttcgggcacttagcaacatcaccatgaccaccaacaaggtgctgcttcaaccttctaacacctgcatgaacaatttttccacaaaggatgcacttcaccacatcttttttgtccaaatccttccaataacaatagttccatgctggatccttcgattttg

SEQ ID NO: 9169 - DNA, 854 bp, Zea Mays
ccacgacccatccgctttccggaccaggagaaccggggaggagtacgccgatgagcattcccggatgatgccttgctgcagcatagcctcgcattgtttctcgatctcatccttcaacagctgcgagtaacggtatggttttaccgcaactggtgttgttccaggaagaagtgtgatgcgatggtcatggcgtcgagggggtgggaggccgcgcggttcgtcaaagatgtcggtgaaggagtcgagtagggtcgtcaggagatccctcgtgacggccagcgcagcgagctgcggctgagggccaccgatcccggaccagcggacaacacgttccttgtgccagaacgccatggtgaggtcggcgaagttccacaagatcggccccagggtacgcagccattgtaccccgagtacgacgtcgaagccatccatcgcgagtgtgtagcaggagatgtcgaaggtgtccttgtcgatggagatagccccacctggcggcatatgcccgtgctggggacacgatcgctgttcgccaccttgacggagaggccggtccggcgttccaccatgagccccagcttggccaccagtccctcttggatgaaggtatgagtcgatcccgagtccaccaaggcgaccagggagactccgttgatgacgactgggagtttcatcgtgttgcccacgtcgatccctgttagggcgtgcagggagatccccagctcttcctgtacggactccgcgccggcgtcgtcgtccatctcgatgaggaaaatgcccttgcctgcacacttgtggtctgtcgtatatttctcggtgcagtgatagcactcaccattggcgcgcttggccgccaa

SEQ ID NO: 9170 - DNA, 324 bp, Zea Mays
ggcgagttcacaatctagtacaccttggtgtcacacccagaggtggtgaccacgcttcggccacgacacgcagctacgttggcatcgcccacttctccagtggctgctacgacttcatcccctccaacggctacggctccatcgtcttcggcaactgcgtctccatcctctacgacggcttcgacgtcaacaacgcccgtaggaccgacgatcgagtatgctacaccgccaaccgtggatgtggaggatttggacgtggatcatgaagatgacgtaccccttcggttccatctcctagacaaggtcataggaccggcgatgtcc

SEQ ID NO: 9171 - DNA, 421 bp, Zea Mays
ctaatatcttgccattcaccttgaggaaccggaagtggttgcaataaaccagccgggtggactcgctctcctttagccttttgacaaatttgacattgtttgacaaaatcctccacactagtcttcattcctttccaaaaaaacaacttcttcaatcgaatgtaagtcgcgtgcacccctgagtgaccacccatggcactatccaaatcaaaccgcccttcctaatgactcctttagagagagagtagccatgttcatccgggctgtggacacacaaccgagccagaagtgattgtgcagccgagtcagtcacataggaattcgtaacttcctggacccagagaggttgaacttcactgactgctgtcaatgccatcacacaacccacacgctacagagcatcagctactttgttctcttt

SEQ ID NO: 9172 - DNA, 751 bp, Zea Mays
gttaacttctgactgaccatcggattgtgggtggaatgtcgagctcatctgtaacttcactctagccatggtaaacagttcagtccagaactggctagtgaaaactgtgtcccgatcactgactatcgagcatggcagaccatgaagtttgacaatttcgtcaaagaaggcctttgcaactgatgcagctgaatatggatgccccaaagcaatgaaatgaccatacttagagaactgatcaaccactgttagaactactgacttgccaccaacctttggaaatccttcaataaagtccatcgatatatcagcccacaccatagagggaattagcaagggttgaagtaggccggctgggtgaagatgctgagtcttgtgttgttggcaaactgcacagctgcgcacaaactccctgacactttggagagctttagaattgtaaaatgatgtgcgccacctgtgagctttctgcacgccttcatgaccagactcgtgtgcttgggcaagaagtacaagccacaaagtggatgcatccgggatgaataccttgcctttgaaccgtagtaagccatctgccattgtccactcaggacttgcttttccatctgctagctgaacgcggattgcagccacttgagggtccgagtcagccttagtttgcaaagtagagaagagatcaaaggaaggggaagaaagggtatacacagttcttgtatcttcctctcggcgagacaaggcatctgctacgcca

SEQ ID NO: 9173 - DNA, 432 bp, Zea Mays
ggaaattatccagcgccccatctggtctcgcttcggccttcgaaggccgaaaatgatgattgaaaataatgatgaagcatgccaaaaggctttcagcaatgtttgtgctttcattggtacaagagacttaatccaagagcacatagcctatagagtgtggccacttgtagatagttgggagatgccgaaggatactactgctgggtccgccgaaggtggattagttcgattaaagtatacctttagattcacggactggtttgacgagccaaatgacgattggctgaaaagcattgaggctactagcgacgagttgcttggaacatataccagggtcgaagatgatgccttgtcctcagccttcgggggtcggggcaagaaaagattgaacagggtttttgatggaattggcttcatatatcctgactactg

SEQ ID NO: 9174 - DNA, 1300 bp, Zea Mays
attttagcatttttctacatttttctacatatttctaaagttttcctgaaaaagaaaaaggaaaatattcaatagtgttgggctgattccggcctgaaccggcccaacaacgcaggaagcgcgcgcccgcgtccgcgcgcgatggcagaattgcaccggggtcctcgcgtctttatctaactgcgaacgggttcaactactattccaacgggtctatgacgctttacaccgagccccccggatttctaattctttacacgcccaagtccacgacgacggcagcgcggggagcactccggcgaggttctggaccggccgattggggctatggctgggttctccgagcggcggccatgaaatcggggctaccctgaccatttcccccaacctaattgcagctaaaactaactacgtagctctggccacggtggccgtgagcatggcggttaaagtgttgcgttcccggcgatcccaggcggtttggttcgattaaaggggtcggggagcatcgcagatgcatgagaacgcttaaacaagggagcagaagacgggaactgaccggagtatggctggcaacggtgaggctcgtttcacggtgacggaaactgaattgggggaagtgagcgattctctggctatgggggctaattggagacgggagtggtggctatggctttggtatgacctagcgcagctggccgggggctcaatttataggcggagcgagcggtggcgcttaaattgatgatggcgcggtggcggccggagatgaggaagaagcctggcgcggtgaatacgtgtcctatggcgtggcaataactccggtgatcgatggacagttggagggggtcgcggtgatgcggtggcgcggttaagacacgcggcgcacggtcggacggtggcggttcaccggcgagcctatcgctccagccgtaaagcagaggggaaggcaggggaggccgtcggagtggtggccagctcaccggcggtgaggatctttaccgagccatgtttacccgatggccacgacgcacgaatcacggcgagcggtgatcaacggtgatggacctccggcggcgagcaaagggatgagatcttcttcagttaccctttactgtaccatggccagtttcagttaaatgaacctgacagcccagtttgaagcccagttttctctcgaattcatatggcaactcatccgagggtctgcaaaacaagtgtagagcaatacaccatctgcaactttgtaatatgatgatgccacaaaaacccattggatcaagctggaatttaagcttga

SEQ ID NO: 9175 - DNA, 677 bp, Zea Mays
atgaacttgagccactgttcactctggccgccgtgtccgcctagctcacaaccgatttggatgaactcaccggagttagccacctcgtgaccttgcgccacgtgctttggtgctttaaccacggtgcactgagtcaccttagcccacccattcatcgccggtgagcttgccacggtaaacgccaccaattgcttgcgccagtgcgcccttttctctccggccgccaccgcgtcatctcaaattcacgggccaccgctcaagggccctataaattgagcacaccctcggctccgctatgtaattatgcacccaacacacccgctcgtgcctccaattactcaccagagcccccgaattgctcacttctcccaaatcggttttccgccgccgtaaggggggcctcaccgtggccagtgcgctctaggtccaatcatgtcctctgctctcttgttttagcacccttatgtgcccctgatgcttctcgacccgaccgattaggctagaaccccttagatcgttgggaacacttcatgctgccattgatcccgctgtcactgtgggcagggtgatttagagctcaaatctaacaattaagtgaggggaaatggttgtgtagggttgaattcggtgtccagcaaagaggagggctagtcgttgcttattctggcaagtacaag

SEQ ID NO: 9176 - DNA, 313 bp, Zea Mays
ccgaggatatactgttagtctgatatactggttccatcaataagggaacttggagaaaaggtgattcaaaagaaatcgagcccaaaccctagctgtacccggccgccaccgccggcagcctccccatctgctggcggtggtgaaggcgatggcggcgcctcatggcctgcccccgtgtccctcctttcctccccaaactggaaagcagaatgtcttataactgtgaggtcccatagtctttactgcctacgaaggacgaaatttcggagcaggatcgggccgggaagcacgaagcagacagaagtgcactttc

SEQ ID NO: 9177 - DNA, 634 bp, Zea Mays
tactcctgcagtcctagctgtagcgtgggcgcagccgcagccgcgcgtggcgaatcagaatcatgcacggctgcagccttcacagctctctgcatgcattgcacccggcagcaacgcaagatgcgatgccaattgcccacaggcctcaggaatgacgagcagagcagctagctagctagctaggcactagccaccaggcaggcaagccgtcaaagatctcatgagccgatcgaatcgaatcggatctccgtctcctggccgatgatgatgaatggggtggcgttctgttaacacagaccagagcaacaacacgagtcggctcgggcgtacgtgcacggacggcctgaacgacgaccgggacgacaacaggaacgagacagaaacggccacgcggcggcggaaagccaagcaagccccagcctctcgaccgccgcagctgctgctgggtccgaccggaccgaatctatcggtcaggcactcagcacagcagcagcgatacagtggcagagagtagggacagcgtagctgagcgcacggcgtcaggacatcggatccctttacgcattgatggcccagggcactgtgtcctgtcctgtcctggtgtggcagactaggctgaggctgcccctgccgg

SEQ ID NO: 9178 - DNA, 749 bp, Zea Mays
cgggagtgaaagctggcaaggcaagaactgcttcagccggcaccggggattcatcctgctagaactagactccctgagggataatgatatcattaaattatcccaccaaatcgtcagaaggaaggtcttcaagacccgataactgataactgaactgctcttctgcattgatcacaacgtttgcattgtttgtgttggccactggctcagggggttgtgcctgctgaactggccaagggtcccaaccttcatcatcattgatggcaacatcttcctcaacattgttcccttccatgggaggaatgttgagatcgatctgaaaattggctactggttgaccctttccaaaaaaactcaactggaagttggtgcccatcatgtgggtagggtggcacgggatcctcatcttgaggttgagcaccaagcataaattgttgcacgatgtcacattggacagtccatgaaactccttggaaaccttcagccaccgagaacacgatgaactgtggcacttcctgtaaagatgtcactcgtgcccggaccaacagcctagttgcattattttggtcagggtcccacatgagaaccatcctaaaggctccgaccgcattttgaatgtgttcatgagtccagaagtccagaggaaaaccaagaagtagaagccaacattcatggttaaaggttagggcacactgattccagccctcattgtgtcgaatgacagtaaaagagaatcccagggcttgctg

SEQ ID NO: 9179 - DNA, 589 bp, Zea Mays
gggggatgtaatttgtaagcttcatcaatttgttcatccaggaataattgctcttgtgagtaccaagaaaaactgtcctagtttcgaaggttgcttattctatttttatatttaacctgctttaattgtcatgctcaggttataaagcctagtgttgttggaggttttgagaatgcagctcatattgccaaatgggcgcagctacatgataagatggccgtcatcagtagcacgtatgagagttctataggtttggcatcctatatacagttagcacattatgttgaccaacagagctctatagtctccagaataagaaacaaagatacatgtagagccactgcacatggacttggaacatatcagtggttaagggaagatgtatcagaacaaaagttaaagatccatgcatccccacttggtgacggaatccgagccacagtagaagatgcccatggttatcttcaccatttaaacataaacaatgagaagataaaaagtacgtatggtgaagaaaaacataggtcatattctatccaagttgatgtggacgattgttcttatctagtcaaacttcgagaggctggtg

SEQ ID NO: 9180 - DNA, 331 bp, Zea Mays
ttgttttcaagaatattcaacctttgaaggatagagtctactctgcctatctatacactggggtaaatgaccctactcgaattaccaacaaacagatatctgaggaagacatgttgagtcgagttgatttgatgctgagaggcaaggtttcgaatgccggtgctcccttttcgtattctgcctggaatcttcccccatagagcccttttccaagtttgtatccaaccctcctattcaagacggaaattccgagccatagaatgcgaccctctctagaagatattgaggccttcattgctccataccgaaatctccctgaagaagaaagaca

SEQ ID NO: 9181 - DNA, 1030 bp, Zea Mays
ttcagaatggaaaagaaaatcattcttgcgctcgggtccctggcttcttttcccctacgttcttataaacaagtcctcgggctactattcatatggaccactgacattgcaaaaaccccctaggcttgtgaacattccaacccgcgctccaaaccccatcgaaacagtagccgcgacagagaaaagggcgtttggacttaccggcggcagtctagttccagcgaaggggtctcgaagataggggaggtcctggcgaacccattgatggtcggatggcgatcggagtcgtcctggccacgcgcgggggcggacgagctcgtcggcggcgaggtgcttggcctacacagggcggtctagttcaattggacggctcggggaggttcactagttgacgtagaagctatgcgcacaaggaatttggcaatggcgcagtggcttacccaggtcgcgtgctccgggggcggaagaattccagcaaggacgatctagcgtttctggtgaggtcgcgctcggtctgaaggctcaggaagcttcacggggctctagggaggttgaccgagcagcgggtttggggaggatgagccggagtggctggtccacggtggtcgcgctggggtggcttctagcgggcggcggagctctcgtttccgggcaagtctctaacgatcaagtgcgggtaaacttgagggggtgaggcaaggatgcccgaggggcctggtgacttttatagttgtgggtgcggcgaggcatgcgagcggactgaccgtgcgtgggggtgagcgcgcacgcgggttgggtgaactctggcctgccgaccagagtcgaacacgtggtggcgttgtttctgcccgagttctcgcgcgtgtagtcactcatctgggcctgctcttgccttggtcagtgcaaaagacctcttcccctcccctcaagctacctatcttgtgtggtggtcaaggaattttgccgactggatccagagatatggtgcactcaagtgggatctgtctcacagcccaaacccgaggcaaat

SEQ ID NO: 9182 - DNA, 482 bp, Zea Mays
gacgggagctgcgccgctgtgattgttaggccgccgtcgagtttgtgcactagggatagaagacgacttctgggccgcaggatcataatcggctgatcgacggacgaaacgggtctcgggtgtgttgggtcgtcgatatgatgatgcacgactaggattggggttacgaaccgacggggtctgtttgggtcggcaccgtcggatggtaattggaggcgttagattatatctcggttattttaaatcctgaacgttggtgggagatctaagggctagcaatgcacatcgagttataaccttcactggtgtaatccgagccctcagctggtgatcggacggtcgtgaattgtgcgtaccccttcggccaggccattttgcataacagtcccagtgttagatggaaaacaacccgccgtccctctcctgttgaatgtaatcagagtttgatccctggattcttatgaaatgacccctgagctctt

SEQ ID NO: 9183 - DNA, 508 bp, Zea Mays
ccgatattacaggactaaaattgtctcctaatccaaacgagctcttagtttccctcgtaccaagaaccaggtataaaaaacagactatctttagaagcctcttacatttcgtttcaaactccactcgataaatgtctacaacagtgttttacatattcatatacacaatctgatggccaatgcctaacaacttacatagtcatatgcacaatctgctggccgaaggtccatactacctggtctccttgagtttcctataaattgagctgggtcgtttgtattgtacttcaaaaaaggactagaaaagattagcatacatgtttcgcaaggcttctcagccaggacagtggaccgcaggagccaagaggcatatagatattgaacggaagataacattctcgtagtcactgcagctagagaaacacatggtttgccaagggcaaaacgcccgaacatcataacaaccagcaaagctcgtgcacaagcttccgaatctgagctataatca

SEQ ID NO: 9184 - DNA, 786 bp, Zea Mays
gcaatgctgggactctcggtgtcacagggcacgacgagtgagatctacgcagtggaggggaaggagctccagcatggcgtgatgaatcggcgagggcacggcgcatcggctctggcgacgtcatggcttcaggacacaggtgcaaattctgatgaactgtgacacgagcagaggacacaacaccgggtcgctagcgcggagcacggcaacaaagagacggtcgacgagcggtggctgcacgggtcaagcgtgaacacgacacgacgcgtgagcagcagcagggagagtgcgcagagaagagcgggagcagggcgagcggcagcaccaggagcgattgagcaagcgcaaaggattgcaagcatctagcatgggacgaggttgcgctcggcgtgaggatggcgagcgagcaaggcacaggcgcatcagcaccaggcgcagttgagccagcgcagaggatggcgagaagcacacggttggtgagtgaggcttacatagacaagtaggggagggatagaggcgccagcttgaaggagccttgaaggccatcaatggaggtaacagcgacctgagaaactgtcggttaatgaaggctgcagcagtagtggaggggagatgaacgagcataggcgaccgctgctggcgattgcactagcgacgcggggagccgagaggacgagagcacaggtagtggccggcgcatgcgattccaatttccaagcgccggcagcgcatgcgagcgtcaaagcgaacggagagcgcacacgaaatgattggcgtgcgagaagc

SEQ ID NO: 9185 - DNA, 305 bp, Zea Mays
tagctgcgtgcatctcctcgccggtggccctcgcggcaaggctggcggcggctccgacggcgtcacgaagcgggcagcagctccggcaccacggtggactaccgataaccggcgtcggcaactggctgacgttgggtgttttccggccgtcgcatccatgcaaccgctccaaaagcttctagaagccgctgccgccacctctacccctctcgccgccgcgcatctccacgctaacattctccgctcgggcctcctccactcttcgcaccacctgaccgcgcacgtcctcgcgtgctaccctccgg

SEQ ID NO: 9186 - DNA, 812 bp, Zea Mays
atgtaacacaactaaagccctttaccccgtcatataccctagtttatttatatttctcttcaatagtggatctgactactgactagtgttgatgtgcatcttgtgaaagtggtggagcgccggctagtgcgcaaagggagccatccagtggtcgaagtgagagtggtttggtctaatctctgctactctataagactctaacgtagaccgtgcaccatgttctgccatacccctctcggacgcgatgctcgcctcgtgatgtccgctgcacctccgcgtcctcagcacccgccttggatacacatacaccccttcctacctctgcccgttgcgcccacatcggaggcaggcatgccaccgcacccctagtcccctccctcgtgctccccgccgacggatgctacgcccacgccaatccctcgccatccgtaccctcacctcggccatctgcacgtcgtgcacgccctacgcccctctcccatgccttccacgccttctcccccaacacagctttagcttcatctgcccgtccacacccacgcgtccctcctcgtcaatgcgcagccgccaatttctcctcctcctcccccgtgtgcggtggatcctccacgaatttggtgcctcaagcacatggtagcgggcccatacctttgcagcgtcctcgcagctgacattgaccccatcatcccaaacctcctctttttcggcgcctcctcgcccacgatcaccgtcattgtgcttcacgctatactcccccgacatctcgcatatggattgactatctcaggcccccttcctccctctcaccaaaa

SEQ ID NO: 9187 - DNA, 285 bp, Zea Mays
atttaaaatgagaaagggtaaacagaaaataaaaagggaacttacttactcatcttgggccaaatccactcactcggcccacctctgtttcatccagccggccactctccagactccacgccctattgtaagctcctcaagcagcgcgtcactggcaatcgggcccgggccgtcagcgcctcctcccttctacccacgccgaaatcctgtccgcagaagtcgctcaaccactcaagcttggtggccgccatggccgtcgccggaaatctcggggtcttcccttcc

SEQ ID NO: 9188 - DNA, 313 bp, Zea Mays
cctgcggtccccgagcatcatccaagccccccaatcggagccatcgatttctggattgacacctcgggccttatccctaccaacgccacaccggcagctgcgcacaccaacatgaacactgcgtcgccattgccgtgcaatccgtccacacgatactcaaccctatacttcaagctgaggagagcgatagcgaggaagcgaggatgcagagttagcgaggatgcacccacagtgaagagtggaagggaggatgcgcctacgctccgtcgatcaattcccagctccaccgtactctagccttgatgggtgcggt

SEQ ID NO: 9189 - DNA, 458 bp, Zea Mays
ccaaggggcgaggaggccgactcataataagtcggtttcaattttgtgtcgaactccccctgtgaataaaaaatgcagttctttggtggttcactgttgcatgcttttgtttgcgcattagcggctcactggcattttagaggtaatgcctgagtgatgcttgtgatctccgcttttccgagttatgatctggcactcttgcgctcgacttatcgagccaactcatatttatgctgacgtatccccttgagttccgaaccctaattctcgctttttcctctgccacttctctgtttcctgagctcttgagcctgctcgcttcgcttgagagattgcgatggcctccaagaggaagagacagagtgtttttattccaattattccgcccatcgatcctaacagccaacttccgtttgccgacaaccacatatccggtgtctctgagtctgacctcttgc

SEQ ID NO: 9190 - DNA, 580 bp, Zea Mays
gtcgatgatgtggtgataaaaacagaaaacttcatcgaagatttgtagctggtcttcaacggcttgaggcgatactggtggaagctcaattcggagaaatgtgtcttcggagtaccagcagggaagttactcggattcattgtcagccaccgaggaattgaagccaacccagaaaaaatggaggccatcatgagaatggaagcgtcgtgatcatagaaaaaggtacagaggcttactggatgcatggcggtcctatgtaggttcatatcaaggctaggcgagaaaggcatgccgttctataaattgctcaaaaaggtggacaaatttcagtggaccacagaggcacaggaagctctagaagcactgaaaaagttcctgactacaccaccaatactcaagccacgacgccgagccacgccgaatcagccagcagaagatctgttgttatacatctcctgcacgactcacatggtaagcaccacgttagtagtcgagcgggcggaggaaggacatacatatccggtgtagcatccagtctacttcatcagcgaagttctcgggccctcaaaaatgaagtatc

SEQ ID NO: 9191 - DNA, 880 bp, Zea Mays
taaaattggagctcactggtgatcgactgggagcaatactgggtggctgggtgtgtgatgaccttgcggagctcacggcgggctcaatttatagggagcgaccgcgagaacaatgaatttgagcggcagatcgtgatcggtaagaacaaggtgagtcactggtggccgctcaacgtggcttttaccgtggcggcacctccggcgatcaccggacatgcgaagcacggttagccgcgacgtggtaaagcatctggacacgcggcggatgacggtgatggttcaacggcggtgagaatcttatccgagggatcggtgagcaagggggaaggtacgacggctagccggagtggtgtccagctcaacggcggtgatgatccttctacccaagatgttatccacttgccgcgagcacgaatctagacgccggcgacacgaatcacggcggagatatcgttggcggtgagatctctgcactggcagcctgatccaattcaggttactgtaccatcgcatcccacatcagttagcctgacagagcaacttcagggcaaattctctctagatttcgcatgacaactttatcatccctctgcaccaaagttgtagagctacaaaccagctataattttgccacagcagcagtagccaaattcctattgaatcaagcttgaattcatgcccaaagtctttgtggttgcactgtcagtctgaaattcagacttcaacagcctgacagcccatctttgggtataattttctccaaatccttctcaacaactatgcttactctcttaagcaaagttgttcacctttgataggtttacaaatttgatgtggtgacctagggtaaattctcactattttggaagatatagagctc

SEQ ID NO: 9192 - DNA, 655 bp, Zea Mays
caggggtgcaacgtgtccgcgactagagtcgcatatcggccgacctacaactatcatatattgaaacgaataggtacgcaagatctaatctcaaccgcccagatcagatctaataatcgtgatttaatgcaagcgaaactgtatgagatgatctaatctcatccactagtcacgcatccgacgacccaaactacccccaatgaaccgttatatcatgttttaatcctggtcattcatagatatattaatagctactggcaccccacccatctccctgcctttccccaccaccatagggtggcgcctccatgccgtacgacggagggcataccagcgacgtgttgtccggcacattggtgccctgctagccaatccagagggtcatatgagctactcgagacacgacgaaccagatgagtgcatccttacctccaacgtttgcggagtctgcaccgtccatgacgtggtgtagatgcctggcggagggttggctccgacgagaaattcagccatccctaagggtcctcccccgcattagagccacgacctcgctctccaaatcttagcgaacctcccagacctcctgttgatccccgaacatcagtgtgggcggagcgcgacgtaaggacatcttctctcgttctctccctcttgc

SEQ ID NO: 9193 - DNA, 307 bp, Zea Mays
gcgtgctctacacaagtcactccctcagcctcatgttaggactacggcgaggcaacctctaagcatgaaagttcctcctacacaggtcattccgatgggctcatcggtgcctcgactttggcatcaatgacactatatatcctctcaatgccatggagcaaattctccataactcgccggcaccatatgccaatgaggttgctactaaaaatagtggcaattagatgttctcaagtttatagtcatcgctagggtcaaccctggtccttttctccccatgcacctaacttagacaaggcaacaacag

SEQ ID NO: 9194 - DNA, 517 bp, Zea Mays
agcaccccttctggaatgtagtgctcccaaaatgccagtttaaattcatcccaggtaacttgatgaccagcaagctggatagccacataatttccccaccaggtgctggcagggcctcgtaactgttgcgccgcaaataagggcttctgagtctccatgcatcggaggagcccaaacttctgctcaataacccgaatccattcatctgcttcaaggggatcttcagccttgacaaatagtgggggacgcgtttccgagaaatccacatatgaagtttcgtggggtccttgcggataagctcgcccgccttgatgctaatattgttgtcccgccagttcgcgaaggaaacaggtgttgtcggctgttgcattgactaaggcagcgatagcctcagccaaggtcaggggtactggtggtggattaggagtagtttccctcccacgggcggttcccgcaccatcctgtccacgagtcctggacgacatctgaggcaaagaaaatttggaaaatataatat

SEQ ID NO: 9195 - DNA, 998 bp, Zea Mays
gcgggctcctagttcaattcagtggtttggcaagcatcacagggttatgagaatactcaaacgagggagcagaaggtgtgggctgacctgaatcgcgctggccgcggtgaggctgtttccacggtggcggagactgactttgggggaagttcgaaattggagctctctagtgattggttgcgaacaatacgtggtggctgggtgctggatgaccttgcggagctaggggagggctcaatttatagggagagcgagcggtggtgatcaatttggccgagccgtgctggcggccagagatgaagaagaacgcgggtgcggtgaatacgtgttcagtgtcgtggcagtaactccggtggtcgacgggaagttagagggagtcacggcgatgcggtggcgaggtttggacacgcggcgcaaggtcggacgacggctgtcgccggtgagtttatccgaagtggtcgtggcaagtacggtacggtggccggaattgtttatcggccggacttatccacgacgaggacccatacttgatcccaagtgttatccactcggtcagcacgaatcacggcggccaaaaacgcgaatccatgtgcggcggtagtcggcggcgaggtgcactgcatctctgatattttgctactgtaccatgggaaattcagtttatgacgcctgacagagcaacttcagggcaattcttctccaatttttgcattacaacttcgtcatctctttgcaccaaagttgcagggctaccatccagctataactttgctacattggattcctacaaaaagccactggatcctgcttaaaactaggccctaagttcatgtaatctttctgtcagtctgaatttcagacttcaacaggctgactgcctaactttgggtgtaattatctccaaattcttcataacaactgtgcttacactcttaagcaaagttgttcccctttcaaagagctacaaaatttatgtggtgccctaatatgaattctca

SEQ ID NO: 9196 - DNA, 339 bp, Zea Mays
gtcagcatcagcagggtcacacccattggggtcagctccagtaaaaagttccactggtacttcttcatcagcaggagcagaagggccagcatcctggtccaaacacgacactcgccgaagccgcctctttttcttcttcttcccctcggtaggagcagatggatgactggccgggcgaaggcgctttgggcgagtactattagatttttgagcattcaaggtttttccaggctctgggatagttgcaacagctatggtttcagcagggaccgagtcagaagaatcctcagccaacatgtccagcatagcacttatctctgcattgcttgggtttatagg

SEQ ID NO: 9197 - DNA, 794 bp, Zea Mays
cgcgatttctctggtggtggggccacttcacagccactcgttatcgcacgccgctcacttcgggtctctgcaacgtgggccacctgggtcagcctttccttcctcaccgaactcatcgggagcctctgcaacaaccatccgtgatccctgggattcggttcaaccacggcaccacctgggtggggtcggtaatttgcctcaccgtggactccctccccctataaacttgccggtttgtgattgttccgctcaactggattacctgggaacctgactgctgggagaaaggagctgggtggcgccaccaccatcggtggggttaaactgcgctgggaacgttccatctacggttgcggcgctgggggtaggcagatgctctgggtttcactgaagccttggcaaacttcccctagagctagaggttcatcgccatgtcgccgttgtatgcccagttgttgccgcatgcttccatggctagccaccttcgcccttcaatccactggtaatttcccctcccttgtgctcgtcctactccgccgtacgtgtagcagcggtccatgtggggatttgtgcacgggcactgcgctcctgcgagcttggtcgccgctgggcagggcgcctctaccgtggaccagcagggagagtgaagagacgctgcgtaccgttgattcccccaaccaacggcgccgatcagacctcgatgatgatttcggcctgcttgatctaagtcattggttatggtgtggatgggctggattaaaggtagcttaccattcgagagaatttgacccgag

SEQ ID NO: 9198 - DNA, 366 bp, Zea Mays
agccggcagatggtggaatgatggaagtttgcgctgatgtgcctgatgccgggttagagttatcccgagcagcatctcatgcctcatcgaccttggagcgtggtcttaagagtcgagaggctgatctagattgctccgttcccatggaagttgttgagggtccttcagcattagagatggcagctacagagagctcggtcctcaaggatggtgctagcgtttgcccagcccccgagggtgttgccggagatgatccggctcggatgggtagcacgagctatgacccagcccccgagggtgtccgagtgggttctccctctcatacttccatggatgttcatgtagggtcttctcctccgcattttg

SEQ ID NO: 9199 - DNA, 1007 bp, Zea Mays
caaattttgaaccaggtgacgtgaaataaatttcacatggaaacgtgctagaatagaaggcaacagacagactagcatttaagcttgttattgtgtccatgggactccatactactacttgcttgcattggacctgaactacaactgtataaatatgagcaagctacaggttgtactaggctgctaggtggtgattcacatccgaatacacttgcattagtttgttagtgagcttcacggttacactatgtgtatcaacatcttcaacactaaactgaaagtgctcattccagataggattcagatcgttgttctataaagtagtatagggaacacgacacccagttatctgctacaaaaattagtgtattgccaaacctcaagagtgtctgaaatttcaggtacaacaaaaaattcgccactaatgatcttcagtctgaaatctagctttttctgacatagcgcatgatttgagaaaaataaatgagataactaggttcaggagtttataatgaacctctagaatctatatgatatccccatggacattggtttcattgggatgctgatgtcaattattatagttctcccacatttcttcatgttgcttgctatagatcaaaggattctgatcatgatgcacttggcataatttccctgactatagtccactcttataatgggattatctaatttctcaaattcatttgcaggtagccagattattatttcagtcgtgagtgcttcgaccaccgtccaacattgggagcatcgagtttgaggtgacctacctcgacgacgacacatgtgtcacccacccactcatagctctttgcagctggccatagttataggcgatggtctacacaccaccaaaacagcagcgcgagctgtcagaagcgtctatcagaagcaagtgctctgtcagaagctaccctcacacacccgcacagtttcaagcattccataataacagaattaagtatgtagtatatctgagtactgat

SEQ ID NO: 9200 - DNA, 647 bp, Zea Mays
ctcaactttggagttttgtaactttcaaattctaaggtttttgccctaggtcaccacataaaatttgtagacctaacaaaggagaacaattttgcttcagagtgtaagcaaggttgttatgaagaatttggagataatcacactcaaagtcaggctgtcaggctgttaaagtctgaatttcagactgacagtgcaattgcagtgactttgggcatgaattcaagcttgattcaataagaatttggctattgctgctatggcaaaattgtagctggtttgtagctctccaactttgatgcagaactttaggtaggttgccataggaatttgaaagagaagggagcccaaactctgactgtcaggtgcactgaaaggaactcgccatggtacagtgacctgatgaggatcagaacgccagcgcagagtgctcgccgccgacgagccacgcgcgattcgtgccatcgtcgccgcgattcgtgctcggattatttggatagcactcggggtcgcgtaaatatcctcgccgtggatagactccggccattaaacaactccggccaccgtaccgtacttgccacggccacttcggataacctcgccggtgactgccgtctcacggccttgcgccacgtatctgaacacctctg

SEQ ID NO: 9201 - DNA, 501 bp, Zea Mays
ccggggtaagaatctccagactcagtgaacagtggaggcggatggcgggttattttaacctaaaccgagggactcataagaaaaatggtgtggctgaaggggtatggacctatcgtgaccgtccgattagattcgaagggctgagattaattccatattacatcgaaccggtacgcaatctaatccatcggatcaactaccaacggtgacgattttaaatgggctcgatccaatcatgcccctgcgttgacgatccgacggtcgcagatcacccaacccaaacggtacgctgggcgccatcgcagccgttccctacgaaaccgacggcgcgcaaaccatcttctcccctggttgccgagcgcgacggcgcccaccctcacggcgacccgctcgccggagaaccatcgatttggccacaaacccacccgaatttccaatccaaccaagccacactaagccaaaggtaggccgaacccgatagagcccccaatttaatgtttg

SEQ ID NO: 9202 - DNA, 468 bp, Zea Mays
gtggggggtgggggttgccacacgtagagggggcgaggttagtctacactaatgccttaatagttagtagagattaccacccctattgttatccatagcaggatggtcttgtgatgctttgccctctagacactgaactaatggagtagcatggtttcgccagataagcacaactacttgtgccgtatcgaccacagcacatctcaccacacaacagtcatttgccaacatacgaaaacggacttgccatctccaccaggacaacgtctgaaccgctccacgcgcgccgtttcgtctggttgcggagcgcaggcagcacccccgcccgctgccatggctgatggctgctagcgcggagcgaaatgcctcaactgcccctttcacgaaccacgcagagcgcctctcctcctggacaggagcaccccctgccaacgcccgccacctggcctctcggctccgcaatcccgc
